United States Patent Application Publication US 2006/0134663 A1 - sequence listing, part 2

SEQ ID NO: 3970 - DNA, 1093 bp, Homo Sapiens
  misc_feature (637)..(657): n is a, c, g, or t
  misc_feature (659)..(895): n is a, c, g, or t
  misc_feature (929)..(929): n is a, c, g, or t
  misc_feature (1010)..(1018): n is a, c, g, or t
gatcccccaaagatgtttgagcatcaccagccctcaaaaacaagagatccataaaagatgaaaacgaaagttcaaccccggctgacggtgagggtggctcgcaactgcagcccaagaacaagcgcatgacaataagcagattggtctgggaggaggacagccagagtactgagcccagcgcaggcctcaactcctcccaggaggccgcttcagcgccaccatccaagcccaccgttctcaaccaacccctccctggagagaagaatcccaaagtacccaaaggcaagtggaacagctctaatggggttgaagaaaaggagacttgggtggaagaggatgaactgtttcaagttcaggcagcaccagatgaagacagtacaaccaatataacaaaaaagcagaagtggactgtagaagaaagcgagtgggtcaaggctggagtgcagaaatatggggaaggaaactgggctgccatttctaaaaattacccatttgttaaccgaacagctgtgatgattaaggatcgctggaggaccatgaaaagacttggcatgaactgaaacaggctttcatttccacagaattcacaggagcatggttcctaataatagcccctgatagtctgctctttccttcnnnnnnnnnnnnnnnnnnnnngnnnnnnnnnnnnnnnnnnnnnnnnnnnnnnnnnnnnnnnnnnnnnnnnnnnnnnnnnnnnnnnnnnnnnnnnnnnnnnnnnnnnnnnnnnnnnnnnnnnnnnnnnnnnnnnnnnnnnnnnnnnnnnnnnnnnnnnnnnnnnnnnnnnnnnnnnnnnnnnnnnnnnnnnnnnnnnnnnnnnnnnnnnnnnnnnnnnnnnnnnnnnnnnnnnnnnnnnnnnnnnnnnnnnnnnnnnnnncctcccaaagggctgggaataacaggcatgaagncaccgcgccctgggaattggctgtttccttccacaaacctgggctgggaatggaaaattttggggcaacctccttcgaacnnnnnnnnnaggccccattttcccctttcctccccgtgtgggagatcctggggagctataaaaagcgagagcccaagctccccc

SEQ ID NO: 3971 - DNA, 855 bp, Homo Sapiens
ggggagcagatgaggcttggtgccaggctcgaggtctgaattgggcagcattgtgccaagcccataaacttcggggagaactcctagaactcatgcaacgaattgaacttcccttgtccctaccagcctttggctctgagcagaatcgcagagaccttcagaaagcactggtgtcaggatactttctcaaggtggccagagacacagacgggactggaaattacctactcctaacccataagcatgtggcccagctctcctcatactgctgctaccgaagccgcagagctcctgccagacccccaccatgggtgctctaccacaatttcaccatatccaaagacaactgcctttccattgtttctgagattcaaccacagatgctggtggaattggcccctccatacttcctgagtaacttgcctcccagtgagagcagagaccttctgaaccagctaagggaaggaatggcagattctacagcagggagcaaatcatcctcagcccaggagttcagagatccctgtgtcctgcagtgacctgcctgcctatggaatggagctgggttcatctcatcacattagattatccctcagggtgacaccaaagcacccagacagatttagaagcccaaagtttagggtcaaatgtaaaccctggaacctgagtcccaagaaatggtagactgggaatggaaagaatggggtaaaccacagtctacatagggaaggactctttccttagccttctcttattgattggagagggactgacatgctcctcattctcttaactttgccaaacccattcttgtactcccttgtgatctataaaagatttttctatgatgccaaa

SEQ ID NO: 3972 - DNA, 1032 bp, Homo Sapiens
  misc_feature (953)..(965): n is a, c, g, or t
ccgaccgagacggagccgctgtcaactctccaactcagctcagctgatcggttgccgccgccgccgccgccagattctggaggcgaagaacgcaaagctgagaacatggacgttaatatcgccccactccgcgcctgggacgatttcttcccgggttccgatcgctttgcccggccggacttcagggacatttccaaatggaacaaccgcgtagtgagcaacctgctctattaccagaccaactacctggtggtggctgccatgatgatttccattgtggggtttctgagtcccttcaacatgatcctgggaggaatcgtggtggtgctggtgttcacagggtttgtgtgggcagcccacaataaagacgtccttcgccggatgaagaagcgctaccccacgacgttcgttatggtggtcatgttggcgagctatttccttatatccatgtttggaggagtcatggtctttgtgtttggcattacttttcctttgctgttgatgtttatccatgcatcgttgagacttcggaacctcaagaacaaactggagaataaaatggaaggaataggtttgaagaggacaccgatgggcattgtcctggatgccctagaacagcaggaagaaggcatcaacagactcactgactatatcagcaaagtgaaggaataaacataacttacctgagctagggttgcagcagaaattgagttgcagcttgcccttgtccagacctattttctgcttgcgtttttgaaacaggaggtgcacgtaccacccaattatctatggcagcatgcatgtataggccgaactattatcagctctgatgtttcagagagaagacctcagaaaccgaaagaaaaccaccaccctcctattgtgtctgaagtttcacgtgtgtttatgaaatctaatgggaaatggatcacacgatttctttaagggaattnnnnnnnnnnnnngaattacggcttttacagcaacaatacgactatcctatagggagttacaatcatcgcaaagtagtgc

SEQ ID NO: 3973 - DNA, 436 bp, Homo Sapiens
  misc_feature (92)..(100): n is a, c, g, or t
ccatccataacttggaatactgctctggaatgaaaaggaactaactgttgatacaagaacttggttgtacctcaggggtattatggtgaacnnnnnnnnnccagtctcaaatggtcacatactgtatgatcgcatttatataacattcttgaggtgacaaaattattgaaatgaagaacagattaatggttgccagggatagggactggagggggtgtggggtatgtatgactataaagggatgacgcaaggagttcctttgtgctgatggaacagttctatatgattatgatgattacgatgttgattataacatttgattatgaggttaagcacatgaatctttacctgtgctgaagttgtatggacctacatacacacaaatgaatgcatgtaaaatctggtgatactgaataaagtctgtagtctagatagc

SEQ ID NO: 3974 - DNA, 932 bp, Homo Sapiens
ggggtagtggggcctgcggtgggagtgggaaggaaggcggagggaaccatgcgaggttctgagaattgcggcgagggtcgcctcgagagacggtttctgagcaggaattctgaaatccccaccacttcctccctccgggggatttgatcccctatggccaccgctaacagcatcatcgtgctggatgatgatgacgaagatgaagcagctgctcagccagggccctcccacccactccccaatgcggcctcacctggggcagaagcccctagctcctctgagcctcatggggccagaggaagcagtagttcgggcggcaagaaatgctacaagctggagaatgagaagctgttcgaagagttccttgaactttgtaagatgcagacagcagaccaccctgaggtggtcccattcctctataaccggcagcaacgtgcccactctctgtttttggcctcggcggagttctgcaacatcctctctagggtcctgtctcgggcccggagccggccagccaagctctatgtctacatcaatgagctctgcactgttctcaaggcccactcagccaaaaagaagctgaacttgggcccctgccgccaccacctccaatgagccctctgggaataaccctcccacacacctctccttggaccccccaaatgctgaaaacactggcctctcagtctccaaagacccgtgggtccccggcggcagatccaacgtttgggagcacctgctggcgctctatgtggcaaaaaatccggcggctgcaagaaaaggagttggaactcctcagaattggatgacccagactccgcatacctgcaggaggcacgggttgaaacggtaaacctgatcccccctccttggggccgcacattgggaacttaaaaaaatgcttcttttcctgtgacccgccccgggttaat

SEQ ID NO: 3975 - DNA, 1598 bp, Homo Sapiens
  misc_feature (321)..(321): n is a, c, g, or t
  misc_feature (358)..(358): n is a, c, g, or t
  misc_feature (396)..(404): n is a, c, g, or t
  misc_feature (422)..(422): n is a, c, g, or t
  misc_feature (438)..(438): n is a, c, g, or t
  misc_feature (440)..(440): n is a, c, g, or t
  misc_feature (447)..(447): n is a, c, g, or t
  misc_feature (450)..(450): n is a, c, g, or t
  misc_feature (452)..(454): n is a, c, g, or t
  misc_feature (456)..(456): n is a, c, g, or t
  misc_feature (460)..(460): n is a, c, g, or t
tttatggggtacaaaacgggccgaggtgcccctaaaaaagttgtttgtcaaaaatagctttttgtggtcgccccccattctcgggagaagggtttcacccgactttgtaattattacctggccaaattgtcggcggccggggggtgtcttctgtttttcaacttgcccagatattccctccgccagggtcccaaggggggctaatacctcggccggttcaaggtttttacagacccgttgtgacccccttgccattttgttaaaaggctttaagcaaaccccaacgctcccgcccaggttttcccagggagcggcttattncaatatccagctcccctggggttcccggggattcaancccagtagtgtcttcaaggtttcccttgggctttgttnnnnnnnnnaccggtttccccccgggngtttttttatggttgngntttccanccntnnncngggncttttgatgggtattgcttagttgggcaatatctgaatacagaccagaagaacatctcccattaagcgttatgttaaatattacaaaacttatacagaagatagactcatagaggctataaagctgatgtcttaagtaactcacccatgaaatgggtgcaggtttttaaaggctatccaataatctttgtactctataaataaatgcccctacttttcagtgttcccattcttcaacaggagactcgagcagcttaacagttttgctataaaaacaaaccattcttcttaacaaaccaagaatataaaaggaaacccaataaaggacgtacttttcacagttaacaataaataaaagtgcaataagtgttcaagtagggcatgtagtataaaaactacacatgagtatttagcataggtcatcttttaaaggcttctccgagggtccctgccattacttattgtggtcatcactgtttgattactagctgttccttgtagttgtggatttataagtccccggccattgcttctgccagcatgtgaaaactggtgttcccttgattcagggccagtgtgaacaccatttcccactggtccaaatgtacctgtacccatattactattcatggaattattcttctgttcactctgtgcccctttgttctgctgtcctcgataatctgggttgggttcactgaaatttggcacttctgaataaaccatacaaaatcttacacccctagagaggatggctcctccaggtcagggtggagatcattaccagggtagtagtgtatggaatctcgcattgcggctgcctgcaccgcacctagatccccaattttttgaagttcaccaccccttccagtataaagtgtcagacatcctttccacatggatgcataccctctggtcaaccgaataatatcccctggctgtataagacctccgatctcatcccacacggaaatagtgatgctgcccgttttatctgctactttgcacgatctcacttcatggccgtctttgcttttggtcacgcgtcacgggcgcgcgcccagcctgtcccgggctccgggaaggaacgggctgtgacagcgaaacgggagcggagacagaacaccgcacacccagcg

SEQ ID NO: 3976 - DNA, 903 bp, Homo Sapiens
  misc_feature (45)..(45): n is a, c, g, or t
  misc_feature (159)..(159): n is a, c, g, or t
  misc_feature (224)..(224): n is a, c, g, or t
  misc_feature (246)..(246): n is a, c, g, or t
  misc_feature (252)..(252): n is a, c, g, or t
tttctccgtccacttgttaacctaaatggtagaaatgggggcccnccaagcattggtggaggcaccagaaggttctggaaaggcacttggaaaggatttcctgggagtagaatagagtcctgggtgtgggatacgatcctgtagggggcaggatatgtngctggtgtcccccaggctcctggtggaacggtgccccatggaacaggtggtgctgccccaggggnttggggaggaggaggagcggantatggnctgggagatggatatggcatattaggggtaggatactgccctcccattcctggcgcccaaggtccagaagacatggatccccatggacctaaaggaccagctgcagctggatctgtgggtgcaccatatggtctgggtagctctggaaagggcatatttggtgtaggatatggccctgtggggccagggcccggcacagttggggctggataaggaccaccaggtgggggacatgatggtccggaaggaggaaagggtgctgggggtcctggaggtggtccggtgggaggcacggagggatacattcctgttggtgctggtccaaaaggcacagtggagggtgttgcacttggtgggagtccagatggcactgaagatggagcactcggattattccaagggttggagcctggccagccttgaggaggttggccaggttttgtattgctcacagcagaggttttggcaggggagtgttcaggtagtgcatctgccaacgaaaattcatcagacattttcccggcaatatccgagaccgcagtagggtctagaagcggcgatgggtccgagggactgggccctgaagacgcgggcgcagcctgactgacggcagctagagcagcggcggcaacagcaccagcagcgcgcccc

SEQ ID NO: 3977 - DNA, 352 bp, Homo Sapiens
catgcgggcccagctccgcttcaccgatgcacgggtaccggacctgaccgcctacaaccgttacctcggcaatgacaacgtgcgcctgctcggcgggatcggcctgctcagtggggatgtctcactggatgcctccgggcgggtcggacaagggcagtgccgatctgcggggcaccggtgcccggctgagcgtcgccggtattgcaatgcgcggtgacgcgcaactccaggcgcgtcgtgcagcgtgcggatattcgacagccagccagttcgatctcggtggcaccaccgtggagctgcgcaacatccatgtaggcgatgaaaagagtgacgccgctggtggggcagggac

SEQ ID NO: 3978 - DNA, 450 bp, Homo Sapiens
  misc_feature (416)..(416): n is a, c, g, or t
tatcactgtattttttctataattaccttttcgtttactgtttcaatttattgaattatacatacaatgaagagcacaataataaatgtacatacagcttgatgaattctcacatagtgagcctgtgttacaagtaatctattattaacttttaagatgatacagtgctatgatcgaaggactaaaatgatcaacatcaccataaaaggcagagtcataaacaagaacaattaagtgtaattaaatcaggtgggaggcacacttacaaaaatgaaacaatttttggttcacattttacaccacacaggtattctgtatctttagaacatgagaaaatacatattctcagtctgataggtctctgactttggggtttcttttactgtactttttttctctctagtagctgaacattntaaagcaatcagcagaaaaaatataaaacttcag

SEQ ID NO: 3979 - DNA, 706 bp, Homo Sapiens
accctgaagtgccagattatcccaggcaaacctcttgtgtgctccagacctatacatccaattgctactaggcatctctacttatatgtctcagctctcaagtttagtaagtctccaattgaaaaatgaccaatacctcccccttcactgaaactacaaaataaaaaactgctcctcccccagtactctcaccttaggcacaagaactactggccctggaagtcagccttttcctctccccaggacccccaaatctcatccatctctaaatcctatcaatttttcctcccaaaatttatttgtcaaatcaggctagtttatctctatcactgccatcctgaaccaaggtgccaccaactcttgactacattattgtaacagctaatctcaacgctattcaaattgtgacctgtgcactgacactggtccaaaaacttttgctactggtctgaaatgaaataaatatagaaacctagagaaagcatttaggaacgtttacagcaatttgacactgccaaaacaaacatcttattgtgtgttactaaataccagaatgaatagaaaattaaaacaaaattggtccttcaacacagacaagtttgagaagcaatgacttaattagtctcccggtatttacacttgcctctttccaacctgttcttgcagagcagcactgatttttttaaagcaaaaatttggcaattaa

SEQ ID NO: 3980 - DNA, 994 bp, Homo Sapiens
  misc_feature (94)..(296): n is a, c, g, or t
gggactgcgcgcatgcgcggcggccgccgaaggggcgggatccgaggcaagcgttggttctgtgcgcctcagagttggagcacacagctgtatnnnnnnnnnnnnnnnnnnnnnnnnnnnnnnnnnnnnnnnnnnnnnnnnnnnnnnnnnnnnnnnnnnnnnnnnnnnnnnnnnnnnnnnnnnnnnnnnnnnnnnnnnnnnnnnnnnnnnnnnnnnnnnnnnnnnnnnnnnnnnnnnnnnnnnnnnnnnnnnnnnnnnnnnnnnnnnnnnnnnnnnnnnnnnnnnnnnnnnnnnnnagtataatgtctcaggaagtcgattatgggaggtggaccatatctagtagtgatgaaagtgaggaagaaaagccaaaaccagacaagccatctacctcttctcttctctgtgccaggcaaggagcagcaaatgagcccaggtacacctgttccgaggcccagaaagctgcacacaagaggaaaatatcacctgtgaaattcagcaatacagattcagttttacctcccaaaaggcagaaaagcggttcccaggaggacctcggctggtgtctgtccagcagtgatgatgagctgcaaccagaaatgccgcagaagcaggctgagaaagtggtgatcaaaaaggagaaagacatctctgctcccaatgacggcactgcccaaagaactgaaaatcatggcgctcccgcctgccacaggctcaaagaggaggaagacgagtatgagacatcaggggagggccaggacatttgggacatgctggataaagggaaccccttccagttttacctcactagagtctctggagttaagccaaagtataactctggagccctccacatcaaggatattttatctcctttatttgggacgcttgtttcttcagctcaggttaactactgctttgacgtggactggctcgtaaaacagtatacaccagagttcaaaagccaatcctgcttgtgcatggtgataagcga

SEQ ID NO: 3981 - DNA, 786 bp, Homo Sapiens
  misc_feature (526)..(535): n is a, c, g, or t
tcgtgaaaccctaggatgcctctgtgactcctcccctttctttagccctaaagtctcttctactaagtcttctccaaactcaccaaattcctcacaaatccatcccaccccttcaactgccttagttgatccctcttatcatcacaaggttggctctatctcatttcccagatccagcatttcattctccaaagccatccttttcactggggccaaagttatcttccctataacccagacctgactgcgcactctcctagtctgcattctttagcagctcactgaagaattcacctgtaagagttcaaattcctactctaacctcagcctaccttccagctttatcctgtggcgctccatggctttgctaatttttcacctcagccacattagatttttcctaccccacaatttcacacagctgcttccaccctctatgtctttgttcacactactttctcagcctggtatgaactgctcttttctgcctatcaaattcatccttcaagatgaggctcaaatgtcnnnnnnnnnncctgggacaagtttcctaaactctctaagcctgtctcccctccgccctttccacagtcaaaagtaagtgctcctactataacttatgtcaaccagcaatataactcttatctctgttacagtcataaatgcaagtctcccctacaaaattctgagatcttcagggaaaggagtgtaataattttgaattgtcattttctaccacaatatatggtacttggtttagctcaaaaaaattgttctggactgatt

SEQ ID NO: 3982 - DNA, 144 bp, Homo Sapiens
gtgccagatactagctatcattcagtagatatttgtaaataccttgctcctccttcaaagttagttctcacacaagtgtctcatttttaaagtgtttacatagtattcattgtaagaatgtattgtgatttatgaaacatagcc

SEQ ID NO: 3983 - DNA, 426 bp, Homo Sapiens
agaatgtctttggaatctcttgatctagcggtttggaaactgagtcacacagagccctggggttccttaggattgctctgggtccaatccagttttatctcttttcatatacttgtgttctatccgtattaaacaagaagttctgaggcctctgatctagtccactgcactcacatttaagatgtttgaactgaagttaagagagagaaattgatttgtgcagtcatataatttgtgatggttggtttgagctgagcctccagtctggagtttcagactgcctggagggtggtcttcaaacacaccataccattttccaaataacaggataaatgttacatataggggtctcagcagtagagctgattctgaatgtgaaatggaaggacatggcccattttggatgctttcatctccttcttctcc

SEQ ID NO: 3984 - DNA, 220 bp, Homo Sapiens
aagtgcctaataatacagatgaagaaactgaaatgcagactgtaagtggctcatataactaaaagtagtgaggcttggtcaggtctatccagcttcaaagttgttttgtgtatgttttttccccttcatgagttacaaggtttctaataaaaggattttgttaggttagtgattttgttaaccagctggacttatttgaaggactctaggttttattttg

SEQ ID NO: 3985 - DNA, 221 bp, Homo Sapiens
aagtgccaaatgttgttagccccctgcacctgtttctcttccaaatagccatgaggggtgggagaaggctttgaaaaggatgtaggtcttatcgggatattatttctttttctctctattaatgaaacctctgaacctagggtgaactgtaaaatctttactattacagacccttaagtgtatgatgtacttttggtacttaaacaacttttttagttcta

SEQ ID NO: 3986 - DNA, 579 bp, Homo Sapiens
aactgccgtactttgtgggaatattcagatgtcaactaatgcaaaaatagaggaaaacacccagaagaagtgaaggttatctggcagtctattgatatcacagagtaagggtttggaggggaggaaaagagtaggggattgggctacaacagatttccagaacagccaggagattagagtctgggtggtaaaaaatgacttgagggtggaagaggtaaaaaggaattcaaagtaggtgggaatcaatactggtcatctctgagtgggcattagttctagttccaaagtctctaaagctctgctctgtggtatgacaatttctagaggaccttctttgggaagcctttccaattctccactgccagagagttagacacccttatccttaatgcccatatatatcatttaacccatattcaataaatattagttgaataaattaatgactcaccataacctgagtagactatgagaaaattaaattgaaaatcaacttcaccaaaggaatgacatagccgaatttccagtgatgcctacatgctattgggcatcactgctcgacgagcttcggatccgtgc

SEQ ID NO: 3987 - DNA, 418 bp, Homo Sapiens
ccagacagtaatgtgagctgcactctgatatgttggatgatgttgcctgtaaacctcacattgaaatgtaatccccaatgtgggaggtggggatgggtgacgggtgattaaatcatggggacagatttctcataaatggttagcacaatctctttggtgctgttctcatgacagtgagtgatttctcaagagatctggtaaagtgtgtggcatgacctcaccccatctggctcccactcgcactgcgtgagacacctgctcctcctttgccctccgtcacaattgaaagcctcctgaggcctccccgaaagccaaagcagatgccaacaccgtgcttcctataaagcctacagaaacattgagccaattaaacttctttataaattacccagcctcagtgatggtacgagctcgatgt

SEQ ID NO: 3988 - DNA, 957 bp, Homo Sapiens
cggttgctgcgcggcagcaagctgctaagaagaaattcctggactggttggtctttctgggaagaatcccccctcaggtctcaaaaatcttcccagtcagaagctctactcaatataacaaataatggaatacacttgctaccccggcaaacatttacagatgaggaaatgatgataaagagttcagttaaaaaatttgctcaggaacaaattgcacctttggtttcaaccatggatgaatattcgaaaatggagaaatcagtaatacaaggattatttcaacaagggttgatgggtattgaagttgacccagaatatggaggcacaggagcttcatttttatccactgtgctcgtgatagaggaattagccaaagttgatgcatctgtggctgtcttttgtgagatccagaacacattaattaacacactgattagaaaacatggaacagaagaacaaaaggccacctatttgcctcagctcactacagaaaaagtaggaagtttctgcctttcagaggctggagcaggtagtgactcatttgctttgaagaccagagctgataaagagggagattattatgtcctcaatggatccaagatgtggatcagcagtgctgagcacgcagggctctttctggtgatggcaaatgtagaccctaccattggatataagggaattacctccttcttagtagatcgtgatactccgggccttcatatagggaaacctgaaaacaaattggggctcagagcttcttccacctgcccgttaacattcgaaaatgtcaaggttccagaagccaatatcttgggacaaattggacatggctataagtatgccatagggagtctcaatgaaggtagaataggaattgctgcacagatgctgggactggcgcaaggatgttttgactacactattccatatattaaagaaagatactatttggcactt

SEQ ID NO: 3989 - DNA, 277 bp, Homo Sapiens
aattcccaccacagaacgaccacaaccacatgtgcatggaagggccaggtgatgaagaggtgcccttacctcacaaaacccccatccagcctggggaagagtgtcactctgtgggaaccaattctgatcagtacatctgggtgaaaaggagcctgaactgtgtgctcaagtgtggctatgatgctggcttatacagccgctcagccaaggagttcactgatatctggatggctgtgtgggccagacatgtgtttcatctccacgccttcaaacaatg

SEQ ID NO: 3990 - DNA, 645 bp, Homo Sapiens
caaattcaaccacatccaagaactggaaataaaaacaacgtttatccaacatatgatttggcctgccccatagttgacagcatcgaaggtgttacacatgccctgagaacaacagaataccatgacagagatgagcagttttactggattattgaagctttaggcataagaaaaccatatatttgggaatatagtcggctaaatctcaacaacacagtgctatccaaaagaaaactcacatggtttgtcaatgaaggactagtagatggatgggatgacccaagatttcctacggttcgtggtgtactgagaagagggatgacagttgaaggactgaaacagtttattgctgctcagggctcctcacgttcagtcgtgaacatggagtgggacaaaatctgggcgtttaacaaaaaggttattgacccagtggctccacgatatgttgcattactgaagaaagaagtgatcccagtgaatgtacctgaagctcaggaggagatgaaagaagtagccaaacacccaaagaatcctgaggttggcttgaagcctgtgtggtatagtcccaaagttttcattgaaggtgctgatgcagagactttttcggagggtgagatggctacagtttataaatttggcaacttc

SEQ ID NO: 3991 - DNA, 165 bp, Homo Sapiens
ctctctggccaggcaaatccaaattccttcaggacgggttcacagcgtctcttgactgaaagacacatgccgccgcatgggccaatggggatgttgatcttctctgtgcacattggcacataaacagaacaaaggaagaactggaaaagtaacaaaatgaacaca

SEQ ID NO: 3992 - DNA, 976 bp, Homo Sapiens
gaaggcagtggcacaggctgtgaaattaggaaggtaagatgctggagaataagagcgacatgtaggggatgcaactacaccactgagaacttcatgtgttttctggggagtaaatgaatattgaaaactaaatattctaacttaaaaagtaactcctagaaatgtaaagtttgaaatgtaaaagtaaaagacatttttgctttcttaatacaaatcttttctatatattggtaaagcagcagtatcagcatctctttaaatacaaagacgatatacaagactgcagctccagtgacagtggtggcagtatcgtgcgagacagccagagacacaaactacttccggtggaccgaaggaaatctcagatggaggaagtgcaagatgaactcatccacagactgaccattggtcggagtgccgctcagaagaaattccatgtgccacggcagaacgtgccagttatcaatatcacttacgactccacaccagaggatgtgaaaacgtggttacagtcaaagggattcaaacctgtgactgtcaaatagtcttggagtattaaatggtgcacaacgtttctctctcaatataggatgaactgaggacagtctgccctgtaaggggcgagagtctattagccaaatcactgtacttaaagctgcattggaggatatcattgcaagctccgagttacaagaaattatgagtagacgacaggataataatcagtgctgccgctagtgattcaggagtggaatcttttgatgaaggaagcagtcactaatttgtttgtttgtatttaaactccattgtttttggcattattccaacatgctttgttttaagaagccttgaagggaatgtcagattcatttttcttgatgtaatttatcaccatgttaaatataaacccatgcaaacctgagtgagcacaggatttgcttctaggtcctgtgactctgggcactgtttgactctg

SEQ ID NO: 3993 - DNA, 476 bp, Homo Sapiens
  misc_feature (229)..(377): n is a, c, g, or t
gtggtagcataggaaactaagaagtaatctatgcaagttaacaatttagttatttcccttataaatgggacaaaaatggccagaaaaaagacttttataaatcatacaatttggtggcatatgtctgtttgtcccagccaatatgaataaaacaggcacctggcagtgacagcaagtgacgatgtgaggctttaaaactcatggtattggctgggcgcagtggctcagnnnnnnnnnnnnnnnnnnnnnnnnnnnnnnnnnnnnnnnnnnnnnnnnnnnnnnnnnnnnnnnnnnnnnnnnnnnnnnnnnnnnnnnnnnnnnnnnnnnnnnnnnnnnnnnnnnnnnnnnnnnnnnnnnnnnnnnnnnnnnnnnnnnnnctactttccattattttctgtttctgacactccaagtttccttcttctatactttcctttctgcttttataaatttccactgcctcaaacaattggtcg

SEQ ID NO: 3994 - DNA, 649 bp, Homo Sapiens
  misc_feature (248)..(289): n is a, c, g, or t
gaaagcatggaggggtttccacatattaaaagggaaagggcaaccagtctgtgctctgggaccccatcaacccaccggaagacacacagctatgaaagaaatgaggctgctccacatatgctaggactgagaaaagttttttgtgttttgtttcggtttctgagaccaagttccacctctttggttgccccagttgggagtccaatggtgcgatctcagccctgggtgacagagtgagaccccatctnnnnnnnnnnnnnnnnnnnnnnnnnnnnnnnnnnnnnnnnnnttgttgccttgcaacccccgaaaatgtaccaaggaaaagctagcaagcaccttctctattttgggcatcaacaccaaccaaggacacagtgcagggcagcctgcttggcctctgggtagagaaaggccagcccctgcagaaagcccttcttcatcctgacagcacagcagtgctctacgcttccttgcacagaaactcataagatgcttgtggctggtgagaaaacaacacgtgaaacatttcagctcctcaaatgctaaggcctcggtgccacctccactaaggttttattgttcactgccttcaaaacaatagtctcccgtctgccccgccccccactcttgcctctgcaaggaaggc

SEQ ID NO: 3995 - DNA, 920 bp, Homo Sapiens
  misc_feature (31)..(31): n is a, c, g, or t
  misc_feature (73)..(73): n is a, c, g, or t
  misc_feature (182)..(182): n is a, c, g, or t
  misc_feature (289)..(289): n is a, c, g, or t
  misc_feature (373)..(373): n is a, c, g, or t
aaagtttagccatgaaacaatgcccaacctncctttttttctccaagtaaatgctatttaaaatagctgcacnccagtaaattaaaaccctaggattccagttttagaggaaaaagtcatgtggcacattcacagttcatattgaagttaccagtaaaccagattgctcaccattgctttcngatctttatttctgctgtctctctttagtagataagaaaaatggcacttcacataaaatcatatttaaaagctactaaaatggataaacagatgcagatcagctctntaatgagaatccctgcatagctggaggaagttcaaggataattgttttttcaaaggcaaatagactcttgttacgtggctaatntcatgtacattatcatcgctgggaagttcctgctgagaactcacggtagctatgccagaaaagtactttcttcacaggaggtgttgaaataatgccggataaatgcaagtaaggtcaatatctccctcttggtctagatcaggagctggcaaactttttctttaaggagacaagtagtaaatcttttaggctttgcaggctatactgtccctgtcccaactattcaactctgccaagaaagcagtcccagacaataccataaatgaatgggtgtggctatgctctaataacattttgtttatggacactgaaatctgaatttcatagaattttcaggtgtcatgaaatattgttcttcttttgattttctgcccaatcatttgaaaacatataaaccattcttagctcacaggttgtataaaaacaggtggcaggccaggtttgattcgtgggccatagtttgccaacccctgatctaatggtccttttctagtccatgttgtaaaatgtatatatttttaaaatcccgttacatatggctacttta

SEQ ID NO: 3996 - DNA, 1205 bp, Homo Sapiens
ggggactcttccggtccctaaagcaagaaggaagaccgagaaaaggaagcggaggagaatcccggggcatacgcttgacacacacgcatacaaaaagagctttagtctcgaaagaggaattaccgaagtgtcgagagaggaattttaagaagtttacaactccgtcttcgccctaaacgcacgctgacccggaaagtaatctcctgaagctaggtcaaaggcgggggttctacggatgccggaaggagggtgcgcgcccatccttttagcaccgcgagaggcgccggtgtttcgagccgtggcaccggcatcggctgacactgctgcctccagctagttatttcgtcctcttccgttcttcacccctacaccttggaggtgaacttctcacctgagggctgtaaagactcgtttgaaaatggagagccaagaaccaacggaatcttctcagaatggcaaacagtatatcatttcagaggagttaatttcagaaggaaaatgggtcaagcttgaaaaaacaacgtacatggatcctactggtaaaactagaacttgggaatcagtgaaacgtacaaccaggaaagagcagactgcggatggtgtcgcggtcatccccgtgctgcagagaacacttcactatgagtgtatcgttctggtgaaacagttccgaccaccaatggggggctactgcatagagttccctgcaggtctcatagatgatggtgaaaccccagaagcagctgctctccgggagcttgaagaagaaactggctacaaaggggacattgccgaatgttctccagcggtctgtatggacccaggcttgtcaaactgtactatacacatcgtgacagtcaccattaacggagatgatgccgaaaacgcaaggccgaagccaaagccaggggatggagagtttgtggaagtcatttctttacccaagaatgacctgctgcagagacttgatgctctggtagctgaagaacatctcacagtggacgccagggtctattcctacgctctagcgctgaaacatgcaaatgcaaagccatttgaagtgcccttcttgaaattttaagcccaaatatgacactggccatttttgtaaacgagaccaccaggccttcttcactaagactttgtattcaacttagtttaatgtagatttgccattagctttttcgtaaaataaaagcacagaacag

SEQ ID NO: 3997 - DNA, 1670 bp, Homo Sapiens
tggccagtaactataacggttctacggtacgcgcggcctgggtggcgaattcggcacgaggacaacctcgggtccaccctgcatgacaacgggccataacacagtgaggtttaaccccaacttctaccgcaatgggacagtctgcttgagtattctaggtacatggactggacctgcctggagcccagcccagagcatctcctcagtgctcatctctatccagtccctgatgactgcgaacccctatcacaatgagcccggatttgaacaggagagacatccaggagacagcaaaaactataatgaatgtatccggcacgagaccatcagagttgcagtctgtgacatgatggaaggaaagtgtccctgtcctgaacccctacgaggggtgatggagaagtcctttctggagtattacgacttctatgaggtggcctgcaaagatcgcctgcaccttcaaggccaaactatgcaggacccttttggagagaagcggggccactttgactaccagtccctcttgatgcgcctgggactgatacgtcagaaagtgctggagaggctccataatgagaatgcagaaatggactctgatagcagttcatctgggacagagacagaccttcatgggagcctgagggtttagaccctgctcccatctccccttcccccactcaagagtcccagcagaatcccttccccccaccccagggatggagaggcactgtgtatctccctccagactcgaagtcatcctgcaagatggcaagaaccaagcaagctccgatcccagggtgtgggagtgggggcctgttcccggtctgacctccttggcactggagcatctggggcttcgttcatccattcatcccgtatcaggggccaaggtacctttacaggagcacctagagcgagggcctttggcaaaaacaaaacaaccaacacacctctccacagggccagctccttagggataagtggaagatggaaattgcaattccaagagggagtgtgcccaaatgatttatggggatacctggaagggagcttggggtgggggctgtctgtgacacttaagcagtctgggtggttgtctatttgtctgtcttcagtcttgaagcagggcttcccaatgcccttttcctccctgccttccttcccccattatttcccacaggccagcataattttgtttttcctaatttatagtcactgttctagacagaccaaagagaaggaacagtggtggagtctaggctgctgatcagtaagctttacctagcacctgagcacctttctcccctcccctctttcctcacccttttctagatgtaagacagaaggtaaatgtgactgggacttaaccaaggtcttggtaaagcctgcatggcaccgtaagaagctgaaaatactgtttgttcccgcaatcactgatttgaaaagttcccaacacaggcagctgctgtgtatatgggattagagccactacatagaatagtctcttacagattttataaatactagtcacaataagggtatttttcttgggggtggagtaaaggggagaatgatgctaacccttggtggattttggtgggctgcccttggggaattttccccccagcctgaaatcctcctaacttcaacccaagggatttttgggggaccag

SEQ ID NO: 3998 - DNA, 1236 bp, Homo Sapiens
  misc_feature (552)..(552): n is a, c, g, or t
gggaaactttctggtgctgtcttttgttctctgaattttcagagactttttttataatgttattcatttggtgactgtgtaactttctcttaagattaattttctctttgtatgtctgttaccttgttaatagacttaatacatgcaacagaagtgacttctggagaaagctcatggctgtgtccactgcaattggtggtaacagtggtagagtcatgtttgcacttggcaaaaagaatcccaatgtttgacaaaacacagccaaggggatatttactgctctttattgcagaatgtgggtattgagtgtgatttgaatgatttttcattggcttagggcagattttcatgcaaaagttctcatatgagttagaggagaaaaagcttaatgattctgatatgtatccatcaggatccagtctggaaaacagaaaccattctaggtgtttcaacagagggagtttaatacaggaaattgacttacatagatgataaaagagaagccaaacagcaagaagctgttaccacacccagggctatgaggataatggngaagaggtttggtttcctgtgtccagtagtgggatcatccagaggagctggaaccatggtgggggctgcctagtgggagttaggaccaccaatggattgtggaaaatggagccatgacaagaacaaagccactgactgagatggagtgagctgagacagataagagaataccttggtctcacctatcctgccctcacatcttccaccagcaccttactgcccaggcctatctggaagccacctcaccaaggaccttggaagagcaagggacagtgaggcaggagaagaacaagaaatggatgtaagcctggcccataatgtgaacataagtaatcactaatgctcaacaatttatccattcaatcatttattcattgggttgtcagatagtctatgtatgtgtaaaacaatctgttttggctttatgtgcaaaatctgttatagctttaaaatatatctggaactttttagattattccaagccttattttgagtaaatatttgttacttttagttctataagtgaggaagagtttatggcaaagatttttggcactttgttttcaagatggtgttatcttttgaattcttgataaatgactgtttttttctgcctaatagtaactggttaaaaaacaaatgttcatatttattgattaaaaatgtggttgcttaattcctaaa

SEQ ID NO: 3999 - DNA, 962 bp, Homo Sapiens
ggggattgcatttgcggcctcgctgccgcatcccaggctaagcgccgcgcgcaaagccgtgcggagattggaggccgcgcgggtccctggtctgggccatgtctggctgtgatgctcgggagggagactgttgttcccggagatgcggcgcgcaggacaaggagcatccaagatacctgatcccagaactttgcaaacagttttaccatttaggctgggtcactgggactggaggaggaattagcttgaagcatggcgatgaaatctacattgctccttcaggagtgcaaaaggaacgaattcagcctgaagacatgtttgtttatgatataaatgaaaaggacataagtggaccttcgccatcgaagaagctaaaaaaaagccagtgtactcctcttttcatgaatgcttacacaatgagaggagcaggtgcagtgattcatacccactctaaagctgctgtgatggccacaccttctctttccaggacgggagtttaaaattacaccatcaagagatgatcaacgggaataaagaaaatgtaccttccgggagggctattatagaataatgatgaacatggttagctggcgcaccccattaatttgaagaaatacaccccttgaaggatgaaaagtaacctctaaaggaaaacaaatggggccctcttgcccactggaattggaatacccccaaacgtccctgggtgcaacaacctgggtccaaaacgcccctgggaaacctttttgcggtggcgcggagccacacccgtgtgcacaagggccaaaaaacccatggtgtggaatgggttagcgcccactcttatttggaaacttgcgcgcatccaccttatgtaaactgcgggatttgttatccttccgcaggttcccaattttggaacaaatatggcaaattttttaagcccaaaaagaagctgtttcctattttacccgtgactcgac

SEQ ID NO: 4000 - DNA, 1059 bp, Homo Sapiens
  misc_feature (285)..(285): n is a, c, g, or t
  misc_feature (403)..(403): n is a, c, g, or t
gacacatcacaaaaattggcacacacttttgaatgccatttttccagtggattgggcctaaatttgtgttccccaccccacttatgagtttgtgtaaacacaccttttagtttgtgggggaggaaaaaaagttaccccccaacccatttcatttcaaagtggattggaccaaagtcctgtaaaaaattaaagtccattaaaaaagccgggagacccataaggacccccaccctttaaggaaaggggaattttaacccgaatttgcctggctggccctgttgaatntaaaggtctttctacctttccctttttaattaaccatggaaagaaaaccggctgggctaattgggtccccctttgtccaaaatccagggttacctaaatggaacccttaaatatccanaaataataagtgaatgctatttataagacaataaaaagttttaaaatcttccaaatgtgctgtaaacagtacaaattcaagtgcagaattattacgccattttaagtactatctacttttttaaaaaatcacagtggtcttcatcacatggcgaaaaaacaaacttcactcttctccaaagggataagtccatcctaaatgtaactacaaacaattgtataaacctttatagtttttccccctaatctactaaacatattccagtgtcatttagtagttttacatagaatctgcactatacttggatactcagggaaaataagatgacatatattgtagttttagaacgcaaaagagctttcattttagacaaatatacaacatagaagccactaaaaaatatgggtctattaatcaagagcccatttcaaaatgataagagcattcagtatgtacatctggaatgcacagtttctggaagtattagaacttagtgttaaacagtgcccttataccctcttctaatactgtagacacctaccaaccagatttgatttcccctaattctattatttccatcagaaaaccaaaaacagattattggggatccacctgtaactgaccagagcaaaaagtttttaagacttccgtttgtg

SEQ ID NO: 4001 - DNA, 1331 bp, Homo Sapiens
  misc_feature (115)..(115): n is a, c, g, or t
  misc_feature (205)..(215): n is a, c, g, or t
ctttttttgtgttgtgttctctatttgtttgttttccggttggactcttttatactgtggaacccaaggcccgtgataactggcgccaataccatgaacagagggagcagcagcnctaaacacaagcggaaaaacatttaagattaaaatttgggggggccggttacaagctttaaaagtgacccagacagggatatcattgctnnnnnnnnnnntccccttgtgacctgggaacaattctgcaaagccacaggtttgccaaatggttacacaagggccaaaaggaggccatgagttgtctttgttgtggggacagagggtaactgttcatgaaaatagtgagtgtctgaagattaagaaaatcatgctgcagcagaggagaagggagaggaagacaggaagggaaaggagatgcctgagggtcaaaagctgagcccaagcctaagcccaagctcaagctcaagccccagcatggcataattttgtgaattaactcaggctgagttgcctccagtctttggaatgtcatcttatactggtactgctgaggcagagggcagtaattggtgctttgggataggagaaggggcagttgctgaaatacaaaattaatagcatcccaagttcctcaattgcagccaaaatacatgtgttcgggcctttcggcagtatcgcccccagaactacctgctgtagtgtggtccattcccagacagcaacatgcaagaataagtttacaatacactcagcccttctggcttcagatcaggggctcagaggctgtgacaactcatgatgctgaaaatgtatccagtgaaaatgaagtactagctctctgcttcattaaaagctcttggaaagaatattaaatctcaagacaacaaaataattgaacacacaatacatttgtgtctttgtatccaatatattacctttgtcttattaacaaaaattatatctctcattatatatttcttggatctgaagtttttattcacactcagtaatttctgtaaaggacaaatctgtctctattttccatatcatttagaaatataccacattcactctttttgatgtgaactttcccaggaaaattctcttgtgcccatttagttttagaagagtgtcattttgtgctattatgtcaatatcctgttttatttccattatgtttttcaaaaaccgaagaaaataaggtttttcttaaaaagttagacattttctcttgttaattctgtatcctgttatttacagctgaagagaaactattttaacttaagtgtaaaatggtttagaatagcaaatgatacagtccactcagagtttac

SEQ ID NO: 4002 - DNA, 1317 bp, Homo Sapiens
  misc_feature (937)..(958): n is a, c, g, or t
  misc_feature (1054)..(1092): n is a, c, g, or t
ggggcaatagcgagacgctggagcgcggcgtaggtggctgccgagtcttttcctgtttagggtcttatcctggcattgagggcgccggactggcgcttttggccgacttggcattgggtgggcggcttcttgggacccacatgagccagtggcatcatccccgcagtggctggggccggagacgcgacttttcaggacgctcctcagccaagaagaagggcggaaaccacatccccgaaaggtggaaagactatctcccagttggacagcggatgcctgggactcgtttcattgctttcaaagttcctttgcaaaagagttttgaaaagaaacttgctccagaagaatgcttttcccctttggatctttttaacaaaatccgagaacaaaatgaagaacttggactgattattgatttaacatatactcaacgctattataaaccagaggatttgccagaaactgttccttacttaaaaatttttacagttggacatcaagtgcctgatgatgagactatttttaaattcaaacacgctgttaatgggtttttgaaagaaaataaagataatgataaacttattggtgtccactgtacccatggtttaaacaggactggctacctcatttgcagatatttgattgatgtagaaggcgtgaggccagatgatgcaattgaattattcaataggtgccggggaacattgcttagaaagacaaaactacattgaagaccttcagaatggtcctatcagaaagaattgggaattccagtggtaccccaggtcaagtgaattttgaagaaattcaacacatcttcatgggaacccagtcccaccaataaaccccgggttaaaccaggggaccctacagggataaatccttacattcagaaatccaaggggtccaccttccagcttccctcgaaacatttttnnnnnnnnnnnnnnnnnnnnnnaaaggtttgtccaaacaatttaggtctcgggaaaaaattttttcccgcaaaaaaatccccccatggcttttaaccgaggaaaacaacccatttatnnnnnnnnnnnnnnnnnnnnnnnnnnnnnnnnnnnnnnnaggaggcccctattttcgccccacacgggaagggggttattttcctttttggaaaaagtgggaaaaaaccccccccaaagtggccccgagatcgcgggggcaaaagcccccccgggtgtcgttttcaaaacaacaggacgggggggtaatacccccccttaaataagaaattatagaacctccccaagaagaaatccccccccaaaaaaataccccaaaccctca

SEQ ID NO: 4003 - DNA, 841 bp, Homo Sapiens
  misc_feature (672)..(672): n is a, c, g, or t
  misc_feature (773)..(773): n is a, c, g, or t
gggcccgccctgcagaggctacaccctggcaggacttaatctcctaaatctctgccgcttaccctagtcttttgcaccaatttaatcattccttcacgcagggtctactgagcgccatcccttgtgctggactctggctacttaaataggaatcaagccaggtccctaccattgctcagcccgcagccgagtgggaaagaagctcgcaaaagcagcaaacaggcagtaatcgagggaagatggaagagttgagtcaggccctggctagtagcttttctgtgtctcaagatctgaacagcacagctgccccacacccccgcctatcccagtacaagtccaagtacagttccttggagcagagtgagcgccgccggaggttactggaactgcagaaatccaagcggctggattatgtgaaccatgccagaagactggctgaagatgactggacagggatggagagtgaggaagaaaataagaaagatgatgaagaaatggacattgacactgtcaagaagttaccaaaacactatgctaatcaattgatgctttctgagtggttaattgacgttccttcagatttggggcaggaatggattgtggtcgtgtgccctgttggaaaaagagcccttatcgtggcctccaggggttctaccagtgcctacaccaagnagtggctacttgtgtcaaccagttttcttcacttctgccaggaggcaacaggccgaaactcaacagcaaaagactacaccatttctagattgcattttacnatggaggtaaaccagaactactacgtttctggatgtgatgtgctgggcggggaacaccctttttaagg

SEQ ID NO: 4004 - DNA, 1044 bp, Homo Sapiens
cagcttgctccttttctcaggttctggcttggaaacggggcccccggtcggaccattgggcctgtgtctgggctgatgctgagcagccaccctcctggttctctgatgccgagggtctcttcccaaagccacctctggtcccaatgcgagtgctgtattttctgcctcagtgcagcctgcagcatattcagcattccaggccgaaatccagtggtgttaacaagagggatcttttaaagttaaattagaattcacaggacccagtaattgagggctagaaagagcctcgaatttatttgtgcacttacaggctgctcttaccttgtagcctctatccggctgtggaggtcacgtctgggccgggtgatgtactccatggcaaactgtctgctcctgatgaaggattatgtgctggccgtggaggcgtatcattcggttatcaagtattacccagagcaagagccccagctgctcagcggcatcggccggatttccctccagattggagacataaaaacagctgaaaagtattttcaagacgttgagaaagtaacacagaaattagatggactacagggtaaaatcatggttttgatgaacagcgcgttccttcacctcgggcagaataactttgcagaagcccacaggttcttcacagagatcttaaggatggatcccaagaaacgcaggggccaacaacaacgctgccgtgtgtctgctctacctgggcaagctcaaggactccctgcggcagctggaggccatggtccagcaggaccccaggcactacctgcacgagagcgtgctcttcaacctgaccaccatgtacgagctggagtcctcacggagcatgcagaagaaacaggccctgctggaggctgtcgccggcaaggagggggacagcttcaacacacagtgcctcaagctggcctagctgcctccaacacactacgtcagaaggacccgggtctttgaaactgtgtcttgaagctaatgtattaatgtgacatggaggaactcaataaaactcctgcttcactggtg

SEQ ID NO: 4005 - DNA, 1086 bp, Homo Sapiens
  misc_feature (104)..(105): n is a, c, g, or t
  misc_feature (176)..(176): n is a, c, g, or t
  misc_feature (971)..(971): n is a, c, g, or t
gttctcctttaataggtcggtattccttaaatccctattctgttacaaattagcctgccatattcagggaatggaaccaacccagtaaaactgttactgaagannctaatttaaatgatccatttaagagaaatgcagtcaaaataaggcaataaccatcagccctatctgtactnttcttctgtgcctactcagtaaaattgagaaaataatttttgcccacttctataaaaatatcaccccatttgctacctagcatatgagagagacaagactagccctgtcacgtttgtctctaaaaagaaaaatgataggcctggtggagagcaagctatatggaaacatcagcctttccttttctaagatacgtcactccaattcttccttaaatataaacttcctccttgatttatattaaccccttaggaggcactataataactttatgttcccatggaacatagggtttttcaagaatttcttaaaataaaaaaggtttgaaagctatggagtaaactcagcagctgtgatattccgttcaatctaccacagatgtcaaacggtcacattttacagaagtcaaaggaaaacaaaaccacagttctgcactcttccacagggcaaggaattgatcatattctattttcctttcaggaattcataaaatccctaggatagcacctttgtatgggctgaaccattaactgaactaaaattaatacaggaagcttaacattcaacattgtgcttgaacaaaacttaccactactcaatttttcttccaaactatgttagtaatatacattttgcaaagagtcttagaaagtttttaaaagaaatctcttttaggtgatgtaacacggaaaactcgtaaggaacaacaaaacccttcagtcttatttctgaagacaagtcaatgtttaatgcagatcattccagtacatgatgtgcgtgaccccctttcctttccntacgtgtgtcacacagccattaagacattttagtttgatcgcctccttaaacttttcagtccctctaagacatcattataaaacaaatttagtcctttagttttatcatatggaa

SEQ ID NO: 4006 - DNA, 939 bp, Homo Sapiens
ggggaaacacagtctttttttaaaaaaaacaatgtttgtaacaagggtgccatggtatttttagataactcgtgattatcttaagagaggtaaatttagtgatcattttatatcatgtcttattccttcttaatgaacataatttgttaaattctcaagcaaggttttcacttttatattggccattctgtatgtttttgtaaaacagaatatttaatccttatttattaatctcttgctggagtggtgtaatgtatctaacttttagcaaaggagggttgcagagcagcttaaattttttttataatgtataagaattttgtttatcttttaagagtagtaaagtactttgagtgtttgggggttcaacacacacatgcaattttgcttaacaaaagtattttataatacagtttcatacagaattaccttaaaagggagtcttatgttttcaactacagatagttgtaagggatcatacagaagatattgatgatagttgaaatattcttagaaggggtgtgtatgtctagctgtgtctaccatgtgtatgtattcttgacaagcagtataaaatacctgtgatttttctttacattagggataatgcataaggaattaatcttcatatatattatcatccctaatgtagcagggggaagtatttaattgcccatgatatgtattttacttatactatgccagagaggaaactataaagtaattacacatgtaatcttgggtttttcacatatgtaggtattcattttgagtaggttgaagaagaaaaaaaatatttaaatgaattgaattcctgatgggatagtatcaataagtatttaaaagccagtattctaaaaataataaagggtagggtcatttttgagtttgtttttcttttgctattgttaatattcaaaattaaagtgttacattggt

SEQ ID NO: 4007 - DNA, 353 bp, Homo Sapiens
gagatagccggtccacaatctggaagcaacactcaacagatgcaagcagtgtgggtgtgcagcagaacagtgatcttgggggaggaagaggatgttactagagtcagatgatttgctgtattctcctgaaaggtcgtaggctgacaggcgctcacattccttggctgcctcggttctgagggcagctaaggagctgtttattcctcaagtcatgctccccgatctccttcctctaccactctgtcaccaggagtttaattacaggcttgaggagaagaaaggaagaaaagatatcttgatgctttgaaaactgtgttgcttccagatggtggaccggctcgatcttcgtgggt

SEQ ID NO: 4008 - DNA, 891 bp, Homo Sapiens
  misc_feature (187)..(187): n is a, c, g, or t
  misc_feature (765)..(765): n is a, c, g, or t
gggaaaccaaagggacttggagtgcagatggcatccttcggttcttccagacaagctgcaagacgctgaccatggccaagatggagctctcgaaggccttctctggccagcggacactcctatctgccatcctcagcatgctatcactcagcttctccacaacatccctgctcagcaactactgggntttgtgggcacacagaaaggtgcccaagcccctgtgcgagaaaggtctggcagccaagtgctttgacatgccagtgtccctggatggagataccaacacatccacccaggaggtggtacaatacaactgggagactggggatgaccggttctccttccggagcttccggagtggcatgtggctatcctgtgaggaaactgtggaagaaccaggggagaggtgcccgaagtttcattgaacttacaccaccagccaagagagaaatcctatggttatccctgggaacgcagatcacctacatcggacttcaattcatcagcttcctcctgctactaacagacttgctactcactgggaaccctgcctgtgggctcaaactgagcgcctttgctgctgtttcctctgtcctggcaggtctcctggggatgttggcccacatgatgtattcacaagtcttccaaggcgactggtcaactggggtccagaaagactggaagacccccttgttttggaaattattgcctgggcctttccaacatgggccgggggtctccctttcacctggcttggatgggggntccggctgttcaccacccctttaaaccccgttaacaccccaagaatggggggcctgggaaatttccaaagggggccaaggccatatagttaaaagagaccctctccaaggggaaaaaacccccccc

SEQ ID NO: 4009 - DNA, 405 bp, Homo Sapiens
ccactattctggtaagccaacacactccataacctgacccttagagtgcatggaggacactggggccagtcctgtccttggcacagctggccaggccaccacacttgcttctctggtatacgccaggagcgctatgcccgatccatcatcatcggtggaaagcacataaatactctgatctttgccttataactaattatttacattgaagtattttttagctgtatattagattgcccttacgagctagagttatgttcacagttgaatattttaacaagtatgtcccaatcatttaagcattatatttgtttcttttagtaaagcttttaagtggatgtcactatgcaagagaaacacagttcaaaaacataccgtcatacatataccttgcctttggtagtg

SEQ ID NO: 4010 - DNA, 243 bp, Homo Sapiens
gggagccgcggcccgggaatctacgtcacccgaaaagcgactataaacgccggcgcctccgtccccagccgcggctcgggaatccacccgaagagtggctataaacgtccgcgcctccattgcgctctcctcttcacttaggacactggtcctcccacgcctgacaccgacgtcgccaggaccgcggggttgggggaacttggctgtcccacgtctttcaaataaagctgttttgtctaactc

SEQ ID NO: 4011 - DNA, 357 bp, Homo Sapiens
aagcgaatagccggtccacatctggaagcaacacgtacgcgtgaggacattgaggcctgagcttagataacttgttcaaaatggccctgctgataagctacatggacgaagtcagcggttttgggcatgtcgtttccaccagcttctggaagaacagcacacaggccgttcccctctcccccattttaaagtggcaggagaaggtggaatgaagaaaataaacagggctgttcctggctctgtgtggtcagagggtgatactggttcaggctccagcttatcagtgctgcactgatattcacagagcattcggctccggaggctttgcacctgtttgtaatgcattgtcaaaacttg

SEQ ID NO: 4012 - DNA, 484 bp, Homo Sapiens
gggggtgtaggacacattagccttctggaaacaagtagaagccatcacctggcccatgtccctacaaacccatgattgtcagggaggtgccagttacagcaggtgattcagctacttgaggtcggtaacagaccttccattcctcactgaaggtggggtttgtgtttttgttttgccctgttactccactggtagtcatctggtgtttgtactataacaacagcaagaaaatctcatttatctttatatactctttgcacctcctttttttagtcgagatataaatatttgaggggagagaaatatctacaggtatatatggaaacaaataatgtggtctgctttataagatggccagatctacattaggaaaagtataagccccctccctaatggccgctggggggtgagggcggtgtgttgtatgtctttgggtgtttgtttttttataaagcatataataaaataatcgtgctactaaaaa

SEQ ID NO: 4013 - DNA, 473 bp, Homo Sapiens
gccaacactcaaatatgtaaactttaattacgtgttacggatcagtgagagcaaaatgaggaaaaaaagaggagaggtgagggtaggggaaagtcacagactaaaagagaaagtccagaggcaggcagctcagaagcagagaagccagtgggaggaaggggaggtacagaaaagcaggagttggggattcagcaggctctggggctgaggtgacgtgtcatgccctggacagtgcttattaggtttattactgacacctcctactgctcttgatcctcacactttcaggtgcctcccttagaaagggagagccccagcggcccacggagcaggcttgcaggatcaaatgcgagacactgagtaggtctgaatttcaggtaaacaataaatatccttttagtgtaagtattcccaaatatagcatggggcatacttatactaaacaaaaatattatgtgttgcttccagaatgg

SEQ ID NO: 4014 - DNA, 419 bp, Homo Sapiens
acttctacaattaaaattcgaaaaaatcaaaacataaacatttattaaggccttcagttactataaataaagcatccgaatcttaattttagagctaatggtaacttttaaataattcctaaatttcatgtaatctgttaagatatattttgttaacatttagaaaagacaagagaataagagaatcaaaaccaacgaattaaaggagctttataatttagcaaaactttcaacttacatgtctctcaaacattactggcaaacacaatgactgcttatgagaaaatctgcatatgtcattctacaaacagtaatgtcattaatattctatttttagtttccaagggaagatcctaaacataacaaatccttccgttagcatttcttcgtgtatgacatgttcccactgccttcaaaca

SEQ ID NO: 4015 - DNA, 405 bp, Homo Sapiens
tcgagccggtccacattctggaagcaacaccaagtgacgatgcgggtgaagtgcataactgcacatgaatttttagaactcctggctgactccttgtgagagttagacggagttttgtgcatcttgttcctttgtaaacatttgattagcaaaaatgcattgacttactccgggagtggtggtcaactatttgcagttacattgttgtgtaacagagctcctgacatacttcgatgtaagagactgggaaagatttgaacatcatatcctccactgatgtctttttatctgtttgtgatgacggaaagtgagggttgaaagttgggagtgtagtagaagcgactggctctctaaagagcgtactcatttcttatgctgggaatggtcatttgattgagtctcctt

SEQ ID NO: 4016 - DNA, 732 bp, Homo Sapiens
tctagagatccccttgaaggcagtgtagtggccaacccccatggctccataatgattggacacggcaatgaggtcgtacacataaggccttgctgacaggttacagacaaactcggacatgttcagccctctgattgggaattctacgactgtgtcgagcttatccctccagtatctgttgtaggagaaacgtttgaggtggaccaccaggatcttgggcaaggaccataggtcaaacttttttgtggcctgttgatgcttcttacagttgggacagtaccaggggtcatgctccccaagggtctccatggtggtgaagagctcgatgcagtctctcagggccactgtggtcttcttcttcttctgaggctgcaacatgctcacatgcttctcgtaggcctcagattcttgctcatcatagtaaagtctccgagtttcactgtcccaatccatggccagtgtagatcgagagttgagtttaagtagttttccatcagctgcaagtgaatttatgtcagctgttccataggagttcacaagactgaaggtaaaaagcctttttgggcagggctggcctttgatcttcttttgggtggtctcactggggtcatttcctggctcatcttccccactgcctcctgtttctgaaagctgctctttgccttcttcctgatgcgccatttcttcctcatcttctccttcacaactgttcctgggagccatgtgcacggc

SEQ ID NO: 4017 - DNA, 298 bp, Homo Sapiens
gctggtaccacattctggaagcaacacccccaacacaacacggtggctctaacaagacacagcagcaggggagaagccagtttgcccagtgggccctggaaagtgacgcagtctggtcatcagcaccccagaaatccctcccaggcggtgggccccttgatagtgcgaagggtccggatggccacagggaattgtacgttatctgaacacagcaactggggcctctgctctccgcatctgtgtggcaccttgctcatagcagctgctcagtgttgcttccagatgtggtccaggctat

SEQ ID NO: 4018 - DNA, 704 bp, Homo Sapiens
ctatgtttgaaggcaggaaaatgttgattgtcgcggataatcaaaattaagttggatggaaaacttgaccaagaaggtgatgatgtacaaacagcagctgaggaggtactagctgatggagacacattagattttgagggtgacaccgttcaatcatcaggcccgagggctggtggtgaagaattagatgaaggtgtggcaaaagataatgctaaaatagatggtgccactcaaagcagtcctgcagaaccaaagagcgaagacgcagatcgctgcaccctgcccgaacatgaaagtccctcacaggacattagtgatgcctgtgaagcagaaagtacagagaggtgtgagatgtcagaacatccaagtcagaccgtcaggaaagctttagacagcaatagcctagagagatattcacagtgaaataggaaagagcagtataggtgcaaagactaaaagcatgacacagctagatacagggcagctgttattgtttttgtatggagtaaacctggagaaatggtgagagaaggggcagaagatgagaggggccagatcatggagtacctgtttgtggcgctcaggagtttagatgttatcatgcagataatctaggagccatttgaggtacttaaatacaggagtgataccagatttatatgtttttatatgattacttggtggtaattatagaaaggattgtt

SEQ ID NO: 4019 - DNA, 884 bp, Homo Sapiens
gtgtgcaggaggcttatactcaaaacttcttcggtcaaagtatgacagctgttttagataatattcttcatcttcttcaggatcataatgatcggaccgaacaatatcttcaggtggcttcagttgaggtttttgaggttctgggatcctgtacagagttttgtcatgttcactgaattgattctgagaagtgggtttgggaccaatgatgggagcacctgaaggtttagatgctacttctggaggcttaaaactgccagtgtcatttacatccttcttggtctctaaggatgcagatctgttgttttcaaacatcttaactctggtgagtacagactgtggcttcattgctggatcttcctcttcttcggtttgagttgggggtggaggcagtggtttggtgtttgaaggcagagcttctggcttatgctgagatgaaggtatcagcggagggacagctgcagcaccatggagaggctcaaaatgacctgctctagaggtaaatccttggggtggtacttgctcgtaactgcgtgaatattgctcaaaatactgcttggactctgcaggcttgggccctgctgaagggtggggctgggcttccggtctgagtctaccatgtgtgtcatacccaggagctggctgctcttcgtgccgcagggcggatgctctaggtgcctgttcgtaacgtggtctgctgtcgtaagacagaggggctggctcttcaaaacgtggaaagtaccctcgttctgaggactcttcgggatgctgtctggagtcaaggtcttgagagtgctgattatcaaaaggtggccgagatgggtagggctgtttgtcatcataatatgaccactgttcttcatacatggggacgcgatcttcgt

SEQ ID NO: 4020 - DNA, 630 bp, Homo Sapiens
  misc_feature (618)..(618): n is a, c, g, or t
gcatatgtcactgttactatgatctactgggatatgtcatgtccataacctgcgacgtatcacctacgctatagtgtcttctttgtacctaaagcccttgcatttaattttacaattgcctgctgaaggtactcttaagttcctctccaaaccaaacgatgtttggtgaggtttggtaaactgaatctcaagcctggtatcgtataatagaggcacatgctatctgctgagtctctatcaacagtgtttctctcttttctgccatacagttttggatattcgtcacagcttcctcctttttctggctattactgctattcgcttccacagaaaataaagagctctcaggcaaggtttcaggaaaacacaaaagacagtcttttcctgagtgtggaaagaaggatttgatagttttgtcacttgaggtgaagactgtgctgtttctgagattacgcaagtgcggctgaaagagctggccccagattcaggtaagcctctgccaatttgccccagttccaaagattaagaggatgcaaagaaatcagcttctgcaggcagaaaattgttttctccaagttctgcaaacttgaacaaatagccagctggaggtagagtacngtggttacatgg

SEQ ID NO: 4021 - DNA, 1155 bp, Homo Sapiens
gtcccaaaaggttcaccacagtaataggagtaatattttcccacagctactggaaagtatggtctacgcatattctcatgatatagacccccatgtttaatgtctggataatcaacaggtttcaaggtacatctcggagcaggtatccagccagtacttgtgcatttggctgtatttccccgggttgcaggataaaaaccatttctacactggtacgtgatttcatctccagttctgtgtttaatccttaaaggtgagtagtcaccatttggaatataaggattatcacatgatttttcttcacatgaaggcaacggacgccatccagattcagtgcatacagcatctcctctttcactgtattcataacccatgttacatttatattgaaatcgttcattctccttataaataatcttctgagatataggagatccatttataacatctggggaatttgcatgaaagtttccacacactttggtttctctttactccaaaaacccatcgtctgaacaatgcatttcttcacctccgtcaatcttgtagcctgagttacatacaaaccgtactgcttgtccaaaatggtattcccgatctggttccattgcactactgacaatttttccattctctggtgctgtcactggtaaacacttcacaacttcacatataggaatatcattcggtccatccatctgtgtcacattcacggtaattaatctcacctagcaattgatacccctcattacatgtatacacagcttttacaccatattcaaacacatttcctcctgtaagggtaaaagtaccaaaaggagtatctccaggatgtccacagggccttttctgacatttccttaatggattaagagcaacccattctcccttcctgcataccattattatatttccaagagatctatatccagggcggcatttatagatagcctgggtgccttctggatatgtttggtcagaccaggaacctgtcagaatttctgtatttcttcttggaggaagttcattgcaatcttctgctacacaaatagcccataacataaggcaaatcaatctttgctagaagtctcattttttggatcttgttaagaggacatttaccagctaactcatgttcacaacgtccagttctcc

SEQ ID NO: 4022 - DNA, 495 bp, Homo Sapiens
tgttaaagtatttcatgctacaaggtagggttaaacagttacaatagacactttatgacccacgaagcctaaaatatttactatctggtcctttgcaggaaaagtttgtcaactcttgccttaaggtatccattgtatataataaattaactattttctatgcatctagaagggtattagctgtgtatcatcctagagaaaaatgagaaaataagatacacaaattattttattttgggcttaattctctcttgaaaccccagttgagaaagacagtatatacatttatataattaaagtaagatgctttgagtatagtcatcagtgtagaaaaagatacatgaatttaaagttctgaaatttgggttgataagccccattacaccaaattattctgtgagcataaaaatgaaacacatggctcaagagattaccagaggtaaatgtctggccttataaaaatccaagatactgtgggatgcagtagctcacact

SEQ ID NO: 4023 - DNA, 595 bp, Homo Sapiens
agccaagccaagtgtatctgctttgacagttgaaggcaccggcatcccctggtgctggaaacccacctgggaccccaaagggaaagagagagctgatgagcaatggcccaggttccattattggtgctaaagctgggaagaattctggcaaaaagaagggccttaacaatgaactgaacaaccttccagtaatctccaacatgacggctgcgttagacagttgctcggcagcagacggcagtttggctgctgagatgcctaaactggaagcagaaggattaattgacaagataaatttaggagataaagaaaagggcaaaaaagctaacaactgcaaaacggacaaaaacctctctaaactgaaaagtgcccggcccattgcccctgccccagcccccactcccccgcagctaatcgctatacccactgcaacctttacaacgaccaccactgggacaatacccggactgccctccctcacaacaactgttgttcaggctacaccaaagagtcctccgttaaaacccattcaaccaaagcccacaattatgggagagcccatcaccgtgaacccagctctggtgtcactcaaaga

SEQ ID NO: 4024 - DNA, 761 bp, Homo Sapiens
aggatccggctgaaggtcaaggagagtagcttctgatgtttccacaggttacttcaggaaaatggattaaaacaaaacaaaaataagccattgtactagtctaggtactagtctaggaagttcaactgaaactcaagacagagcaagtgatctacggggagatgtgaaatgccatttgcgtccacggccacctaaatgccactgacagcaactatggtggccgtttccacgtcccgagggagaaagatcaaaatcaagtccctgttcatgagattctactgagtttacaatatgaccagcaggagcctgtttttgcataaagctaaacatgaccaagcgcctcgggaggacactccaagcgaggccctggaaggagcctgtcagggggaggagctgaagcctgctgagtggacctgagcctggggctatcgaggtcctctccctaaggcctggagcagtcggaggcaatggtgattccagaaccactgcatataaggaagtgggcaaactggtgccgggaaccagacagcatctttgtctctgaagaaaccactgtctccagggagaatacgaaacatacaaggaacctacagtgggagagagtctgagcagcaaaacgtggggtccccatctgcctcgcatgcagtcgggggacgatcaaatgcacgtgtgcgcttcctgcacatcctgtggtgcacagtatcattattaactctgggatctgaaaaactcgttcaggccaatacaacttagcccgaagt

SEQ ID NO: 4025 - DNA, 615 bp, Homo Sapiens
ccgtctcccccagctgccccctgccccctttgtggcccggggcaggtacagcagcatcgtcaacagcagctccagcagtgaccctaaaataaaacagccaaattgaaagcaaacacaagttgacaaaggcagcctcgctcccgggcaagaacggcaaccccacttttgctgcagtcacggctggctacgacaagagcccaggtgggaatggctttgctaaagtttcttcaaacaaaacaggtttctccagcagccttggcatttcacacgctcctgttgacagcgatggctcagacagctcgggtttgtggagtcccgtcagcaacccaagcagccctgacttcactcccctcaattcgttctccgcctttggaaactcttttaatctaactggtgaagttttcagcaaactcggattatctcgatcgtgcaatcaggcctcacagaggagctggaacgagtttaatagtggcccttcatacctttgggagtcgccagcgacagatcccagtccttcctggccagccagttccggctccccgacccacacagccacatcggtcctcggtaacaccagcggcctgtgtccaccactccatcagcagctccatttgg

SEQ ID NO: 4026 - DNA, 695 bp, Homo Sapiens
ggcgtgatacagtgtctgagaagtaaagaggatcctcaattcctgagctagcacattctgatgcttaccagactagagaaatatgctccagtgattctggatcagactggggtcagggaatttatcttacacacagtcagggatttgacatagcatcagaaggccgaggagaagaaagtgaaagtgcaacagattcctttccaaagaaaataaagggattactgagagctgtccataatgaaggcatgcaggtgctttctctcactgagtctccctatagtgatggagaggaccattctattcagcaggtttcagaatcttggctagaagagagaaaagcttacatcaatacaatctcatctctaaaggatttaattacaaagatgcaactgcaaagagaagccgaggtttactgatagttctcaatctcatgagagcttctcagactggcgaggtgaactactgcttgcccttcaacaagttttcttagaagagcgtagtgttttactagcagcatttcggacggagctgacagctctaggtactacagatgcagttggtttactaaactgtttggaacagagaatacaagaacagggtgttgaatatcaagcagctatggaatgcctccagaaagcagatagaaggagtttgttatctgaattcaggcacgccttcaaacatgtgtacaccct

SEQ ID NO: 4027 - DNA, 590 bp, Homo Sapiens
acgcacttcacgagtacaacaaaataccagttgctcctcaaggacttcctgagatacagtgagaaggctggtttggagtgttcagatatcgagaaagcagtggagttaatgtgccttgttcccaaacgctgcaatcacatgatgaatctaggacgtctgcagggctttgagggcactctgactgctcaggggaagctgctgcagcaggacacattctatgtgatcgagctggatgcaggcatgcagtcccggaccaaagagaggcgcgtgttcctcttcgagcagattgtcatcttcagtgaactgctcaggaagggatccctcacccctggctacatgttcaaaaggagcatcaagatgaattacttggtcctggaggagaatgtggacaatgatccctgcaagtttgcactcatgaacagagagacttctgagagggttgttctgcaagccgccaacgctgacatccagcaggcctgggtgcaggacatcaatcaagtcttagaaacacagcgagactttttgaatgcactgcatcgcccattgagtatcaacggaaagaaaggagcacagctgtgatagtctcaacc

SEQ ID NO: 4028 - DNA, 1235 bp, Homo Sapiens
  misc_feature (187)..(187): n is a, c, g, or t
  misc_feature (189)..(194): n is a, c, g, or t
  misc_feature (340)..(340): n is a, c, g, or t
  misc_feature (378)..(378): n is a, c, g, or t
tagggacccggtgaggggtgaattcccaaaggtttatgtgttccctggggtgtgaccccccccgttaaagggttaattgtttttttgtaaagggagccccttttcggattggcccgcccccttaggatggggaatccacccacttttcaggaaaattatacatgtgcatcttttggaggaaagtagntnnnnnntcataattggcagatgtgttagcatgctgttcttccttcattggaatatttgtaatagtagttgaagccaagtcaaaatgttgctgtactaaaatattcaatttggtagcaagattgccgtcctgcacgaacactatgaacttcanctggttaaaaccggggacaactcttttttagaacgatncagatacaaggctgtcttcacccaaactgggtaggtgtggatcaagaccaactcacatttttgaatctgcatgagatgatctgaatttgcagcaagcttgttatgttcatgaatcgtttcctggacacagtcttcaagcattcgcacatgactatcactttttgcattagtaatacagattattcgtcctctatttccaacacgttctgcattctccatgagtagagtacgagcctcatgttggtattcagtaattttgcagagagtttccactgctgcaacaaggccatgcagaatactgcagcactctggatctgcccgaggattaggaggcccaacagcggctaatgctgccattagctcctgtaaattttggtcttcttgagtccaagaatttaaaaaatgtgctccagagtcactcacaataaaattcaccagctttttgaaaggaaatatatcatacattattctacaatattccatggaagattctactgagcaagtccacaatgatttagatatgggggccaaaggaatgattccttgggttctattcttcaccagcatatcaaactcgacatgctgcctgcaagattctgccatataagggcagtgatccacaacaaacactgttttatgagattcagaaaaaatcttcattttgttttaactttcgtgcctggtcctgcagtgaaaacgaacagaggctatggaccacagcctctctggaaaaggctgctggctgggcggggagagtcagcgcacagtcgggagtgtctggtgccacagacaggggactatgctttccccgatcatctcctagcacaccggtccttcccaggcttcctaagagcccc

SEQ ID NO: 4029 - DNA, 1091 bp, Homo Sapiens
  misc_feature (860)..(860): n is a, c, g, or t
  misc_feature (883)..(896): n is a, c, g, or t
ctgagatacagtcggccatgaaagatgcatcatttattgaagatgacaaaaaagggagtcagatatattctggaagctattttaattttaggcacacaatctcatacattttgagacccttgggtcatttattactttttacaaactagttcctctctttttttctgccaagtcctgaattgaaaactgtaggcttccttgcacagatgttgcagccagcctcaggagtaaagtgcccgctgactgctgccgccacctctgtctcgctccctgtcagtgctgctggcacgtgggacgcggcaggtgacagccgttctcagcatgttttagaagcttgcctcacagacttccatgcctctccattcagccgatgacttcagggtgtcaaactggttttaatttttcaaacaaatggaacagaagccattgtggttcatcctgattacttgaacgttgcacttggtggaccgtgcctgggagcgctcgcatgccccctggcttcagaagtcatgtcagtgtctctgtagacaaactccactgtacatcttggattaatcttctgattcattgttcattttctcaagactttttgtggaattctctgataaaggaagcttttaggatggtatctatcaggccaccagcaggaattgaaaatgttttcacaaaaatccttttccttagaaataaaagctggtgacagagatggtttccttgtaccgataaaaacaaaaccaaatccatattatacatcaaaaccttgtgagacattcacttgctcttttgccatatttagatgtgttagtggaatcagaaacctgttttgatatgtgttctccatgaagtaagtctgatttgtncttttatttcatgatgcatgtcnnnnnnnnnnnnnngtcaggataacgtcatatagcatcttggttagtttttccttatctctatgtacatatctatctacttctgactgtagatgggtatatagatagatgccaaagcttcttatggttctgggggtagtatgcatcatttattggggtctctgcctttaaacacatcaaaattcattttagacaaaaaaacttctgcct

SEQ ID NO: 4030 - DNA, 1048 bp, Homo Sapiens
actcctcaccaggccacagcagcacaagagggaagcggggctgattgactgcatcaggccagctatgagtctccaggcagaaaccggagtgcttgggatagacagctccattcttgccctttaatgtgccatccaggaagttgcccgtgtaaaactggaccccgggctgggtggtgtatacttctagtacccgcccgcttgcagcatgatgcacccttgcacaaaaatgcttttctttagatcccttcagacagaaattgtggtcaaaaccattgagatggaagtcctgcaggtgttttccaagctccactggctttctcaggtcgaatgcagtgccttgcactggggcaacttctccggtaggaatcagggtttcatccacaggcaaataagtatccgcttctatggtgacttcatggtcatttatatttgggggaagcctggccttgccagggttgaagtaagaatggttggtcaggttgaatgggtgtggcctgactggctggtgctctgtagttgactatgagctctccgccatccaggggtgtatgtcacccagactttaaactctccggggtagccttcttcacccatctggactgatgcgcgagaactggacgccatttgacagcacccgaggggtccagagcactttatcaaaccctctgactcctccatgcagactgttgggttccttgttaatggccaggtgatactccttcccatccaccttgaaggttcctttggcgattcggttggccaccctcccaataactgctccaaagtatggctgcttttggaggtatccttccaactcggcgaagccaagcaccacgtccgaggctctcccctgcctgtctttgacctctagggctgtgatcgtgcagccccaggagatgatgtccactctcaagaggtctgactgcagctggaacttctccactgtccctcctcccgagggcagctctccaaacacggccctggtcaccgaagccatagggaaagtttggcgtgtgcagccactgcccgctcttcaaactccagcccc

SEQ ID NO: 4031 - DNA, 1619 bp, Homo Sapiens
  misc_feature (1433)..(1446): n is a, c, g, or t
ctcgaatagcagatactgaccatacatgctgcctgtgggactacagggctccgcagagaaatctgattcaccttccacttctagcatcccccctctcaatgaaacggtatctgcagcttccttactgacgacaaccaatcagcattcatcctccttgggtggcttgagccacagtgaggagattccaaatactaccaccacacaacacagcagcacgttatctacgcagcagaataccctttcatcatcaacatcttctgggcgcacttcgacatccactctttgcacacaagtgtggagagtgaggcgaatctccattcttcctccagcactttttccaccacatccagcacagtctctgcacctcccccagtggtcagtgtctcctccagtctcaatagtggcagtagcctgggcctcagcctaggcagcaactccactgtcacagcctcgactcgaagctcagttgctacgacttcaggaaaagctcctcccaacctccctcctggggtcccgccgttgttgcctaatccgtatattatggctccagggctgttacatgcctacccgccacaagtatatggttatgatgacttgcagatgcttcagacaagatttccattggattactacagcatcccatttcccacacccactactccgctgactgggagggatggtagcctggccagcaacccttattctggtgacctcacaaagttcggccgtggggatgcctcctccccagccccggccacaaccttggcccaaccccaacagaaccagacgcagactcaccataccacgcagcagacattcctgaacccggcgctgcctcctggctacagttacaccagcctgccatactatacaggggtcccgggcctccccagcaccttccagtatgggcctgctgtgttccctgtggctcctacctcttccaagcagcatggtgtgaatgtcagtgtgaatgcatcggccacccctttccaacagccgagtggatatgggtctcatggatacaacactggaagaaaatatccacccccttacaagcatttctggacggctgagagctaatttggcccaaggctgggggctgtgttttgtgtgtgtgtataaatttgcactgaagtcttgtttcagaaaccagaccactgaggagagcctgctgagctgaggccatggcctgcgtggcttggggaaatgagttggtggataccttctgggcttttgaacttgcccctcccccatttccctctcccccatgtgtctgaccctgtcttacccatttcaagttcaagcggtgcagcaccttcgaagcatcaatgcacacacctgctgttgcttttgatttctggaaggcatgtagtttcaacttgtaacaaaaatatttgtagtcttcaataaactgtggtatttctttagctccnnnnnnnnnnnnnnaccgtaaaccaaaccatgttcggcccgcctcggccctccaagaagctttcctaaaccatttcgtttggcggcgcggggcccagatagggtaaatggaacatggcccatagctggtctccctaggggaatccttgggcctggacctaaagggccttggaatttctcccccaatt

SEQ ID NO: 4032 - DNA, 1151 bp, Homo Sapiens
  misc_feature (841)..(900): n is a, c, g, or t
  misc_feature (969)..(970): n is a, c, g, or t
  misc_feature (997)..(997): n is a, c, g, or t
gggccgagagacccgagtgcacgtgtggagaagcggcggcacaagcgcggcggcgggagacactcccgcccccaccagactcaagccctcactcgactctcgcggccttcgttgctcgcacagctccctgcccaggctaggaggccggcttgcggggttgagtggcccgagctaagggtgcggagacctaagggcggcgactacgacggcgttgatatcggtggtaacgacggcctcagcaggcggggaagatgaaaggtagccggatcgagctgggagatgtgacaccacacaatattaaacagttgaaaagattgaatcaggtcatctttccagtcagctacaatgacaagttctacaaggatgtgctggaggttggcgagctagcaaaacttgcctatttcaatgatattgctgtaggtgcagtatgctgtagggtggatcattcacagaatcagaagagactttacatcatgacactaggatgtctggcaccttaccgaaggctaggaataggaactaaaatgttaaatcatgtcttaaacatctgtgaaaaagatggtacttttgacaacatttatctgcatgtccagatcagcaatgagtcggcaattgacttctacaggaagtttggctttgagattattgagacaaagaagaactactataagaggatagagcccgcagatgctcatgtgctgcagaaaaacctcaaagttccttctggtcagaatgcagatgtgcaaaagacagacaactgaacaaattacaaatgaactttcttgcacttgcttgtcgccaaataaaagagaggcccattgattcctcccccaccccaacnnnnnnnnnnnnnnnnnnnnnnnnnnnnnnnnnnnnnnnnnnnnnnnnnnnnnnnnnnnnctctgagagttttaatactttcaaggactttaaaaaaataatcatggtttgaattgttttctcttattnnttgtgaggtggttttgaaagaaggacnagggtagatctggttaagtttttgcagttgaaagttagatggtccctaaacatttaatttgtcaaataatttccaaatttaatgttcctgcttttcaccattggaagggcagagcctacaaaaccattgttatattttccaaaggaaccaaaac

SEQ ID NO: 4033 - DNA, 816 bp, Homo Sapiens
ccatggcaaaaatcacatttctttcatgtgaagtcccgagctagaagcatttccaagagatatggagggtggttcttggttcgaataacgtttgatagttgtgataatctttttccttctagggtttgtttttcaaagcttttctttcggttctcactcttggcttctgaaaaatttctaccagtttgctttaacatcttgacttggactcttaggagcactgctatcaagaacctggttttctgccaaaaacgtctgcttcagtcttgatgggagtttcttctggctcactctctgaccctgaaagactgccatagctactcattagtgagcatagggctggtgtcacttccttgggtatcacagaatgttgtggtttctcctccttatcagactcagaatcactgtttatcaaaacaccaagaggatctgcatttgcctccggtggaccttctagcttcaaatcacacaagtgactgcctgatccagtgactgctctctgtctagaattgtcgtttttccatttgtgattcttgccaggacttctgatctttgccatttgtgaatgtctggacatccccttcatcttgccatattgtgttgttgtcaatactgctcctctcttctccttttcaagttttaacttcttcttcctttcaatattggccagagttggatagtttttccttcgttcttccctccaccgtgcaatttcctctggagtgtctaacttgatcttcttcatgccaggagcatgcatatttctcccaatggaactggacaatcttctcgtgtgcagtaaaagagcaatctaat

SEQ ID NO: 4034 - DNA, 451 bp, Homo Sapiens
tcttgctcccatcagaaggagaagtaaagctgcaaaccaggcctctgcaagagcaactttgtttcacagctcagggtgaccagattcccctccaggagtggggatgtcacagatgcattcagcactggagctggaaatagctctttcacagtgacagatattcctgctgatgtgtagcgatgctttcccaggcctgagcaatggtaggtgccattgtgacttatgttggttttcagaatggtgaggttagaattccagtggaaaaacttaaaggctttgccatttcgatagtaaagcacattgtacaccagcttatccttccacgcatgacacctcaaggccagaggttctccttccgtgaagactctgctggagacctgcagtagtagccagccccaaaggagcagagttgtcaagaaccacatgtgtctccagctgatggacgcagctg

SEQ ID NO: 4035 - DNA, 514 bp, Homo Sapiens
aaaacaaaaaggaaaacaaatgatgaaggtctgcagaaactgaaacccagacatgtgtctgccccctctatgtgggcatggttttgccagtgcttctaagtgcaggagaacatgtcacctgaggctagttttgcattcaggtccctggcttcgtttcttgttggtatgcctccccagatcgtccttcctgtatccatgtgaccagactgtatttgttgggactgtcgcagatcttggcttcttacagttcttcctgtccaaactccatcctgtccctcaggaacggggggaaaattctccgaatgtttttggttttttggctgcttggaatttacttctgccacctgctggtcatcactgtcctcactaagtggattctgggctcccccgtacctcatggctcaaactaccactcctcagtcgctatattaaagcttatatttttgctggattactgctaaatacaaaagaaagtttcaatatgttttcatttcctggaggggaaaatggggat

SEQ ID NO: 4036 - DNA, 1342 bp, Homo Sapiens
ggaccctgggtgacgtgcacattgcttgggtatggaacggtagaaatttgggtgtttttaaaaccttgtttggggttgttcctgtccttgttgagaatcatagagatgtctgtgttcttggagtatttcacactgaggactaatctgctatcttcattccagtccctacccctcagtgcctgctctcatccaaataacctgggaggtgacaatcaggatatctcaggaggtccaaaggtggaacagacctctttgcctttcccagcgtctcatacccccggtagtgcagctgtgggtggaggctggggtgtctgcacgaagtcaggccagcgtcctcctccacagcctgtcactgccccctccccagcctgtgtccacagtgctgtgatcccgagggaagtcctccagtctaagtcacagtgccctgacaggtgagaagcaaactcccgctggaagcctccatctctttggaaaaacagttagtcttggagcctgtggcccaggcccttctgtccccaggcatcatcccaacagctcattttccccagtcccgcccttcgttcaagggtcaggaatggaccagaacacatgggttctggaggcccctgaacagagggctatggctgtggagaaggttcttggcccgttggactcacacagaccctgtaccctctcggcaagcatcttcagtcagattatcctcagtttcagatacttcataataccttgtgttgtgtggggtcatacatcatcgtgtttgtaagagaagatggtcattttattctctgtataaaacttagctctaaagcagaaactaaagcagcaaatgcaggaaggctgtctcgccatcctcaagactcagcagctctcattctccagtggtgagcacaccatttgtgctgctgctgttgtcgtgaaatataataacagtggaagtcacaaaaatgtcccctgcccagccccctcgccgcccttgacctcctgcaggccatgtgtgtattacttgtctagtgatgtcctctcaaagtgctgtacgcgagctcggcgcccacctccgcctccctttcagagcctgctccccgccctctctgctcgctgcattgtggtgttctcttctcaagggctttgaaatctccccttgcactgagattagtcgtcagatctctccccgtctcccttcccacttatacgacctgatttccttaagacggaacccgcagcacctgcgcccggcgtcttactcccgctgcttgttctgtcccctcccctcggaccaacagtgctcatgcttcagggacctggtttgcccaaaaaggtgggttcccctttcccccgggatttt

SEQ ID NO: 4037 - DNA, 1157 bp, Homo Sapiens
  misc_feature (38)..(38): n is a, c, g, or t
ccgtttaaggatctaacctttgccctaccttctagggnttatgtctaaatactcccgaagttggcacaagctaggttatttctagttctaaacagactactgtgcttttgcacaatgctctcaagttcagctaaagcagtgctcctctggaagttcaccaccctaactgaactgtcactcttctttattttcttctagaatcctgggattatctgaataataaatgccatcacattgtacttttaatacatacttcatctctttcacctagtgcactatgaattactacgaggaagaatctgtgtgcctatcttcctgtcttcagtgatgatatactgaaagaatggtgtaggagtagaaatattctatttaccagtgctaactctttttcacaaaaccaggcagagatctgctcatttttactctgtaaacttggaaaagttaatttattcaatctctattttgtcctaactagactgatcatcttattactaagatgaaggaatctattgcaagttacacgttactatcatcccctggtatgaaagagcgattttgaacctgaacatataaaagcattcaagatagtgtctggcacagtagaacagggattaacaagacactggacttgatcctcaaattatttaagccacagaagggattcagactctggccttttgattgaccaccttttaagattgcttgaaaagacaacgcccttcctattagcacagctgaagccaatccagaactaaacatcagcacacaaaaaataccaggatagatggaatcaaagactctgaagccaaaggaggctagggagagcaactgaacttagcaagctgaggacttcagtgtccatcatccgatcctgccctgtaacaacaggtctatatgatagagatattccatctgagctggaggccattatccttagcaactaacacagaacagaaaaccaatacatgttctcatttagaagtaggagctaaatgatgagaactcaaggacacaagaaaggaacacagacactggggcctacttgagggtggagggtgggaggagggagaagagcagggaaaataactactgggtactaggcttagcacctgggtgacaaataatctgtacacaaaccacttgacatgagtttacct

SEQ ID NO: 4038 - DNA, 704 bp, Homo Sapiens
ggggctatggaaggacagcggcaagaaagccacgcaaccctaacactcgcccaggctcatttcaacaatggagagtacgcggaggccgaggcactgtactccgcttacattcgccggtgcgcttgcgcggcctccagcgacgagagtcccgggagcaaatgcagccctgaggatttggctactgcatataacaacagggggcaaatcaagtacttcagggttgatttttatgaagccatggatgactacacatctgccatagaagtccaacccaattttgaagttccatattacaacagagggttgatactgtataggctgggatattttgatgatgctttggaagatttcaagaaggtcttagacttaaatcctggatttcaagatgctactttgagcttaaaacagactattctagacaaagaagaaaaacaaagaagaaatgttgcaaaaaattattgatatttttaacttaatggaagtattgattcatgatccttacatctgcatctagttatcagtaatttagatattgagctattttgatttatatttaagaaattaatacattagcactgaaagttaaatagtgtgtttaaggtagttaatttcaggttgaatgggttttttttaatgaagtgtaaataataccaatgtataagtggatattattaaaataaatattattgaaaccaaacaacagg

SEQ ID NO: 4039 - DNA, 628 bp, Homo Sapiens
cctaccaacaatgcagtttgggaaatgagccatgaaaaacataatggcctgagagttagccatacatcctaggtctgccaattgaatgaggacattaatgggaatgtaaaattccaggagacattcttttattctcctctccaagttactagcatgtccagtatcagaaagaaaacagtagaggaatgtggcaatagccacatatgtgaaaccttagtagagctaaaaccaaactaaacaaaatgcaaactacagtgggacaaagaactgactctcatttgagttttatttgtggcttcaagcaacctccaaactaagaggctcataaattaggaaataattttaatgcactgaggggtcagtaatttgcattagaatattattaaaatttatgtcttgtaagagttgcatatacttcattgttgaattcggtgccaacagtaaacaaataactaaatgagatataacctcaaatatacccacttccaaaactaaaaagcattttaacacatttttctccgccaccctcaagtgaatcagtaaaacaaatagaaaatcaaaacatgattgtaatattacataagacaattattttacttaaataacttagtctgttccaaagtatttc

SEQ ID NO: 4040 - DNA, 756 bp, Homo Sapiens
gcaaagggaaacaaagaaccagcccagctttcagaagcagccccagtgcccacagagcccagggcctcacagctctgggatctgctagatctccgggatggggcttctggggatgtccagcaacctcccccatctggacccccccccaggaggtgccctggtacacctgccttgaccttccctgtgtacctccacccccagctcccatcccagatctcaaagtgtttgagcgtgagggagtacagctgaatctgtctttcattcgaccccctgaaaaccctgctttgctgttaatcaccatcactgccaccaacttctcagagggtgatgtcacccatttcatctgccaggctgctgtgcccaagagtctccagctgcagctgcaggcccccagtgggaacacagttccagctcggggtggccttcctatcacccagctcttcagaatcctcaatcctaacaaggcccccctgcggctaaagctgcgcctcacctacgaccactttcaccagtcggtgcaggagatctttgaggtgaacaacttgcctgtggaatcgtggcagtaactgtctccactcacagcctgaaattctcctgtgtcccaaaccccagggggccccagcagcttcgaacctacacctgagggctaccagcaggtggcgctctggctttgcactgcaaaaactggggaccagcccccttctcccacaaataaagcccaataaagcctgagaagtgaggaaagccaaaaaaaac

SEQ ID NO: 4041 - DNA, 635 bp, Homo Sapiens
agcaacacatcaaatacaggcatctcaccatcattacctgaggcctttaacaatctccttagatctgcttcctcccaccaaagctaaatatcctaggactgaaaaatacaattgttttgctaggtagacgagctcttttctagaaactcctcatttgaccatacatgagaactcatccttgacatgtgcagagattcagcagggacccgaaataggagcaaggtggtctgccctatcactctgccatattaacttctctacattccactcatttcccatgatgaaatgaaatgatttctgaacacctactagtgccaggttctgtgctaggtatattacagactttacccctctaattctcactacaatacccttctaccagtgagaaagagtgaggttcaaagaagttacaaaaactggtccctagccatacatctggattcaaacttgggtcccaccgagagtggtactctttccgctgcaccacactgcttaccaagacatggagcacctcagggcacatccatggaaattcttaggtgccatatatatgtgtagatagcataaaccattatccaacttcaacaaatttaaaaattaaaaatctgggccaggcgtgttggcttcagaatggt

SEQ ID NO: 4042 - DNA, 415 bp, Homo Sapiens
gggaccttgatgtgaggaaaagataaaatttaaacaataaatttgccacttagattttctagcagcaaagtccgaaaagatagttatatacaaaattctgttttctgaaaacaaaattgtgattcaccttcagaattggccattttttttgtgagtttccttgcatcaaggacactgagaaacacagtcattgtcttaggtgttctatgggaggaagtgaatagagcctttaggaacttcctggtcaagcttatggtgcttattttgatctgggccacttccctccttccagtcatgagtaatcatcaaggagcaagttggagtgtttcaggtgtatattttgtagaacccaaaagattggagccttaacaataaacatcagcactaagtgacctgttcctccttttttaaatag

SEQ ID NO: 4043 - DNA, 462 bp, Homo Sapiens
  misc_feature (406)..(406): n is a, c, g, or t
gtccggccagaaatcatgaatattagtaggtgaaaaataaacacattttaccacctggaaaatgaaaaatacttgagtataatctaaataacaacgggaagtgcagagttactctccaggtctcggtttaaatatgacttaaacttaggccaattagtagtagaagttgagagaaaaagtaactatctgacaaagaaattataagcagaatatataaagaactcttaaaactgaataatcagaaaacaactcaataaaaaggtgaaggatttgaaaagatatttcaccaaataagacatagggatgacaaataagcacatgaaaagactctcagcatcactagtcacagggaaatgcacgataaaaccacagtgagacaccatggcacccctgtaggtatggcttnagaagaaataaaactcgaccataccagtgttgcttccagatggtgggccgctcgat

SEQ ID NO: 4044 - DNA, 551 bp, Homo Sapiens
gtatggaagcaacacaatctgtaggtaattgtcaccccaccgccttgggagcagtcctgcgcgcaataggatgatcaaaggtctgcaaaagtaaataaaactcgtctagataaattcctttacactcctttgttacctacttcttgcccttagcgtcagggtaagagaatttagctgccttcagcctttattctctcccgaagctttgcaaaacctcctggacttccaagaaggtttgcgtctctccttataacttttcccaccaccctgactgatctcctacatctcccccttttgttttttgcatcaggttttgttgattgaagagtacagatgtgcacagcagcaggtttgtcaggcgtagcgattactgctcgtattccggctttgcatcaccagagagcagagcaaggaacaaattatctggagtgaatggtttctgtgtctggagcaggatttgctcagccttgtaagttgtcttcttcagcatcccccaggtaatgtccggggcttgtgtcgtctgaggagctgtgttgcttccagaatgtggt

SEQ ID NO: 4045 - DNA, 585 bp, Homo Sapiens
  misc_feature (530)..(530): n is a, c, g, or t
ggcataaaatgtctccctctggactgggaatacctcttatgtggcacaaggttgagtgatctcaaatcaccgctaacccacctagacattttaacatccgaaaccgagtgatgacgtccttatctatatcatcttactgcctgtgtgtgtggactttaaattctgaacccaaatgagggggagaaaaccaagttgactttcatgactgagctctcagggacgtccaaggaatctgtgcatttcaagaaacaaagttcatcagcttctctcctaaggtattcgcccacaatacccagagggcttggcagaatcatgtgtgatgggtggggagctccaagcaggtgggcaggacccaggggcctggtgaccaggacagacccccactgtccatcacctttcctggccctgtcctctgctaaacttcccacaggccttctgcccgatcacacaggagtatgcccaaactctctcaggcctctagcagctgacaaccactgctttaaatccctattacatttattatgacatanggttattgtaaacaggaaaattctattgatgctacaaatggaacgccatgcttta

SEQ ID NO: 4046 - DNA, 959 bp, Homo Sapiens
gcaatgctcctccttatgggaattccctgtgaccacccaaggtttgggcgggacgccgaggtcccaccgttcctacagcgtccacaatgctccacagtggatcttcgcctcctcgcgccggatgtcctgccgcccactctcaccgcaccggccgaagttgaaattgcgcgcagtacacatggggtcgccaggtccaggatatagtcatttatccgctcgacgtgctggtattcagacagtacatgtcccgttaccaggttgatgacccagctgtagggccttagatggtccagtaccgcagcactctgcatgaagtcatggagctctggagtcacctggtcaatgatgggcatcagataggctaatatatgcttggtgttggccattgttggatccgatagaatccctgaggtggtgggtagatgaggtttctaccagggatgttgccagcctctcgcctaccaccagcagataatgtgaccacaatgtcatggtagccctggtagtagtgcagctgaggcttgcgctccaagatgaggaggatgatgtcaagcagttcttcctggagcccttctcgctgttcctctggcatgccaggagggaaccgccgcaatgaccgccaggacgtccagcaacacttgttggtagtccttgctcatctgccgtaggttcttccctgccttctccgcgcacgccgtcccagtggcacggatggtggggccagtcagcccatgcagcactcacaggatgggccatgcacaccaggggcacacctgggcaccaccacaccgatgccccaggctggtggcggagccagggagaagacgcggctccgaccgcgggacgtagcagcccgctcaggcatcggtcaggctcccctccgtcaggccagcggcgcgcaggcgcagcctcgtgccgaattcgccacccaggcctcgctacaaaacggaccgttatag

SEQ ID NO: 4047 - DNA, 397 bp, Homo Sapiens
atctgcaggttcccattggtcatcttgctgtctgcacaccttcctctctcacctcttggcacttccctcaaaaaagagagaagtggagcacagtaaataaacgccagcgttttctccagttcccagcacctctccggaactggatcccccaaactcctctgtcactttctgtgtccagcgggcccctggggtccttcactgtcttcactctgctcagcctgtgcgcttggccttggtgctgtagggactgttataagagctgctgtccgatccccatattcaatctcacagccccactttgtgtacacacaccagagccatcttcttaaaatcagatcctgtcactcctctccctaaaatctaccagtggtctaataaaatcttgaatttttagcat

SEQ ID NO: 4048 - DNA, 1696 bp, Homo Sapiens
  misc_feature (1035)..(1185): n is a, c, g, or t
  misc_feature (1193)..(1207): n is a, c, g, or t
  misc_feature (1242)..(1251): n is a, c, g, or t
  misc_feature (1336)..(1348): n is a, c, g, or t
  misc_feature (1392)..(1411): n is a, c, g, or t
  misc_feature (1446)..(1493): n is a, c, g, or t
  misc_feature (1569)..(1579): n is a, c, g, or t
  misc_feature (1608)..(1616): n is a, c, g, or t
tggaccggtccggaattcccgggatcagatatgctgtcggagaagcacctcatctcagtctgtgccgacaacaaccacgtgcggacatggtctgtgactcgcttccgcggcatgatttccacccagcccggctccaccccactcgcttcctttaagatcctggctctggagtcggcagatgggcatggcggctgcagtgctggcaatgacattggcccctacggtgagcgggacgaccagcaagtgttcatccagaaggtggtgcccagtgccagccagctcttcgtgcgtctctcatctactgggcagcgggtgtgctccgtgcgctccgtggacggctcacccacgacggccttcacagtgctggagtgcgagggctcccggcggctcggctctcggccccggcgctacctgctcactggccaggccaacggcagcttggccatgtgggacctaaccaccgccatggacggcctcggccaggcccctgcaggtggcctgacggagcaagagctgatggaacagctggaacactgtgagctggccccgccggctccttcagctccctcatggggctgtctccccagcccctcaccccgcatctccctcaccagcctccactcagcctccagcaacacctccttgtctggccaccgtgggagcccaagccccccgcaggctgaggcccggcgccgtggtgggggcagctttgtggaacgctgccaggaactggtgcggagtgggccagacctccgacggccacccacaccagccccgtggccctccagcggtctcggcactcccctcacacctcccaagatgaagctcaatgaaacttccttttgaacaacgcagctgccatgatgccttgggatgccctggtcctgggggactcaggtgcctccctgattcctgtgggaaccccgggttcagggccagggcctccttggaataaatggttattgttactaggtccccaccttccctcttttctggaagccaaagtcaccctccccaataaagtcctcactgccnnnnnnnnnnnnnnnnnnnnnnnnnnnnnnnnnnnnnnnnnnnnnnnnnnnnnnnnnnnnnnnnnnnnnnnnnnnnnnnnnnnnnnnnnnnnnnnnnnnnnnnnnnnnnnnnnnnnnnnnnnnnnnnnnnnnnnnnnnnnnnnnnnnnnnnttgtgggnnnnnnnnnnnnnnnaaaaaattttttaaacattctctttgggggggggnnnnnnnnnngggaaggggaaaaagggccttaacttttttttcctcaaaaaaaccgggcccgggaaaaaagaggcgtgggttttccccccccacnnnnnnnnnnnnnccgggcggggaaaccaaaacggttttgttaaaaaaaccccacannnnnnnnnnnnnnnnnnnnccttttcttggagggctaatcacaccggggggggnnnnnnnnnnnnnnnnnnnnnnnnnnnnnnnnnnnnnnnnnnnnnnnngggccccctttttttataaagaaaagtgggggggagcttcttctttataaaaatcctttccccaccgctgggaagnnnnnnnnnnnaaccccgcgcggtgggggaacctaaaatnnnnnnnnngcggggggtaaaaaccaccgttggggcggcgtgggctgaaaaataattattcccccccgggggagaaaaaagaggcgggg

SEQ ID NO: 4049 - DNA, 286 bp, Homo Sapiens
aagcatagcgccaccaaggccatagcgccaccatggccatagcgcccaccaaggccatagcgcccaccaaggccatagcgcccaccaaggccatagcgcccaccaaggccatagcgcccaccaaggccatagcgcccaccaaggccatagcgcccaccaaggccatagcgcccaccaaggccatagcgcccaccaaggccatagcgcccaccaaggccatagcgcccaccaaggccatagcgcccaccaggccagagcgcccaacaagcagagcgccaccggagct

SEQ ID NO: 4050 - DNA, 946 bp, Homo Sapiens
  misc_feature (409)..(409): n is a, c, g, or t
  misc_feature (699)..(798): n is a, c, g, or t
  misc_feature (802)..(806): n is a, c, g, or t
  misc_feature (821)..(834): n is a, c, g, or t
tgagctcggtccaactcagggcgagctgctactcagggcgagctgcagctcagtgggcgctgcaccgcgctgcgccgtgcccgtgagtccggcgcgcagaggaggaggagaaagctgaccgcttaggcccgggtagtggtcgtcgtggttttccttgtagttcgtggtctgagaccaggcctcaagtggaaacggcgtcaccatgatcgcacggcggaacccagaacccttacggtttctgccggatgaggcccggagcctgcccccgcccaagctgaccgacccgcggctcctctacatcggcttcttgggctactgctccggcctgattgataacctgatccggcggaggccgatcgcgacggctggtttgcatcgccagcttctatatattacggccttttttttngctggatattatcttgtaaaacgtgaagactacctgtatgctgtgagggaccgtgaaatgtttggatatatgaaattacatccagaggattttcctgaagaagataagaaaacatatggtgaaatttttgaaaaattccatccaatacgttgaagtcttcaaaatgcttgctccagtttcactgatacctgctgtttctgaatttgatggaacatgtttcttatgacagttgaagcttatgctaatctgtatgttgacaccttgtaattaaaatacgtaccatgaaaaannnnnnnnnnnnnnnnnnnnnnnnnnnnnnnnnnnnnnnnnnnnnnnnnnnnnnnnnnnnnnnnnnnnnnnnnnnnnnnnnnnnnnnnnnnnnnnnnnnnaaannnnnaaaaaatgttggggnnnnnnnnnnnnnnaaaaaattttttaaaccctttgttgggggccccgccccccaggggaaagagaaaaggggcaaagtgtttcccaaggaaacccgggacaagaaaaggggttgggttccccccc

SEQ ID NO: 4051 - DNA, 362 bp, Homo Sapiens
atgttgatgaactgattcaaccaggtgttgaaggcacgacagccactgctctacgaaaaggcagagtacgtttttcccttctggttgtaacctggttgagagcttcccctttatcagattggcagctaaacagttgtattagataatccttaaatctgacatccagcctgttacgctctagggctcgctgcttggcctgcgtttgctttttattgtgtatccgttcccctcctacggtgtgctcctgaatgaaggtttctatgtaagcagatgatgattttacctgtcaataccagcactgtattactaacatgcaaaatactgcagatttattttgaaaattaaagttaactggtcacaaa

SEQ ID NO: 4052 - DNA, 883 bp, Homo Sapiens
  misc_feature (227)..(236): n is a, c, g, or t
  misc_feature (461)..(490): n is a, c, g, or t
  misc_feature (521)..(535): n is a, c, g, or t
  misc_feature (645)..(743): n is a, c, g, or t
  misc_feature (759)..(771): n is a, c, g, or t
ggtctctggattgttcatgtcgttgtgctgcgccgggagccaccgccctccggagacagggcagctcccctacgaccctagcgcctccgccctccgcggcccctctcctctcttccgccccctagtctcccacccttccctccccgtagtgaccaattcctatctcttccctctccgcaggctcaatgaatcgaatgaatgtgaacttcttcatctgtgaaaaatcnnnnnnnnnnccattttgttctgtttgggggcttctgttttgtttggcgagagagcgatggctgccgtggggagtactggggagccctcgcggcaagcagggtgggggggacttgggggcatgccgggccctcactctctcgcctgttctgtgtctcacatgctttttctttcaaaattgggatccttccatgttgagccagccagagaagatagcgagatctaaatctctgccnnnnnnnnnnnnnnnnnnnnnnnnnnnnnnccacaaagagcaaagcagaacttataaaatnnnnnnnnnnnnnnntaaaaagtctctattcttcaccccccagccttcctgaacctgcctctctgaggataaagcaattcattttctcccaccctcggccctcttgtttttaaaataaacttttnnnnnnnnnnnnnnnnnnnnnnnnnnnnnnnnnnnnnnnnnnnnnnnnnnnnnnnnnnnnnnnnnnnnnnnnnnnnnnnnnnnnnnnnnnnnnnnnnnntctttgtgggggccgnnnnnnnnnnnnnaaaaaaatttttttaaaaacctttccttttgggggccgcggggcccccccaaagggaagagggaaactgtgggccataaagtgtgttttcccaaaggaaaaaacccggggac

SEQ ID NO: 4053 - DNA, 1148 bp, Homo Sapiens
  misc_feature (79)..(88): n is a, c, g, or t
  misc_feature (113)..(127): n is a, c, g, or t
  misc_feature (135)..(141): n is a, c, g, or t
  misc_feature (143)..(265): n is a, c, g, or t
gggggggacccaacccccttgttctggccccggtttttttggggaaaaattaagcccgggttccttctcccttgggggnnnnnnnnnnaaaaaagggtttaaaaagttttttnnnnnnnnnnnnnnncccccccnnnnnnntnnnnnnnnnnnnnnnnnnnnnnnnnnnnnnnnnnnnnnnnnnnnnnnnnnnnnnnnnnnnnnnnnnnnnnnnnnnnnnnnnnnnnnnnnnnnnnnnnnnnnnnnnnnnnnnnnnnnnnnnnnnaaatggttctttattcataaacttgatgcaagtttacaaaatttactgtacattgccaaataaatctgcaattaaaaataaaatccattaaacaaagcatgccaaatgtgcagctatcagtctgcttgccatcaggatattaaagaattcaacaatgtattcaagatttagccttaggcttaaggaactttactgatttaaagaattctgccttgtcacttgttatctgagcaactggcaatcagaactttatacaaatgtaatcaagtgaacaagaataccagaaaatctatttactgctctcttaaccaaaatggaatcaaaagaaattaaacacacacaatgtagaaatgacaagtctctcagatgtggtttacaaagttaaaaactgaatctcaaagctaatgcacaagaaacacttttgaactttgtaacttgtttgtgcagaaaaatgtgcttctggatttcttgttaaaagtgcttaagaactagaatttacttttaaatcaaacgtgggtgtataaaaaaatctattaccaaccaaaaaggactgattcaggtaaggcaataaaatggagagtaccttgatttgagtcaggttctataaaaaaattaacatatgtagagtttctattaatctttcaatgtaaaagccattgttttgacatggcaaaaattactgtaagagtctccaaattaagtatctttttgtacttaactgcacagcttttgctcaaggagtctttgtgccaatcactttataagtttattagtttacaaacgattgcaacatcccgttaataaaatggaaacgtaagatgacttagtattttaaataacttgaagctctgtactgtggctcttgttcataagaaacactgcc

SEQ ID NO: 4054 - DNA, 707 bp, Homo Sapiens
  misc_feature (676)..(676): n is a, c, g, or t
aattgacatatacttctatatataattatgagtttaatgaagtgagataatttaagatgatcacacaataaaactttacagccaaaatacaaagtcttcatcttattttcctacttcattttttttcatgttcttagtaagtgcatttttctactttattttttgaaaagaacattcatttttgaaaagtttatttcaccaaggaccaatcttttgttgatgttcaaatttaaattgttctttcatatctgtctcataggagaaaaacatgaaaaattgcttctgtggtagtttcttctaggttttcaagtactcttatagtagcaactggttcaaaatactgctttgtttcaaagcatacagtttagatgtatcttcactgatgatgggaacattttcattttgttcctgagctgtcaggtcactttcactgtcagatagtgtacacaggagagtgtcattttcataggttggaaaataatactccagttgatcccacgtctttctatcggggagcagcgaagtgtgtttagtttcttccatgtgagttcttaagtctgctttggatttgaacttcacatggcagccataacatctgcattggtgaacttggcctccgaataaaaatgaccagtttcacttgctgatagaaatttaatccaagtcttgctttatnttgagaagtccaaattctgtggcattctcat

SEQ ID NO: 4055 - DNA, 725 bp, Homo Sapiens
  misc_feature (687)..(687): n is a, c, g, or t
ggggggaagaagaggtagggcgccgccgtgacagattagtcctaaagggaacggggttgttagttcaattggctaccgagaaaaaaccaggctgggctgggcgccgccatgacaaccgataccggaaaaggcgggtcgttccccccggacagccctacgccggcaaaggtctcgagatgcaggcggccctagaggtcaccgctcgctactgtggccgggagctggagcagtatggccagtgtgtggcggccaagccggaatcctggcagcgggactgtcactaccttaagatgagcattgcccagtgcacatcctcccacccaatcatccgccagatccgccaggcctgtgctcagccttttgaggccttcgaggagtgtcttcgacagaacgaggcagctgtgggcaactgtgcagagcatatgcgccgcttcctgcagtgcgctgagcaggtgcagccgccacgctcacctgcaactgtggaggcacagccacttcctgcctcctgaggactcctctgacggcaggaaaactggacatgaatgactgcccccacgcccctcccctgcagagtggccagatggagtcctgagccctggacatgggcccggctttcctggatatcaggacttccaataaataaagactctgtatactgacccaccacactttatccccccctttggntttacatggtcgggccgccttcgggcccttccaaaaat

SEQ ID NO: 4056 - DNA, 1027 bp, Homo Sapiens
ctcccccaccatcttgtctcacttggaaaccgttgtcagtttatttactatgcaatagacattcattgttttgtatccagctagctttggtttaatatgccactgctttgtctttctgttacacatacagttttgatttatttacaatatatgctgtgccattttgatttttatattgtttggttggttgaataaatttgcgacactcaaacacttgaggtgatagttgttaaaaacaataccagtatttgatccagtttcatctcaactatgttatacctggacattttagatgtttatcaaaggtcttttatggggaagaaagtaaatgtatgaaataataaatgtgtgacatttatagggaatgttggctctgaacaaacttttgaaaacttggttgacaaaattttggatcaactgaaaaaagcatgacttttgaaatctctgaatgccttggttctcagtattatcattctttattgaatttatttcttattaaaatatgtagtttttaagactttttttctgacagtattatgtaattttttagcgtgggtagatgggagtgtcgcttgtatgttatcgtacagctgacatgtatttttgtctattctttattatcttagtttcatgctatgtatgtaccataaccaacctattgcctatgagaaacatgtaagataatgtatttacagccattgttacaagtttataatgtatttttctatcttgttttatatgtatgttatataacattcaaaaagaatttttttcttgattgagaaaaggatacaaaatgcaaaatccacaattttgataaactgaaaattgccaatttgttttgcagtactttattatattggggtggccttgtcctttttgggcttttagttagctaatgaatgaatacattagacacttttgggttttagttgggattttacatagcttgcattttaattctttggttctttgctgtttctattaacccacagcattattttaataaatgttataataccaacct

SEQ ID NO: 4057 - DNA, 898 bp, Homo Sapiens
  misc_feature (65)..(140): n is a, c, g, or t
agagaaagaacatgagatggaagtcatctgactctgacagctcagactctgagagtgatacaggnnnnnnnnnnnnnnnnnnnnnnnnnnnnnnnnnnnnnnnnnnnnnnnnnnnnnnnnnnnnnnnnnnnnnnnnnnnncacaaggagtgagagtataaagagtgtagggggtggttgagagtaagaaaccaggagccttgtgccttgagactcctggaaagactcaatagtgagaatatagcctcccaccccattaacttcgctcccatgggagatggcttcccctcatgcaacaggcaggtttgggagttagaggtcaaaagcagctgcctgaatgagttgttgtttccttatcactcctggtccctttgcaagtgaaccctgcagctcacccattcattcacccaacttccttcattcagcaggaggtcctattaccctctccagctgccactgccagagctggattcctgtaaaggagtccaggctagagccacagagactgttgtggaggtgagttcggctgtagttagagtgattggacccttcctattggtctgtcctgggccaactggtgggtgatctctgctgcatccaacatgggagcagagactggcagcaggaggggggaacatggtgagaagtggtgctcacttttcccattcctcctaacatagttctactatgctagaagtggcatccagcggccacagctagaaaacagtctgcagtgtgacttaacttgtgtattgcattccagcagaccactgaaccagacagcgaagccaagatcattgttctactttgtatttactactgtgtgaatcagttgattctacttcaggtccttgcttaaattcctgtcactaaatggaaatgtgtttggttttaaaaaa

SEQ ID NO: 4058 - DNA, 1819 bp, Homo Sapiens
  misc_feature (1654)..(1654): n is a, c, g, or t
tcagttaccacggtaagatgtctttgaagcattttataaaaaagattggcaaaaagactccttgttgggaaaagtgcctcagtcgatgctgaaaagtctatgttgtcaaagctcaagcatgagtgcggtgcagccttcaccagcaagctggaaggcatgttcaaggacatggagctttcgaaggacatcatggttcatttcaagcagcatatgcagaatcagagtgactcaggccctatagacctcacagtgaacatactcacaatgggctactggccaacatacacgcccatggaagtgcacataaccccagaaatgattaaacttcaggaagtatctaaggcatttctatcttggaaagcacagtggtcgaaaacttcagtggcaaactactttgggacatgctgttttaaaagcggagtttaaagaagggaagaaggaatccaggtgtccctcttccagacactggtgctcctcatgttcaacgagggagatggcttcagctttgaggagataaaaatggccacggggactagaggatagtgaattgcgcagaacgctgcagtccctgtgcctgtggcaaagcacgtgtgctgattaaaagtcccaaaggaaaggaagtggaagatggagacaagttcatttttaatggagagttcaagcacaagttgtttagaataaagatcaatcaaattcagatgaaggaaactgttgaggaacaggttagcaccactgagagagtgtttcaggatagacaatatcagattgatgctgctatcgtcagaataatgaagatgagaaagactctgtggtcataatcttctagtttctgaattatataatcagctgaaatttccagtaaagcctggagatttgaaaaagagaattgaatctctgatagacagagactatatggagagagacaaagacaatccgaatcatgtaccctacgtggcctgacgcatctgcagacggttccccttcatgaaacactagaatgtaccctcagagcaggaagcacacctgtgccatttctgggactctgattgatccagctgtggacattggaaggcgaaggaagggaggtggctcctgggtcatctttcacaaggctcaagacttcaacctgcagatgtatctttttccctccagtttttcctctagttcttttaggcatttaaattgtttctgttactctgtgcaaaataactttgagattggacaagaagatgttactaaagagaagttcctttaaaaggtcttgttcttgtgtcaaaaagctgcaagtttggtttgttctcgtgtgtgatcatgagtgcacaatgaagaagaccctagatgctgcattttttagctctgaagattccttaggtatccctgaagacagctcgctcagatgatcagcatttagagtgaaaacaagggcccttcatgggtgaacattagaaagagccaagggttcaaagctggcagaatggatgacgcaccctagccactggcccctcgctgggtcatggagttccaaaacttgtaaactttgatggctgatttttcgtaagtcaggtttctaagtgagctccctgagggtgccaaagccatggtgtccgcccatgctgcagtctgttcgtcagctgagttccttgtgaatctctgnttttagggtttggggctagtgtgtttgtgtttccataaagaggtccttggaaaccactgcaagcttttgagaaagggaataaatgccagattccaaacgatattttaagaagacagtttttgcttctctggcagtttgctggggaaagcagggcttgttgatccg

SEQ ID NO: 4059 - DNA, 879 bp, Homo Sapiens
  misc_feature (444)..(444): n is a, c, g, or t
  misc_feature (626)..(626): n is a, c, g, or t
  misc_feature (629)..(629): n is a, c, g, or t
ggggcatgcgctctcattgcagcctcggcgtttgtagaagaggagcatctgctccagatggaaaatgggtaaggaacaatcaaattcaattcgggaagaatatagaggtggtaataattggtaaaagtctgcagggttttttttaaccaaaggaaactggtttgagaaaattgtgaaatcagcattgaaatttgttacctactccaatcaagatttgcaaactacaaaaaaatcattctgaagctttcacctataaatatataccaagataatttcagataagaatgtccagcaaggaagtgaagactgctctaaaaagtgctagagatgcaatcagaaacaaagaatacaaagaagctttgaaacactgtaagacagtgttaaagcaagagaaaaataactataatgcctgggtttttattggcgttgctgcagctgaactanaacaacctgatcaggcccagagtgcctataaaaaagctgctgaattagagccagaccaattactagcttggcagggggtagcaaacttgtatgagaaatataatcacataaatgctaaggatgacttgcctggtgtttaccaaaagctcctggatctttatgagagtgttgacaagcagagnggntgtgatgtctgcaagaaacttgtggaatctatattaccaaggaaaagaaacaccctagaggtggcctccgaacatgggccacaagtttgattaaaaacccgggcaggaaacccaaggtgcaagaaaaatggaaaggaggccttccttccaccttatgggataaaaaattggacctccaggttccctggggcttggaaagggtcccagagaggggacccccgaaattaatgtgagaaacccctcccgcccc

SEQ ID NO: 4060 - DNA, 457 bp, Homo Sapiens
ggatcccccttgtaacactggaactgaaagacagtgatgaaagctatgtcaagcattcattattctgaagaggaggagaaatgccacatacctttcccatgggacctgtggtggaatgaatccatacttctgcctcacttcgagcagacttttgttctcggcgctcctcacgatggagtttcatgcttcattttcacatctctctgcacaattagattgggagctccttgagggcagagtacgtgccttaatctttatctttgtaatgccacaatgaacagagtgcctcctggtacactgtaggagcttaagaaatactcactgaatgcatgaatgaatgaatgaacaaatgaaggaatgactaaggatgtttgtagtgctataatatagaatgggatttactctgctttaccagttagtttcataataaacaaatagtctgtatcgcctggtgaaa

SEQ ID NO: 4061 - DNA, 1063 bp, Homo Sapiens
  misc_feature (777)..(908): n is a, c, g, or t
  misc_feature (934)..(961): n is a, c, g, or t
  misc_feature (980)..(980): n is a, c, g, or t
gggcttgttgaagaatcgtggaaggaggaggaggaggctgggcatcatctctcagcctggaggaggagacgccatgccgggggctgggatcaccatgccccttgcccgtctcgcaccttgctgcttgatcagggccaaagcggtcagtgagaaggaagtggactctggaaacgacatttatggcaaccctatcaagaggatccagtatgagatcaagcagataaagatgttcaaagggcctgagaaggatatagagtttatctacacggccccctcctcggcagtgtgtggggtctcgctggacgttggaggaaagaaggaatatctcattgcaggaaaggccgagggggacggcaagatgcacatcaccctctgtgacttcatcgtgccctgggacaccctgagcaccacccagaagaagagcctgaaccacaggtaccagatgggctgcgagtgcaagatcacgcgctgccccatgatcccgtgctacatctcctccccggacgagtgcctctggatggactgggtcacagagaagaacatcaacgggcaccaggccaagttcttcgcctgcatcaagagaagtgacggctcctgtgcgtggtaccgcggcgcggcgccccccaagcaggagtttctcgacatcgaggacccataagcaggcctccaacgcccctgtggccaactgcaaaaaaagcctccaagggtttcgactggtccagctctgacatcccttcctggaaacagcatgaataaaacactcatcccatgggtccnnnnnnnnnnnnnnnnnnnnnnnnnnnnnnnnnnnnnnnnnnnnnnnnnnnnnnnnnnnnnnnnnnnnnnnnnnnnnnnnnnnnnnnnnnnnnnnnnnnnnnnnnnnnnnnnnnnnnnnnnnnnnnnnnnnntcttggccggccccccccgcccctcnnnnnnnnnnnnnnnnnnnnnnnnnnnnggcgcccgcgggcccccanaggggaaaggggaaacggggcccataaagtgggttccccaagagaaaacccgggggaacaagaacaaaagggggtgggggatt

SEQ ID NO: 4062 - DNA, 1193 bp, Homo Sapiens
  misc_feature (861)..(877): n is a, c, g, or t
  misc_feature (891)..(985): n is a, c, g, or t
aatcagaaatgctaggtaattttaaacttcagtaagttaaaaataattattgtctctttttaaaaaatgaagagtgtggaatagatggtctcacagataactaatggtgcaaaggagttaagcaacacatcccaactattcccaagttatggcacacatggaaagcgatgctgtaggcacactgaggaaaatggacaaaggtggttctggcccagaggctccagccacccaggccacctttggatgtagcaaggggtgaggggatctgtatctaggcctgtctgtgatttgcagtgccagtgtgcatgcctcaggaagctctaatcaaggagaggtaaaatgacttaagtcacaaaatctagttactggcagctttgggaaataaatgcaaatatcttcttgtcagtgtattttctactaatcacaactgctctacatgctttctggctctaaaattcaatcatatatgcagacatgtatctatatttaagaataaagaggatttcctaacatgcttgaactaaagacacctaagctagcaatttacatcaaagctgaaaattaaaaacagttcttagcataaacaaatatttgactatcttctatttttcagacttgctattcttttaaatttagtttgtaagctctttgaacagtaacaatcttttgcacagtattttgtatatctctggtagtcagtaaatagagagtaacaataaattacactataaaggaaaaaactagacaaagtaaatccacattctaaataattctgaaggtgaaaaaagtgttaagtgttgattttgtagaggtagagaagattccctctttaaatgtcaaattcctgctagctaaattgannnnnnnnnnnnnnnnngagacagggtctcnnnnnnnnnnnnnnnnnnnnnnnnnnnnnnnnnnnnnnnnnnnnnnnnnnnnnnnnnnnnnnnnnnnnnnnnnnnnnnnnnnnnnnnnnnnnnnngacatcttaatatgcactatctactatattataggctcttgagaaacatttcattccacagaatggttctgatttatccccagtgttgatgctaccaagaggaaaagattcactacaaaggtagttcaccttttaccaagtgtcaaatattccatattacctttgaaaaccagagattataggtattaatcccactgattcaactgtg

SEQ ID NO: 4063 - DNA, 844 bp, Homo Sapiens
  misc_feature (306)..(323): n is a, c, g, or t
  misc_feature (580)..(757): n is a, c, g, or t
agtagtgtttccaagagtattagggagaaccccattaggggtttggcgagaaacttccccccgaggggccacaggtggagagtgaaaaaaaggcttgtaggcaagccacaagggccaggggtgtaaggattcccctgggagggcctgaccggccttgggggtgggggccccccagtgaagccccaggccccctggaggggcttttagttcttggtccccttgccagaggctcagaaaatggaggtgggctccttgtgccttggtcccagcaatggttcccctgaaaaagaaccccataaggattannnnnnnnnnnnnnnnnnatgtgtttctggtgttattgtagataatctccccaacagtgggtgagcttggggtgagggaacctggctgctgggagtggaaacgccctagatcctccatcctgtacagctgcccagtggacatacctctctccccagcaatttctcaaggcacaagataaagtaaggggcaaatacaaagataaagctgtgaggcaggagggtctgagtctgcctctaaaggagtagccaagactcctgtttctctgcatttttcnnnnnnnnnnnnnnnnnnnnnnnnnnnnnnnnnnnnnnnnnnnnnnnnnnnnnnnnnnnnnnnnnnnnnnnnnnnnnnnnnnnnnnnnnnnnnnnnnnnnnnnnnnnnnnnnnnnnnnnnnnnnnnnnnnnnnnnnnnnnnnnnnnnnnnnnnnnnnnnnnnnnnnnnnnnnnnnnnntggggtccctgttgcccagcatgcctggaccctcaacacttaatagtgataataacatatatccaacccttggtaaatgccaggact

SEQ ID NO: 4064 - DNA, 854 bp, Homo Sapiens
cccggaggatgctgctgagccccggcactgcctgctcggggacactggggttgggaaatcaagcatcgtgtgtcgatttgtccaggatcactttgaccacaacatcagccctactattggggcatcttttatgaccaaaactgtgccttgtggaaatgaacttcacaagttcctcatctgggacactgctggtcaggaacggtttcattcattggctcccatgtactatcgaggctcagctgcagctgttatcgtgtatgatattaccaagcaggattcattttataccttgaagaaatgggtcaaggagctgaaagaacatggtccagaaaacatttgtaatggccatcgctggaaacaagtgcgacctctcagatattagggaggttcccctgaaggatgctaaggaatacgctgaatccataggtgccatcgtggttgagacaagtgcaaaaaatgctattaatatcgaagagctctttcaaggaatcagccgccagatcccacccttggacccccatgaaaatggaaacaatggaacaatcaaagttgagaagccaaccatgcaagccagccgccggtgctgttgacccaagggccgtggtccacggtacttgaagaagccagagcccacatcctgtgcactgctgaaggaccctacgctcggtggcctggcacctcactttgagaagagtgagcacactggctttgcatcctggaagacctgcagggggcggggcaggaaatgtacctgaaaaggattttagaaaaccctgggaaaacccaccacaccaccacaaaatggcctttagtgtatgaaatgcacatggaggggatgtagttgcatttttgct

SEQ ID NO: 4065 - DNA, 471 bp, Homo Sapiens
  misc_feature (181)..(194): n is a, c, g, or t
ttattgttcctaagaatttggcacaagtcagagataattgcctatactaagaatctatactgcagaatatagtgtatcaaaaacttttttcttttaaattattaaagtgtcttttatacttttatgaaatcattggtagccccccaagtgtttaataactggcattaagcttagagggtgnnnnnnnnnnnnnngattgatagtatttttcataatgaaaaaactgaagagatacgtgaatgaaaccaggccatagctgtcataaatctttgacttttgaatatttacattcttcagtataattttttataatcctcaattatgaaccaccttgtttataggacaaaaaaatttaaccaattttattgaaacgaatttcactgtgtaaaagttggtttgattcaaacatgtagagaagttgtagattcaagatatatgatttctctatggaaataaaaatatttgttagtg

SEQ ID NO: 4066 - DNA, 802 bp, Homo Sapiens
  misc_feature (30)..(31): n is a, c, g, or t
  misc_feature (668)..(678): n is a, c, g, or t
gaatcgcctgcctttggctccccaaagtgnntgggataacagggcgtgagcccatcgtgcccgggccaaataaaccatttcttttatccaggaaagttaaaaagtggaaggggtggaaagaatataacccaacaactccaatgctagagataaaggtttgtttcatgaggaggaaaactctccttttagaggaaaatatggaacatctcctagatagggatgactacatgcatttccttttctcatacatctcaggacacaacacctggctactaaagtgactttgagcaagaacttaaagcagatcaacacttaaaaaggctctaaaataaaaaactgaatttgaaattgaagattagcttagacaaaaatatactcagaacactgaaaatctccatctttagaccgattttcagcttactccaagcagggcaggagtaatctctgaagcaggtgactgggcttagggacaacaatacttttaacaaaatacctcagataattaattgatcaaggacaatttgaacaggctccagagaaaagctgatttatagcccatacaaaggacccaatttaaaaaagcctatttgatttaagaaggaaacaaccagctttgagtagacagaatgggcctgtaataggtaaaggaacaaatgaagtaacaaagnnnnnnnnnnnttcctggggatctaaaaatacctgatgatgcatgctgggcacaggctacacacaaaggctcttttctgaagccaaatttcctacaatgctatcagcactgggcaaaaggatttctaaaatgacc

SEQ ID NO: 4067 - DNA, 358 bp, Homo Sapiens
atgtaacacccctcttgaaggtcgctgacagcttcgataataaactattaacaagtagtttctatgcacagaaatatatgtacagtatgagcacgatctttactttatattaatttttaatgtcctatcatgtggattaaatgcataacgggcatataaaaatgaggaatcttccctaagtaatcaaaacatatgccttattgagaagaaaattttagaagctgattaaaatccttcagcactagctttgcaattaattctggagaaataccttgacacatcttatagtatttgagtttccttataactttaccttccttcaaacagaagctacctatgtgcaaataaactggttgtt

SEQ ID NO: 4068 - DNA, 179 bp, Homo Sapiens
gcactaggcaccgtgctggccggcaaatcctgttttctagactacatctggaatttgatcacttcccatcaatcctgtcactcccactcagattattttggtaatgtcctaactgacctacttgtgtctgccctcatccctctattcatcccagcctccagggcgagcctttgaacaca

SEQ ID NO: 4069 - DNA, 1012 bp, Homo Sapiens
  misc_feature (48)..(79): n is a, c, g, or t
  misc_feature (596)..(612): n is a, c, g, or t
  misc_feature (895)..(903): n is a, c, g, or t
cctggtacgggagtgggaagatagaaatagacgctctagtgggcatcnnnnnnnnnnnnnnnnnnnnnnnnnnnnnnnntctcgtagggagaaggaagaagcccgaggaaaggaaaagcctgaggtgacagacagggcaggtggtaacaaaaccgttgaacctcccattagccaagtgggaaatgtagacactgcttcagaacttgagaagggggtgtctgaggctgcagtcctaaagccttctgaagagttacctgctgaggctacctcatccgttgaacccgaaaaggattctggctcagcagcagaggctcctcgttagagactggaatttgtgaaaatgtgacagtgacacttcctggagtgtagagcttgaggtgtacagatgctgtattatatccgctcccgctgtactgcagccccgcgccagctggtggggaactgtaagcaatttgattgcttcccttctatttaaaaatagccacaaaataacaaaaaatactgaaaatatgaataaatattaccctttttgctgtaactttttaaaagttttgactttaaaaagtttacaaatcgtaattagaagtgctctctannnnnnnnnnnnnnnnnaatttaagacaaggtaacggtgaaagctcctcaaaacaatagggatgtttttaataaactccattttcgtaacaaactttaaaaaataaaaccaccccccccacgtaattcctaaagcgcatcccccctcttcctcaccctcccccttatcaacctctccaaaccactcccttgccaacctcagccaccactatgcgctcgtgcacaataaacgctacctcctcagtaaatatcccctcggcgggtgtcccccgccgctccttggaaaatttctcttttaaannnnnnnnntttcgggggcccgtcgcccccctttatggtataacacaacacgggggtcgcaattttgtttccccacagagaaatccccggcgaattctaaactagggccctggtagct

SEQ ID NO: 4070 - DNA, 474 bp, Homo Sapiens
agtaagcccttggtgaatattcactattagtgatcatcatcatcatattgtttcccacaccctctggatcaagcgtctgaggcatttcagggcaagtagggtttgggataccctggaggtgcgggctggagctagggcagagcaatgacctggacaccccacgccacttcaaggccctaggctagaggcagcttgtgcagcacgagtgtgcctccaacacagtccagaagaggagcaaccctcaggaaatggcccaggacaccttcatagcggcctttttcctcccacctggagaaggtaaccagacatcgtgtcatcgctgcttctctcatggccctgacattcaaacaaaaaccctagaggtgcactgtgagcccaaacatgacatggggacacccttcagacaccccatgactgccaccttgacctggggacacccttcagccaccccatgactgacactttgcccaagag

SEQ ID NO: 4071 - DNA, 842 bp, Homo Sapiens
gggatacttgtgcggttccaagtgtggagaaagcggctctgggtctagattgagggatactccccctttccaccatgggcaagaagggcaaagttggcaagagccgacgagacaagttttatcacttggcgaaggagacgggttaccgttcccgatctgctttcaagctgatccagctcaatcgccgctttcagttcctgcagaaagcccgagccttgctggacctgtgtgctgcgccagggggatggctgcaggtagctgccaagtttatgcctgtatccagccttattgtgggagtggacctggttccaatcaagcctctccccaatgtggtgactctccagcaggacatcacaacagaacgttggaagcaggcccctgaggaaggagctgaagaccctggaaggttgatgttgtgcctcaatgatggggcccccaacgttggggctagctggggcccatgatgcttacctcccgagccccatttgaccctgatgggctctacctatttggcattgctgacttttcgggccccgtggggggtcaaccttccatcccaaagggcttttcccgttcctccggaactaatcaacccctcctggtactgggattcctttccgccggcttggttcccccccgcggtccaaggacccaccacaggccccccaaggccctctgggcccatggaatacctgcacgaaggatttctttggtcggcgctgccccaagggattttcctggggccccccttggaccagtgggtgtggacacggcaaagcttctctttttggaacccccccaaattcttggcccatttttaacgggaggcggtctgatctacg

SEQ ID NO: 4072 - DNA, 252 bp, Homo Sapiens
tttcctgcatggtcgatctcctgagtatcccccctcttgaggtgctgacaggcacacactccctctctccagctcctggtgtattccagcgccttccttggtatctgcctgccgcttcacattgccttttctctcttctattttgtctcttacaataacacctgtcattgcatttagggcccatcttaagttcaggatgatcccacctcaagacccttaattacatctgaaaaaacactttttccaaataaa

SEQ ID NO: 4073 - DNA, 988 bp, Homo Sapiens
aaacctatcggctaggtagcgaggcctgggtgttgaattcggcacgaggcgaggatccgctcgggagcctcccctggccagagagcaggtgattagtctgccccgcgaccggccccagccacgacgcggacatcgccccctctgtctgggccgctgtcactcacgcgccaaagggccacggagaacagaaggggcgggccggggcgggccgggcgagcggaggcggggacttgcgccgtcctgaggctgcctcctagggtccggccggcgctggagctgcggatttagattgtcactgccacctcggtcggtgcttacttcgctgccagctggtcgtcgccatgaacccggacctgcgcagggagcgggattccgccagcttcaacccggagctgcttacacacatcctggacggcagccccgagaaaacccggcgccgccgagagatcgagaacatgatcctgaacgacccagacttccagcatgaggacttgaacttcctcactcgcagccagcgttatgaggtggctgtcaggaaaagtgccatcatggtgaagaagatgagggagtttggcatcgctgaccctgatgaaattatgtggtttaaaaattttgtgcaccgagggcggcctgagcctctggatcttcacttgggcatgttcctgcccaccttgcttcaccaggcaactgcggagcagcaggagcgcttcttcatgcccgcctggaacttggagatcattggcacttatgcccagacagagatgggtcatggaactcaccttcgaggcttggaaaccacagccacgtatgaccctgaaacccaggagttcattctcaacagtcctactgtgacctccattaaatggtggcctgggtggggcttgggaaagacttcaaatcatgcaatagttcttggcccagctcatcactaaggggaaaatgcctatgggattacatgcccttttatcgtaacctattcctggaaatc

SEQ ID NO: 4074 - DNA, 754 bp, Homo Sapiens
gggcggagcaagacggtcggggctgcttgctaactccaggaacaggtttaagtttgagagactgaagtaggtctacacagtaggaactcatgtcatttcttgtaagtaaaccagagcgaatcaggcggtgggtctcggaaaagttcattgttgagggcttaagagatttggaactatttggagaccaatgatgcgagctcagagtcaatagcatccttctctaaacaggaggtcatgagtagctttctgccagagggagggtgttacgagctgctcactgtgataggcaaaggatttgaggacctgatgactgtgaatctagcaaggtacaaaccaacaggagagtacgtgactgtacggaggattaacctagaagcttgttccaatgagatggtaacattcttgcagggcgagctgcatgtctccaaactcttcaaccatcccaatatcgtgccatatcgagccacttttattgcagacaatgagctgtgggttgtcacatcattcatggcatacggttctgcaaaagatctcatctgtacacacttcatggatggcatgaatgagctggcgattgcttacatcctgcagggggtgctgaaggccctcgactacatccaccacatgggatatgtacacaggagtgtcaaagcccagaccacattcctgatctctgtggatgggaagggtctacctgtctggtttgcgcaacaaacctcagtcatgataagccatgggcagcggcagcgagtgg

SEQ ID NO: 4075 - DNA, 692 bp, Homo Sapiens
  misc_feature (101)..(173): n is a, c, g, or t
  misc_feature (522)..(636): n is a, c, g, or t
aaaccccttcccacagtgtgtggaagcaacctccagccgtttacctgatgtagatactggttgctgagtttttgtacattctaaagaattgtgacctaaannnnnnnnnnnnnnnnnnnnnnnnnnnnnnnnnnnnnnnnnnnnnnnnnnnnnnnnnnnnnnnnnnnnnnnnntttcccacccagttgtctctcagacctcattacggttattcttcttacatgtgttccactttagctgcttgggtccccatgcttttctcaacacacacgctggtgctccttcttgcctttgcattgtcgtcccctctcctgggaacatgcctcctttagtgacctgaatggctcaccacttcacctcctgtaggtctttgctttggtgtcaccttctcagtgtggcattccctggccatcctatttgacactggccctacttctttccagagttctatctttcctgcttgattttcctctgttgtactcatccctacccacatacttggtattcctcttttttaatttnnnnnnnnnnnnnnnnnnnnnnnnnnnnnnnnnnnnnnnnnnnnnnnnnnnnnnnnnnnnnnnnnnnnnnnnnnnnnnnnnnnnnnnnnnnnnnnnnnnnnnnnnnnnnnnnnnncatttttttaagatctctccccagtacctagcacattgtacctggtgcataataca

SEQ ID NO: 4076 - DNA, 229 bp, Homo Sapiens
cccactcactttctcctaagcccagccatgcttgctcctttctgatcccagagccatgccctgataatagaggggttttgtttgtttttatttatgttctatttactcacatgaatgtacataaaatatgaagaattccatctgaattctgagataccttccagcctgggccgaagagagcctcaggttgactgcagccccatcactgtggggaaggggtggtatactc

SEQ ID NO: 4077 - DNA, 895 bp, Homo Sapiens
  misc_feature (662)..(669): n is a, c, g, or t
  misc_feature (674)..(748): n is a, c, g, or t
  misc_feature (750)..(750): n is a, c, g, or t
  misc_feature (754)..(759): n is a, c, g, or t
  misc_feature (762)..(807): n is a, c, g, or t
  misc_feature (809)..(818): n is a, c, g, or t
  misc_feature (826)..(842): n is a, c, g, or t
gggagcgaagaaaatgtaggcgcgaaagtgaaaagtgaggcagctagttcttcctattccattctcgaccaacctgccctttcttaatatgactagtggtcttgatgctagagtcaacttactctgttgctggcatttagcacgagaactaggaggaaccatatgaaaaagatcaggcttctcgtgacgttccatccccacaaacacatttaccagcatactccaaactgtttctgatgtgttccatgagaaaaggattgtttgctcaaaaagcttggaaaatactacacactccctttctccttctggagatcaacccacattagagtgtctaaggactcctgagaattcctgttacagtaaacaaaactaacgtaatctaccatttcctacactatttgagcatggaaatcatagtccccactctgtgaaaacttaacgctttttggaagacatttctgtagcatgtcagtttggagaaatgatgagctacgccttgatgaaagaaccgtgttggtgctgctaagtttagccattatggtttttcctttctctctcttaagccttattcttcaactaaaagatgaggattaagagcaagaagttgggggggatgtgaaaataattttatgaggttgtctaaaataaagagtagtttcttnnnnnnnnaaaannnnnnnnnnnnnnnnnnnnnnnnnnnnnnnnnnnnnnnnnnnnnnnnnnnnnnnnnnnnnnnnnnnnnnnnnnnanaaannnnnnaannnnnnnnnnnnnnnnnnnnnnnnnnnnnnnnnnnnnnnnnnnnnnannnnnnnnnntttggggnnnnnnnnnnnnnnnnnacaaaaaattttttaaacccccctttttggggggggcgggcgcccccacaaag

SEQ ID NO: 4078 - DNA, 296 bp, Homo Sapiens
ccctcccccacagtgagtttagaactattggaggataagttaggatattttatctctccttgggagaactagcatccatttagatagaagataagctgaattttttgtgtgttgttttagaaaaggagaaccaaataaaagagagtttaaatctacattacaacccttgaagaaatgtgaggtaagccttaacaacatttgaataactttaaatggttactattagagaaggcttttttagtaacacaattggagtgccgggaacaatgtgaatagagaaatgtgtgagagtagtg

SEQ ID NO: 4079 - DNA, 1085 bp, Homo Sapiens
tatgtagacaagccagtgagcctctaatgctactgcgccactgggggctcccaggcctgggcaacttagctgcaactggcaaaggagaagggtagtttgaggtgtgacaccagtttgctccagaaagtttaaggggtctgtttctcatctccatggacatcttcaacagcttcacctgacaacgactgttcctcatgaagaagccacttgtgttttaagcagaggcaacctctctcttctcctctgtttcgtgaaggcaggggacacagatgggagagatcgagccaagtcagcctactgtcggttaatatggtataatgcatggctttgtgcacagcccagtgtgggattacagctttgggatgaccgcttacaaagttctgtttggttagtattggcatagtttttctatatagccataaatgcgtatatatacccatagggctagatctgtatcttagtgtagcgatgtatacatatacacatccacctacatgttgaagggcctaaccagccttgggagtattgactggtcccttacctcttatggctaagtctttgactgtgttcatttaccaagttgacccagtttgtcttttaggttaagtaagactcgagagtaaaggcaaggaggggggccagcctctgaatgcggccacggatgccttgctgctgcaaccctttccccagctgtccactgaaacgtgaagtcctgttttgaatgccaaacccaccattcactggtgctgactacatagaatggggttgagagaagatcagtttgggcttcacagtgtcatttgaaaacgttttttgttttgttttgtaattattgtggaaaactttcaagtgaacagaaggatggtgtcctactgtggatgagggatgaacaaggggatggctttgatccaatggagcctgggaggtgtgcccagaaagcttgtctgtagcgggttttgtgagagtgaacactttccactttttgacaccttatcctgatgtatggttccaggatttggattttgattttccaaatgtagcttgaaatttcaataaactttgctctgtttttctaaaaataaaaa

SEQ ID NO: 4080 - DNA, 183 bp, Homo Sapiens
gttagagaacagtcactgatggtcccagaaccaagattcaagtctagatctcccagattccaggattcccagacttgtaactacctcaagagtgtttgcccaatgaatgctatcacagtcctgaaagaatgcactggcttcttgaaaagcagagtgtactctgcctctaacctgcttgtgctg

SEQ ID NO: 4081 - DNA, 784 bp, Homo Sapiens
  misc_feature (583)..(584): n is a, c, g, or t
  misc_feature (604)..(605): n is a, c, g, or t
gggaccccttagacctcgtggcgctcgcagagcaggtgcagaaggctgatgaattcatccgagcaaatgccaccaacaagctgacagtcatagctgagcaaatccaacatttgcaagaacaagccaggaaggtactggaagatgctcacagagatgccaacctgcaccatgtagcttgtaatatagtgaaaaaacctggcaacatttactatctctataaacgggagagtggtcagcagtatttttccatcatttctccaaaggaatgggggacaagttgtccacatgacttccttggtgcctacaaactacagcatgacttgtcctggactccgtatgaggacattgagaagcaagatgctaaaatcagcatgatggacacgttgctaagccagtcagtggccctgcctccgtgcactgaacccaacttccagggactgactcactgagagtgggctttgacaaacagctctcacaggacctggctgtcaacctccttgttgcccccactgttgccttgagaattgaagacatgtaggtgactcacaaacttcttggaaagagaccctgtgtgaatgttccnncccattcccccaccccacanntcaaaacatggtcggccgccctccggcccccgaagaaagtttttctaaaaccatttcgttttggcgcggcggggcccccgtagggtaaaggggaacttgggtcataacgcgtgtttcccccaggaaaaaccctgggtcccttgaccaaggggccttggggaatcccctcccccaaatat

SEQ ID NO: 4082 - DNA, 648 bp, Homo Sapiens
  misc_feature (425)..(473): n is a, c, g, or t
ggggccgcgccgtagaccgcgctgcacgccggcggcagccatggcggatgtgtcagagaggacactgcagttgtccgtgctagtagccttcgcttctggagtactcctgggctggcaggcgaaccgactgcggaggcgctacttggactggaggaaaaggaggctgcaggacaagctggcggcgacgcagaagaagctggacctggcctgagactctgcgccttccgccccattctgtccccctcatggccaccttgccatgtccgcgccggagccccggtccgccggcgcccagaaccaggcttgccacacagtccccgcctgccatggccggctcttcctggagtgttgcttgttgaagatgcatatagactaccggaaagaaatgacttcttcttgcactttatgaatcaattttatttttnnnnnnnnnnnnnnnnnnnnnnnnnnnnnnnnnnnnnnnnnnnnnnnnnccgtgtcgggccgcctcgggcccttggagaatgctttccaaaacccattccatttgggcgccgcgggccccaagatacggtaaagggtaacaatgggccccttaagcgtggttttccctaagggaaaaattccgggtccacttgaacatagggggcttgggaactttctccaccc

SEQ ID NO: 4083 - DNA, 827 bp, Homo Sapiens
ctgtcccgctcttgctacggtggcctggaggagtggcgaaaccggaacagagaatttatcacttctgggactcacagtcgtgatgtctttcaagagggaaggagacgattggagtcaactcaatgtgctcaaaaaaagaagagtcggggacctcctagccagttacattccagaggatgaggcgctgatgcttcgggatggacgctttgcttgtgccatctgcccccatcgaccggtactggacaccctggccatgctgactgcccaccgtgcaggcaagaaacatctgtccagcttgcagcttttctatggcaagaagcagccgggaaaggaaagaaagcagaatccaaaacatcagaatgaattgagaagggaagaaaccaaagctgaggctcctctgctaactcagacacgacttatcacccagagtgctctgcacagagctccccactataacagttgctgccgccggaagtacagaccagaagcccctggtccctctgtctccctttcccctatgccaccctcagaggtcaaactccaaagtgggaagatcagtagggaacctgaacctgcggctggcccacaggccgaggagtcagcaactgtctcagcccctgcacccatgagccccacaagaagacgagccctggaccattatctcacccttcgaagctctggatggatcccagatggacgaggtcgatgggtaaaagatgaaaatgttgagtttgactctgatgaggaggaaccacctgatctccccttggactgatacccttttcccattcattcacaaataaattacaatgggtgctgagaaaaaa

SEQ ID NO: 4084 - DNA, 1181 bp, Homo Sapiens
ccacgcgtccgcgacacgggagtggcaaacgcatcctcttgccgttcccggtgtttgggccttgcctgtgacggtgggaaaagaaaatggccttgctgtgctacaaccggggctgcggtcagcgcttcgatcctgagaccaattccgacgatgcttgcacataccacccaggtgttccggtctttcacgatgcattaaagggttggtcttgctgtaagagaagaacaactgatttttctgatttcttaagcattgtaggctgtacaaaaggtagacataatagtgagaagccacctgagccagtcaaacctgaagtcaagactactgagaagaaggagctatgtgaattaaaacccaaatttcaggaacacatcattcaagcccctaagccagtagaagcaataaaaagaccaagcccagatgaaccaatgacaaatttggaattaaaaatatctgcctccctaaaacaagcacttgataaacttaaactgtcatcagggaatgaagaaaataagaaagaagaagacaatgatgaaattaagattgggacctcatgtaagaatggagggtgttcaaagacataccagggtctagagagtctagaagaagtctgtgtatatcattctggagtacctattttccatgaggggatgaaatactggagctgttgtagaagaaaaacttctgattttaatacattcttagcccaagagggctgtacaaaagggaaacacatgtggactaaaaaagatgctgggaaaaaagttgttccatgtagacatgactggcatcagactggaggtgaagttaccatttcagtatatgctaaaaactcacttccagaacttagccgaatagaagcaaatagcacattgttaaatgggcatattgtatttgaaggagaaaaggaatttgatcaaaatgtgaaattatggggtgtgattgatgttatcagacaggatatagctatgactgcaacaaagattgaaatcaccatgagaaaagctgaaccgatgcagtgggcaagccttgaactgcctgcagctaaaaagcaggaaaaacaaaaagatgacacaacagattgagtgggagatggaaggaaggctattacattatttccgaatttttaatactgtgtgaagtggtggcttgtctgctgtaatcttgtctttgcttgctta

SEQ ID NO: 4085 - DNA, 579 bp, Homo Sapiens
ggggcgtctgtcgggggcgcgctcgggtacctgtaccccacgtagtcgccggttaccgatcggactaagttccagtggtgatttacaagtcaagttaaaatgtccccagaagtggccttgaaccgaatatctccaatgctctcccctttcatatctagcgtggtccggaatggaaaagtgggactggatgctacaaactgtttgaggataactgacttaaaatctggctgcacatcattgactcctgggcccaactgtgaccgatttaaactgcacataccatatgctggagagacattaaagtgggatatcattttcaatgcccaatacccagaactgcctcccgattttatctttggagaagatgctgaattcctgccagacccctcagctttgcagaatcttgcctcctggaatccttcaaatcctgaatgtctcttacttgtggtgaaggaacttgtgcaacaatatcaccaattccaatgtagccgcctccgggagagctcccgcctcatgtttgaataccagacattactggaggagccacagtatggagagaacatggaaatttatgctggg

SEQ ID NO: 4086 - DNA, 838 bp, Homo Sapiens
ggggccgaaacttccgccgccgcgtccgccgcctccggaactaaacggggtgaggtcacattcggttatctctaacgttggaaaacgatggagctaacacccattatggagattaaccacttttcatcaggtttttaacttaagtcgtgaggaatacaacggtgaacacaagattcattttattttcatcaccatgggacgtatcctgttgttgagttctctgggtcagacctctgaagacttctcagatggatcctagtctctgggcttgccctgaaattactcgctgctcagggagagagttgaaatggttggcatcctcccactctgttgctccggctgtgtcccctcgctctgttgttccagctatgtcccctctgttgctccaactgcagctcattctgttagagctcctcattcagctggtcactgtggccagagggtgttggcctgctcccttcctcaagtattcttaaagccatggatttttgtggagcatttttcttcctggctctcccttgagttattttcctttcttcgccatcttgggactcttctttgtgcttgcggacatcggttgagaagaagacttccttctttccttgtctccttggtggttgactcgtgggttgctccttcaaaactggactggaagctcttgggttttctccttcatcttcaacaagtcagtctctctcaagggtctcacgttgcaacattcttaccagagggcattgggccctggagttccagttccaggggtctggaaaatcaacctcagctcaacaatctcatgccgggttgggcaatttgtcagcagaaaaccgatgccctgccc

SEQ ID NO: 4087 - DNA, 965 bp, Homo Sapiens
  misc_feature (344)..(344): n is a, c, g, or t
ggggcttttgtaagccaagggaagagatggtgttgagtggaaaatacaaatctggggaacaaattcttcgtttggccaatgagagatttgctgttccggaaatactctttaatccttctgatataggcattcaagaaatgggaattccagaagctattgtctattcaattcaaaatctacctgaagaaatgcagccgcatttttttaagaacattgtcttgacaggaggaaattcccttttcccaggatttagggatcgggtttactcagaagttcgatgtcttactccaacagattatgatgtttctgttgtgctgcctgaaaaccctattacttatgcctgngaaggtggaaaattgatatcagagaatgatgattttgaagatatggtggtaacaagagaagattacgaagaaaatggacatagcgtctgtgaagagaaatttgatatttaagcaacatttttgaatgaaagttgtgaccataaggtttaatttcaaagttccttttaaaaaaggttaaggaactgtgttaccttttgtcctaagaaaaaggcttgaatttatgtaaatactttgatcgattgctaattttcaaaggcttcttaggtaggttactacagtaaactgtaactcagtccacattttcatttaggagctagactaccataacaatgcttatgctgtttccaagggtaggttatttttcattaaaagaagaatgaatgcattttaagtttaattcttcatagctgaaagcacaaatttaacggcttcactggacagttttccttagaaggtagttttgtgtgactgtgactaaactattttattttaaaatgtcattcttatttatacattctaaagttggaaagactgatcttatatgtgtataatgtttattttgtacctagagtacatttaaaagggtggagactaagctaataaagtttttttggccactac

SEQ ID NO: 4088 - DNA, 1600 bp, Homo Sapiens
  misc_feature (218)..(218): n is a, c, g, or t
  misc_feature (429)..(517): n is a, c, g, or t
  misc_feature (530)..(552): n is a, c, g, or t
cctcccccaaatttaaaatgttattaaatgcaaaggggttgggtaaggactttaaagatttccccataaccgtccccttactaggttaagttcttcttggcttccctcctaattaggtggaatccaatccagccttcaaggtatttcaaaggaaagtcaaatcttaaagccttgcccaggcccaaaagacaaaagccagcccaggacctgaccacccngtatcctcttggtggcaatctgctgaagccagatgagttctgcttttaaattccaatcctattctgccactgaaactaggcctgggcaaccactcttaatcattaacatatcaaaaggagtatctcctctgagaaaagagcttttctcaggttctagaagctagcttttacaaaagacgtcttcaaataggggccgggtgcagtggctcannnnnnnnnnnnnnnnnnnnnnnnnnnnnnnnnnnnnnnnnnnnnnnnnnnnnnnnnnnnnnnnnnnnnnnnnnnnnnnnnnnnnnnnnatctatttctacnnnnnnnnnnnnnnnnnnnnnnnttatgtcctaaaatattaaagggtcattaaaaggcacaactagaacttggaactctggggaaatctagtgcaacaaccccttgccggagagaaagatcctagaaacagctcttgaattgacaggtcagaagtgttttataataaaaacgataacaactcttcaataatcatttgagaaaatcagactgttaagccattttctcccatgaacaggacactgacctgcccacatcttgaagcatattctgttgtggaagtgggttggcaaagtagtctgaggcaaggcaaagaaatacaaactgagccctagaaaaggttagggaggcaaatcaaaggaaactggaatcaaacatcagcttcacatggggaaggctttaactgcataactggaatgtataaagaacacttaagaacagcccctcagtctgaggaattggctttatttagataggaactctcaaaatgggagacaagttcttctcatgttttcaatagcagtctgaatagcttttgtaaattctcttatgtcttttctcctgatctctgacactaggggagactcaagtaaaagctttgacctatcactcatcttttcctggcaagagatagtgttcttcaaagcactagcttggataaaaccaatcctgagatcctaagctggctagaaaaaacaaaatcttccccaccgctcaaacaactggcctctttccttacctttcgcaaagcaatgaacttaatgcactaggcattagcaaagggaatcgttcactagctgcttccatcactgggcctgccaatgtcccagcactccaccacctggaacacaagtgttattgccacaaagcacacccaggtgtgctatcacacacttgtgtggagatgagacaagttactaaaagattgtcagccttcaaggtcagaaataaaccggacacaaggttctacagtgccctcttgtgttcaactgaataatactcttttacatctacgttgcatcaaatcagtaccaagacgatggttagtcccttcaaggatacctaagtgacag

SEQ ID NO: 4089 - DNA, 1168 bp, Homo Sapiens
  misc_feature (1012)..(1025): n is a, c, g, or t
ggccatactcatattattcaaatatataggtggtacttttgaaacaattacattggttctcttggtttaactgaggtttatgaatattcaaacctttgctgggggaaagaaatgaaagttaatgagcatgcttgctatgagagagggatttttaatttaacttgtagttatagtttacttattgtttttagaattacttttacattttcccaactagatggcctagagtccaacattaccttttcagatgacattattgtctccataattgagtgatagctttaaaaaaaagattagttttgcttaagaagttatgttacaactgatcagccctatatgaattaactgatcagccctatatgaaacataagttgtgttataacttatcagccgtatatggaacataaatagtttctacctgcttgttagagaagctttaatttggttctaataaatacagtatggtagtgattataggaatccaggatgttgaagaaatggcataatgtctatattttggaaacagaaaggaaaagtcacttaagatagtattaagtaattaaattcctatgtcagttgccaaatctttttaaacttatgtattcaccaagcccaaaaatagattgtggctcccaggattccaattttaattggagagctaagtaagtaaagttttataactgttaggtttcttaatgatcatattttgcagttttagtaaaagggaaatattgttatacatttattaaatatacttcccccatgaagtgaaaaggttaattttgctgaatgttttaagttgaagttacttcatggatgtcatacccatgaagtgcatttggatgagatagaagaaattgttttttaaaaagtttaagtaccaaaggtagtctagtctagaacgataagttaatacgtgttggcttttctaatttgtactgtaacatccttatactttctattttaagtatatctgtttcttaagtaaacaacttagatattttccacaccnnnnnnnnnnnnnnctgatgcagagttcaggttaatattttactgcatctgataatgtattatacgtttgaagcctagtgacttttcattttgacattcttgtgatttcatatgctgtattcttcaagcaataaaattgtgatgtgttttataaaaa

SEQ ID NO: 4090 - DNA, 160 bp, Homo Sapiens
gaaggagattctcacatttatgtttcttgaccccgtagctttagtttacctgccagcaactgaacttataataaaacaacaaaaattaattaacagtaatttcttagaaacccaaagaaagcaaccttcatgaaaaacactacgccatggtgctcccact

SEQ ID NO: 4091 - DNA, 296 bp, Homo Sapiens
gtcaagctcagttgagggttaatgatgaggcaggctgatgcgggttctttgcccagtcccagggttccaagaagccttcctgggagagggggcctgagttgaatggtgcaagatgaacaagaaatggcaagatagagaaaggtggggagggcttcccaggcagaagagagagcatggctaaagggctaggggcatgaagcagcaggggacccccagccatgtagtatcactggaggatgagaataagggggagaaggagggagggagagaaggtatacttctgagggcagaactaa

SEQ ID NO: 4092 - DNA, 356 bp, Homo Sapiens
caggagtaggagagagggaggtgcagataaagtgcttgaacagtttggaagcaggaagggcagtggtgctgtgcatgttggatacagcagccacctcatttcagcagggcacacccacagtggaattctctgggcaatcatggtgctattgcaaagtctgattttcaatcccagttaattctgaagcagcccaagcatcagggaagaacaaacgtgtaaaatctcattgttctccggtatacaacaagcattttggaggcgtgtcattctggctgtttctcctcctttggaaatagactgacatttttcatagacctgttcatggttgggggtcaggtggaaggatggatgtagtt

SEQ ID NO: 4093 - DNA, 635 bp, Homo Sapiens
actcatggaggtgaatgcaggaggtgtgattgcctatatcagttcttccagctcagcctcaagccctgcctcttgtcacagtgagggttctgagaatagtttccagtgcctcctcctcttctgttccatcttctccaaatagctctaattctgataccaatggtaatcccaaggaatggtgatctcgccaatattgaaggcatcttgaagaatgatcgaatagattgttctatgaaaacataggcaaatcgagtgcacctgggatgacaaaaagtcatagtggtgtgacacgtaagtgactttggttttctaaagattgctgccattaattgcaaatggggcttattttatcagcttttcatttagggggccattatgtttctgggtacagttttcactccttgctgggtaatcatacatcagtagttagggaagaaatcagtgatgatgatagaagttataacctaggggctgtcattaattcttgcctcagagcaagacatgtgattatgtactctgcctgaccctggtccctctagggtaccctcttttactacatttcacagttacttttcttctgaactactagaactaagtctagtaactagaacagagtacttgctcactgtggggga

SEQ ID NO: 4094 - DNA, 500 bp, Homo Sapiens
agctactcacctcgaagctccatacttccaagccgcttttagtgccacctcctccagaagccttccggatgccctcggccaggatgcttctaagagtttccatagcaatccatcttttgctcagctctctgtttgctccctaagtgacttacagataaaacatagatctcctctgctgctcctgcccagtggactgacgcagcgcagtgcccggcacccactggcgcaagccctgcccagctcacagggggcctgacgggaggtgcttgggaaggggaggcttggtctgttgtcctcagaggacaggactaggtcacaggcacgtgttctgtgcgaaaagcaacaacatcctagctcgccacagtggcacagcccggtccaacccaggagcaggacctgcacgtgcccagcctgaggtgaccacgagacccccaaatccagagaagcgaccaggggttcccagtcatgacaggtttcataccgaacaggcagcgagccat

SEQ ID NO: 4095 - DNA, 450 bp, Homo Sapiens
agtgcccatgagcttgagagtcacagttctcatttcaggtctaataaacacactaacctcggcagcactggagcgtctgctggaacatcatctttatctgccactagcaaaaccctggtgccaagacgacggggtgggctgtctgctcaacaggagctggggagcaccctcaggagggagggggctccatccacccagcttcaaaaagaacttttgcatgctggcccccggggactgtgtgttctcccagacgtgaaggtggttactgtgcctaggctcagggctgggtggagtcagctcggcaggcagggaagcctgggggttggatggaaatgaatgaggtccttccagcaaatcagagtctctcctcctccccggctccatgtggacggcagattcccggccaccctagggaagggatgagggtattgagctcactgtggggaaggg

SEQ ID NO: 4096 - DNA, 343 bp, Homo Sapiens
cgttggaacatcgtgtagagatgagcactggataggggtttggaaacctggattctggtcttggttctagtgctaacaagccatgttatactggggcaagtcccttctccctgtctgtgaaaaacaaaggaactgtgttcctgaaattctctgcattgtatgatcttctacaacaaaaatgcaagctttgctaaagcagtgttgtacgccttgtctggggctgagtcctagaatggttcctggtacatggcagatgatcagggaatatttattgctactgaacagcgttatggtgtgcactggccactgaaaaggctctgagggatgtacaaagcacgtaacg

SEQ ID NO: 4097 - DNA, 420 bp, Homo Sapiens
gaggtgactcttgcaggagcctgtcccctcatcacaggctaaagaagagcagtagacagccctggacactctgaagcagaggcaagacaaacacaggcgctttgcaggctgctctgagggtctcagcccatcccccaggaggactgggatttggtatgatcaaatcctcaagccagctgggggcccaggctgaagacctggggacaggtcgattgctggaccagggcaaagaagaagccctgccatctgtgccctgtgggccttttccctggggcagcaccttgccctccccaggggatcactcacttgtcttctatgaagacggactcttcatgaggttgaatttcatgccagtttgtatttttataagtatctagaccaaaccttcaataaaccactcatctttttgttgccctcccc

SEQ ID NO: 4098 - DNA, 1123 bp, Homo Sapiens
  misc_feature (51)..(51): n is a, c, g, or t
  misc_feature (381)..(437): n is a, c, g, or t
  misc_feature (772)..(772): n is a, c, g, or t
  misc_feature (776)..(779): n is a, c, g, or t
aggggggggaggatacaagtgtggcgagattatatagtacccatactcgancgccgcgtattcttggcgttcttccccactggccgagcgtcattcgttggctcagcgagggtgtgtgtactccgcaggtctggggcgagcgggaaaaagttttgttatgagagtggggagtaagcgtggcggcgctgttctccttcaggaggtgaaggtgcggaaaagtatagccacgggggagacctcagaagttttgtaggtgaatgtaggaccacgctctcccgcgcgtatatagggttccccggcctgtctacaaccgggttttgccccgattaactagggggcgcccccggggggaaggatcacgtcttgtgtaaattgtctgtnnnnnnnnnnnnnnnnnnnnnnnnnnnnnnnnnnnnnnnnnnnnnnnnnnnnnnnnntgtagtttaatggcggccttggagggaacatttccccaacccccttaatcttttgtttggcccgggcgggattttccgtcattggaaagggccggggctcgtgggcccagcatttttgtcgtaaaaccgcgagggggggacccagggcaccccagggggatattatgtttagaaaaacattttttgaggggacagagggccgtgcccgcacaaaagggtgggggaggggaggtggaagaggtctagcggggttttttgggtgcgttaatgacggggcgggttctcgttttcatttggatttaggaagacttttgagtaaattaaagtgtgttggnaaannnncgagtcagaggctttatgtccccaaacccaaccccctctgagtattaaactataggggcattgtccctcaagctcccctctgccttggctccagagtcttcctcctcttcttccaaactgggcaggggggctgttgttattggtgaagataggcatctagccagagctgccctgactcctttagtgagtggatgatgtcggcgaaggctgacagcaggggcttggactggtactctatgccatgcttggcacacaaggactgcaccaggggagccactttgtggtaattgtgtcgaggcatcgtgggaaaaagatggtgctcaatctggaagttgaggtgtcca

SEQ ID NO: 4099 - DNA, 379 bp, Homo Sapiens
tcggtaccccccttccccacagtgagcccctcaagagcagcgtcaggggattgtggggactgttggcacacagctggctttgctaggttgaagacaatgggaggtgtggaagacttgttgacgcatttaaagaagattggagggaaaggttaggattgagagtgtttcagacagaaaaaggattatatgctgagggtaaagcacaagtacagagggttgcagatagtgcagaagtctttaaaaacaattattttaacccatacttccagggagactgaatttcttctgccagtcagtaacaccatcaacctgggagttgcccctgacccctccagtcttagctcctgctcctgtaacaaaatacccgccagggttttcc

SEQ ID NO: 4100 - DNA, 2168 bp, Homo Sapiens
gtggtacagcgtccggatatccgggatatcgtcgacccacgcgtcgcccggggttcgtagcggaggaggagcgggcgccatggcggttctactggagaccactttaggcgacgtcgtcatcgacttgtacaccgaagaacggccgcgtgcctgcttgaatttcttgaaactgtgcaaaataaaatattacaattattgccttattcacaatgtacagagggattttatcatacaaactggcgatcctacagggactggccgtggaggagagtctatctttggccaactgtatggtgatcaagcaagcttttttgaggcagaaaaagtcccaagaattaagcacaagaagaaaggcacagtgtccatggtgaataatggcagtgatcaacatggatctcagtttcttatcaccacaggagaaaatctagattatcttgatggtgtccatacggtgtttggtgaggtgacagaaggcatggacataattaagaaaattaatgagacctttgttgacaaggactttgtaccatatcaggatatcaggataaatcatacggtgattttagatgatccatttgatgaccctcctgatttattaatccctgatcgatcaccagaacctacaagggaacaattagatagtgggtcgaataggagcagatgaagaaattgatgatttcaaaggaagatcagctgaggaagtagaagaaataaaggcagaaaaagaggctaaaactcaggctatacttttggagatggtgggagacctacctgatgcagatattaaacctccagaaaatgtactgtttgtgtgtaaattgaacccagtgaccacagatgaggatctggaaataatattctctagatttgggccaataagaagttgtgaagttatccgagactggaagacaggagagtccctctgttacgcttttattgaatttgaaaaggaagaagattgtgagaaagcattcttcaaaatggacaatgtgcttatagatgacagaagaatacatgtggattttagccagtcggttgcaaaggttaaatggaaaggaaaaggtgggaaatacaccaagagtgatttcaaggagtatgaaaaagaacaggataaaccacctaatttggttctgaaagataaagtaaagcccaaacaggatacaaaatacgatcttatattagatgagcaggccgaagactcaaaatcaagtcactcacacacaagtaaaaaacacaagaagaaaacccatcactgttctgaagagaaagaagatgaggactacatgccaatcaaaaatactaatcaggatatctatagagaaatggggtttggtcactatgaagaagaagaaagctgttgggagaaacaaaagagtgaaaagagagaccgaactcagaaccgaagtcgtagccgatctcgagagagggatggccattatagtaatagtcataaatcaaaataccaaacagatctttatgaaagagaaaggagtaaaaagagagaccgaagcagaagtccaaagaagtccaaagataaagaaaaatctaagtatagatgaaagatgaagaggcagaattgagaggctaacatatttactcttgtctaacttaagagtgccaggaaagcagatgcttagattttgtgtcaaagcttgttatttttttcatactaggattatggtctttagattaatactgattatatagagcacggaaagataaagaattgaacattttctttgtatacttttttacactaattttattgttatacataaatggtagtcttcatttttgaagtcttacattttcactctttttttaatgaagtatttcatactacaaaaatacataaacgtatatataaagggataataaatgtaaatatctgtgtactcatcagccagcttaagatacagatgttgtcgacattttagaagttccctaaggccctctccctctcaaataattatttggaattttgtgtttgtcatttgtctattatagttttacaacatacgtatgtatctgtaagtgaaatgttaattttgtatgtttctgaattttatataaatggcaaaatgtttacttctgtgactttctttcatttttattgctatatagtattatataaatatactacaacttattcattcttgatggaaaaa

SEQ ID NO: 4101 - DNA, 207 bp, Homo Sapiens
ggatcaacacctgagaactgttacaccttttattttgtcttttaggaaatccctgtctttccattttttcatgtaaattttgcacagttacttgttcatatgtaaatattttactttcagaaatgaagtttttaattgctattgttttatataggattgaaagaaaattaactcctttattaaaaacaaatttatctgtaaaaaaaa

SEQ ID NO: 4102 - DNA, 780 bp, Homo Sapiens
ggggcaggcgcggtggtcggacgacagaccgtgtgtttccaaaatggcggcagcgatggatgtggataccccgagcggcaccaacagcggcgcgggcaagaagcgctttgaagtgaaaaagtggaatgcagtagccctctgggcctgggatattgtggttgataactgtgccatctgcaggaaccacattatggatctttgcatagaatgtcaagctaaccaggcgtccgctacttcagaagagtgtactgtcgcatggggagtctgtaaccatgcttttcacttccactgcatctctcgctggctcaaaacacgacaggtgtgtccattggacaacagagagtgggaattccaaaagtatgggcactaggaaaagacttcttccatcaagcttaattgttttgttattcatttaatgactttccctgctgttacctaattacaaattggatggaactgtgtttttttctgctttgttttttcagtttgctgtttctgtagccatattgtattctgtgccaaataacagtcagttggattcccgaacttccatgccccgctccttgactcctccctgtcggccgcctccggcccttccgaaaacgctttctaaacctttcctcttggcgccgccgcgcccatctaggtaaagcggaacctgggccctaagcctgcttccatagggagaaccctgggtccttgaattaggggcctcgcgattccctcacccaaataaaacaaaacgccccgcggggggcaaaccccgagcgggtttcctgg

SEQ ID NO: 4103 - DNA, 1369 bp, Homo Sapiens
  misc_feature (541)..(719): n is a, c, g, or t
  misc_feature (721)..(721): n is a, c, g, or t
  misc_feature (724)..(724): n is a, c, g, or t
  misc_feature (737)..(752): n is a, c, g, or t
  misc_feature (761)..(761): n is a, c, g, or t
  misc_feature (773)..(789): n is a, c, g, or t
  misc_feature (864)..(873): n is a, c, g, or t
  misc_feature (887)..(900): n is a, c, g, or t
  misc_feature (954)..(979): n is a, c, g, or t
  misc_feature (1008)..(1018): n is a, c, g, or t
  misc_feature (1169)..(1169): n is a, c, g, or t
  misc_feature (1172)..(1172): n is a, c, g, or t
  misc_feature (1217)..(1217): n is a, c, g, or t
aagcctcccagcacccattcagttgcatccccagggcacaggactttgatctcttctgttgccctcgctaggttctccctggtgggttagtgctttgtatctgtctctctgcccctcactaattctacacccatgagaattagacattattctccttaaatatataaggaccatataatctgtatctttttggtgtgtgtatatggtatctggcacatggatctctgattaccagcctgacatcaacaaatcccctcagttacaacgtataggttaaacaaagcttttaaaagctcatgtggtatgacctcaaggttgctaacctggtcactcatggtaattagaaactctgattggcagctttgtatttcttgactaaaaacctaaataaactgattaggttttaggcgttctttcaaagaggttcttgagaagattgagaactatcctatttggtgcttagtgaaaagattttgaattactgtacgtaccagttgttgccatttctttattaaattcagaagtttttttgccaaataannnnnnnnnnnnnnnnnnnnnnnnnnnnnnnnnnnnnnnnnnnnnnnnnnnnnnnnnnnnnnnnnnnnnnnnnnnnnnnnnnnnnnnnnnnnnnnnnnnnnnnnnnnnnnnnnnnnnnnnnnnnnnnnnnnnnnnnnnnnnnnnnnnnnnnnnnnnnnnnnnnnnnnnnnnnnnnnnnngnggngagaaggggccgnnnnnnnnnnnnnnnnaaaagaatnctccaaacaccnnnnnnnnnnnnnnnnnccccccccacggagaagaaagaaaggcgacacacgacgggcgccccaaggaaaacgcccggcgcgggcaaagacnnnnnnnnnnctactcccccaccnnnnnnnnnnnnnncggcggaccggggcacaaccaaagagggggcgtccgaagaacaagcctctgaannnnnnnnnnnnnnnnnnnnnnnnnnctctccgtggtggcggcccctccaccccnnnnnnnnnnnacggcgacccgaagcggcccgcggatgaacaataatatcgcgcgccgcccccgccgcgccgaccgctccgagaaggaggacgcgggtggggctcgatccaccaatagaacgcctccctgccccgggggagatgcgcggcgcgccccccagnggngcgggggatcgggatagcgtctgggggggtcccgcccgcggcggngagacccgcaaggcgctgggtggcgccctgctaaacaaagaaaaactattcggccccgccgcgccgccgaaaaaagcgggagggaggcgcagcacagacgggagcctgcctcactgcgggggtggccccctcgttatcaataacaacaagag

SEQ ID NO: 4104 - DNA, 753 bp, Homo Sapiens
  misc_feature (89)..(115): n is a, c, g, or t
cacaatgtgttaagtcagttgttttattaaaaaataagcactatgcttgggtttcataaaatttatacatgaatatgtacacagacacnnnnnnnnnnnnnnnnnnnnnnnnnnncacacttgctttcaagggcagtggtcctggcacccccacatacataatcaacttttcctttaaagaaaattgcttggccccaaggagaccacagttagagaaccactaataaagctgtagcccgttgcctgcaacattttcaattcgggtttcaaaaatatataaataatttaattacaaaacccaacattttttttctcttttggcacagtgaagcatcggtcaatagcaagaaatcactgaagagcctctgacatgtctctcacactcagtcatacctggaaatgccacatacgtacacggatgggggcccagaaaccccaaacagtagtcatatcatttatagtgtggaaaggttccctgatgtacttaggggggagggaagggacataaatcaatggaagttgcgacaaaaacagtagaaataagacgaagcctgggcgttaaagaaagacaaaaaaagtccttatgaagggaaggaggagcaggcttcgcaaagaaactaaaacaagaattgctttggtcctctgtaaagttataaaacacaaaggaaaatatcctggactaagtttaaatactcctgtcaaaatgctttagctttaaggcacgtttgatggagattttaataattcatcttg

SEQ ID NO: 4105 - DNA, 804 bp, Homo Sapiens
  misc_feature (331)..(345): n is a, c, g, or t
gaccattaccatttcatactgggaaaacccttgaaaagggaattcccagccagccttaggcaaacatttctttatatagaaaaagcaaatatcagtagtatttcccacaggaaaggtgatggcaactgtagcaatttgagtcaaaagttcagtcctaatttttcaaaccaaaggagaaaatcatcaaagcacttttccaatagtttaagaaaatattttatgtaatacttttgatcagatgctggcttgttttgtgtaagttgaacaaaaatgaaaggcatcagttaccatcactatcccagtttaaaagaacccaaaagttgcaacatcnnnnnnnnnnnnnnnttcaaagatgctgcctttgtataaaagtaaaaagaagaaaatcttatcacaagagctaaagaaaaagtgggtctttggatcaaaccataatatttttaaggcatgttagaaaaactttcacttatctaagttgctagtctgatcagggcataaaataaatagtgacacaaggccaactttcttctgtagccactaaggtcctcgtatgccaacaaatgtaatcttcctgttcttaagtgttttattactgtaatatctcaacaaacacattcatttgccagctgagttatatattcataccagatggatatgaatttccagtttcgggatgtccttgatgccttggtcactaaatatgcagggctgcgtggaaacactcatcaggcagccagatcagttcttattcatgtcttgacagtaaaagcccaccctgtcatcagacacaaatgtttttaaccc

SEQ ID NO: 4106 - DNA, 1608 bp, Homo Sapiens
  misc_feature (620)..(638): n is a, c, g, or t
  misc_feature (858)..(879): n is a, c, g, or t
  misc_feature (899)..(946): n is a, c, g, or t
gggccaaattttgagggggaaattaagttaacccaatgggccctttttggaaatggaggattaaatgatccccttggtttggtataaaaggaacccaagattattaataaaaatgcctcaaattgattttacactctttaatgtgtgctattacattaactgaataattcattcccttggaggctgttattaaaggtaagcctcagcttaaccaggcctgagcatcaagaataaattgcataacagaattcactgctgggagaagacatttctccctgctggtccttggtagcaataaggaaacaggaaggacagttgctttagtcagtaacatttttgagcaaaaactgttgcagagctgcatgtgattctcttggattctcaagacagcatatgagacttatatattgtttttataagaggcactgagcagagctctagatctagcagaaactctatgagaatattatgaaaaaaagactaaataaacaagttcatatagaaagaaacaagacataaaattacactgatgaaaactgtagtgtctgagtcctggtttttattgatttagtatcccttctgaattgtactatttaaaatgagatgttgccttttcttgnnnnnnnnnnnnnnnnnnnaagattttcaagtcttctggtggttagtgcgagaataatgggtagctaatacattttgcatacctacctttattcctggtaatccttgttagtggaatcatgtggatggagtgtctagaaataatagccaaatcatatatagcccttctgcccttattaaatagtattttcaaacctaaatgaataccttacaaacaaagtaagttttgctgcttggaannnnnnnnnnnnnnnnnnnnnngtgggaggaaggataagttnnnnnnnnnnnnnnnnnnnnnnnnnnnnnnnnnnnnnnnnnnnnnnnntattcttctgcacagagttgaaaattattgtgcatcttgcaggtgaagtactttcattggattgtatttccatttgttgaggcaccggcaaataataaaatttgttctaatgttttctcaagctgtacaaagctccaaggtcaaagctccccagaatacagaggaatatatacaagactgtcttctctgtgttcaccaaatatgggattcacaatgtgtcattttaataactcctacgccaccccctagccgacggtaattcatcccgccatataacctccatgtattggcatcaggatcaaaaacttctatggtcttcaagtatgttgtgccatcaaaacctcctactgccatgagctgtccattgaccactgccaggccaactccactacggcgtgatgtcatggccaccactggagaaccactggttggttctggggtcataactttcaacactattgagataagaggatccatcatggcctcctactgcatataacagatcatcaagaacactgaccccaactccgcatctccttttgctcattgaagccaccattctccattcattggtctgtggatcatatcgttcaacactggaaatggcatctccactgcaccaaccaccaactgcaaagagtacttccccgcatcggataggt

SEQ ID NO: 4107 - DNA, 1502 bp, Homo Sapiens
ggagtaaagggtggcggtccgggcctgagttcagtgggtgcagcctgcttggcgagctgaggccagacaggggggcgcctacggacggaaaagaaaagttgattacaaacgggaccatattttgcttcgaaatggaaccagcagttagcgagccaatgagagaccaagtcgcacggactcatttgacagaggacactcccaaagtgaatgctgacatagaaaaggttaaccagaatcaggccaagagatgcacagtgatcgggggctctggattcctggggcagcacatggtggagcagttgctggcaagaggatatgctgtcaatgtatttgatatccagcaagggtttgataatccccaggtgcggtactttctgaatgacctctgcagccgacagaatctggtacccagctctgaaaggtgtaaacacagttttccactgtgcgtcacccccaccatccagtaacaacaaggagctcttttatagagtgaattacattggcaccaagaatgtcattgaaacttgcaaagaggctggggttcagaaactcattttaaccagcagtgccagtgtcatctttgagggcgtcgatatcaagaatggaactgaagaccttccctatgccatgaaacccattgactactacacagagactaagatcttacaggagagggcagttctgggcgccaacgatcctgagaagaatttcttaaccacagccatccgccctcatggcattttcggcccaagggacccgcagttggtacccatcctcatcgaggcagccaggaacggcaagatgaagttcgtgattggaaatgggaagaacttggtggacttcacctttgtggagaacgtggtccatggacacatcctggcggcagagcagctctcccgagactcgacactgggtgggaaggcatttcacatcaccaatgatgagcccatccctttctggacattcctgtctcgcatcctgacaggcctcaattatgaggcccccaagtaccacatcccctactgggtggcctactacctggccctcctgctatccctgctggtgatggtgatcagtcctgtcatccagctgcagcccaccttcacacccatgcgggtcgcactggctggcacattccactactacagctgcgagagagccaaaaaggccatgggctaccagccactagtgaccatggatgatgctatggagaggaccgtgcagagctttcgccacctgcggagggtcaagtgagggacactggaggctgggctctctcgacacgttgctcagccagtcactccttcccctgtggattgatgaaataacatcctttgaatgagtttgctctgagcctgtgactccttctgctaggcagagagcgcaccctactctttccgtgacgatgagggcggcaaaaacagacatttcttccttcatggaactggatttggatttcttgaagcaggcagcttcatattataccgatttgttctctgaaa

SEQ ID NO: 4108 - DNA, 1415 bp, Homo Sapiens
  misc_feature (1090)..(1283): n is a, c, g, or t
  misc_feature (1293)..(1305): n is a, c, g, or t
  misc_feature (1328)..(1340): n is a, c, g, or t
ctggtccccttggccagtgtcctgtgagcccttcctgtggcggccttctatccggctggcttcccttggtctttcctgcccattcccctcttttcctcttgctttgctcgatggtcccggcctggagttcaatccctttctgggggtccgtcctgaaccccccgtggggtccactaagtgcctttcgtacttaccgtggcacttgtttccgtgtgtatgcggggcctttgacctaactggtgcattgtgcctttcgtgctgctgtctcctttgggcctgtcgactccttcggtactgggcctcctatctaccttctgtatccacgttcttggccctgtgcagtcgctggggctggggcctggctgtttagttgtggttcatgcctctagccgcgcggataggctagcattcctagcccacctagccttgccccggagaagctccgggaggagtaagctgtcacgactgctccctctgccagcgtggtcccgggaattctgtgaaccaggctgctgtctcctccccagaaagagtccgtataccttggagagggtcctggagagaatttcctcttccccagctaaataccctgcctgcaactgaagcagacccgggggtgtcctccctgccctctgcccagaggccacctccactcctacaaaatcaaagtaattgtccagacaagagtcactggcccctgctccagcttctgggtatccagagagcactgcacttccccaaaacggaaggggcccctgggcagtgggttttgggcaaattccctttctttgcatccacaatgtggggtcggagcttgggggcaggtcctgggagtgggaagcctcttccttgtgtctttcgctccacttttagctcatcgcaccaatattgcagacttggaaggaagcataagcttcccatttcacaaaggggaaactgaggtgcgggtgcgcgggcctggggacggccgtcccatggcttccatctgagccacctcgggaccccagcactcctggcgccctcttctcatcgcttggcctatgacaggtcaccgtgtgtaaatctttcccaataaagtgttgcacaaagnnnnnnnnnnnnnnnnnnnnnnnnnnnnnnnnnnnnnnnnnnnnnnnnnnnnnnnnnnnnnnnnnnnnnnnnnnnnnnnnnnnnnnnnnnnnnnnnnnnnnnnnnnnnnnnnnnnnnnnnnnnnnnnnnnnnnnnnnnnnnnnnnnnnnnnnnnnnnnnnnnnnnnnnnnnnnnnnnnnnnnnnnnnnnnnnnnttgggggcgnnnnnnnnnnnnnaaaaaattttttaaaaccttttnnnnnnnnnnnnnccccaaaaaacaaaggaaaggggcctattttttccccaaaaaaaccccggggaagaaaagggggtggacttcccc

SEQ ID NO: 4109 - DNA, 1028 bp, Homo Sapiens
  misc_feature (272)..(284): n is a, c, g, or t
gttacgcacataaagaccccactcaaaaggaagcttgaataatttataattttgatcgagtttcttaaaagaccctgcagaaagagtggcatttcttctgtttcaggttttgtctgagttcaaactagtgcctgtgttgttacggaaagcagcagtgtaccagtgtcactctggagtacagcgggagaaacacaaaatagtataactgaaaacattaacattcagacacactcccttctgccttccggcttaaagctgtggatgatccacgnnnnnnnnnnnnnaatgttaaatgtgtaactcagtattactgaaaaggtacccacattttgaatagtagttatcactcttaggtcagacagccatcagaattctcccacaccaagtgcatgtcagttgtggagaaaacatagcaaaaagagccgtacgctctttacagatactaatgtcaagagttaaacctcctcaggttcaacctgtgataaaagactagtgcttcccagtacttgcatggggttcactatttatagttttcttgggagtatcacaggaaaatcacaattacaccactttagaccctatgtgtagcaggtcacaacttacccttgtgtgtttagatgtgtatgaaatacctgtatacgttagtgaaagctgtttactgtaacggggaaaaccagattctttgcatctgggccctctactgattgttaaaggagttcctgtcacctgctccccccacccccgcatgcgtctgtccacttggctaacttttaatatgtgtatttttacattatgtatattcttaactggactgtctcgtttagactgtatacatcatatctgacattattgtaactaccgtgtgatcagtaagattcctgtaagaaatactgctttttaagaaaaaaaataacatgctgaggggtgacctatatcccatgtgagtggtcactttatttataggatctttaaaacatttttaatgaactaagttgaataaaggcacaattaaaaactgtcaaaaaaaa

SEQ ID NO: 4110 - DNA, 2754 bp, Homo Sapiens
  misc_feature (2283)..(2508): n is a, c, g, or t
cccggaccgtgcagttctctgcaggaccaggccatggagctcgaagtccggcgggtccgacaggcgttcctgtccggccggtcgcgacctctgcggtttcggctgcagcagctggaggccctgcggaggatggtgcaggagcgcgagaaggatatcctgacggccatcgccgccgacctgtgcaagagtgaattcaatgtgtacagtcaggaagtcattactgtccttggggaaattgattttatgcttgagaatcttcctgaatgggttactgctaaaccagttaagaagaacgtgctcaccatgctggatgaggcctatattcagccacagcctctgggagtggtgctgataatcggagcttggaattaccccttcgttctcaccattcagccactgataggagccatcgctgcaggaaatgctgtgattataaagccttctgaactgagtgaaaatacagccaagatcttggcaaagcttctccctcagtatttagaccaggatctctatattgttattaatggtggtgttgaggaaaccacggagctcctgaagcagcgatttgaccacattttctatacgggaaacactgcggttggcaaaattgtcatggaagctgctgccaagcatctgacccctgtgactcttgaactgggagggaaaagtccatgttatattgataaagattgtgacctggacattgtttgcagacgcataacctggggaaaatacatgaattgtggccaaacctgcattgcacccgactatattctctgtgaagcatccctccaaaatcaaattgtatggaagattaaggaaacagtgaaggaattttatggagaaaatataaaagagtctcctgattatgaaaggatcatcaatcttcgtcattttaagaggatactaagtttgcttgaaggacaaaagatagcttttggtggggagactgatgaggccacacgctacatagccccaacagtacttaccgatgttgatcctaaaaccaaggtgatgcaagaagaaatttttggaccaatttcttccaatactgcctggtgaaaatgtagatgaggccataaatttcataaatgaacgtgaaaagcctctggctccttatgtattttcgcataaccataagctcatcaaacggatgattgatgagacatcaagtggaggtgtcacaggcaatgacgtcattatgcacttcacgctcaactctttcccatttggaggagtgggttccagtgggatgggagcttatcacggaaaacatagttttgatactttttctcatcagcgtccctgtttattaaaaagtttaaagagagaaggtgctaacaaactcagatatcctcccaacagccagtcaaaggtggattggggaaaattttttctcttgaaacggttcaacaaagaaaaactcggtctcctgttgctcactttcctgggtattgtagccgctgtgcttgtcaaggctgaatattactgaagaatgatcctgttcaacctcctagtgcctctactgaattattcctcttttaaatggttaatgaaccaataatttttaaatcataccaaaaatagtaagaaaatatgcaaacactctgtgatcaaacttaaaagtcattgccattcatcattaataaaagttgccatttcaactacgtcccaacattccctaatagggtattcagggaacctgttcttaaattgtgcttaatctaaatcctggaactttgagctaggggaggagaatgtattagactaaatacaaactgcggggttgtaagggagtctcagaacctcactgaatccttcactccagttaatggcactgctcacttcctgcctctgctgccaccatcactgtgtgaagctttcaagagcttggtacttcccagggctaccggcagtcctctgtagtccagagaggtgagattagatcttcttggttccctgtgaggtttcaggcactaaaactctatgtggggaagggaggggttactcctcctccaatgggactcaaggacttgacctccaggagtaggcccctggtcagaagtgccatctcaccagtggtcttcattcttcctcattcattctttatcatcctgtgttctgtttagttgcaacaatctcttgtgactaatgtcactcaaagcatcttgtaaatcctagggcttcctggaagttagttgccaaagtcatgcaagcatcacctgtcattcttgtgttggagttatagaattctacatcttataaaacctaactggcatttannnnnnnnnnnnnnnnnnnnnnnnnnnnnnnnnnnnnnnnnnnnnnnnnnnnnnnnnnnnnnnnnnnnnnnnnnnnnnnnnnnnnnnnnnnnnnnnnnnnnnnnnnnnnnnnnnnnnnnnnnnnnnnnnnnnnnnnnnnnnnnnnnnnnnnnnnnnnnnnnnnnnnnnnnnnnnnnnnnnnnnnnnnnnnnnnnnnnnnnnnnnnnnnnnnnnnnnnnnnnnnnnncagctgacgcaggctgcgacgcacactgcaccttcaccgggcaacgagcagacccggcgtcgacagaacacaacgtcgcactaaggaccataaaatacaccccctaagaccaaatgggtacagccagaaactgagctatcaggagcacaacacctgacaaaaacccgatccaaaaaggggcccccgcaacgccggacaggggggcggccagggcaacaaccggcacagcacccacgcacgaccgcc

SEQ ID NO: 4111 - DNA, 1619 bp, Homo Sapiens
  misc_feature (1040)..(1040): n is a, c, g, or t
  misc_feature (1043)..(1148): n is a, c, g, or t
  misc_feature (1469)..(1477): n is a, c, g, or t
ggggcacggagagcggtgcccgcgtcagtgaccgaaggaagagaccaagatgaatacagagcccgagaggaagtttggcgtggtggtggttggtgttggccgagccggctccgtgcggatgagggacttgcggaatccacacccttcctcagcgttcctgaacctgattggcttcgtgtcgagaagggagctcgggagcattgatggagtccagcagatttctttggaggatgctctttccagccaagaggtggaggtcgcctatatctgcagtgagagctccagccatgaggactacatcaggcagttccttaatgctggcaagcacgtccttgtggaataccccatgacactgtcattggcggccgctcaagaactgtgggagctggctgagcagaaaggaaaagtcttgcacgaggagcatgttgaactcttgatggaggaattcgctttcctgaaaaaagaagtggtggggaaagacctgctgaaagggtcgctcctcttcacagctggcccgttggaagaagagcggtttggcttccctgcattcagcggcatctctcgcctgacctggctggtctccctctttggggagctttctcttgtgtctgccactttggaagagcgaaaggaagatcagtatatgaaaatgacagtgtgtctggagacagagaagaaaagtccactgtcatggattgaagaaaaaggacctggtctaaaacgaaacagatatttaagcttccatttcaagtctgggtccttggagaatgtgccaaatgtaggagtgaataagaacatatttctgaaagatcaaaatatatttgtccagaaactcttgggccagttctctgagaaggaactggctgctgaaaagaaacgcatcctgcactgcctggggcttgcagaagaaatccagaaatattgctgttcaaggaagtaagaggaggaggtgatgtagcacttccaagatggcaccagcatttggttcttctcaagagttgaccattatctctattcttaaaattaaacatgttgggganacnnnnnnnnnnnnnnnnnnnnnnnnnnnnnnnnnnnnnnnnnnnnnnnnnnnnnnnnnnnnnnnnnnnnnnnnnnnnnnnnnnnnnnnnnnnnnnnnnnnnnnnnnncccttgtgggcccccctcggcccctcaaaaacctttttaaaaacattcctgttgggcgccggggccccagaagggaagggaacctgggcccatacctggttcccaaggaaaaccccgggcctagacatagggcttgggattctccccccaaataaaaaaacgcccggggggaaaaccagaggggtttttaaacaaattcccaaatgggagtttctggagggtccttttcggggattttttccaacggggagtccccaagcggaacccccaattattaaaattatacccccccgccccgggcccattttattggaaagaaannnnnnnnnaaattccctttaaaaaatttttttgcgccaacattgtggaaacccccttccacaaaacgcgggtagtgtgataaaacctctgagaatcccgccgacggggggaaatctcaaaaacccttgtgtcccccctcttggcggtaaa

SEQ ID NO: 4112 - DNA, 304 bp, Homo Sapiens
aaaaagagtaagtgggatctgtgtgaggagctggtgtgcagtgttcttggagtaggactgtccccagatggagaaaagccggccaggcgtgtgccagcctctggcagcctgttttcatctctacagctgttacgtctcgccagcagagcccagggatggtaccaagtacactgtgagagctgatactggagttggcagatgccctggggcaggcgccatgcagaacacacagaagtggggttagtgaaaaggtcccttcgaattccatttcgtttcccttaaaacaactatacaaaagcccata

SEQ ID NO: 4113 - DNA, 187 bp, Homo Sapiens
ggaaaagctgagtgagtttcaaagttctattgggagatggagtttgtggttctttctgccccacccaggtcaaaggctcatgtccagaaaaggatttctcccagtgatagggtggaagtgtgtggcaggaagttgctgtttgtcctggaagtgtaaaggaaaccttttcaagaactaaactcggacc

SEQ ID NO: 4114 - DNA, 1007 bp, Homo Sapiens
  misc_feature (784)..(839): n is a, c, g, or t
gcatcttgacaaggagcttcccaggacttttctccaggacccttttcacctgcacaccctctgacgtggccgccttgggtctcgtggtgccgctccctttggggcgtccccggcctctgccagttcctggagctttgggagatttgggcttcttaggtggtttctgctctcgccgggaggggctccctctcccagttaccgtgaagtcaaaatcattagggtccagggatgtgtcgcctaccttttccgaagtacgcaatcaagctccactttagagcgaaaggctttaccctggggattgatcaaatacacatcatacttcccaggcagagcggccagatttcctttgcttaagcttccgtgtccaagccttcaggcaggatggggtcatcatacatgggtccccggtcacggatgatggagcgccgctgtttgggggaggcagaagcttccaggcacagccggggcggagcctgacccttctgatgtctctgctttgcctgcctctgcgggctcagcagagtggtgggctgatggctgcacgggctcatgcttgccctctttctcgttctttcttatcgtgtcttcaccgtgttttaaacttgaggggttggtccttgagaccctggaggtcctgatcttctgacttttcttccctgagccctaacatcccagctaccatggaatcctgttggagctggtctacagaagcaaggtgtattctggggagtcacatgtcacatcaaagcaggaactggtgagtctgtatttttatggagcagtnnnnnnnnnnnnnnnnnnnnnnnnnnnnnnnnnnnnnnnnnnnnnnnnnnnnnnnncattttccggacggcttttaccacagccctctctccgagaggagggagcgcgcgcgccgccgacgccgggaccccgcacggccgacgtcgcgccatcccgggaattccggaccggtaccagcatactatggggttcgtggcaggtagtaataaaatcgaccagggaac

SEQ ID NO: 4115 - DNA, 658 bp, Homo Sapiens
ctgaggagcgttagccggtcgcaagtcaacatcttaatgctgtagtacgatttaaatgtttacttctatgataaagcagagtacaatagaaaaaaaacaattagtttccagtaatatctatatctctaatcagaattaagtcttccaagacatattacctggaaataaaagcctgttacaataagcaaagcttcaaccagagcggctacttttcgtgccaggaaaaagttcatccctataggaggaatgatgtgctatgtaaaatggctgtaaggtcacagccttgagggcattggaagtatattatcctattccacattaagtatttcagcgaatttcaaacatcagtttatctgcaaccatgctggcaacctttaactgatatttcaatcaaccggtaaaaaataaattaagaaatcccttcacggatattccgtgatttacactgttaaaaggtacactgttcattaacatgtaattctggttcagaattacctttgagactccctgctcaaaatttggctaccacagtaagaatcttccagaaattcaagttcttattaatcaataatttgtcagctaggatacattcaggcatcagctgcaactacagaataggtgccagcctcagcgcttggaaagaataatctagaacata

SEQ ID NO: 4116 - DNA, 526 bp, Homo Sapiens
agtggatgctcactataacctcaaacttaatgattcaaaaaccattcatcattattctctccaaatggttcctgccttccaacttctattccattcaatggcatgaatgagtatcacagtcttctcagctagaaagattagactccctgtggctcatctcctttgtgtcagaatagaataatgggatgtagtgcagctctggatcaaacagactaaaatgtaatcccaggattgccattacttattgtgtggtcttggattagttacttactctctgagcctagatcctctatcgtgtaaaatgagagttagtaatatctatttcacaacgggtgtgaatgtctgtgcacacacagacatacatggataaacaacagcccctctcacatctagttacttagcaaattatgcctattcatcctttgcaggtctctgacagataattctactccccattctaactcttagtcatatctggattactctaataacctcttttcaaagactaaatcaacctgctcgcccc

SEQ ID NO: 4117 - DNA, 241 bp, Homo Sapiens
ggggaaagacccaatgatgagacagcagaagactctaatactgccaacaaagagaaagtggcatttaaaagaaaatatcaagagtcctacttaaattgtaggttcattgcaataggtgattcacattctccaaacctgctttctctaataatgtgatgaccagctatccacgaaaagccagtgaaacctcttaaaagtgcttcaccacatggagaccaacaccctgcattaaaagacagcc

SEQ ID NO: 4118 - DNA, 305 bp, Homo Sapiens
ctaaacaagtggcagagtaacagaaagaaccccgcagtccctttacccatagtcgcctcttctgaacattctgctacgttcactttatcatccctctctccctcctccaagggaatacggttttccccataaccattcaagagttagtggcagataccacttcccaagcaaggatgttattttacataaccatagtacaatcgagaatcaggaagtttcacattgatatagtacaccctctaaaacatagtccacattcagatttcaccagttgtcccagtgatgtccttgatagcattttcccc

SEQ ID NO: 4119 - DNA, 324 bp, Homo Sapiens
ggagattatatctcgtttctacttaaatgtagtgcttagggttaattttttgtactgaagtctttattggtgggtgcatgctactgggaacaagtttttgtacaaaagcttcaatcagaatcactgtgcattactgagactctgtttatcactagccttctgtccctcccgcagaagactgttggattgaacaaaataatatgtattttgatttacttaaagtgcttgtaaatttcttagggacctgccacttttgactgtggatcagttgatgtacacttgtattattaaagcactcaataaatcactgtggctgataactgc

SEQ ID NO: 4120 - DNA, 529 bp, Homo Sapiens
  misc_feature (339)..(360): n is a, c, g, or t
acttcgagctcggcacccctcgcgtgccggatcatttgagagttagacgcagacatgatgcccttttgtccctaagtacttcagggtgtatttcctcaaaacaagcacagtatcatgattgaaatcaggatatcaacactgatacagttctgttatctaatatgcaaacttcaagtctcaccaattttcccactactgctctttacctttagcaaaatcaagaacaacatttagagtgattcaaggtttcatccaggctcacaagcctttcatctagtgtgtcctcaatctttgctgcctctcatggcctttgtatttttgaaaagtgcaggcactgannnnnnnnnnnnnnnnnnnnnncaaaagtttaaaatgcgataaaaatgtgtgacacaaaatctaccatcttaatcatttttaaatgtgtacagttcagtagtgttagatgtattcacgccattgtgcaatagatctctagaaccttttcatcttataaaactgaaactctgcacccaataaacaacaattc

SEQ ID NO: 4121 - DNA, 2094 bp, Homo Sapiens
  misc_feature (1483)..(1509): n is a, c, g, or t
  misc_feature (1891)..(1891): n is a, c, g, or t
  misc_feature (1893)..(1910): n is a, c, g, or t
gggggggtcacgtggtggctgggccggggaaatggcggcttcaggagagagcgggacttcaggcggcggaggcagcaccgaggaagcatttatgaccttctacagtgaggtgaaacaaatagagaagagagactcggttctaacttcgaaaaatcagattgaaagactgacccgtcctggttcctcttacttcaatttgaacccatttgaggttcttcagatagatcctgaagttacagatgaagaaataaaaaagaggtttcggcagttatccatcttggtgcatcctgacaaaaatcaagatgatgctgacagagcacaaaaggcttttgaagctgtggacaaagcttacaagttgctactggatcaggagcaaaagaagagggccctggatgtaattcaggcaggaaaagaatacgtggaacacactgtgaaagagcgaaaaaaacaattaaagaaggaaggaaaacctacaattgtagaggaggatgatcctgagctgttcaaacaagctgtatataaacagacaatgaaactctttgcagagctggaaattaaaaggaaagagagagaagccaaagagatgcatgaaaggaaacgacaaagggaagaagagattgaagctcaagaaaaagccaaacgggaaagagagtggcagaaaaactttgaggaaagtcgagatggtcgtgtggacagctggcgaaacttccaagccaatacgaaggggaagaaagagaagaaaaatcggaccttcctgagaccaccgaaagtaaaaatggagcaacgtgagtgaccgcccaaggtcacaggcacagaacctttcccctgctatctcccttcctgcttcgaaggactcattctttcctcccacttccaccccaacatagagtagtatttgctttttagtccattttgttttcaatacgatttaatatcgatcagagtaattcttttgtacattgaaatgaggggcttggtttaaaaaaagacctttccctctccctgcccctagaacaaccagtattagaaggtgccaccattggtgctgccttctcttcccacagcctgtaactcagtgttttgtacttcactgaattgtgatggttagaaacttcgtggatagtttgtggaaatcatccaattaaacatactgcttaaaacagtgttgctgtgacttcagagacaagcctggaaggggcaccttaggaagccccttcgcttcagttgctcgcttctgggtgtgctcccttcgaaggcccagataagacagggaacacttgtgagcacacagagcagcatctgatgccctgtggtgtttggcatgtgccccctgtctactgaccaatcagtgtggcatgaggcccacgccacccaaacctttcactttccaaagagctagccgtcctccacccagtaccatgtcctagcctgtctgcatttgttagtggtaatattctttatgtataataaatttttatactcnnnnnnnnnnnnnnnnnnnnnnnnnnnttccttggtcggccggcctcggccctccgagaaagctttctaaaaccattcggtttgggcgccgcgggccccaagtaggtaaagtggaaacatgggtcaatagctggttttccctaagggaaaatccctggggtccatggaactaagttggccttgggaattcctcccccccaaattaaaaaaaataccgcccccgggggcgcgccaaaacccggaagggggttttcctggaaaaccaaaattccccagaaatgggggaagttttcctttgaaagcgggcccattttaacctgggggatatccttatatccgaacccagggggaaagccccccaaagagccgtaaacgcccttcccatatatatctccaaaatttttaacgngnnnnnnnnnnnnnnnnnngttgggcgcaaactttcatattctgggaaaaagcacaccgtggcgtggggtcaaaataattccccatttttaaaagcccctatttctctcgtgcccgcgacaaccagtggcgtaaaaaaagtcccctttttcacccacaaataaccgggggctaaatttggtgtattaggaaaaacccccctgc

SEQ ID NO: 4122 - DNA, 397 bp, Homo Sapiens
aagttcttgaaaagctaacaaaatggacacatctttagttagagtgaccaagaaaaaagggcagtgactcagattacttcattcaagagtgaaagagggcacatcactaccaatttacagaaataaaaaggattatgaggaaatactacagataattgatgacattaacttagaagaatatatttcaagaaagacacaaactactgaaaccgactcaagaagaaacagaaaatctgaacagacctataaaaaatagagatttaattgatattcagaaagtttcccaaaaagaaaagcactggccaagatgacttcactggtgaattctatcaagtgttcaaagatgaattactgacattcattcacactcctttaagaaatagaagaggagacatca

SEQ ID NO: 4123 - DNA, 514 bp, Homo Sapiens
tatatggtctagggtataactctgggagtagatgactgaggtgagctggggtagcatttaagagcattgggaaagagatcaagggactgagagaacaagtatagaatggattgtccctgtggatattgaagtaatcaaaaattctgataagagtagtgggtgaggaaaaacatggtgaactggaggctaaaattttttattgaaaagagaggtgagacttagggcttaggaggtaggtaggtgatgagtatggaatctactggcaggcattttcagataatgtttttaaaggattaacaatatttgggagaagcactgagaatcaaagacacatatctcatctctagtatatagtacaaggtttatgagaggaaaaaaaacatcttcacttgaaagggatgtgggagaagcgctatgtttaaaggagacccggatttcacttaggaccagctaatgaagagagttgcgagagaagaggctgtgtatactggagatattgtgacgcttttcaacg

SEQ ID NO: 4124 - DNA, 830 bp, Homo Sapiens
  misc_feature (747)..(747): n is a, c, g, or t
  misc_feature (749)..(749): n is a, c, g, or t
  misc_feature (752)..(752): n is a, c, g, or t
  misc_feature (754)..(754): n is a, c, g, or t
  misc_feature (761)..(765): n is a, c, g, or t
  misc_feature (768)..(772): n is a, c, g, or t
gggaggaaccgagaggctgagactaacccagaaacatccaattctcaaactgaagctcgcactctcgcctccagcatgaaagtctctgccgcccttctgtgcctgctgctcatagcagccaccttcattccccaagggctcgctcagccagatgcaatcaatgccccagtcacctgctgttataacttcaccaataggaagatctcagtgcagaggctcgcgagctatagaagaatcaccagcagcaagtgtcccaaagaagctgtgatcttcaagaccattgtggccaaggagatctgtgctgaccccaagcagaagtgggttcaggattccatggaccacctggacaagcaaacccaaactccgaagacttgaacactcactccacaacccaagaatctgcagctaacttattttcccctagctttccccagacaccctgttttattttattataatgaattttgtttgttgatgtgaaacattatgccttaagtaatgttaattcttatttaagttattgatgttttaagtttatctttcatggtactagtgttttttagatacagagacttggggaaattgcttttcctcttgaaccacagttctacccctgggatgttttgagggtctttgcaagaatcattaatacaaagaattttttttaacattccaatgcattgctaaaatattattgtggaaatgaatattttgtaactattacaccaaataaatatatttttgttncnccncnaaataannnnnaannnnntaaacttgtcgggccgccctcggcccttcggagaaagttttcctaaaccctttcgttt

SEQ ID NO: 4125 - DNA, 887 bp, Homo Sapiens
  misc_feature (720)..(730): n is a, c, g, or t
gggggaagtgggttgacgtagcccggaaggggaatacttccaagttgtagtgttgttgttttcagcctgctgctgctgctgctgttgcggctaggggaaccgtcgtggggaaggatggtgtgcgaaaaatgtgaaaagaaacttggtactgttatcactccagatacatggaaagatggtgctaggaataccacagaaagtggtggaagaaagctgaatgaaaataaagctttgacttcaaaaaaagcaagatttgatccatatggaaagaataagttctccacttgtagaatttgtaaaagttctgtgcaccaaccaggttctcattactgccagggctgtgcctacaaaaaaggcatctgtgcgatgtgtggaaaaaaggttttggataccaaaaactacaagcaaacatctgtctagatgtattgatggaatttctggctttctaaatgattttactttctgccttgaattttcaaggcatagatgtcaacttacagaataacatgttttaagataattaagtttaaaccagagaatttgattgttactcattttgctctcatgttctaaacagcaacagtgtaactagtccttttgctgtaaaatggttattttccttataagaattttaagaactaagtgccaaacttccatgaaaatatttccctccccctctggatgcccctttttcatttaccctttattccttattaattnnnnnnnnnnnaccatttttatttttatagaatacctcgcaacacggggggaaaacggccaacccatcgcgtatccctttgcctcctgcaaactttcggcgcatctcaaaagaggttaaatgttgttcccccaccctccaccccccctctggagtggggtggacaacc

SEQ ID NO: 4126 - DNA, 1246 bp, Homo Sapiens
ggggggcgggtcctgagtcgcgaccctggtccggacctgacctgaattgcgaccccaacctggactgctcccctgaccgcaacccctacccccgcccaccagtatggcccggcacgtgttcctaacggggcccccaggagttggaaaaacaacattgatccataaagccagtgaggttttaaaatcctctggtgtgcctgttgatggattttataccgaagaagtcagacagggagggagaagaataggattcgatgtcgtcacgttgtccggcacccgggggcctttatcgagagttgggttagagcctccacctggaaaacgtgaatgccgagttgggcagtatgtggtcgacctgacttcttttgagcagttggcactacccgtcttgaggaatgccgactgcagcagtggcccagggcaaagagtgtgcgtcatcgatgagattgggaagatggagctcttcagtcagcttttcattcaagctgttcgtcagacgctgtctaccccagggactataatccttggcacaatcccagttcctaaaggaaagccactggctcttgtagaagaaatcagaaacagaaaggatgtgaaggtgtttaatgtcaccaaggaaaacagaaaccaccttctgccagatatcgtgacgtgcgtgcagagcagcaggaagtgaagacacgtgcattcctgccttccgtgaaggagtgcccagttcaagaggagcctgatggagccctgcctgtcgaggctgtatgcctatggggttatggaaccttgtgggcttttctagagaaaactcaacagctgtttcccataaaatgtttaaaagatcaaattagccttaatgctggattgtctgtacaagattaactatccattgtggcttatctatgcttaaagatttcttgtttatttcctcttgcagtcatgcacatgatttgggtaaactgtgagatgagaaatggttttcagagtattagatggaattcacccccgttgaagtttataaatgtgttcaggggaagcgggaggaaagagttcactgcctaatcagttttgcatgtcatgaaaattaaattcctctccaggtgcagcttcagcctcatgcaacttaaagtgataacagttatttgattttttaaaaaatattattccaaaagaaaaccattttaggtcatctcccccaactctgtttgcttactgcttaataaatataaaaataaatctgatggttacagacagg

SEQ ID NO: 4127 - DNA, 310 bp, Homo Sapiens
gctcggtacccctcctatctgaatccagatctaaaattattctggctagaatacagtatatacaaacatgtatttaagtgagccctaaaagaaatactcataggtggtttagaatcgcttgttagaggcacaggttcgtttacagttgctggttactagactgtacgcagctggacacttctatgttaaagggaagagaatgaatactatgtgccaggcagtcaacacatgaagacagagttgtattagccctcagagtccttatgcttcacaattactcgtttactttcaggtaggataaaatgttccc

SEQ ID NO: 4128 - DNA, 567 bp, Homo Sapiens
ggggcccgatgctttctgtggctaaacacgcatgtaatggcgaagaaataaaagcctacgtgttggtaaatccaacagcaagggagatttttgaatcataataactcataaggtgctatctgttcagtgatgccctcagagctcttgctgttagctggcagctgacgctgctaggatagttagtttggaaatggtacttcataataaactacacaaggaaagtcacccaccgtgtcttatgaggaattggacctaataaattttagtgtgccttccaaacctgagaatatatgcttttggaagttaaaatttaaatggcttttgccacatacatagatcttcatgatgtgtgagtgtaattccatgtggatatcagttaccaaacattacaaaaaaattttatggcccaaaatgaccaacgaaattgttacaatagaatttatccaattttgatctttttatattcttctaccacacctggaaacagaccaatagacattttggggttttataatgggaatttgtataaagcattactctttttcaataaattgttttttaatttaa

SEQ ID NO: 4129 - DNA, 851 bp, Homo Sapiens
gaaaggtggggtgtgtgagcgaccgcgggggaaaggtcggacacactggggcgcaatcgagttatattgggatattgaggacctgggcgagaggaccaggagtcttttcgattgaaagagggccaaaatatggcgggaaccccctgcgcttggtgggggcttattccagagagggttttaaaaatggaagagttaggaaaaatggtaaacccagccttgagaatattcccattttttcctaccaagggcagtttgtataatctttagccgttactgaaaggttttaagggagatatgtaaggaaagcaatcaaaatattagataaaaatatttaaatctttggatccttttattccatggccttcataaaaacacaaaagtggccagatttttcccactagagcttaaaatatcaaaaagattcactagtaatttataattagcaatgaactctatactgagtcatctgtgggtcatcataggcccaaggaccagtgttgccgtgtgttacaggctaccaaaataatttctagcactctgaatcctcttgaaatatgatggaatgagtcaaggtatcatgactaaattccaggcataataggaaaaacaggttcattgatgcctagttttaaagtcctacaaaaggggggaagatcacttatttgaaaatacagctaagtacattctcatctgtgattatttacatttgtatactgaaaatatcgattatctggacagatcctgtgatatgccatttgctacaaaatgaagttcttacaatgagcatgaataattaatcctttttagataatgaaataatgtatcaaatcttcatttatgttccaaacacc

SEQ ID NO: 4130 - DNA, 1166 bp, Homo Sapiens
  misc_feature (72)..(72): n is a, c, g, or t
  misc_feature (283)..(292): n is a, c, g, or t
gtggaagtaagttccacccggtgtataagccccttccaggaactctccctttttggcgtattgtgttttccnaaaacggtttgggattaaccgcccgcgggcgcgttcttttatcgtggggaagaattccaaagcccgtgtgttcactgagccaggattttccttagggaagacaaggtattggcccaaggttccattttcccttctggggcccggggcgccaaagcaaaatgttttggaaaagttttttggaggggcggaggggcccggccatattaataannnnnnnnnnaatgggtggggttagaaaatactggatttaatagaaaatatcacattgtaaacaaatccattgatccatgagcttaaaacagaatgacggcacaatcacatagaaaagctaaagacaaaacactggtaccaaacatagcccttaggcctgggctaggctctcaaaggtctttcccagaaatggaggcagcagtagcttcaaacaggcacaaaaacagccaggaggaggcagcatccactccatgaaggcctaagacaatgaaaggaagccagagcaacagaccaccttgggatccggggagaagggtaaatgggcaaaagggttgtatttcctgatgctctcagaacatcagaccacaccatgtgaatttaagcaggactattttaagtggggaaacaatactagaagcatttggtgtattttcctggcactcacctcctaggtaagcaggagagcgggacactcaggagttgtgactaaactcacacttaagctgcctgcccagaccgtccccttggctgaacacaacactgaaattgtggcagtgtctgttgccccagtggacctcccacttactaatgagtatgtaaaacagaggagccacagtgaggccttcacaaaaacacagggctctgggggaaaaacggcttccaccttctgccttttggtgctggagagtccctgagggagagaagtttgacgtggctgggccccttgaggctctggatttatcaatagaagcctcctctttggccccacccacccaaatccacccccaggttctcctagttcagagaaaagctgtgaaagtggaagaaggaagggatcgttttctttccattgcacttgttactgaccaaagagactgcttccc

SEQ ID NO: 4131 - DNA, 825 bp, Homo Sapiens
  misc_feature (157)..(176): n is a, c, g, or t
  misc_feature (281)..(318): n is a, c, g, or t
atgtgcagggatgagtgcgcgttggaggtattaggggggcgtaaatgcgcggatgggagcagagagatggatagcggggtggcggggatgggaatgtagaaagaggggggcgtagagtgcagaatagggacacaggtgatggagtgatgaaaaagannnnnnnnnnnnnnnnnnnntaaaagaggtggtaagggggcggaagagagggttgatgggtggctgtgcaacgggggctgcccggactctttgtaagggggggatgccttttcagggtcgcggannnnnnnnnnnnnnnnnnnnnnnnnnnnnnnnnnnnnntacaaatgggaacagtcatttccttgagtgcagcaaagaaaggggggtcgagacaatgttggccggtgatgggcgtcgggcatccttgagggctggtgtgctctggagactccctgcctggacatcaagcagtggccatttcatctggagataggttcgggcggtgggcgagagcgatccgttggggaggtaggggctcgtcaggtcggggatcatgatgaaggggtagccgggatacggtggccccttaaagagccctccatcttgcctcttggccgcttcttccaaactttcccgggatttgtctcggaaactttcggagcgaggcggaggccgtctttccgcctcggaatcggaggagctgttttgattcgtttctgattcattgactagagacgatttgacatcagctaaatccctctctgccgaggagttttcggagctcttctcctcctgttcgccctcgtctttgaaggaaatcagttcgtcgttggcgcctaggtcacc

SEQ ID NO: 4132 - DNA, 1048 bp, Homo Sapiens
gggattcccagtgtttttctcttttgtaatctttataggtggccaaattacaattctagacaatgagatgtttgtggaagtctgctgagtttgggagatgtagtatcctgagaaagctttcactttcctgaagaaaaaaaagaccatggatggtggaagccaccccctttcccctcttcttgccttgaacaaaggtgcgaaggctaaaactgctgcagccatattgcaaccatgaagtcaatgtcgagagaatcacagaaatgatggccctgctgttcttgagctattgaaccaacaaagttactccacaggatccgctgaacataggatgttgccacaaaatctacctcgtgtatttttctctttcactcatgagctgcacaattgcagatttgagcacaatgtctgcagactgtgttgaaaaactctgaagaacctaattaacacaggatgacctaggagtgattctaagtctgtgtaacaagatattactcattagtgaatgtgtcagtcttggtactgaatgctgcagataacagcaagtaggttctcctttatttctgaagtattcacttgaccttccatcagtaagacggacttttctaatctgttcctggagatattaatggaatacagtcatgtccactcaagacgagaggcagatcaatactgaatatgctgtgtcattgttggaacagttgaaactgttttatgaacagcagttgtttactgacatagtgttaattgttgagggcactgaattcccttgtcataagatggttcttgcaacatgtagctcttatttcagggccatgtttatgagtggactaagtgaaagcaaacaaacccatgtacacctgaggaatgtcgatgctgccaccttacagataataataacttatgcatacacgggtaacttggcaatgaatgacagcactgtagaacagctttatgaaacagcttgcttcctacaggtagaagatgtgttacaacgttgtcgagaatatttaattaaaaaaataaatgcagagaattgtgtacgattgtt

SEQ ID NO: 4133 - DNA, 877 bp, Homo Sapiens
  misc_feature (177)..(188): n is a, c, g, or t
  misc_feature (309)..(332): n is a, c, g, or t
  misc_feature (483)..(485): n is a, c, g, or t
  misc_feature (487)..(566): n is a, c, g, or t
  misc_feature (685)..(701): n is a, c, g, or t
cccacttggggcgaaaaaattattttcggccaaggggggaaccaagggttttaaaatcccccctggcggaatttaaagggttcctttcaaaccccggttggggaaggggtttcccaagtgcggggcggaaattttttaatggaatttccacccctttttttcaaaaaaattggcaannnnnnnnnnnntaattttaaatttgagggttcgcctttgggcttcccctgtggatagaatcccagtaaaaggccctccaggaattccccttttgggatttggtttaagaaaacccttcggttttcccccccnnnnnnnnnnnnnnnnnnnnnnnnaaattccaaggcccttgttcatggccccgggattttccttggggaacacggtattggcccatgttcacctttcccttctgggggccccggccccccaacgaatgggtttagagaaacttttctgaagggccgagggcggcccgacaagggnnntnnnnnnnnnnnnnnnnnnnnnnnnnnnnnnnnnnnnnnnnnnnnnnnnnnnnnnnnnnnnnnnnnnnnnnnnnnnnnnnntaagagtttaaggaaagaatatatttgaaccacataaacaaacaaaaaggtattacataagaaaaaataatgtaacaatttatgtaagtacctaacatatgagcatgctcttacatctnnnnnnnnnnnnnnnnnggtaacattggtactatatatatatatttgacaagtgtgcattaaagaattctctaatataaaacatttaaaatgtggagaatactttttcaagatacagaaaacaattgttatgataggcacacccacaattcttataacaacatgcttgcgaggataaaatccacctgagcacc

SEQ ID NO: 4134 - DNA, 175 bp, Homo Sapiens
tgacagagtgatactctgtctcaaaataaaaattaaaataaatattttgtaaagaatcatgcagggagtcagtcaataaaagctttaaagttaagtctcaaaggctgtgaaaataatcttcttcttgtatttatggcttctttcattgcttctccaagactaatcggcctgccgc

SEQ ID NO: 4135 - DNA, 251 bp, Homo Sapiens
ggggaaaatagcagggctgttgacagagattactggtagcatccaaatgggtctggttccggttgctcccaaatcccagctgactcaatgctcttcccaatcaatcagtccccttttggattccatatgccaatgccaatgaataccctttttaacttaagccaaaagtttgcatgaagtttctatcatataactaaaggagttctgacccatgcactttgggagtccaaagccggcggaccacgaggtca

SEQ ID NO: 4136 - DNA, 143 bp, Homo Sapiens
tagttcttgaaaagcaataagcatctggaagtctgtactaaggaatagctatcttccaagatgctgagagaatcatcagttacaagtgtgtaccgactgaagccactatgtttaccaccagctgctctacacacactagagga

SEQ ID NO: 4137 - DNA, 308 bp, Homo Sapiens
cttcattctcatcccacctcctgccccggcttccagcagcctcccttaaaattctggggatgcagacatctgtgctgaggctgagaagccaggagcctggagaccagcgtccctgggcaggtgcagtggaaccagctggccatgtgccaaaattcctgtgacccttccctggtactgtgctgtctttgctgagagctggccgcctgtctcaggggtccctaagtcttacactggacaactggatgagtgagaaataattatttaattgttaagccacagaaattccgggctcatgtgttacagccagt

SEQ ID NO: 4138 - DNA, 760 bp, Homo Sapiens
cttgagagagagaacgaattcgttaaaatttgtttatttgccatcctatcataatatgactacctaggggaagaataattaagtggagtcattaactggtgtatttaccacatctttgagcgggaatcataattattggtcttacctggatgtataccaccctcagttgtcccgcagtaagcccacccagcttctctatgttaattttcaagaccatctaagtcttctagggtaatgtagtccactacagtagccttacagatcacacacatgatagttatggcgcaaaccggtatctccttccttaatattgcgtaatagcatctaacacatatatccagcctgactctaagactcccactcctaaatgtcctgcagctccctctaccttaaaatttccaaaactatgtcaattctcttctgcttctgaagctggtttttccttttgtgtattatttctgcagtgaatcagaccaccacccaatataatccaagagtcttctttgattgtttttctctgtctcaacatgcgccaaacccctgctaccccacctagccacttccagtcttatcttttatggtgagaaccagcttcatgtcacagaaactctataaaaaatcaatgatggaaataacttgggtatataaatatctcgtctcagtagaaagataagaggtgggaagtctgagcatgctataaacatctagaaacagttatgactatgacatatcggattcactgccgtcgtttacactgaat

SEQ ID NO: 4139 - DNA, 284 bp, Homo Sapiens
cctgatagtcttgaaagcgatcctcctactctgcctcccaaagtgctgggatgcgtgagccaccatgcctggccaagagaaggaatacacttcagagaactacttagctgttcaaattcatgtagctggttggctgcagagcaaggattccagagaactacttagcttgttcaaattcatgtagctggttggctgcagagcaaggattcgacccaagctccactacctttcattagggacgtttggtaaactgtcaagtgctgtacagatgtccattggtttct

SEQ ID NO: 4140 - DNA, 209 bp, Homo Sapiens
gaaggtgactgtggacatttcagccaaggctgtaggtttcctaccacattttttcgtgctgggtgtggtcaaccacaggccccatgtgttggctgtggccaaagaggcccttatcccttccagtaagagtttagaatctgggaacagggttacaggacttcacatgactgatattcttttcagtgatttccttttcaagacctatcaga

SEQ ID NO: 4141 - DNA, 367 bp, Homo Sapiens
  misc_feature (33)..(33): n is a, c, g, or t
tgaggaggacgcctttgtttgccgtggttggtngggagcacacgccggaggcccggtaacgtgcctgtgggagtgaccaagggccacccgcccaagggaaaatgttcattcttcatcagctttgctaattctgctttgaggcagtaaaatgcaaaagaccatagaatttgtatttctttttttaaaatacaatttataacattatattttgtactctttatattagaatttgtaactagattgatgtatttaactatttctgaaaaagtaattcaatgttttagttgtgtgataaaaatatttagataaaacatattcattctattggaatttgaaataaataaaaacatcttggagttcaaaaaaa

SEQ ID NO: 4142 - DNA, 630 bp, Homo Sapiens
aagttgaatcacatacacaaataaaatattacgtctttccatagtaagaagactaccaaagagcttagaatttactgacagatataggggactgagccacttttgtcgaaaacagtgacaccgatactaaggcaataatcaagtaaaatgtggaggcatccttgacactaccgagagaacagccgagagactggccaggaaggccagaaacctggtgtgtcatgtgggcacccatccctgcaaagatctcacaccagctcctcacaccagcaaggacacctcaacatgaagatctatggctgctgccagcctgtggcttttggatgcataaagtcacaaactaatttagagacctagcccctgtattagcagctgagaatccctgcccagggaatagacttcgtgtgtctcttccacccatttcttctttgaaattgtgttctcgtggtgcctagcagaggctatgtgtgtgtctcactctgcacagctcacattctgctttgtggccacacgacccaggaagagggcccacaaatggacgagaatagagggaggtgggggtggaaatagagaaaccacattccaggccgaccaaagactttatgtatatagctttccaaagaactaaat

SEQ ID NO: 4143 - DNA, 672 bp, Homo Sapiens
taagttctttagtgtttggctcatttggttcatgggtctcatttgcactgctggtgttaactggttaggaggagccactgccctctgggaaaattgctggctacctactgcctgttgcagtgactgatttggggtataggctgcaggtgtacctgtggggaagcggactcctgcagacgtcagggcttcttgctgtttgcttgttccttcttgagaggcccagtttggtgcagttgtgttggatgtgatcattacgtttgatgttctctgtggtggcatgcttgccatactatgggttaaatttggtctcaattgttgtgaattaccaacagatccagctccaaaagtggctacattgttattattacttggccctaaggtaggtggccgtggcatcatagggttgttttgatttgctaacaattgctttgggtttctctgtcgggtcaattgattcattcctgaagtgacactgtatgtgttaggttgattacaaggcagatttccatacatccccatattctgaactgctgtagataatgatggcattcttgtcccgtgagaagtagacaggaggctggaattgggagttaaaatggtgtgtgttgaaactgggtttgccagagcctggttagagttaagcttatgtggatgagcacctgagacaagaga

SEQ ID NO: 4144 - DNA, 664 bp, Homo Sapiens
ggggggcaactccgcccttgaaagactgggaattatgctagaaggtcgtgggcactaaagaaagggagagaaagagaagctatatagagaaaaggaaaccactgaatcaaagagagagctcctttgatttcaaagggatgtcctcagtgtctgacatctttcactacaagtatttctaacagttgcaaggacacatacacaaacaaatgtttgactggatatgacattttaacattactataagcttgttattttttaagtttagcattgttaacatttaaatgactgaaaggatgtatatatatcgaaatgtcaaattaattttataaaagcagttgttagtaatatcacaacagtgtttttaaaggttaggctttaaaataaagcatgttatacagaagcgattaggatttttcgcttgcgagcaagggagtgtatatactaaatgccacactgtatgtttctaacatattattattattataaaaaatgtgtgaatatcagttttagaatagtttctctggtggatgcaatgatgtttctgaaactgctatgtacaacctaccctgtgtataacatttcgtacaatattattgttttacttttcagcaaatatgaaacaaatgtgttttatttcatggggagtaaaatatactgcaatacc

SEQ ID NO: 4145 - DNA, 187 bp, Homo Sapiens
agcggccgattagtcttgaaaagggatccttgatgcttctatctgaatctaagggctgactttctaatggactttccattatagaaattccaggaaaagatgaatcagagttcatagaaatatttttagaagctctatcatcatcagaacatagaaaactagaacttaagtagtccctcttactatt

SEQ ID NO: 4146 - DNA, 1581 bp, Homo Sapiens
  misc_feature (1480)..(1480): n is a, c, g, or t
gggagatgaagtgtggctctatcttgtatgtgagcacacccacattttcactgccattatctgggacagcagaaccaggtttggctcaacagatttctctttccacccatctattgcaggtgtagtggtcttgctgcttctccagggaggatctgcctacaaactggtttgctactttaccaactggtcccaggaccggcaggaaccaggaaaattcacccctgagaatattgaccccttcctatgctctcatctcatctattcattcgccagcatcgaaaacaacaaggttatcatcaaggacaagagtgaagtgatgctctaccagaccatcaacagtctcaaaaccaagaatcccaaactgaaaattctcttgtccattggagggtacctgtttggttccaaagggttccaccctatggtggattcttctacatcacgcttggaattcattaactccataatcctgtttctgaggaaccataactttgatggactggatgtaagctggatctacccagatcagaaagaaaacactcatttcactgtgctgattcatgagttagcagaagcctttcagaaggacttcacaaaatccaccaaggaaaggcttctcttgactgcgggcgtatctgcagggaggcaaatgattgataacagctatcaagttgagaaactggcaaaagatctggatttcatcaacctcctgtcctttgacttccatgggtcttgggaaaagccccttatcactggccacaacagccctctgagcaaggggtggcaggacagagggccaagctcctactacaatgtggaatatgctgtggggtactggatacataagggaatgccatcagagaaagtggtcatgggccatccccacatatggggcactccttcacactggcctctgcagaaaccaccggggggggccctctgcctctggccctggagctgctggacccatcacagagtcttcaggcttcctggcctattatgagatctgccagttcctgaaaggagccaagatcacgcggttccaggaccagcaggctccctacgtagtccaaggggaaaccagtggggtggggcctatgaatgatgcgcaacagcaattggacgaccacaggtcccattctctttaaacaaattctacaaccttgtgccaggagcccatgcatcctggctctcatttgaccatgcgattgacctttcccctgcggcaaatatccctcgcaaaccacgggcccccctgtacccttttctctggtcccaaagccagttccaaagcaataaacgccctttgggtttccccttgccgcacagggcattcaaccctttcaccacaagtaaagccaagggtccaaaactgcaccctttgccttgcgcctggagggccctggcttcttccctcccaaggacaattttccccctcggcgcggaattctccctttggtctacccatatgcgcttttttcgnatttcccttcctttccaaggcccttttccctggaccttcccttcttcaagaaccaccaaaatttgcgaacccggggttttctggttctctcccgtgccccc

SEQ ID NO: 4147 - DNA, 377 bp, Homo Sapiens
ggggagtttcacgcgcgtatgctttgcccgccatggccgcagtcaaggagcctttggagttccatgccaagcggccttggcgccccgaggaggcagtagaagatccggacgaggaggatgaggataatactagtgaagccgagaatgggttctccctggaggaagtgttacggctcggaggcaccaagcaagattaccttatgctggctactttggatgagaatgaggaagtgatagatggaggcaaaaaaggagcaatcgatgaccttcagcaaggtgaattggaagcatttattcaaaatcttaatttggcgaagtatacaaaagcttccttaattgaagaagatgaaccagctgaaaaagaaacattccagccc

SEQ ID NO: 4148 - DNA, 422 bp, Homo Sapiens
atgagccaccgcacctggccttccctgcttcctctctagaatccaattagggatgtttgttactactcatattgattaaaacagttaacaaacttttttctttttaaaatgtgagatcagtgaactctggttttaagataatctgaaacaaggtccttgggagtaataaaattggtcacattctgtaaagcacattctgtttaggaatcaacttatctcaaattgtaactcggggcctaactatatgagatggctgaaaaaataccacatcgtctgttttcactaggtgatgccaaaatattttgctttatgtatattacagttctttttaaaacactggaagactcatgttaaactctaattgtgaaggcagaatctctgctaatttttcagattaaaattctcttttgaaaaaacacagc

SEQ ID NO: 4149 - DNA, 1005 bp, Homo Sapiens
  misc_feature (243)..(243): n is a, c, g, or t
  misc_feature (430)..(555): n is a, c, g, or t
  misc_feature (567)..(577): n is a, c, g, or t
  misc_feature (602)..(611): n is a, c, g, or t
  misc_feature (635)..(781): n is a, c, g, or t
  misc_feature (797)..(805): n is a, c, g, or t
  misc_feature (921)..(963): n is a, c, g, or t
gctatattatggaaaaacttgttaatgtagaattatactgcttcatattattttacctattagtacactcatagttagctttgtaataaatttatgttttctttaataattttagttcttcaaagaatggctgatgctggcctgtaatttttctttcaaggatgataatttgtgtgttgtttgatttgtttatattttacatctctgtagttttatttttagaagttgtgagatattggatgngtggctatttttcctttctctgtattctttatgaaacataacttttgaaaaacctatgtattattcatacagctttggtttgtatattctgtatagcctaactacacacatcaaaatgtatgtcaaccaagtgtttagaatgaaattataagtgtttaagtccaaataaagcatgtgatgtggaatnnnnnnnnnnnnnnnnnnnnnnnnnnnnnnnnnnnnnnnnnnnnnnnnnnnnnnnnnnnnnnnnnnnnnnnnnnnnnnnnnnnnnnnnnnnnnnnnnnnnnnnnnnnnnnnnnnnnnnnnnnnnnntttgggggcccnnnnnnnnnnnaaaaattttttaaaacctttttttnnnnnnnnnnccccaaaaggaaaagaaaaggggnnnnnnnnnnnnnnnnnnnnnnnnnnnnnnnnnnnnnnnnnnnnnnnnnnnnnnnnnnnnnnnnnnnnnnnnnnnnnnnnnnnnnnnnnnnnnnnnnnnnnnnnnnnnnnnnnnnnnnnnnnnnnnnnnnnnnnnnnnnnnnnnnnnctttatttaaattttnnnnnnnnntgggaatttttgggaataggggggtaatttttttaaaccttcggccgacggggaacccccccaaaagggggtggaaaaacctaaatccccaggggaataaacccttgtggcccctnnnnnnnnnnnnnnnnnnnnnnnnnnnnnnnnnnnnnnnnnnnttttcccttatgggccccgttttaaatcaaaaggggggaaaa

SEQ ID NO: 4150 - DNA, 968 bp, Homo Sapiens
ggaggttgcacctgacttatatgctgaactacagaaggcacatttaattttattcaagggtgatttgaattacaggaagttgacaggtgacagaaaatgggagttttctgttccatttcatcaggctctgaatggcttccatcctgcaccactctgtaccataagaacattaaaagctgaaattcaggttggtctgcagcctgggcaaggggaacagctcctggcctctgagcccagctggtggaccactggaaaatatggaatatttcagtacgatggtcccctttgacttgatttaggagctctcagttgcatagaaagatctggtgagcaccttttcatccccagaaaaggagcacgtgaattgagtcgcctggcggctctgtacgcgctcagggaagcttagcttcttggtgcccatctacgtgcactggatgatttttcttttgaacattttgccccactacactgtttttggggatagctgggttaagcaagttaaagatatttacatttatattggaattttagcaactttttttcaggttaaatatataatttcaagtgcttttaatgaacttatttttaattggctagggagcaaaaaataagtgagttctgcttttagttaggtaaccttgttcttttcttaaatagtacactgcatggtatttaatattcccaggaagcatgggattttattttgcttgatttttgggcacatgaaataatagctctaggaaaaatgcgcatctttaatgactcttttggaaagagaggcatttcctaacactgtggatggtttgccttacataaaaagttaccctcataaaggtaaattctaaccttttaattccttgaaattttattttcatttccaataaccttgggttccatttggcaccgcctttgggaattttggattgaccctggtaaaaatgggatggttaggcaaaacttcaaaaaat

SEQ ID NO: 4151 - DNA, 498 bp, Homo Sapiens
gggtacttgttatctattaaaaatctcctttacccaaatctgtattatggtttcgccagacaaatattatgtgatgtagcccagaaaatccacaccttttgtcctttttatgttttaatttgaataatcatgtgcttagtcccgtggattactgccacatcagtttaacacgatatcagcacattcccttgtcatcatcaaggtgttggctcagatttattcttaattggatgtttaaagcatgtactaccttgttacagttggtttagtgtagtggattattgacatgacatcatgagaagatgtgtaattttataccacatttataaaacatgattttgttttctacccttcaaggtaaacattaaaaataaggtggtacttgtgtacttgtacataaaaccaaaattatagttgggaaaaaaataaatttatatatgaaaatgtcaaaatcattttaaaagtattattttcaaataaaatggagaagctggcaaa

SEQ ID NO: 4152 - DNA, 1996 bp, Homo Sapiens
  misc_feature (879)..(920): n is a, c, g, or t
  misc_feature (1651)..(1665): n is a, c, g, or t
tcaccatactggaagctacacacaggactgtaggaggactctgagctacgtgccctgtgaagacccccaggactttgtcataggaggtcgttcagcttccccaaagtcagaggtgatttgatttggggaagactgaatattcacacctaagtcgtgagcatatcctgagttttacttccttatggcttgccctccaagttctctctctcatacacacacacacccttgctccagaatcaccagacacctccatggctccagctatgggaacagctgcattggggctgcctttctgtttggcttaggaacttctgtgcttcttgtggctccactcgcgaggcagctcggaggtgtggactccgattgggctgcaggcagctctgggacggcacagggcgggcgctctgatcagctcgtgtaaaacacaccgtcttcttggcctcctggccagtctttctgcgaatagtcctctccctggccagttgaatgggggaagctgctggcacaggaaggagaggcgatcccggctgaggcttaggaaattgcttggaccccgctccaagcagagaattcactggggaggttatcagagtctaacatcattctgcctgtgttgggggccaggtgtgtcacacaagcatctcaaagtcaaaagccatctgggtctgctgcttctctttctcaggctactggggaaaggaatctccctctcctctcacttgattccaagtgtggttgaattgtctggagcactgggacttgttttctcttttccttgatggaccaacagtgcaaatgcaatctcgccatttaactttcaggtcgatttcctttcctgatcagacatctttgtgccccctttaggaaggaaaagaatannnnnnnnnnnnnnnnnnnnnnnnnnnnnnnnnnnnnnnnnngatcctcgttaggatgagactaagggatgaggacatctctttataaaaggcccctaagtaatggataaacagaaacacttagaggtgagaaggtctgtcttcaagatccaaggtaagattgccttcagtctgatgtttgttctcaaggacttatcccctacatattctcccactccatacttctccttctaccccaccatgtgctcccgtgcactcctcagatggtcagaggggtaacccaagtccttagagaatttggggaccaatagaatatgtgatgtgtgaattttctttaaaaaacttaaggagtctttgctaccttctgcttgttgagttgttttggcattcatattaaaagccagcatctcactatttattgacaggttgggctgtgtgtgtgcgcatgtgtgtatacatttccaggcgtgcctgtgtcctgtagctttttaaaaggaaacccagtcatcccactatgaatctggcatcttcttatgcttctagtgttttggccatacatcaaccaaggggtttaatttatccaatgcttgacgacatgttcaggaggggctggatcaaattttgagagggttatgggaaagggagggggagaagaaattgacatttattttattatttattttaaatgtttacatcttctttatgttgtatcaagcctgaatagaaactgatagcattaaaatactccgttcctctctctcttctcgcttccnnnnnnnnnnnnnnnaaatttaggataacacatttttgtttctaaagtgatttgtgatttgtgctgtataaactgtataaaaggttctgtttttaaaggtggattttcattcctctggggacagtggtcgccaagacatctacattgtaagagaacacagtggaagatcctgtcctgattctcaaaaattattttctctgtatgattaaaagtttattccatttattttagtttggtgtttacttgattttgaagaaaaaaatatttgacttggtgtaaagagtaagggatcagggtgtccttttcttgcggggggagatgtgaatatatataggaattttggcgg

SEQ ID NO: 4153 - DNA, 877 bp, Homo Sapiens
  misc_feature (665)..(665): n is a, c, g, or t
  misc_feature (808)..(808): n is a, c, g, or t
ggggtggcgcgggccgccgtttccgcaaacagaatcgcgtttggctgtgctggatgtgtgaacctattgggtactgtacaacttcaagcctcgaaatcagataggcaccaccaacctcatttcctgtttcaccttgattttctgtgataccaaaatctcagcttcacaaagtcattgaaagtgttggttcatgaagttttaccatcaattcaagtaatcataaatggcaaattctgcaaaagcagaagaatatgaaaagatgtctcttgaacaggcaaaagcgtcagtgaattctgaaacagagtcttcattcaatattaatgaaaacacaacagcttctgggactgggctttctgaaaagacttctgtctgtaggcaagtagacatagcaagaaagagaaaagagtttgaagatgatcttgtaaaggaaagttctagttgtgggaaagacactccatccaagaagagaaaacttgatcctgaaattgtcccagaggaaaaagattgtggtgatgctgaaggcaattcaaagaaaagaaaaagagaaacctgaggatgtttccaaaaaataaatcttctactggagatggcactcaaaataagagaaaaatagcacttgaggatgttcctgaaaagcagaaaaatctggaagaaggcacagctcnacagtggctgcccattacaatgaacttccaggaagtgggtttggagaaccgtagtcaaagtcgtattttttacctaagaaactttaataattggatggaaagggttctcattgggagattttttggaaaggtacgaacgaaanaaaaaacgtgatatcccctgttttggacctgggaatgtgggcaaaggcgggaaaattttgctggaaaac

SEQ ID NO: 4154 - DNA, 799 bp, Homo Sapiens
ggatcagacagcgagtgtgctgaacaattgaggcagcttgccagaagaattacagaggatcatgtgattcagcatgggctggtagtggatgggaccagcctatctcttgcactcagggagcatgaaaaactatttatggaagtttgcagaaattgttcagctgtattatgctgtcgtatggctccactgcagaaagcaaaagtaataagactaataaaaatatcacctgagaaacctataacattggctgttggtgatggtgctaatgacgtaagcatgatacaagaagcccatgttggcataggaatcatgggtaaagaaggaagacaggctgcaagaaacagtgactatgcaatagccagatttaagttcctctccaaattgctttttgttcatggtcatttttattatattagaatagctacccttgtacagtattttttttataagaatgtgtgctttatcacaccccagtttttatatcagttctactgtttgttttctcagcaaacattgtatgacagcgtgtacctgactttatacaaatatttgttttacttccctacctattctgatatatagtcttttggaacagcatgtagaccctcatgggttacaaaataagcccaccctttatcgagacattagtaaaaaccgcctctttagtattaaaacatttctttattggaccatccctgggcttcagtcatgccctttattttccttttttgggatcctatttactaattagggaaagatacctctcctgcttggaaaatggcccaaatgtttgggaaac

SEQ ID NO: 4155 - DNA, 305 bp, Homo Sapiens
  misc_feature (43)..(94): n is a, c, g, or t
gtggtctcgatctcctgacctcctgacctcgtgatctggccgnnnnnnnnnnnnnnnnnnnnnnnnnnnnnnnnnnnnnnnnnnnnnnnnnnnngaggctagttaaacttaatcattaggttgagaaatttgaaaggctccaacaaccccaattttacatttgtatacagaaactcacaaaattactaagttgagtggaacctggaaggaacaataccgtgatgaagagaagggaaacgcctgggactgaagaacacatttcctactttctgctcatgaatacagacaataaagaattaatttcc

SEQ ID NO: 4156 - DNA, 390 bp, Homo Sapiens
tggaggaaagcttaggattgacaggaaacacagccttcaagggaaaatgcttgcattacactgaaaagtctctttaaaactaaaactgacgaaacaaagcagtactcacatatactttaggcttcatttccacaaaaggctcttcaaagtcagaaaaatggaaccagcataatagaaaaactacaaatggccaacacagataaaaataagttcaaccggcatggtggctcaagcttgtaatctcagcactttgggagaagactggctgatgggagcaagacggcatcagtgcttcttgggtgacaggctttcttgccgagttcattgctgagatggccaagcagaggatcttccccgagtggaataaactgagactgactgatgggacga

SEQ ID NO: 4157 - DNA, 843 bp, Homo Sapiens
agtgtctgtcttaggtactagttcctggggctgatctccttttgcagagtaaagttttcaaatggaacctatgaagccttggcactcccaccccgacactgtggatttttattacttacgtggtaaaatgtggtaatgaatgggatggcatgggagtctttctacttcgacttctatgtggaacatagcatggctttggtatttactgtgaccactttacgaaatgcagaaagctagccggaacccactgggactgttgctaagcacagagagaagaaaacctggcactcttggacaacaggattgttaaaatgagcactggtaacaatgagggagcctcaaatggtttctatggcattcattcaggaatcaaagttaatagctattatgtgagtgcttactccgtgccaggcaggtgtgaaaaacactttataggctttatctcaattaatgttcactccataagatgaggaaattgaggcttacaaaaggtaatactatattatatgatatccagttaggatctgtcccatgggtgttcattctatggttaaccattcccctattttttgtgatggaaaataatgctggaggaacatgcttgctgtataagctttcatatgattcttttatactcatgaattatgagtgtaaaaataaagagtcaaggataacatttttgaggatctagatgccaaatgccaaagagtcctgctaatttatactcataggagtaatgaaggaacccattctccatgactcatactgacgcgaatgattgcttataacgttcttttttctttctgatttgtaatgaaaagaggtatgattaagtttaatttg

SEQ ID NO: 4158 - DNA, 266 bp, Homo Sapiens
gggaccactcgggcagctgacaggatgttcacagtatataaatagaaggtccggatggggcatggtctggtgtttagggaatttcctggagtgacatgaaattttctgagagcatcttatatagcatatccttagcttcctctgcaggaatcattgcaaagtcttccacttgcttctgctctatgtgtttcttctgcaaaactagacggaatattctagcacagcgagacccaaatctctcctgtacgacggactccagagtggct

SEQ ID NO: 4159 - DNA, 399 bp, Homo Sapiens
atactagataaccaagagaaataacaacagaaataaagcaatcttaacatttaagaatagtagaagtacaacactcagcatccacgataataatgtaaacaacttgtaaaagagatatgtgattttgggacataatccattaagaagctttttgtcaggcaaggattttcttaaagctacttgataatcaacagttgaccaagaaatagcacagcaagagaccatgatggccgcatactgactgaaattcgcttgtccatgctccagaagaatgtagagttgaagaataagttgtgggcagccttccaggtaggtctcaaatagtctgagcatgctcaaatcagtcactctatctataacttctttatgtagatcaatttgttctccacgaagtaccta

SEQ ID NO: 4160 - DNA, 248 bp, Homo Sapiens
gagcttagtatactagtaacaacattctggcactaaatgactctacagtgaagcccctgccatgaagagctgctctcctatgggcaacccatcaggatgcacggatctgaattggcacgtgagtaaaaggtacagcctgaaaccatcaaattagcacccgttctccaggctcctggacccaagacatattagggtaagtgcaacaaaatttagatggaggtgaagtgactcttaaaaagcgtgaaata

SEQ ID NO: 4161 - DNA, 1352 bp, Homo Sapiens
  misc_feature (495)..(616): n is a, c, g, or t
  misc_feature (710)..(752): n is a, c, g, or t
  misc_feature (765)..(777): n is a, c, g, or t
  misc_feature (867)..(867): n is a, c, g, or t
  misc_feature (892)..(904): n is a, c, g, or t
  misc_feature (1041)..(1053): n is a, c, g, or t
  misc_feature (1333)..(1333): n is a, c, g, or t
agctggagaggctcctacttctccgaaggggaactcgccgagaccccaccatctccctgctgacaggctcggagcctcccaaagccaaggaccccactgtctcctagaggccccggaggagctgggccagccgcccacccccacccccagtgcagggctggtcttggggaggcagggcagcctcgcggtcttgggcactggtgggtcggccgccatagccccagtaggacaaacgggctcgggtctgggcagcacctctggtcaggagggtcaccctggcctgccagtctgccttcccccaaccccgtgtcctgtggtttggttggggcttcacagccacacctggactgaccctgcaggttgttcatagtcagaattgtattttggatttttacacaactgtcccgttccccgctccacagagatacacagatatatacacacagtggatggacggacaagacaggcagagatctataaacagacaggctctannnnnnnnnnnnnnnnnnnnnnnnnnnnnnnnnnnnnnnnnnnnnnnnnnnnnnnnnnnnnnnnnnnnnnnnnnnnnnnnnnnnnnnnnnnnnnnnnnnnnnnnnnnnnnnnnnnnnnnnnnttgcgggtgggaacaggcggaaacaaaaaagggggtcgggaatttggttctatcactattttcctcaagaaaaaactggggcactggagtgggnnnnnnnnnnnnnnnnnnnnnnnnnnnnnnnnnnnnnnnnnnngcctttttctcannnnnnnnnnnnntcccaaaacaacaaaggggcgggatctctaataaatccctttcctctccactcaaaccccacccgcggcgtttctccaaacaaaaaatcncctctttataacctctccagaagtnnnnnnnnnnnnnccaacccctcaccaaaaagtaatcttgcaggggcgggaccaggtaggtgaagacacacacccccccacaaacaaagcgaggggtgtggttcaccaagacgacaccataaaacgggcaggagtatgagaaaaatagannnnnnnnnnnnnttgaggacggcgtgaaaaatcttgtcgccactccctacaataatcccaactcttatgtgtagaaaagatataatgtgaatataacaaacaaacttatgcacacaccggctatatgtattagtcacacaaaaagatgtgggacacataaaaatttgatctcaaagtatcatatgaagaaaatcctcctcccacccagatatactcacacaaaggaggaagcgcgccacgcggccaaacacaaagacgggccccagattaaggagctggggggggcgaacanacattccacttcaaacctg

SEQ ID NO: 4162 - DNA, 347 bp, Homo Sapiens
cctagtaacgggattacaggcgccaccaccatgcccggctatattctaagagatatccgtagatggtttatagaaatgcatttgactttggtaaactgatgaattactggaataaaaagatgtccaacaaactcttattccagtaatccctctttaaattttttaaggacaaacatatcatctgaaaatcatgatattttgtttcttttcatgacgtagatatattttatcttgtcttaactgtgctggccggactctccattacaaagttgaagagcagtggtgatacagagggcatccctgacttgttctgatgttaaaaggaaagcttttattgagtgataggg

SEQ ID NO: 4163 - DNA, 1035 bp, Homo Sapiens
cccctctggatgcaaagtgtcctaccaggccatttttcagattgacatcgaagatacctgaagtgttggtatctgagtatatctgtcactcctcttatctgagaagtgaccttttatttgtaagatgactacagacctatttttagatatgttttcagtacaattttgaacagcaacttgttaagtaaacatcttccagtgttaggaagttgagaaacgttcataggcaagtctgctgttctatgtcaccatcttttgtctcccctagtcccccaggagctctttactttcccctctagttttgggtgtgcatgtttggagtttgtagtgggtggtttgtaaaactggaccattctgccttgctatgggttgttcaagaaagcctcattcttttctgtgaccctttcgcttttgcattcaccctccttcccacctacctgtcctggggctgttgagcagcataataatcccgggagaatgattcccctcatagaaagacaaaagcatccatcccctcatagttaagtagccactggtgtcctgggaatttctggttggatttggtgccctgaacttttttattaagaaatcagatcccagggtgagagtaacaggccatttggccaagaaagaaacctgtttgtttttcttttgaactatgaaaagaccctgtttgtgaatatattttagaaagagaggaaggatgtctgcagaactttgttctgttttctgccacaaaaatgtgaatagttcagagtgaaaaccttttgtgatggttgatgtctcaggaataagctggatctccaatgttttggggatgctttgagtctcaaaaaaaattgataatcagaaaagtaatttttgtttgtttgtttaatgtatccctgttctgtttttaattaaactccaagtctcattttacatattcttggaaaaacctaagttgcgctgtaatttacataagaagcatgctcaggacctctttgtaccccggggagcctgattctttgggaatgaagcttttcattcttcata

SEQ ID NO: 4164 - DNA, 725 bp, Homo Sapiens
ggaggtggaaggggaggcttcgtgcagcagccgcaaaggaaagctgattttcttctatgagtggaacatcaaactgggctggaaaggcatcgttaaagaatctggagtgaagcacaagggattgattgaaatacccaatctttctgaggaaaatgaagtagatgacactgagaatttacaacgggaatgattttaccaacgaaagctatggcaacccaggaattgactgtcaaaagaaaactgagtgggaataccctgcaggttcaggcctcatctccagtggcactgggtgtaaggattcccactgtggctcttcacatgatggaactgtttgacacaactgtagagcagctgtatagcatcttcactgtaaaggaggaagagagagcttgtgttttattttctttaacaaataagaagatcatcatgaaatggagatgtgggaactggccacaagggcaaacagaattacaattgaaggagttcctatctatctgtaaagaagagaacatgaaattctgttggcagaagcagcattttgaagaaataaaaggttcactgcagctgacccccctaaatggttgaattaaaatttattataaggcattactttttgtaagcggaaaaagtgtcacatattacctcttccctatcttttgtttaaaaggactgtctttattttatattggatgaaatctatgaacatatatacaatgtaaaaaaaa

SEQ ID NO: 4165 - DNA, 880 bp, Homo Sapiens
ggggattccgggcggtcggagccgccgggagctgtagttctcccgcggctcagagaagtaggcagagagcggacctggcggccgggcagcatggcggggctggagctcttgtcggaccagggctagcgggtggacgggcggcgcgccggggagctgcgcaagatccaggcgcggatgggcgtgttcgcgcaggctgacggctcggcctacattgagcagggcaacaccaaggcactggctggggtctacggcccgcacgagatccggggctcccgggctcgagccctgccggacaggggccctagtgaactgtcaatatagttcagcgaccttcagcacaggtgagcgcaagcgacggccacatggggaccgtaagtcctgtgagatgggcctgcagctccgccagactttcgaagcagccatcctcacacagctgcacccacgctcccagattgatatctatgtgcaggtgctacaggcagatggtgggacctatgcagcttgtgtgaatgcagccacgctggcagtgctggatgccgggatacccatgagagactttgtgtgtgcgtgctcagctggcttcgtggacggcacagccctggcggacctcagccatgtggaggaagcagctggtggcccccagctggccctggccctgctgccagcctcaggacagattgcgctgcttgagatggatgcccggctgcacgaggaccacctggagcgggtgttggaggctgctgcccaggctgcccgagatgtgcacaccctcttagatcgagtggtccggcagcatgtgcgtgaggcctctatcttgctgggggactgaccacccagccacccatgtccagaataaaaccctcctctgcccacaaaaaaa

SEQ ID NO: 4166 - DNA, 672 bp, Homo Sapiens
ggggaccaacagcctggaagagaagagtcgccttgtgagtgccttcaaggagaggcaatcctccaagaacctgctttcctgtgaaaacagcgaccgggatgcccgctcccgccgcacagagactgacttctctaatctgtttgctagagatctgcttccgcctaagaacggtgaggagcaaaccgtgcaattcctcctggaagtggtggacatactcctcaactatgtccgcaagacatttgatcgctccaccaaggtgctggactttcatcacccacaccagttgctggaaggcatggagggcttcaacttggagctctctgaccaccccgagtccctggagcagatcctggttgactgcagagacaccttgaagtatggggttcgcacaggtcatcctcgatttttcaaccagctctccactggattggatattattggcctagctggagaatgcctgacatcaacggccaataccaacatgccatcaaacatgagggagtggtggttgctacggtgatggggctcagagcagaaccaaagcatgattgtgacctccagaggtgatggtaactgcacacatggtttccaagggttttcctcccaaatttccaggggcctcgcaaggaaagtggacatattctttttggaaatataattcttctaccaaca

SEQ ID NO: 4167 - DNA, 408 bp, Homo Sapiens
  misc_feature (112)..(128): n is a, c, g, or t
ggtactttctcttgttctctgatgatgggtttaaaattaaaagagcatccggttttggtatggggatgatccaggattatgttgtgactgatacatattagttacttgtgcnnnnnnnnnnnnnnnnnggatctttgcaagggcaaaactacaagtaacgagttttatataattaatttaaatttgttacaggttttcatgttcaggataaaccatacttccaccttgggtgagaacacttgcaacagtttattaatgaggtgactttcaccttaggacaactgttgcatgccaagttttttgtgtgtgtgaaacacttcaaaactgatttaaaagatgtaaatttaaaattggttgtatctaatatgccccaggttcggtaaataaacaattctttttaaaaacaaa

SEQ ID NO: 4168 - DNA, 978 bp, Homo Sapiens
  misc_feature (529)..(542): n is a, c, g, or t
  misc_feature (784)..(786): n is a, c, g, or t
  misc_feature (788)..(788): n is a, c, g, or t
  misc_feature (790)..(790): n is a, c, g, or t
  misc_feature (792)..(792): n is a, c, g, or t
  misc_feature (796)..(796): n is a, c, g, or t
  misc_feature (799)..(799): n is a, c, g, or t
  misc_feature (809)..(810): n is a, c, g, or t
tttgtaacatttaaaaaagaaacctgaatagcctttaattctttaataatacacttaaattttatgtaaatcggttttcgccacgtgtgtttgttcacattctaaatgacttaatgggattctcacggtctgtgtctttgtgtcacgtgtataaaatgggcttgtgatgtaagcgtttcatctggtcagtggttcctttgatattgtactgctgctgggagtgggctgtggaacctgccttcgggtaactgggttcctcttgggtagattggagagatgggggtgggcgtgggcaaattctcacacatgttttcttaacctatttgcagaaactttcaaaaggcatttgattaaacctcttggcagtacagtattcttgtatttgttaacgtctgtgtttaggtactggtacctttttgttttaaaatgttctaagtgttggctttaaagtgaatttatctttagtatgatagttatatgaaaattataggatttgtgtgcagagaatttttttataaagtgctttgtnnnnnnnnnnnnnntgtattctagcttttgcggtacatatgtgtgataactttaatacccatgacagttaagtgcaattatttcatcactctaaaaatgctatttttgtgtcagttcctgcaggtgttttcatgtctttgcaaagtgacacattttgatgccttcttgataaagtggtagacattttgtagctttctagaaactttgtattcatacggtatcaatgaagaataaagaaaatgaaagtgtgggaccnnncnanancggnaanaaacaaaaannaccgtgtcggccgccctcggccctcgaaaaacttttctagcaccattccctttgggggcgcgggcccccagtaagtaaaggggaacctgggcccataagctggtttcccaagggagaatcctggggccattggaccttaggggccttgggaatttcctccccccaaat

SEQ ID NO: 4169 - DNA, 878 bp, Homo Sapiens
  misc_feature (814)..(822): n is a, c, g, or t
gggggcgatcccggcgagcaccttggcgcgcggagctggcaccttggcgctgttggtggcggcggagacagctgtgaagtgtgaggttctttgtctgctggcagctaggggcgacgaggcgggacgtcatggaagtgaaggatgccaattctgcgcttctcagtaactacgaggtatttcagttactaactgatctgaaagagcagcgtaaagaaagtggaaagaataaacacagctctgggcaacagaacttgaacactatcacctatgaaacgttaaaatacatatcaaaaacaccatgcaggcaccagagtcctgaaattgtcagagaatttctcacagcattgaaaagccacaagttgaccaaagctgagaagctccagctgctgaaccaccggcctgtgactgctgtggagatccagctgatggtggaagagagtgaagagcggctcacggaggagcagattgaagctcttctccacaccgtcaccagcattctgcctgcagagccagaggctgagcagaagaagaatacaaacagcaatgtggcaatggacgaagaggaccccagcatagaagagcacagctggccccggcgttatcatgaaggcagaaggcctggcagccatttcctggacgttgagagggttgctaatttgatttttatccctcctcccagcagggctgggttttgggggcttagttggggacatcccacaaatgaggttgagagaaatatttgggggcctgggggggaaaaagaacctgggtggaaaactgggtttacggtcgctccgggcactaacgtccgtannnnnnnnncaacgcgcacccgtcggcccccccgctcgtccaggtaaagattcgcctccccaccg

SEQ ID NO: 4170 - DNA, 793 bp, Homo Sapiens
  misc_feature (654)..(654): n is a, c, g, or t
  misc_feature (763)..(763): n is a, c, g, or t
tcgtggggggacgggaagatggcggcgcggacagcgttcggggctgtgtgccggcgcctctggcagggattggggaatttttctgtaaacacttctaagggcaatacagccaaaaatggtggcttgcttctcagtaccaatatgaagtgggtacagttttcaaacctacacgttgatgttccaaaggatttgaccaaacctgtggtaacaatctctgatgaaccagacatattatataagcgcctctcggttttggtgaaaggtcacgataaggctgtattggacagttatgaatattttgctgtgcttgctgctaaagaacttggtatctctattaaagtacatgaacctccaaggaaaatagagcgatttactcttctccaatcagtgcatatttacaagaagcacagagttcagtatgaaatgagaacactttacagatgtttagagttagaacatctaactggaagcacagcagatgtctacttggaatatattcagcgaaacttacctgaaggggttgccatggaagtaacaaagacacaattagaacagttaccagaacacatcaaggagccaatctgggaaaacactatcagaagaaaaagaagaaagctagtcataaagcctcagggaggccatttttgcctaaantttgaaatgaggtgggccagatgagtatgtttaaagtggagagtgcttccagctgagatgatttgagtctgtcctaactggctcattggagttctcgtgccctcatcanctgaagggcacggaatgggaactttaatgg

SEQ ID NO: 4171 - DNA, 762 bp, Homo Sapiens
  misc_feature (541)..(541): n is a, c, g, or t
cgtactcgggtgaataaaggggctactgctgctccccaaagaaagtcagaggatgattctgctgtgcctcttgccaaagcagcacccaaatctggtccttctgttcctgtctcagtacaaactaaggatgatgtctatgaggctttcatgaaagagatggaagggctactgtgacagcttttgatgccagaaaaggcttctgttcacaacagtggcccatggagaaagaggctcttattaaacttagatgaaagagctgcttccattgtcagggtattttctaatttcagttcaaggaatatcctaaaatttagccttgttcagaatttactgcacataaaaaagggtatttcatccagaatagatcagttattgaagcagtgctgctaacatccattccctttcataccaccattttcaccctgtttcttcccctcctccagttctttggaaatttgtgatcgggggatcttagttgcttatttgttttgactcttgtgtgctgtgggcactggagtagagatttctggagaaaaaaaancagtttatttcatcttgccttttgtgtttgagttatttttaatattttcctgtaaatattttgtaatattttacttgtaatgaaatggatcacaatgtcatttcctaatacaaggcaggatatgtgggaagaatatgtacaattatttgattaaaattatttcccactgacctaaactttcagtgatttgtgggaaaaataaataaatgttctacaccaag

SEQ ID NO: 4172 - DNA, 855 bp, Homo Sapiens
  misc_feature (219)..(219): n is a, c, g, or t
  misc_feature (694)..(694): n is a, c, g, or t
  misc_feature (703)..(703): n is a, c, g, or t
  misc_feature (713)..(713): n is a, c, g, or t
  misc_feature (729)..(729): n is a, c, g, or t
  misc_feature (793)..(793): n is a, c, g, or t
gaagaaaaaacaagagatggaaaggacagaggacgagattttgaacgacaaagagaaaagagagacaagccaaggtctacttccccagcaggacagcatcattctcctatatcttctagacatcactcatcttcctcacaatcaggatcatctattcaaagacattctccttctcctcgtcgaaaaagaactccttcaccatcttatcagcggacactnaactccacctttacggacgctctgcctctccttatccttcacattctttgtcgtctccccagagaaagcagagtcctccaagacatcgctctccaatgcgagagaaagggagacatgatcatgaacgaacttcacagtctcatgatcgacgccacgaaaggagggaagatactaggggcaaacgagacagagaaaaggactcaagagaagaacgagaatatgaacaggatcagagctcttctagagaccacagagatgacagagaacctcgagatggtcgggatcggagagatgccagagatactagggaccgaagggaactaagagactccagagacatgcgggactcaagggagatgagagattatagcagagataccaaagagagccgtgatcccagagattctcggtccactcgtgatgcccatgactacagggaccgtgaaggtcgagatactcatcgaaaggagatacntatcagaangatccccggnagtatgccgaaacatntgagagagaaagtctcgacgaaataggatgatcagattgatccgaagaataaatgcgatgcgantaggagtcgatctaagatggctagtcattaaacaaacgcttacgtggcccctccaaaataag

SEQ ID NO: 4173 - DNA, 1800 bp, Homo Sapiens
ctaggagcgaagcgtgcacgcctgtctttctccacctttcgtctttggtcacagcgccatctcatggttagctgaaactttgaaagaggattcattcttcagaggcaaggaatcggagtcctatgtctttctcgcgccttgaaggttacttagctaaagctaaggtagcgagaaacagtacttttcaggtccttccatgatctacattcgtccttgttctcggaggacccagactctatggttaatgatgaagaggggcctctattcgttcagcgcttgcgcatgcgaggaggttccgcatgcgcggtggagtgagcgaagcgcacgctgaggaggatcggcggccggtgagggggaagcaagtctggtctctgtgattgaagaagtcggctctgggctccagtgcgggaatcacacacatacctcagaatgccgggtctaagttgtagattttatcaacacaaatttcctgaggtggaagatgtagtgatggtgaatgtcagatccattgctgaaatgggggcttatgtcagcttgctggaatacaacaacattgaaggcatgattcttcttagtgaattatccagaaggcgtatccgttctatcaacaaactcatccgaattggcaggaatgagtgtgtggttgtcattagggtggacaaagaaaaaggatatattgatttgtcaaaaagaagagtttctccagaggaagcaatcaaatgtgaagacaaattcacaaaatccaaaactgtttatagcattcttcgtcatgttgctgaggtgttagaatacaccaaggatgagcagctggaaagcctattccagaggactgcctgggtctttgatgacaagtacaagagacctggatatggtgcctatgatgcatttaagcatgcagtctcagacccatctattttggatagtttagatttgaatgaagatgaacgggaagtactcattaataatattaataggcgcttgaccccacaggctgtcaaaattcgagcagatattgaagtggcttgttatggttatgaaggcattgatgctgtaaaagaagccctaagagcaggtttgaattgttctacagaaaacatgcccattaagattaatctaatagctcctcctcggtatgtaatgactacgacaaccctggagagaacagaaggcctttctgtcctcagtcaagctatggctgttatcaaagagaagattgaggaaaagaggggtgtgttcaatgttcaaatggagcccaaagtggtcacagatacagatgagactgaacttgcgaggcagatggagaggcttgaaagagaaaatgccgaagtggatggagatgatgatgcagaagaaatggaagccaaagctgaagattaactttgtgggaaacagagtccaatttaaggaacacagagcagcgcttcctggctgtaaatcctagacttgaaagttttccagtattgaaaacttcaaagctgaatattttttatttctaagtatttaaatgttctaacagatcagaacatgaaatgccctcctaaatgtcagctgttgtcacacagtagctccaacactttgagcatttttaagggagtggcctcatttcactagagacaaatctttaagaatagttctaaaattgggcttgtgatttccatttctgatgtctccagattggcacccctttctagttcaatgcctcacgagatttgccaggggcatccaaggcaaacaatcccaatctttctatataaaatgtattcaagcaaacatcaaataaatttctgggatatttaaaaa

SEQ ID NO: 4174 - DNA, 1809 bp, Homo Sapiens
  misc_feature (1538)..(1560): n is a, c, g, or t
ggattctatcatgaagtctttgcaggatgacagcaagaatgagaatctgcttgacctgaaccagaagcttcagttgcagctaaaccaggagaaggccaacctgcagctggaaagtgaagaactgaatatcctcatcaggtgttttaaggatttccaactgcagcgggctaacaagatggagctgcgaaagcagcaagaagatgtgagtgtggtccgtcgcactgagttttactttgctcaggcacggtggcgcctgacagaggaagatggacagctgggaattgctgaattagaactgcagaggttcctctacagcaaggtgaataagtctgatgacacagcagaacatcttctggagttgggctggtttaccatgaacaacctcctccccaatgctgtctataaggtagtactgcggccccagagctcctgccagtctgggcgacagctagctctccgcctcttcagcaaagttcggccccctgttgggggtatctctgttaaggagcattttgaggtaaatgtggtgcctctcaccatccagctgacacaccagttcttccacagaatgatgggctttttctttcctggccgaagtgtggaagatgatgaagttggtgatgaagaggataagtccaaactggtgactactggaataccagtggtgaagcctcggcagctgattgcaacagatgatgcagtaccactgggccctgggaagggtgtggcacagggtttgactcggagttctggggtcagaaggtcatttcgcaaatcgccagagcaccctgtggatgacattgacaagatgaaagagcgagctgccatgaacaactccttcatctacataaagattccacaggttccactgtgtgtcagctacaagggtgagaagaacagtgtggactggggtgaccttaacctggtgctgccctgtctggagtaccacaacaacacatggacatggctagactttgccatggctgtcaaaagggacagccgcaaagccctggttgcccaggtaatcaaagagaagctaaggctgaagtctgcaacaggctctgaggtccggggaaagctagaaactaaatcggacctgaacatgcaacagcaggaagaggaggagaaagcccggctcctcattggtttaagtgtgggcgacaagaaccctggcaagaagtccatctttggcaggcgcaaatgatttggcgattcgagtggctgcagtacaggatctgactctggctcaggctccagggacttgtggggtgggaggggcttcccgttatccacgaggatttgtgggtgtcagagcccataggcatcactcttcagcacctggtctgttcgctgcagggcatggtggacagtaatgctgagttctgtctcacactgatcaggctcagggccagagaggcaacaagagagcaagacccagggaatgggcccagggcaggaccctattcccttggggtcaagtgaaagggtagggggatagtcctgatcaagtgtgataaatttttatagacataattaannnnnnnnnnnnnnnnnnnnnnnttctaagtgtaactgtccttcctctgtgccaggaaacgggagggggctgatcctctgatcctcactccactgtcatgtttgaaagaggtattggtgttctggagtgggggtcaacccctccccagtctctgtgctaagttcacttgggaggatggcagtaggagccagggctggccatgggtcccctacccttccccgtaggatataccctggagaatggcaaaatgatttaaagagaaaaaatatgat

SEQ ID NO: 4175 - DNA, 1098 bp, Homo Sapiens
aggtccatttggaggctgtagaagttacccctgtcatagacttttaaagatcccatttccctaggttttatttcaaatttttattaaggaaggaaaaccaagtcatccgaggtaaaaaatccttttaaactgagttcgtttttcaaaagaaaaaaaaggaagcaaattgtagtacgaagaaagcaggtcccaagcaatgagcctcttaagggaaaaaataaaagagcaatgtaattaaactttccttcaaagaaaggaaagaaacctaaatctgttatggcaaatttggaaagataaatatttcctagtcccataatatgtgtttgttttacaagatatgcttgaatgatgcaaatctatgaagcagggatctgtggcaatccaaattcatccaccagaactccatccttgttttttgtatcagtgggaacaccttctggaattgcaggtgcagatgctgcctcatccaaataagaactgtcttcatcagccagaagctcatcacctagtgcatccaactctgcttctaaatcatcttcatccagttctggggtgccataactgcgactcagtgcttcttggatttcatttgcatcttccatcatatcctctagctggtcttgtaaatcctcaatctggtcgatcttcacttgcttgtatgccttcttcatttcctttactcccagtttcatagcatcaaccgtggtcttggtgtccttcaaagactggatggtataattggcttgttccatgttgaatgactgttgggcaagattgtcccgctgctgctcatacatcctcttttgctttaaaactcgcaaggctttctgcttgaccatattctttgcaggaccctctctcatcttcttgatctgatccttatacttcactagctcagcatccaatcgagaaatcttcttgtcaatggattctgctctactgtccaccgtgccaatgcagtcagtcaggctgggcggcggagccttgggtttcgctttcccgaagagtcggttcatcttgagcagccgcgaagaaacccaaacactagagcaaaaccagaaacggaagcagagtcactcatcccgaaaattccggacc

SEQ ID NO: 4176 - DNA, 447 bp, Homo Sapiens
ctcacatctttatttttgttacatccaaggtgaagagggcaacacatctgtgtaagctgctttttagtgtgtttatctgaaggccgttttccattttgcttaatgtaactacagacattatccagaaaatgcaaaattttctatcaaatggagccacattcggggaattcgtggtatttttaagaattgagttgttcctgctgttttttatttgatccaaacaatgttttgttttgttcttctctgtatgctgttgacctaatgatttatgcaatctctgtaatttcttatgcagtaaaattactacacaaactagcatgaaaatgtcatattgccttcttaatcaattattttcaagtagtgaactttgtatcctcctttaccttaaaatgaaatcaaactgaccaactcaaacaacaataaaaaacaagacgaaaaacaccttgt

SEQ ID NO: 4177 - DNA, 718 bp, Homo Sapiens
ttttttttcagggctcccaattttatttttatttaatgctaaaagttaaagaaaaaaaggtactgtaaatctgacaaatgacagaattcaggtgatatttccatagcgtgattttaaaatataataatgttgatatctgagattacactcacttcagttgacatgagtttcatcatatatagaaaaagtatcaccttcaacttaaaaaaagtaaaggttaaaaggtggcacacttttaaaatacttggtggccaaggaaaggtatatagtaaaagttgtaaaccatgtgtatgttctcataactttaaatgtgaggccacatgaaagacagtacatctgttaaattctataaattgttaaaagcaaaaaagggaaagcttcaacaccccatcccctaatattttgagtattaaaagcacagctgaaatattaggatttgaaatctgatactgcccatgtacagtaagtagctttgtgacatttttatccagctgtggagaatctctgcactgtcatcaggtacaacaaaagatcaaacccatgtcccgatgttaactttttaacttaaaagaatgccagaaaacccagatcaacactttccagctacgagccgtccacaaaggccacccaaaggccagtcagactcgtgcagatcttattttttaatagtagtaaccacaaacacagctctttaaagctgttcatattcttccccccc

SEQ ID NO: 4178 - DNA, 1373 bp, Homo Sapiens
  misc_feature (1169)..(1215): n is a, c, g, or t
  misc_feature (1330)..(1330): n is a, c, g, or t
ggatcgatgcaccgatgaagtaaacgccttagtgcttcagacccagcaagaaattattgaaaatttgaagccattacttccagctggtatacaggataaactacatacactgatcccttgcaagaaatttgatctcagttataatctaaattaccacaagttatgttcagattttcaagaggatattgtatttcgtttttccctgggctggtcttcccttgtacatcgatttttgggccctagaaatgctcaaagggtgctcctaggattatcagagcctatctttcagctccctagatctttagcttctactcccactgctcctaccactccagcaacgccagataatgcatcacaggaagaactcatgattacattagtaacaggattggcgtccgttacatctagaacttctatgggcatcattattgttggaggagtgatttggaaaactataggctggaaactcctatctgtttcattaactatgtatggagctttgtatctttatgaaagactgagctggaccacccatgccaaggagcgagcctttaaacagcagtttgtaaactatgcaactgaaaaactgacgatgattgctagctccacgagtgcaaactgcagtcaccaagctaaaacaacaaatagctaccactttttgctcgcctggtgccaacacagctgatattactcaaaaacagctgcaagaagaaattgctagattacccacagaaatacaccccttggcgaacatacacacgcactcacagctcttaagaaatacagctgctccactctgaccctgacctggcacacgtctactaaccagtcctccaccctcccacgccatcgcgcaaccctaacaacaggagactcgctttgcgtgacccctgctacgcccgcaacccaacacttgctaccatttgcacaccgccccgtcattccttcctcgcaaacctacctcttccaacaatctactcctccctccatccttgctcccttaatacccgcccccttgcgtcctgctggtacccccttttccccccatacgcatcctttgcctaccacgcgccattctcccatctcctttcgaacagtgcgtacccccccgccttagacctttcccccttccggcgcaccccacacacatggtttaccactccttggannnnnnnnnnnnnnnnnnnnnnnnnnnnnnnnnnnnnnnnnnnnnnnttgtttttgttccgcccctccgccgatacatacatcaccaatgccgttcctttattacccctccttccatacccgcgcccctcctttcccgcccgcacttatccgttcttagcgnatctccgttcgccccgtacccttgcgcctcttccgcgttaaaa

SEQ ID NO: 4179 - DNA, 428 bp, Homo Sapiens
ccaaaaagatagcaaaagcagggcaagaatttgcaagaaataatctcatgggcgatgacatattctgttattatttcaaacttttccaggaatatgccaatttacaagtgagtgagccccaaatccgagagggcatgaaaagggtagaaccacagactgaggacgacctcttcccttggacttgccataggaaaaagaccaaagatgaactctgatatgcaaaataacttctattagaataatggggctctgaagactcttcttaactaaaaagaagaatttttttaagtattaattccatggacaatataaaatctgggtgattgtttgcagtatgaagacacatttctacttatgcagtattctcatgactggactttaaaggacatttttagaattttataaaaaaaccacctttattttaaagg

SEQ ID NO: 4180 - DNA, 1732 bp, Homo Sapiens
cggtccggaatttccgggatcgcgggcggggctacgcggaaaggcctgaccacgcagttcttgggtctgtgctgctggcctggggttgtggttgaggccgggtctccgctcctgtgcccgggaagatggtgctaggtggttgcccggttagttacttacttctgtgcggccaggcggctttgctgctggggaatttacttctgctgcattgtgtgtctcggagccactcgcaaaatgcgaccgctgagcctgagctcacatccgctggcgccgcccagccggagggccccgggggtgctgcgagctgggaatatggcgacccccactctccggtcatcctctgctcttacctaatcacgccattttttaacatctctttttgatcaaacaagaaaaggcatttgggaaatgcaaagaggactgagaatactttggcttaaattttgcccccagaatcttgttgtttgcctactgaagagatgaaaccatggcagaagtagaatccttatagaaacaggaccagaaacacctcccttctccaacaaaaggttcattttggtggctgtccgtttgacctgctgtgcttcagtttaattggcttggaaaggggtcagcagggtgaaaccgaaccccagaaaacttgatgaagaaatgtcttttgcccgttttgattacgtgcatgcaaacagcgatttgcaaagaccgtatgatgatgatcatgatcttactggtgaattacagacctgatgaatttatagaatgtgaagacccagtggatcatgttggaaatgcaactgcatcccaggaacttggttatggttgtctcaagttcggcggtcaggcctacagcgacgtggaacacacttcagtccagtgccatgccttagatggaattgagtgtgccagtcctaggacctttctacgagaaaataaaccttgtataaagtataccggacactacttcataaccactttactctactccttcttcctgggatgttttggtgtggatcgattctgtttgggacacactggcactgcagtagggaagctgttgacgcttggaggacttgggatttggtggtttgttgaccttattttgctaattactggagggctgatgccaagtgatggcagcaactggtgcactgtttactaaaaagagctgccatcatggcccagggaggcgggtgaaagctccgtcttctgaattcatctctacaggctcaaaactcctctttgatatcagacctgatgttattttccttcttttggagggcatttgtttggttaagaaggcttctttggactttggaatttcaacccagattttaccttgcagacggaatgacaagcaaaaagtgttgtggggaatcaaatttgttcctttcctcatgcacaaaacataaaggatagtggcgagtttacaagctgtggatgggtttccatagtcttcctttctgtacattgctatatcttcagtcctttggagcaagtggacctaacaagttgagcaaaatgaatatttggatccatgttcctcttgtgaccctgagtcttcatgcaaggagatctgaagctgaacaatgaaaatcttcagcagaaatagaaatggccgtggattgtaatacacactgaaattctgactttctgaatttaaatgtagaataaattttaccaacttggagtactgtatgagtattttcagaagggggaataaactcaaaattat

SEQ ID NO: 4181 - DNA, 296 bp, Homo Sapiens
  misc_feature (181)..(220): n is a, c, g, or t
ggggcttcctcagagcatgtaacaggaaattaaatgggatgagtgtttggtgtggtttgtgtctgatgagttttttaacattcaggtgtagattgtttcagcttctcttgtttcattttcctgaagatttatgtttttgtctaccttgtgagcaggcttttggaagaacctgtttgatgcnnnnnnnnnnnnnnnnnnnnnnnnnnnnnnnnnnnnnnnncttattatgggagcccttcggtcttagaagctgtttgacatgtataataaatggcattgactgggcctgttttaca

SEQ ID NO: 4182 - DNA, 1162 bp, Homo Sapiens
gggataaaggatgttgttgtcaaaactatcatctcgtcagagccctatgtgaccagcctgctcaagatgtatgtgcgacggccctatagctgccatgaactctttggttttgacatcatgctagacgaaaacctcaagccctgggtcctggaagtcaacatttccccaagcctccactacagctctccactggatataagcatcaaaggcctagatgattcgtgaccttctgaatctggcaggttgtgtcactgccgcaatgcagaggatatcagtttccagccccagcagctgcagcagctccaccaccagcctgcccacctcccctggggacaaatgtcgaatggctccagagcatgtcactgcacagaagatgaagaaagcctattatctgacccagaaaattcctgatcaggacttctatgcatctgtgctggatgtcctgacaccagatgatgttcggattctggttgagatggaagatgagttttctcgccgtggagtagatctgctccggagttggtgctacaaagggttccacatgggagttgtctctgattctgctccagtgtggtctctcccgacatcacttctgactatctcaaaggatgacgtgatactcaatgccttcagcaaatcagagactagcaagctgggaaaacaaagctcctgtgaggttagcctactactctctgaagacgggaccacgcccaaatccaagaagactcaagctggcctttccccttactccccagaaacccagttcctcaaaggacagtgaggacaccaggcaaagagcccagcctttccacccagacgttacctgtgatcaagtgctctgggcagacttcaagactttctgcttcctccactttccagtcaatcagtgactccctcctggctgtgagcccataactggcctctgctgttcagaccagtctgaccccctacccctttcaccctgtccctccgcagagtattttttgaagtggttgcattatagagatggtaatttgtagggccggagggatggtagtgatggggagaaggtgaggaaggtcaccctctgtcacctgtctgcatggtcggcacctcatatctcagcagagaagccagtggtcgccacgcagccttataacgcagcgctttggtttctacctta

SEQ ID NO: 4183 - DNA, 546 bp, Homo Sapiens
  misc_feature (348)..(383): n is a, c, g, or t
tcccggtcgcgaggaggaggaggatgtggcgcgcggaggggaaatggctgccgaaaacaagccggaagagcgtttcccaaagtgtattctgcggaactagcacctactgtgttctcaacaccgtgccacctatagaagatgatcatgggaacagcaatagtagtcatgtaaaaatctttttaccgaaaaagctgcttgaatgtctgccgaaatgttcaagtttaccaaaagagaggcaccgctggaacactaatgagagatcatgatgcagccgtcctttgagatttctttttaataatgtgtgacccttcacctttgatcccctgacctgcattaccttggtaaccnnnnnnnnnnnnnnnnnnnnnnnnnnnnnnnnnnnnggtgtacaagctgtaacatttcatctttcaaagtgtaacacgctgatttcctcaaatagagatacccctttgagtgataaatttgcaaaatgctgtcttcattttctgtattaaaattcatttcagttttaaaataaagtgtaatctgtgttttcatccttat

SEQ ID NO: 4184 - DNA, 665 bp, Homo Sapiens
  misc_feature (76)..(76): n is a, c, g, or t
ggcatctgcggagccaaaacccagccatcggggaagggtcagggcttctgtggaacttggaacgtgccaggaccancctgcaaaagccagggtgcgttgatcattctcagatcattgattggcctccacttgggtatgtgaattattcatgtcccagaagaccaaaaagtgctctggttctgagatgagtattttattcgtgttctgtttccgaaacacttagcaaagaaggtcacagtgatgtggagtcgccgcacccatctttgaagatagccagtgtccctggatgaggtgatgatttcccgtcccaaggactctgtgaagtttagagtacagtttgttggggtccaaaagacaccatctctaccccacccaaataaaaatgcactcatctctgtagaacatctgctgtcaaaggccagcctgtcgttagggcatggcttatgcttgacaaaccagtaacaactgtgggatggcgatggtgggatgtgtcgcaagcaattcactagacaatcttcacatgaatgtcggtagccagggtctctcccgagggatggctttagtcttgatgaatgtgaaccatgtcggaattgttaggtagaaacctgggctgggaggcctcggaccccaggctccatccctggcttccccagcctgcggccgct

SEQ ID NO: 4185 - DNA, 698 bp, Homo Sapiens
gtaatattaacggcctttggtagcgaggcctgggtggcgaattcggcacgaggacagagctgagccaagcgtttactgggcaggctgttacgctcagattccaaatgaaaatgtttgagagcgctgactctacagccacaagatctggccaggatctctgggctgaaatttgttcctgtctgccaaatcctgaacaagaagatggtgccaacaatgcattctcagactcctttgtggattctttgccctgaaaggtgaaggccagaaggggaggtggctgacttttgctgtccagcccagctgtaaagccttgggctcccttgcaggattcagaagtgtatttagcatctctagagaagaagctaagaagaatcaaaggtttaaatcaggaagtgacttccaaggacatgcttcgaactctggcccaagccaagaaggaatgctgggatcggttcctccaggagaagttagcttcagagttcttgtggatggacttgattctgatgagagcaccttggaaacatttcaagaggtgggctccagccagataaagtagccgtcagcacagaggaggtccagttatctgattcctccagagtcacaggttgagaagcccagtgggccgaggaaggagccagcagaccggggacaagccagccagccaggaagacaagtaaattacacacacaacacacaac

SEQ ID NO: 4186 - DNA, 2961 bp, Homo Sapiens
gggcctggtaccggtccggaggtcgtagtgatggccatgcggccctgctgctactggccctgctgggctggctgctgctggccgaagcgaagggcgacgccaagccgtgaggacaaccttttagtcctcacggtggccactaaggagaccgagggattccgtcgcttcaagcgctcagctcagttcttcaactacaagatccaggcgcttggcctaggggaggactggaatgtggagaaggggacgtcggcaggtggagggcagaaggtccggctgctgaagaaagctctggagaagcacgcagacaaggaggatctggtcattctcttcacagacagctatgacgtgctgtttgcatcggggccccgggagctcctgaagaagttccggcaggccaggagccaggtggtcttctctgctgaggagctcatctacccagaccgcaggccggagaccaagtatccggtggtgtccgatggcaagaggttcctgggctctggaggcttcatcggttatgcccccaacctcagcaaactggtggccgagtgggagggccaggacagcgacagcgatcagctgttttacaccaagatcttcttggacccggagaagagggagcagatcaatatcaccctggaccaccgctgccgtatcttccagaacctggatggagccttggatgaggtcgtgctcaagtttgaaatgggccatgtgagagcgaggaacctgggcctatgacaccctcccggtcctgatccatggcaacgggccaaccaagctgcagttgaactacctgggcaactacatcccgcgcttctggaccttcgaaacaggctgcaccgtgtgtgacgaaggcttgcgcagcctcaagggcattggggatgaagctctgcccacggtcctggtcggcgtgttcatcgaacagcccacgccgtttgtgtccctgttcttccagcggctcctgcggctccactacccccagaaacacatgcgacttttcatccacaaccacgagcagcaccacaaggctcaggtggaagagttcctggcacagcatggcagcgagtaccagtctgtgaagctggtgggccctgaggtgcggatggcgaatgcagatgccaggaacatgggcgcagacctgtgccggcaggaccgcagctgcacctactacttcagcggggatgctgacgtggccctgaccgagcccaacagcctgcggctgctgatccaacagaacaagaacgtcattgccccgctgatgacccggcatgggaggctgtggtcgaacttctggggggctctcagtgcagatggctactatgcccgttccgaggactacgtggacattgtgcaggggcggcgtgttgatgtctggaatgtcccctatatttcaaacatctacttgatcaagggcagtgccctgcggggtgagctgcagtcctcagatctcttccaccacagcaagctggaccccgacatggccttctgtgccaacatccggcagcaggatgtgttcatgttcctgaccaaaccggcacacccttggccatctgctctccctagacagctaacgcaacacccacctgcaaaacgaactctggggaggtgttcagcaacccccgaggactggaaagaaaagtacatccaccagaactacaccaaagccctggcagggaagctggtggagacgccctgcccggatgtctattggttccccatcttcacggaggtggcctgtgatgagcttgtggaggagatggagcactttggccagtggtctctgggcaacaacaaggacaaccgcatccagggtggctacgagaacgtgccgactattgacatccacatgaaccagatcggctttgagcgggagtggcacaaattcctgctggagtacattgcgcccatgacggagaagctctaccccggctactacaccagggcccagtttgacctggcctttgtcgtccgctacaagcctgatgagcagccctcactgatgccacaccatgatgcctccaccttcaccatcaacatcgccctgaaccgagtcggggtggattacgagggcgggggctgtcggttcctgcgctacaactgttccatccgagccccaaggaagggctggaccctcatgcaccctggacgactcacgcattaccatgaggggctccccaccaccaggggcacccgctacatcgcagtctccttcgtcgatccctaattggccaggcctgaccctcttggacctttcttctttgccgacaaccactgcccagcagcctctgggacctcggggtcccagggaacccagtccagcctcctggctgttgacttcccattgctcttggagccaccaatcaaagagattcaaagagattcctgcaggccagaggcggaacacacctttatggctggggctctccgtggtgttctggacccagcccctggagacaccattcacttttactgctttgtagtgactcgtgctctccaacctgtcttcctgaaaaaccaaggcccccttcccccacctcttccatggggtgagacttgagcagaacaggggcttccccaagttgcccagaaagactgtctgggtgagaagccatggccagagcttctcccaggcacaggtgttgcaccagggacttctgcttcaagttttggggtaaagacacctggatcagactccaagggctgccctgagtctgggacttctgcctccatggctggtcatgagagcaaaccgtagtcccctggagacagcgactccagagaacctcttgggagacagaagaggcatctgtgcacagctcgatcttctacttgcctgtggggaggggagtgacaggtccacacaccacactgggtcaccctgtcctggatgcctctgaagagagggacagaccgtcagaaactggagagtttctattaaaggtcatttaaaccactgaaggg

SEQ ID NO: 4187 - DNA, 1416 bp, Homo Sapiens
  misc_feature (1056)..(1116): n is a, c, g, or t
  misc_feature (1151)..(1166): n is a, c, g, or t
  misc_feature (1318)..(1327): n is a, c, g, or t
ggtctctgctaaaggcatgactttagtcacccccctgcagttgcttctctttgcctccaagaaagtccaatctgatgggcagattgtgcttgtagatgactggattaaactgcaaatatctcatgaagctgctgcctgtatcactggtctccgggcagccatggaggctttggttgttgaagtaaccaaacaacctgctatcatcagccagttggaccccgtaaatgaacgtatgctgaacatgatccgtcagatctctagaccctcagctgctggtatcaaccttatgattggcagtacacggtatggagatggtccacgtcctcccaagatggcccgatacgacaatggaagcggatatagaaggggaggttctagttacagtggtggaggctatggcggtggctatagcagtggaggctatggtagcggaggctatggtggcagcgccaactcctttcgggcaggatatggtgcaggtgttggtggaggctatagaggagtttcccgaggtggctttagaggcaactctggaggagactacagagggcctagtggaggctacagaggatctgggggattccagcgaggaggtggtaggggggcctatggaactggctactttggacagggaagaggaggtggcggctattaaaacttggttatgtcagttcctgtgtgtagacagtaaggaaaaaaaggcatgctatgtgttacgtgttttttccagtatgtttatttgccaccaaaaagtaaatgcattttcacccattctgtggttcattgtagtttaaggaaaccaagcatatagatgcattagtgattttgtttatattatgtaaaatataacgatctcttaaaaataccacagtttgtattttttctttaaggagtaaagatttgcctttaaataacttggtattttcctggctttcgtttaatacaatagaaaataaagtattacaccgaaaaccgcccctgccgcccctcccttttattactatttccaatttcccccacctaacaatatttcaccacaagcccccccgccaaaannnnnnnnnnnnnnnnnnnnnnnnnnnnnnnnnnnnnnnnnnnnnnnnnnnnnnnnnnnnntcccggtggccgctttgccggccttccccgctaannnnnnnnnnnnnnnnactcatcttcatcccccccccacccaacacgggccggaccgcctaattctccgcgcccaccccccccgtaaaaattctcgcccccctatcttatcttccccctttcctattgccccgacctccaacggtccgctcgctctctcgctttactnnnnnnnnnngttccgtctattatcccgacttcctcctacatgttccccattcccgctcccccttctttgtcggacccccctatctgcgcccgctcgcc

SEQ ID NO: 4188 - DNA, 988 bp, Homo Sapiens
gggattcctagttaaggcggcacagggccgaggcgtagtgtgggtgactcctccgttccttgggtcccgtcgtctgtgatactgcagtgcagccatggcagaaccgcagcccccgtccggcggcctcacggacgaggccgccctcagttgctgctccgacgcggaccccagtaccaaggattttctattgcagcagaccatgctacgagtgaaggatcctaagaagtcactggatttttatactagagttcttggaatgacgctaatccaaaaatgtgattttcccattatgaagttttcactctacttcttggcttatgaggataaaaatgacatccctaaagaaaaagatgaaaaaatagcctgggcgctctccagaaaagctacacttgagctgacacacaattggggcactgaagatgatgcgacccagagttaccacaatggcaattcagaccctcgaggattcggtcatattggaattgctgttcctgatgtatacagtgcttgtaaaaggtttgaagaactgggagtcaaatttgtgaagaaacctgatgatggtaaaatgaaaggcctggcatttattcaagatcctgatggctactggattgaaattttgaatcctaacaaaatggcaaccttaatgtagtgctgtgagaattctcctttgagatttcagaagaaaggaaacaatgtgattcaagatatttacataccagaagcatctaggactgatggatcactgtcccgattcaaattattcttcagtccatttccccttcctatttcagctgttccttttcacctaactgttcagtcattcaggttttcaagcagtgctttatctcatgtccttgaatatagtagtgtaactttatttgttaggtaataaatagaacagttccccttcaaaggctgcatttgccttcttctgccacctaaaatattacttccccttcaaatctgccctttggaatcctcatttttt

SEQ ID NO: 4189 - DNA, 1019 bp, Homo Sapiens
  misc_feature (874)..(874): n is a, c, g, or t
tatggcttcccaaatgcagagttacatcttattcgtgtatttctctgagtatttatatcccgtctccttttttcattcttaaaaataaatgaattttcactgttggcacatatgaggcttaaatataaggaacataacacttgcattctaatttttgcatatattgtaaatgtgtctggtatttacagcaaaatactgtgtatccttttatgggtataactaaagtgaacattgcatgcatgtaatgtgatgaatttgtaatttaggagttctttggggcttctgtgacttgggaaatgcttacattcaggccttaatgttgcatgtagctagcatgttttccctactagatgaatatagtcactgttgtataaactaatcgttgcttgctccttctactctgtgatctttccatatcatatttcattaatgatcagttagtgtcaaggagtcaaaacagattaaaattaatttcatgtgtatatggtggaaatttgtggctagtgtgatttttgtttgtttccttttaagtactgttgatcagttgtgacacttactggttaaacttacgttgctaaagatttctctataataagccacacattatatttagactatattaagggaccttggttttcttctagatagcagctgtcccaaagaaaatatttcttctttgtctgttaagatttagctattatctgccagttgttaagaggttttggttccaaactcaaccagcaatgttgagagctgaacttaagatagctgttgtactttttgctttccatctgttactgtccttcattcttggctccctactatctataaacagctgctgtgaagaagaaaagttgaataagagttggcttanattttaaaaaagaaaaggaaaattgaggtttttaggattttcatggtaacaagctctggtataagctaaggctggcaagttcagatactaaaaatattatttgatcatatcctgggatcctttttgaaaaagttaaggactatta

SEQ ID NO: 4190 - DNA, 941 bp, Homo Sapiens
  misc_feature (401)..(401): n is a, c, g, or t
  misc_feature (486)..(744): n is a, c, g, or t
  misc_feature (748)..(811): n is a, c, g, or t
  misc_feature (867)..(878): n is a, c, g, or t
cagcccagacggtcactggaagtggttgggctgattattggcatcatctccattgtcctactcggttcttaaaggcatatggacttgcctcactcctacagcaaatgacggcatgggcaaagaggggcaacagacccaccctgaagacactcctcatctggttgacttggcagggttaagggaaaaagatgtgatgactaggagctgagagcttagtggttctgccagagctgcagagtctttgttggcctcagggtgggacctctcacatctctgtcagcttttcacagacaccaacctgttatgattcatttcacctgtcctgagcactagcaagaaaaattcgctgtagcttgtgatgtattattctggatttctcaactcattcatattgttcattncattcactaatacacattactgtctattataaggggggcacaatggtaggtgctgggaataaaaacgatgtttaacgtttcaaannnnnnnnnnnnnnnnnnnnnnnnnnnnnnnnnnnnnnnnnnnnnnnnnnnnnnnnnnnnnnnnnnnnnnnnnnnnnnnnnnnnnnnnnnnnnnnnnnnnnnnnnnnnnnnnnnnnnnnnnnnnnnnnnnnnnnnnnnnnnnnnnnnnnnnnnnnnnnnnnnnnnnnnnnnnnnnnnnnnnnnnnnnnnnnnnnnnnnnnnnnnnnnnnnnnnnnnnnnnnnnnnnnnnnnnnnnnnnnnnnnnnnnnnnnnnnnnnnnaatnnnnnnnnnnnnnnnnnnnnnnnnnnnnnnnnnnnnnnnnnnnnnnnnnnnnnnnnnnnnnnnncaccccctctctttcctatcaatttccatccccctttttcccgtttcctcgttttnnnnnnnnnnnnaatccaaagctttccgtcggcacacaagccgcgtgcttctcacccccagctcgggggtgcccc

SEQ ID NO: 4191 - DNA, 1290 bp, Homo Sapiens
  misc_feature (15)..(15): n is a, c, g, or t
  misc_feature (41)..(41): n is a, c, g, or t
  misc_feature (85)..(85): n is a, c, g, or t
  misc_feature (88)..(88): n is a, c, g, or t
  misc_feature (205)..(205): n is a, c, g, or t
  misc_feature (668)..(777): n is a, c, g, or t
  misc_feature (866)..(875): n is a, c, g, or t
  misc_feature (1096)..(1096): n is a, c, g, or t
  misc_feature (1231)..(1242): n is a, c, g, or t
cggctgggccgtggntccctgtgccgccgcgctgaacgatnttagagacgccttcacccaggagctacgccgcggcctccgagcntcnggggccaccaccaggtagccagaggggcctggcgcaaacatttaatcctgggctgtccgggcccgaggctgcttgcttttccttccgggctctacagtggcatcaatgtggaggggntcattccgggcactgcgcagcggcttcgaatcccgacttgggattgttggcctgcagacatcccacgcataagagcctaggccagaccgcccgctccgttgaagtcttgtgattggaaaagacacagtgtggagaaagacccctaagcctaacagagatgaaggtaggctgggtccagacacggcacctacggagagccacggaccgaagccagagagcctttcctctgcaagtgggactgaaactcttgacagatgctgctcaatctgactggtatagcaggacagttaattccagggacgatatggatgaaaagacaaccctacagctgccaaattcctttgattaaatgtgtgagctggttgataggcatgagtgtgatacttctcaggcaagatgtgttaagaataccggggactgtaggcctatggtaataataaacacgtattttatgaaatgaccnnnnnnnnnnnnnnnnnnnnnnnnnnnnnnnnnnnnnnnnnnnnnnnnnnnnnnnnnnnnnnnnnnnnnnnnnnnnnnnnnnnnnnnnnnnnnnnnnnnnnnnnnnnnnncaacacaaaccacacctacaccttcttctttgccggcgcccttcgcccctaaaaaagattttttaaaaccctctttttgtgggcccggnnnnnnnnnntacgcgacagcggaacccgtggccctactccttttcttcccaaaaacaacccccccggccaaaaaccaccatccccccttttgccaccttcccctccacaccaaaatacaaaacccaacctcccccgtcgcgagaaaccccactatagaattccttcttttaaacacacaaaccgctccaaaatccgggatgcccttttgcggcgacctcatacttggggnagtttctaaccaacaccgggggtgttctcccccgcggcgcgccccccaaacctaaaatttttgcggactccccggtccggcgtctatccttatctacgaaaaaagcgccgggaaaaccccctatataaccccttnnnnnnnnnnnngcggacgctctccttatcacaaccgcttttttcccacaaccttacttt

SEQ ID NO: 4192 - DNA, 897 bp, Homo Sapiens
  misc_feature (289)..(304): n is a, c, g, or t
  misc_feature (714)..(725): n is a, c, g, or t
  misc_feature (819)..(819): n is a, c, g, or t
gggtaatagtttctaactgtcggacccgtctgtaaaccaaggactatgaatactaaatgttaagttctaggcaattatacggggactcagaaggacctggccgctgccttcattgagtttaaagggacaggattgcccttccgtcaagaaagtatgtaagtgttggactgcacaaattaatgtttttcccacaaccgagactttggagattaagaacttatttgaggatttaagaattagggaaataatttggtggaaaccgggaatgagttctattcttaaacagccnnnnnnnnnnnnnnnnaatgttggatatacggcgaggtagagttggccatatttcagagacttagattgacgtatatgtttctgcattatttttacaacaagtttgtgtatcagagcgggagtgcgggggagggaaagaaaacaaacagtttcagaattgaataggcaagtgactgttttaaagattaagtaataaagatgtcttatctagtaaaacacaccaacaacaccattccgctaccccctccaaacccacctaccccctcgggactagccccgctcaatgtcatcccgtcccccgcccgcatattagttgcacaccaacctcactccctgtgggggggccgcgcttcgcggccaccccccaggaaaaccttttttccaacaccaccctttttccctttggtggggccgccgcggcggtgnnnnnnnnnnnntaggggataagacggggacaacccgctgggggccaccactgacagtctggtgccttccccccaacaagcagggaatacaaccctcggggggggntcgccgttggggacaccctttaaggaggggcctctctcggggagaaatatctctctctcccccgcgccgcttgttatt

SEQ ID NO: 4193 - DNA, 1863 bp, Homo Sapiens
  misc_feature (1102)..(1102): n is a, c, g, or t
  misc_feature (1279)..(1294): n is a, c, g, or t
  misc_feature (1409)..(1409): n is a, c, g, or t
  misc_feature (1416)..(1416): n is a, c, g, or t
  misc_feature (1601)..(1601): n is a, c, g, or t
  misc_feature (1672)..(1672): n is a, c, g, or t
  misc_feature (1698)..(1698): n is a, c, g, or t
  misc_feature (1738)..(1738): n is a, c, g, or t
gggatgttgacggggtcctaagatggctgctgggcgaccacttcctgacagctccagttaatgggactgccagcaggctagacatccttcgccggaatgtgcagcgcttagttctgtgcccgggaggggcttctctctcttttgggattggagtgtggcattgccgccagaaagcctgcagaattccgggttgtgcagccaagcaggaacggtgtacctttctagacccatcctcttgcaatcttggaccctaagaaaagatgtggagtgggctgctacctcctggcctaaatgaaagtgacgctgagtcaaactcggaagatgaagctacgttggagaactctggacttaacttacaggaagataaagaggatgagagcatcagaaaaacagaaatcatagatttctcaacagatgaaccaaaaactgaaacagagtcaaatgtaaatgcctatgaagagtgtccttctggaattcccatagatatgtggaataaatttcaagaattgcataaaaaacattctgaacagaaaagcacaacctcaagattcagagggaaaagaagaaaacgctccagaaaagataaattgaagaatgaaaaagaattacatagtgaaccgtcctcaaatgaaacccagtggaaagagcttactcagtattttggagtcaatgatagatttgacccgcctgttaaaaggaaaaaagttgagaagtcaggccttgaaaagaggatagaccaggctgtggaggagtggaatattgagaaggctgaggaactcagcaaccagctagctactcgagagcttggtgtaaaaattgccaaagcagttgcctgccacaactttgtaaaagccaaaaaggaggttgaaaattcacaggctgcccgaaaaaaagaagaaacttgcatgggggtttgaagcaaagaagagatgggaaaccaaaagcaacatgggatacatgtaacttgccagagtgcttcaagacatttgtagactcaaaatgctcaatttactgagaatgttttcctgcctatgttaatatgtcagaaaattgatagcactaaaacaaaaataagcatacaatttgggattttgattatccnacaacctccccccaaacccaacacaacaaacaccctacccccacctcgccaaacgcacaaaacatccgccccattcctcctcccccaacccacaaaccaccacaaaacctctctttgctgcggccctcctcccccctcaaaaagatcctctctcaaccacttctcttttcttgcggnnnnnnnnnnnnnnnnttccgtcaccggtgaccacccgcgcccacctctattcgtctccctcccaagaaaagaacacaccgggggaccgtcacacgaaaacacaaggcgcgctgtggacatatcctcccgnacccacnaacaacaacacaaaacaccacccccgcgccgggtgggggcgcataccaaccacagaggcccgttttttccttcgaaaccaaaccacccctccagacacaagggcgggtctcccctgcctgcgggtggggccctcttctctcggtggcgcagctttctcctacagccccgcgccggggggcgcccnctccggagcgcggacgccgtcctccacgatacttcctaaaacatttatgtcccccgccacccgacgcggcngccgatcctatatccgtacgaacganaatatggcgtcggggggatacattctcgtccataagcacnatattctccctcgtgccccacttactgcgcaagacagtactctccctccccaccaatcggtgcggtgtgttgctgaacaccccgctcccacctatcccgcacaccgtgcgcgttattaagcccta

SEQ ID NO: 4194 - DNA, 591 bp, Homo Sapiens
ctattggaatcccatgagtttccattttgtctctacccaaacgtattccaaagctgactgcatttgtaccatcttatttcttttggggattatacacctcagccgcctgagatgggggtcagctctttatataaagggaaaccagaccaggcctaaagcccacccctaccctcacccccccaatcctctcctgaaacttaaaaacagtgggaatataggaaagggaaccaaatctcattaattaattgttctcccccattaccccactgaatgaatggccatacaggctaagctgaataatgacaaagttgaaaggaccaatacagccccttttataaggattttgaatgttttgcaaatgtattggtccctgtgttgtattttgtagccttttcctgggcttcagctcccctacttcttgtatgtgtatgcatactgtagctaaccattaaagtcatgacacacacatgagtccactgtgcctttctcagtagcagcagccagtgctggtggtgaggaggaaaagtggacaatccagccctgcagaccttggggccatggggaaccaccaactaacttcttgctgaatcc

SEQ ID NO: 4195 - DNA, 1417 bp, Homo Sapiens
  misc_feature (579)..(593): n is a, c, g, or t
  misc_feature (848)..(905): n is a, c, g, or t
  misc_feature (961)..(1096): n is a, c, g, or t
  misc_feature (1303)..(1348): n is a, c, g, or t
gcaccaacatgagggattcgagaccattgaggagccttcctgacactgatgtgctctacatgactcgaatccagaaggaacgatttggctctacccaggagtacgaagcttgctttggtcagttcatcctcactccccacatcatgacccgggccaagaagaagatggtggtgatgcacccgatgccccgtgtcaacgagataagcgtggaagtggactcggatccccgcgcagcctacttccgccaggctgagaacggcatgtacatccgcatggctctgttagccaccgtgctgggccgtttctagggcctggcttcctcagcctcttctctttaggcccagctgctgggcaaggaattccagtgcctcctacgggggcagcacacttagatattcctggacatccagatagctcacatgtgctgaccacacttcaggctctggactggagctctctggcatgggggtggggcctcagatgctggggcccagtctgccccatcttcattcctgcaccttaaacctgtacagtcatttttctactgacttaataaacagccgagctgtcccttgaaannnnnnnnnnnnnnnaaaaagggcgcggccggcctcataaagctattccccacagaaggcgcgccccaagccctccacgcggtatccccagcctcacccaggcccacacacacggggacccaaaaaagagagagccgaataaatcacccaacggcaccgtggcacgcccactacacacaacggccaccgcaccggcgacacacccggccaaccacgcgggaccaccacggcgcacaacggaaccccatcaccacccacgcagcagacggnnnnnnnnnnnnnnnnnnnnnnnnnnnnnnnnnnnnnnnnnnnnnnnnnnnnnnnnnnaacagcgcaacacactcacccacactcccccaagcggcataaagcgcgtcacacannnnnnnnnnnnnnnnnnnnnnnnnnnnnnnnnnnnnnnnnnnnnnnnnnnnnnnnnnnnnnnnnnnnnnnnnnnnnnnnnnnnnnnnnnnnnnnnnnnnnnnnnnnnnnnnnnnnnnnnnnnnnnnnnnnnnnnnaaacgctcccacatgacaggagaggaggcgcaggtcggcggccaccggctccggccacggcagaactgtgagagccgagaggtgtcggcaacgagcgcaaaccgcgccggggcatacctacaataacaccaccaatatacctcaacacgcctccacccacctcaaccctcccccctataacacttccccaccatcacccactcatgnnnnnnnnnnnnnnnnnnnnnnnnnnnnnnnnnnnnnnnnnnnnnnattcaatcctcccttccacacataaaactcaaatgaaaacccactacagcgtcacatttagcctgttca

SEQ ID NO: 4196 - DNA, 1305 bp, Homo Sapiens
  misc_feature (711)..(945): n is a, c, g, or t
gggactgcgacggcaggctttgagtgtagcacttggtagttcttcctctgctctgcttcccttcggaggaaaatttcaggctgaaggtttagcgggtgccgcctctaaagagagcaatcactacacttatggctgggattttgcgcttagtagttcaatggcccccaggcagactacagaccgtgacaaaaggtgtggagtctcttatttgtacagattggattcgtcacaaattcaccagatcaagaattccagaaaaagtgtttcaggcctcacctgaagatcatgaaaaatacggtggggatccacagaaccctcataaactgcatattgttaccagaataaaaagtacaagaagacgtccatattgggaaaaagatataataaagatgcttggattagaaaaagcacatacccctcaagttcacaagaatatcccttcagtgaatgcaaaattgaaagtagttaagcatttgataagaatcaagcccttgaagttgccacaaggacttccaacagaggagaacatgtctaacacgtgcctcaaaagcactggggagttagtagtgcagtggcatctgaaacctgtggagcagaaagcacatgagtcctaatgccccagcagcttccgattggaaaatgcaaattgtttttatttaaagatggtgagaaagtgttttcattaaaatatgttttcaaaaccattttcannnnnnnnnnnnnnnnnnnnnnnnnnnnnnnnnnnnnnnnnnnnnnnnnnnnnnnnnnnnnnnnnnnnnnnnnnnnnnnnnnnnnnnnnnnnnnnnnnnnnnnnnnnnnnnnnnnnnnnnnnnnnnnnnnnnnnnnnnnnnnnnnnnnnnnnnnnnnnnnnnnnnnnnnnnnnnnnnnnnnnnnnnnnnnnnnnnnnnnnnnnnnnnnnnnnnnnnnnnnnnnnnnnnnnnnnnnggcgccaactgtacatccagccagagagatcacgatcgaactacaaccagggcgaaaccacaaagaacaacgcacaacaccgagacaaacaccggccggcacagcaaaccaaagcaagcagaaaccatagacagagccacagcgataacactcgatgagaacacgcacgcacacaacccaccgaaaacaggaacacacaaccgcaaccacagtacaacaatagcacaaaaaggtataacagccttatacaagatgcgagccacttaacagacccccatagcgcagaccacaaaataccacacacagaaccataaaacatctacgatcacgataaccagataggaactcgacgcgacaagc

SEQ ID NO: 4197 - DNA, 973 bp, Homo Sapiens
  misc_feature (438)..(469): n is a, c, g, or t
  misc_feature (509)..(527): n is a, c, g, or t
  misc_feature (557)..(557): n is a, c, g, or t
gcgacccgcaccagagaagacacgatgcggggctgggtggggcgagagagtcggcgggcggtgaaacatcgcgaggggagaggaaaaagggcccgcgtcaacaaacgtggtggggtaaagagaggaaaagtgctcgcggcggggcggcgatgatagcatgtaggagatcggaggggtaatccagcgagggtgagagcgagacaagccaatacactggggggtcaaggacgagggggttactcatggtgtgggagaaagaggcggcggcgataaagcgattgactgggcaggccggtcagctcaggcgagcggcggtcacccgcggagccgactggtctggttgggtggagggaaattggggtgggcaagccggggctattcacacagcaagacgagggggcttacggcgcggtcaaacctctgcggagcaacgcacannnnnnnnnnnnnnnnnnnnnnnnnnnnnnnnactagttgattagtggggtgggtcgtagtgcggcactgtnnnnnnnnnnnnnnnnnnnacagaggtgttggatggggtttgattttcngggtttgcttagagaaaatgttttattttcattagtggacaactacctgttcagttgaatggtaagtttcacactgcatcctaaaataagacagatactctgctggcaagtagaaaatagactaatttcattttttatctgttaagctctcttgataaaaaaggcaaaccaggccagttttaaatttaagaaacagaaacattggcagtgcttcttgtatcaacacacttcatattcagaactactcccaagagataacatattatctccttttcaaagatggggaaactgaaactgggcattatctataatgaccaaaccacatagtaagaggcacaagccagcattagaattcagatcttacttgaaagtgcacagcttaaaattttttaaaaaattccttccattataaatcc

SEQ ID NO: 4198 - DNA, 783 bp, Homo Sapiens
  misc_feature (487)..(532): n is a, c, g, or t
  misc_feature (611)..(611): n is a, c, g, or t
  misc_feature (633)..(645): n is a, c, g, or t
ggggaacccgccctccgaatccagagaggcgctgctgacaccgccgccacaccgccgccacaccgccgctgcctcagtcatgccgaagcacgagttctctgtggacatgacctgtggaggctgtgctgaagctgtctctcgggtcctcaataagcttggaggagttaagtatgacattgacctgcccaacaagaaggtctgcattgaatctgagcacagcatggacactctgcttgcaaccctgaagaaaacaggaaagactgtttcctaccttggccttgagtagcaggggcctggtccccacagcccacaggatggaccaaagggggcaggatgctgatcctcccgctggcttccagacagacctgggacttggcagtcatgccgggtgatggtgttcctgcggagaccctcagttgtcctattccttcctagcttccctgcaataaaatcaagctgcttttgttggaaaaaaaaaaatcacaannnnnnnnnnnnnnnnnnnnnnnnnnnnnnnnnnnnnnnnnnnnnnttacccttttccaatttacccacccatactaccctgaacatttcacccaccctgggaaacaaaataactaaaccccttnaaaataaaaaagttgtgggcgnnnnnnnnnnnnnaagaaaaattttttttaaaaaccctttttgtttggggcgcggcggcgccccaaaagagaaaagagaaaaagggcccaaatccttgtctccccaaaaaaaccccgcgggcaaagaaaataggggtttggaatttccccc

SEQ ID NO: 4199 - DNA, 578 bp, Homo Sapiens
gctcgcgatctagaactagaaatgatttaaccccagtggaatacattaattcttaaagcggctcttttcagtagtgtgacttttagaaagtgtctcagtagttaaggaagctaacagtcttagatctacttttaaaacggatggccttcttaagaataaagcaaaaggtgattttctacataatttttgctttccaaaagtgatgatatgctctcctacagcaacatatgagaagaaaaaaggcttatctagattcgaaaattaacagcaattatagtaatatatcccctccttctaaatagtaaaaagctctgattgtacaagaattacctgtgctagtcaagttgttgtttttccttgaacaactttggaaaaatggatttgacagtacataatcagttctactaaccaaagcttgtatttggaaatttactttttgtacaaattgaattatataatgcttaaaatactttgtcactttataagcaaaatgcatagtacttaatttgtttatactgtaaagtatatgttaaatgcttttatcactttgagaataaaaagttactaatgctaaaaaa

SEQ ID NO: 4200 - DNA, 861 bp, Homo Sapiens
  misc_feature (167)..(175): n is a, c, g, or t
  misc_feature (194)..(194): n is a, c, g, or t
  misc_feature (201)..(201): n is a, c, g, or t
  misc_feature (292)..(292): n is a, c, g, or t
  misc_feature (295)..(316): n is a, c, g, or t
  misc_feature (319)..(331): n is a, c, g, or t
  misc_feature (333)..(334): n is a, c, g, or t
  misc_feature (336)..(336): n is a, c, g, or t
  misc_feature (339)..(344): n is a, c, g, or t
  misc_feature (346)..(349): n is a, c, g, or t
  misc_feature (351)..(353): n is a, c, g, or t
  misc_feature (355)..(365): n is a, c, g, or t
tgtggggtaggacgggacccgcgtgctttcttgtggtcccgcgccgggttttttcttctgggggacgacaccataggtaatgggcccactttttctcttctctggtgcggggcgggccggcgcgcgcccccacagaaagggggtgtgagaaaatatatttttgtgtnnnnnnnnncggcgccgccccaaaacanaccccanctctcccctcttttttctcccaaaaaaccaacgctccgctaccttaaagctctatccttctctccccccaccttctccttcttctttcccnctnnnnnnnnnnnnnnnnnnnnnnccnnnnnnnnnnnnncnntnacnnnnnnannnncnnncnnnnnnnnnnnttaacctcacacattaactttattcaaacaaacagcacttacaggaaatgtaaagtagaaaaagatttctgcccactttacctacggagacatgataaacacgcaaaaaaaacctagaaattaagcaaaaaatagcacaataatttaactgaaagcaacaagggcaaaactgtctccttttgtagtttgtggtaccttatagtagtgctcattcagtttcgtttgcttgataaatctgaggactatgagatatcagagttactagtagggtaggagtgctgtaagggtactgggagaagtaggattagttaggggcagatcttgaattctggccaagaaactgatatttaacccataaagagatagtcactatatgttatcaaataggagaataacacaaatgagaaatgactgttaattccagaagcataataacagatgtgaaatatagaataatgtaatatttataataaaaacgtttgaccaggaaaataaa

SEQ ID NO: 4201 - DNA, 342 bp, Homo Sapiens
ggctccaagatgcttttcatatagagtgaaatatcccaggataactgcttctgtgtcagtcgcatttgacgcataactgcacaaatgaacagtgtatactcttggttgtgcattaacttacatgtataatttttggcatctgtgttcacaaatgcatgtgttagcaaatcacctttatttataagtgacaataattgaagttaaggatataaagaaacctgcatttgtagtccagcgttttcatttggtccataacacaatgtatggaaatgtgaaagacaattttgtacatttgtttgttactaactcagatcattaaaatgaaaacaatttttttaaaca

SEQ ID NO: 4202 - DNA, 835 bp, Homo Sapiens
  misc_feature (775)..(795): n is a, c, g, or t
attacatggctgtttttggtcccctaagaatctccacatcattgtctttctttgtgccttttccttggtgagcaacagaaagggaggggttcccagcctctaaaaatgtgctttgtgatcaggagtgcgctccaaccaaaatacgcgcgctgccctttcgaggccagtgagctcagcctccaaggctttaaagccacatttcagcaagagaaagcgctgagagctcgcaggttcattaaagaaggcaaagcactggtttctctccttagaaaagtaggtttcttggcttgatgtagactggcttgctttgatttttagtgaagggaatgtacgtaaaacaaaatagggcttggctggtcaaaggagacaagcaggatggatggatggatggatgaatagatagatggtgtttgcatgtaaattgcagagaaaacaaaaccaaagctgattggaaacaattaattgtgggtgtctgagggggaaggtcgcagctttgggcagctttgagaagcggtacaagagctctgtgcctgtgtgtccagccctggagccagccagtgcatttattttaagctcttagaagcaactccttggcccaggaatgcgtgacccctgagatgggtccacgcatctctctacacttccttctctccgtgggatactggactcgtgcctctgcgcccattctcttctcacgcatatccatgagctttaatttcactttctgatcacggtacgtccataaagccagtattacacttaaatgaagtattcnnnnnnnnnnnnnnnnnnnnnagaaggtaaacaaatttaataaagctaccaataatgcaaa

SEQ ID NO: 4203 - DNA, 879 bp, Homo Sapiens
  misc_feature (695)..(742): n is a, c, g, or t
  misc_feature (779)..(790): n is a, c, g, or t
  misc_feature (810)..(822): n is a, c, g, or t
gggtctcgcgagactttcaggggtcggagcgcgggggccggccgagaggaaagctggaggcgcgggtggggaacatgtctgagtcggagctcggcaggaagtgggaccggtgtctggcggatgcggtcgtgaagataggtactggttttggattaggaattgttttctcacttaccttctttaaaagaagaatgtggccattagccttcggttctggcatgggattaggaatggcttattccaactgtcagcatgatttccaggctccatatcttctacatggaaaatatgtcaaagagcaggagcagtgacttcacctgagaacatcccagcgggaggacaagagaaatcatgtttattcctcaggaatactgaagtgccctggagtaagctgccattcttctgtaacaatgttatcagtaatgctttaaactccagcacctggttatgcatttgaaaccaagtctgtttcttgttttgtattttctctctggaagttgtaaggaggtggtcttaaataaattaaacaaaaataggaaaaaaaaagccgggagaaggcgcagacagtgcgcgaaggcgacacacggccctcgcccccttgcggcgccggtccaggcggcgaacggattctccgcccccacaacgcaccccaaagatctctttccgcgccctgtcgaaaataggggataacttannnnnnnnnnnnnnnnnnnnnnnnnnnnnnnnnnnnnnnnnnnnnnnntgggtgtaaatttttttcttaacaaaaactcctttannnnnnnnnnnngcggggggaccgcgcgcggnnnnnnnnnnnnnttttgggtggtgtgcgaggatcgtgaagtgacaaagaggtgggggcgcggcgaccac

SEQ ID NO: 4204 - DNA, 838 bp, Homo Sapiens
  misc_feature (573)..(573): n is a, c, g, or t
ggggaagaggccaatcaggctatcaatccaaaactgatgcagcttgtggaccacagaggaggcggcggaggcgggggtggtcgttctcgttaccggaccacttcttcagccaacaatcccaatctgatgtatcaggatgagtgtgaccgaaggcttcgaggagtcaaggatggtggccggagagactctgcaagctatcgggatcgtagtgaaaccgatagagctggttatgctaatggcagtggctatggaagtccaaattctgcctttggagcacaagcaggccaatacacctatggtcaaggcacctatggggcagctgcttatggcaccagtagctatacagctcaagaatatggtgctggcacttatggagctagtagcaccacctcaactgggagaagttcacagagctctagccagcagtttagtgggataggccggtctgggcagcagccacagccactgatgtcacaacagtttgcacagcctccgggagctaccaatatgataggttacatggggcagactgcctaccaataccctccctcctcctccaccctctcctccttnacgtaaatgaaaccccctcaagtgggaagtgactcccagccatgcccctgccgcgaaacaccccaacgataaatacacttcccttggcgggcccgcctccgggccctccgaagaaactttttcaaagacccatttccgtttgggcgcggcgggggccccccgtcagggcaaagggggaacaatgggggtccattaacctggtgtgttccccaagggaggacaaccccccggggtcaaatggaaccctaaagtggggctcttgggc

SEQ ID NO: 4205 - DNA, 993 bp, Homo Sapiens
gatgggtattaagagtgaagatgaagctggatgtagctcagttgatgaagaaagttacaagactctgaagcagcaggaagaagtatttcgaaatttagatgctcagtatgaaatggcaagatcacaaacccacacacaaagaggaatgggtttgggtttcacatcttcaatgcgaggaatggatgcagtttgaaaatgatcacacttgtaaagtttgggacttatagacttcttgttctgatgtcacgtccttgttcaccaaacagctagcactctagcttgcatgggtgttgcattgactttaatttattgaaaaatacaaatttttgtaaatatcagatcagtgatactggtgttagtgttgtaatcaggttaaacccacttccattaaacttgacaggactatagaaggataatattttttagttcatgaattctacttttcaaatatataaaagctgcaggtggggataaaatctcatacatggattttttcgtgtccgctgtcttgtgtacttttgtacttaaccttgtacagttattttcatctcttgaaacatgaaagaaatgttatgtagatgttctttagaagatctggccatttggtacataatccagcacagataagctgggtggtaatgataataaaaatggttttctcaaaactggtgttaatttaagttacctgggatgtttctttgaattgtttatagtttctgtagcattttggcaatcgctgttagaaaaacactagctagaaatcgcctccccacaacctttttaaggccagttaactatactacagtcaataccgtgggtgagcaaaaatgtacaaggtggcacgggggaaaactttattcacaataggtatggttccctatcataagggacagacttggaattcagtcattcgtccaaatattacatgtgttattccaggagaatgatcactgctccaagggatgtaagcctctatttaaaaggtgcttttac

SEQ ID NO: 4206 - DNA, 988 bp, Homo Sapiens
  misc_feature (872)..(882): n is a, c, g, or t
  misc_feature (950)..(950): n is a, c, g, or t
gggtttagctaaacaaaggttcttcattgcttttctgttcacagttgtggctctgttttttaagaatgtaacttgtttttagattatacttgcatctgtgacttttctaccagccacgttgacacaaaacaggttctggctcaggtaaagttgcgtcagtcacctgcagcagaaatccctcttcattcctcttctctctgttcattcctcttctgcgccgctctgaagcttctaccaatactctttccatattgtctttttcaaggaagagaaatgcattcaacattacgtccctcctgcctatccaggcccaggactttatgctgctctatacaccgccattccagtatacacaccggcatttattgtcgaaatgttttcttagccaggccctcagctctcactatacaataaactgtttctacctatccccccctccctactgatcccaatcatgcctgacgagtcggacccccatatgtctgacagtggacgccggcggatcacccccccctcccgctaagacccatctccccgcccatgactcccccagtagtaatcgcccccgccaggaaataagttgccgcacctatccgagtgcgcgcgtggggtagcatacactccctgcgtatcttctcggcgataccgagagagtcgtaccccacgagtacccccacgacacccccaacttcgcccgccgacatagaggcacccgggagcccagagcgccggcattgccccatttgatccctgataccccccccactcttgacccccctgtccgtattatggcccactctattttctcccgccgtttaatattagcaccgctcttccccccactctgtcccccctagccagtctctatacannnnnnnnnnngtagcatttcgtattcgcaccgctaggtcaaccccgccgtatcccccccgctttatatgcccctcttnattttcgccacgcctgccttgtgttttgtcccaccccc

SEQ ID NO: 4207 - DNA, 951 bp, Homo Sapiens
tgcagagcttccttctcctacatctgcttgctgctgggatacccgtcaccacccctggtccttttactgtgccatggcaggcagtctcggcttgggccctcatggccacacagaccttctactccacaggccaccagcctgtctttccagccatccattggcatgcagccttcggtgggattcccagagggtcaatggctcctgtacttggctgcctgctttgctagtgggagccaacacctttgcctcccacctcctctttgcagtaggttgcccactgctcctgctctggcctttcctgtgtgagagtcaagggctgcggaagagacagcagcccccagggaatgaagctgatgccagagtcagacccgaggaggaagaggagccactgatggagatgcggctccgggatgcgcctcagcacttctatgcagcactgctgcagctgggcctcaagtacctctttatccttggtattcagattctggcctgtgccttggcagcctccatccttcgcaggcatctcatggtctggaaagtgtttgcccctaagttcatatttgaggctgtgggcttcattgtgagcagcgtgggacttctcctgggcatagctttggtgatgagagtggatggtgctgtgagctcctggttcaggcagctatttctggcccagcagaggtagcctagtctgtgattactggcacttggctacagagagtgctggagaacagtgtagcctggcctgtacaggtactggatgatctgcaagacaggctcagccatactcttactatcatgcagccaggggccgctgacatctaggacttcattattctataattcaggaccacagtggagtatgatccctaactcctgatttggatgcatctgagggacaaggggggcggtctccgaagtggaataaaataggccgggcgtggtgacttgcac

SEQ ID NO: 4208 - DNA, 756 bp, Homo Sapiens
  misc_feature (598)..(615): n is a, c, g, or t
gggttcttagtcgtgtgtacatcattgggaatggagggaaataaatgactggatggtcgctgctttttaagtttcaaattgacattccagacaagcggtgcctgagcccgtgcctgtcttcagatcttcacagcacagttcctgggaaggtggagccaccagcctctccctgaataactgggagatgaaacaggaagctctatgacacacttgatcgaatatgacagacactgaaaatcacgactcatccccctccagcacctctacctgttgcccgccgatcacagccggaatgcagctgaaagattccctggggcctggttccaaccgcccactgtggactctgaggcctctgcatttgcgggtggtctgcctgtgatattttggtcatgggctggtctggtcggtttcccatttgtctggccagtctctgtgtgtcttaatcccttgtccttcattaaaagcaaaactaaagaaaaccgaacacaaactcaagaaacattaacacaaagcaacaatatgcacaacgggaccatgctgcaagaagataaacaccccccgtacgaaacatcaacaataacaatattttttttgtggnnnnnnnnnnnnnnnnnnaaaaaaatttttcaaaacatttccttttggaccccccgggcccccctaagggaaaagggaaaagtgggccctatagcttttttcccacagaaaaaaccccggggccaggaaaaaaaggggggtgggaaatcccccacccac

SEQ ID NO: 4209 - DNA, 2258 bp, Homo Sapiens
ggatcaccaattccggacacacttggactcgacagactctaaggctctacagagagcggctgcagagctcacccggctggcaggagccaccgaggccggacacgtgggcgacttattgaccaagtggggaggaagcagccccgcactgctctcccgactgcggaccaccgttgggctcctgcgcatcctaagccccaccgcctcacctccagtccccacagcgttcgcgctcccagcccaggtccagccggccggtgagcgcctggggaccgcagaggtgagagtcgcgcccgggagtccgccgcctgcgccaggatggagttcgtgaaatgccttggccaccccgaagagttctacaacctggtgcgcttccggatcgggggcaagcggaaggtgatgcccaagatggaccaggactcgctcagcagcagcctgaaaacttgctacaagtatctcaatcagaccagtcgcagtttcgcagctgttatccaggcgctggatggggaaatgcgcaacgcagtgtgcatattttatctggttctccgagctctggacacactggaagatgacatgaccatcagtgtggaaaagaaggtcccgctgttacacaactttcactctttcctttaccaaccagactggcggttcatggagagcaaggagaaggatcgccaggtgctggaggacttcccaacgatctcccttgagtttagaaatctggctgagaaataccaaacagtgattgccgacatttgccggagaatgggcattgggatggcagagtttttggataagcatgtgacctctgaacaggagtgggacaagtactgccactatgttgctgggctggtcggaattggcctttcccgtcttttctcagcctcagagtttgaagaccccttagttggtgaagatacagaacgtgccaactctatgggcctgtttctgcagaaaacaaacatcatccgtgactatctggaagaccagcaaggaggaagagagttctggcctcaagaggtttggagcaggtatgttaagaagttaggggattttgctaagccggagaatattgacttggccgtgcagtgcctgaatgaacttataaccaatgcactgcaccacatcccagatgtcatcacctacctttcgagactcagaaaccagagtgtgtttaacttctgtgctattccacaggtgatggccattgccactttggctgcctgttataataaccagcaggtgttcaaaggggcagtgaagattcggaaagggcaagcagtgaccctgatgatggatgccaccaatatgccagctgtcaaagccatcatatatcagtatatggaagagatttatcatagaatccccgactcagacccatcttctagcaaaacaaggcagatcatctccaccatccggacgcagaatcttcccaactgtcagctgatttcccgaagccactactcccccatctacctgtcgtttgtcatgcttttggctgccctgagctggcagtacctgaccactctctcccaggtaacagaagactatgttcagactggagaacactgatcccaaatttgtccatagctgaagtccaccataaagtggatttactttttttctttaaggatggatgttgtgttctctttatttttttcctactactttaatccctaaaagaacgctgtgtggctgggacctttaggaaagtgaaatgcaggtgagaagaacctaaacatgaaaggaaagggtgcctcatcccagcaacctgtccttgtgggtgatgatcactgtgctgcttgtggctcatggcagagcattcagtgccacggtttaggtgaagtcgctgcatatgtgactgtcatgagatcctacttagtatgatcctggctagaatgataattaaaagtatttaatttgaagcaccatttgaatgttcgtaatagtagaaaatgatgtgaattttctttctgttcggctcctatttttctcatcattttgttttctttaattgggttgaatggagtagatagaaatatttatggtttaggtaacagttagatgtttcctaagaatgcaaactgccttttccacacaaaggctgggaataaaattctgggtattctcgtattctcatttaaaggagtttagctttcagagagaaacagcaggattgcttttgaccttttagaagattggtctccagtaaaggtggacatttttgagatttttataataaagaatttaattgctctgca

SEQ ID NO: 4210 - DNA, 603 bp, Homo Sapiens
cggaggcacagctgggggctggggaaaaatgcagccagcgatgcagaaatgaaccaccggagttcaatgcgagttcttggggatgttgtcaggagacctcccattcataggagaagtttcagtctagaaggcttgacaggaggagctggtgtcggaaacaagccatcctcatctctagaagtaagctctgcaaatgccgaagagctcagacacccattcagtggtgaggaacgggttgactctttggtgtcactttcagaagaggatctggagtcagaccagagagaacataggatgtttgatcagcagatatgtcacagatctaagcagcagggatttaattactgtacatcagccatttcctctccattgacaaaatccatctcattaatgacaatcagccatcctggattggacaattcacggcccttccacagtaccttccacaataccagtgctaatctgactgagagtataacagaagagaactataatttcctgccacatagcccctccaagaaagattctgaatggaagagtggaacaaaagtcagtcgtacattcagctacatcaagaataaaatgtctagcagcaagaagagc

SEQ ID NO: 4211 - DNA, 646 bp, Homo Sapiens
cgcctttgccccatccccatctcctggaatgcaccccaggctccacctgggccaggcccgcatctgctgcccagcaacgagtgcgtggagctcttcagaaccgcctacttctgcagagacttggtcaggtactttcagggcctgggccccccaccgaagttccaggtaacactgaatttctgggaagagagccatggctccagccatactccacagaatcttatcacagtgaagatggagcaggcctttgcccgatacttgctggagcagactccagagcagcaggcagccattctgtccctggtgtagagcctgggggacccatcttccacctcacctctttgttcttcctgtctcctttgaagtagactcattcttcacacgattgacctgtcctctttgtgataattctcagtagttgtccgtgataatcgtgtcctgaaaatcctcgcacacactggctggtggacgaactcaaggctaattttttaatccttttttatatattaaattttgagatatacgccctctttcatctgtaagggactaggcaaattccaaatggtgtgaacccagagggcctttccctcttaccttgacctcccaattctaaagccaagccacttcatattttcctcttagaata

SEQ ID NO: 4212 - DNA, 746 bp, Homo Sapiens
ggcaagagcggggatggatgccctgatgtagatgttcatggcccagactggcacctgaagatgcccaaggtgaaaatgcccaaattcagcatgccaggattcaaaggagagggcccagatgtggatgttacccttcctaaggctgacattgagatttctggccccaaagtggacattgatgcccctgatgtcagtatcgaaggtccagatgcaaaactcaagggtccaaagttcaagatgccagagatgaacatcaaggcccccaaaatctccatgcctgacattgactttaacctgaagggtcccaaagtgaaaggcgatgtggatgtctctctgcccaaagtggaaggtgatctcaagggccctgaaattgacatcaaaggccccaaagtggacattgacacccctgatgtgaatgttgatggcccggaaggaaacttgaaggggcccaagtttaagatgcctgagatgaacatcaaggctcccaagatctcgatgcctgacgtggatgtgaacctgaaggcccaaggtgaagggtgatgtggatgtttcactacctaaggtggaaggtgatatgaaagtgccagaggtagacattaaaggtcctgaagggaagctcaaaggtcccaagtttaagatgcctgatgtacatttcaaaagcccacaaaggctaaggtccacatctggatgtgagcctgcccaaggccgacatcgatgtctccggacccaaggtggacgttgatatt

SEQ ID NO: 4213 - DNA, 596 bp, Homo Sapiens
tccatggtgctggccagtgaaggacaagatggggccatctgcctgtgggatgtactgactggcagccgggtcagccatgtgtttgctcaccgtggggatgtcacctccccttacctgtaccacctcctggtcatcagcagtggcctggatgacctcatcagcatctgggaccgcagcacaggcatcaagttctactccattcagcaggacctgggctgtggtgcaagcttgggtgtcatctcagacaacctgctggtgactggcggccagggctgtgtctccttttgggacctaaactacggggacctgttacagacagtctacctggggaagaacagtgaggcccagcctgcccgccagatcctggtgctggacaacgctgccattgtctgcaactttggcagtgagctcagcctggtgtatgtgccctctgtgctggagaagctggactgagcgcagggcctccttgcccaggcaggaggctggggtgctgtgtgggggccaatgcactgaacctggacttgggggaaagagccgagtatcttccagccgctgcctcctgactgtaataatattaaacttttttaaaaaaccaa

SEQ ID NO: 4214 - DNA, 489 bp, Homo Sapiens
cctcacatgccataccctcagttaagcatgttaacatttataggaggaaaaaaatcactttgggagaaaataaaattcaactcaagcataaagcttctgtttactcaggccttctaaaaagcaggttaaaatgctctaaaatgagaaagcctgtggtttcacttatttatataactcactgggacattgccaaatgagtaagcacttaattcgctgcttctgagacttctctgtcaaaacagccccactgataatattagacagaacgagaatgcaggggtctcttccctcccctggggtttaggaagctcatgaggagctcggcttaaaatgtctttgatgtctcttcctttgtctcaaaaagtaatgtcaattttatatactatttcaatattactatctgcatttgttttaatataaaaatgtttgctgcctacctttttctcccaaaaaatctttaagtaaagatgatctgggaaaatgaaaaaa

SEQ ID NO: 4215 - DNA, 319 bp, Homo Sapiens
cagcgggcgtcacatgtggtacccgttcggtatgcggtacagcctacaaccgctggttcagagcagcccacaagatggctgtgaggactaacaagtcgcagctcaactagaacaaatgcactacctggtctgctttctagaagtagttcaagccttgggactggtggatggccactgtgtctttgaccaaccagcgcacggctaggctctgccgcaactccacgcagctgtaccgcataccgacgggatccgtgcacgttaacgattactaggactatgcagaaaccagtccgacgacactcttagtccgacgaaaacc

SEQ ID NO: 4216 - DNA, 402 bp, Homo Sapiens
  misc_feature (184)..(184): n is a, c, g, or t
tacccgttcgttatactttacagccctcatgccatacatctgtaaagtttagacaaactcaaagtctagtctctcggaaatataatctcttttagttagtgttcgtcttaggcatttttatttagtgtctgccagctctctttttgtagtagtcagcatcaaaccaccctactgttttaatcanctttttgggtgataaatttggtttcactttactggtgttcccggatggctactgtggactgggcgccttggccaatgggcgggttctcaaaacttcccttgcctgggaactggggcttgccctccttctgtccccttaaacctctggggtggctgtaccgcataccgacgggatccgtgcacgtttaacgattactaggactattgcagattccagtt

SEQ ID NO: 4217 - DNA, 216 bp, Homo Sapiens
accccagcagccctacatcgcggggcagcagcccatgtaccagcaggtgagccattcccggggcctcacagcggcacccgcagggcaccctcaggcttcacggtttagcaatgggacccctggccccagtggggattgtcccgtacgtctgctcacagggggagacgcatacccgaggccccttctcagcagacagaacgaggacacaagtctcag

SEQ ID NO: 4218 - DNA, 184 bp, Homo Sapiens
gcgaggtgaagcgactgtgccatgccgagcgcaggaaggactttgtctctgaggcctacctcctgacccttggcaagttcatcaacatgtttgctgtcctggatgagctaaagaacatgaagtgcagcgtcaagaatgaccactctgcctacaagagggcagcacagttctgcggaagatggca

SEQ ID NO: 4219 - DNA, 320 bp, Homo Sapiens
ttccccgacggatagcggtctgcccctccctgtctccagcccagagtatgtggatgcgttcactttcagtatctcagactctatgtccccatccaagctcattattcctccaggaccagcagctggtcccaggttctctgtcagaggcactgcctgtctcaatctagaattgttgctatctgtcaactgtgtccttatgccttcctatgcctgcctgtccaggtctgcagctgaacagtgggttccgggtggcaggacaagcatgaggataggtgcaggggacagcagtggtcaggataggcagggaatagctaacgctg

SEQ ID NO: 4220 - DNA, 1052 bp, Homo Sapiens
ggaattcccgggatagctgctcttcctgccccgccgcagccggtgcaagttcttcagcctgacggagacccctgaggattacacgcttatggtggacgaggagggctttaaagagctgcccccatctgagttcctgcaagtagctgaggccacatggctggtgctgaacgtgtcgtctcacagcggtgcggcagtgcaggctgctggggtcaccaagatcgcccgttcggtcatcgcgccactggccgagcaccacgtgtctgtgctgatgctgtccacttaccagacggacttcatcctggtgcgggagcaggacctgtccgtggtgatccacacgctggcccaggagttcgacatttaccgcgaggtgggcggagagcctgtgcctgtgacgagggatgattccagcaatggctttccccgcactcagcatgcagggcccagccccacggtgcatcccatccagagcccaaagaaccgcttctgtgtcctcacactggaccctgagacgcttccagccatcgccaccaccctcatagatgtcctcttctactcgcacagcacccccaaggaggcagcctctagcagtcctgaacccagctccatcacgttctttgccttctccctcatcgagggttatatctccattgtcatggatgctgaaacacagaaaaagttccccagtgacctcctgctgaccagctcctccggggagctgtggaggatggtgcgcatcggtggacagccccctgggctttgatgaatgtggcatcgtggcacagattgcaggtccccctggctgccgctgacatctctgcctactacatcagcaccttcaacttcgaccacgccctggtgccccgagacggtatcggcagcgtcatcgaggtcctcaccggcggcaggaaggctggcttcctgaagcccatgggcaacagagaagcctccctgctcttcccctcgaccaaggcttcccaagactctctaagctatttcctttaactctggaacaaccccccggttctgctggggaaccctcgttccgtttcctt

SEQ ID NO: 4221 - DNA, 320 bp, Homo Sapiens
ggtggtgaattcgatggcactcctcaccaatcatgtcttcatagctcctgaggcgccgacgagagtccagagggtgtcccagaccgaacgggcacgtgccataatcagacatcataccataatccaggtcatcatagcccatactacgctggtcatcctctagcccataaggctctggatgaaagcgatgcagatccaccgctgctcccaactacccgaacctggggttggggcccatacacatcctgtctactaggtgcccggtagccttccatgctgggcctataccgctcctcaatgcgggtcacccgggacagact

SEQ ID NO: 4222 - DNA, 408 bp, Homo Sapiens
gcacggatcccctctcccttatcagccgcatacgccgaaattcaggcgtcaccggataagtgcacagaccaagaccagccaccggagtgggagtgcctgacttggtggagtgggaatgagcctcccagcctgtacaggtggtcatcaccccgagagctcatccccctgtgacagatccgctgtacaaaccctaggggcagacaacctgagttggggtctaccctattgatgaaaagtgtgggaggtagggaatcaagccctcctgtttctgcccatgacccttcaccaagcgaaccaaaggccccacccagccatccatgttacagcccgtttggcgagttgtggggctgataagggagaggggatccgtgcacgttaacggttactaggactatgcaagaaccaagg

SEQ ID NO: 4223 - DNA, 384 bp, Homo Sapiens
gttaacgtgcacggatcccctctcccttatcagcccatttaaatgtggaaataaaagttgattattactgacttctctctgctttaacacacccttctctaggggtcctgtagagcagggtaatactcagcctaaagttgggagtattttcagttggtttggttacagtcatttgaggctctggaatgttcatgctgtgacgggacatgttcactaaactataaacaatgttaagagaagtagtagatcagtatttgaaaatcgtagcccggtacattgataatattatgagacttaaacattgaactaaaacctacaaaatccacactgaggctcacttcattagaaaaaagccccctttggacgggtcacctttgtaaccta

SEQ ID NO: 4224 - DNA, 354 bp, Homo Sapiens
gttcctgtattggtggtgctccctcatagagcgcattgattccctggcacgccttgaggtgatgtcagtgaaatccccgcaggctcctctgtgggtgtctcatggcaccatctccacctcagtcttgcatcctgcctttggaagccagggagcggcatcctgagcctcaaggcctgccgcaggtaccttctaaaatagctctatgattttttgtttacttataacccaactcaccaggactcacttccattcacagagatatgcagcccctactcagtgccctgccaaatgtgggcatgtttgaccccagcttcagagtccctggcacccaggcagccagcaccaccaatacaa

SEQ ID NO: 4225 - DNA, 371 bp, Homo Sapiens
tgtattggtggtgcttgcttggtagcaatggcaaaccctgcgttcactggcaagggcacaaggtgctgggaagggcagaaggtgctggggccagcccgctgggggtgcacagccccttaggaggccagcttgcagtagctgggaggagagagcttgcgcctcaggtacttgaggacatacagcgggaggcagctgaccacggtgatcgccgacactttccacaggaaggtcacggtggtgataaaggcaacatcaaaatattcattgagaaaagcgagtgaggacacgtagcagcctaagctgaggaactcggccaccaccatcagccagtgccacgtgcggacggccagcaccaccaatacagggtaccg

SEQ ID NO: 4226 - DNA, 636 bp, Homo Sapiens
  misc_feature (292)..(292): n is a, c, g, or t
  misc_feature (447)..(447): n is a, c, g, or t
  misc_feature (482)..(482): n is a, c, g, or t
  misc_feature (498)..(498): n is a, c, g, or t
  misc_feature (565)..(565): n is a, c, g, or t
  misc_feature (586)..(586): n is a, c, g, or t
  misc_feature (612)..(612): n is a, c, g, or t
gtcctgccccgcgcgcgcgctagccgctgtcggccgcaggagccccgggaatctggaggggccgtggggcggagggcggggcctgcgggcggacggcggccgaagccgcacgggagacgacgaggaggagccggaagatgcggacgagaacgccgaggaggagctgctgcggggagagcctctgctgccggcggggacccagcgcgtgtgtctggttcaccctgacgtcaagtggggcccggggaagtcgcagatgactcgagccgagtggcaggtggcggaggcaacagcngctggtgcacacgctggacggctggtccgtggtgcagacaatggtcgtgtccaccaaaacgccggacaggaagctcatctttggcaaagggaactttgagcacctgacagaaaagatccgagggtctccagacgtcacgtgcgtcttcctgaacngtggagaggatggctgccccgaccaagaaagaacntggaagccgcctgggngttagagggttgtttgaccgcgttcacggtcggtcctgcaacatcttccagcttgtaacgcccgcantaagggagggcccggcttcangtggccctggctggagatgcccgctngcacaggtcgaactttaaaagggg

SEQ ID NO: 4227 - DNA, 309 bp, Homo Sapiens
  misc_feature (181)..(267): n is a, c, g, or t
tgtattggtggtgctggcctgggtaactggaggacgatggatcttttgctgagctgatgggctcggtgggaggaagaagctgggtggggggcaaggtggtggatggagtctggtcatgtggggccagtggtgctggtgggtcctccaaggggagattcccagctagctggaagtcaaactnnnnnnnnnnnnnnnnnnnnnnnnnnnnnnnnnnnnnnnnnnnnnnnnnnnnnnnnnnnnnnnnnnnnnnnnnnnnnnnnnnnnnnngcatacgcctagagtcctagctactcaagaggctgaggtggg

SEQ ID NO: 4228 - DNA, 348 bp, Homo Sapiens
gccatgcctgtggcacggttcatttgggcacttagcaaagccgttgcatatgtgggccaggatgacctgttttcgagctgaacaggtgtgcatcctaatggcctatcccctgctcttgttcaagcctccgcagcattcctagtgtctctctacataaaggacatctggctgggggctcagcggccggacacccctcttaacccacgtccggatggtgtgtgaggccgcagatgatggccccgagcagtgaagaggaggccatcgtggtgctctgcaaggaccgccgccagcgcagcctcagatgcttgactcctgccggccagcaccaccaatacagggtaccgagct

SEQ ID NO: 4229 - DNA, 853 bp, Homo Sapiens
tgagcaaagctgatggggatccatacatgcagctgaatgtgtatactcaagacatcctggcaaatgagtgatcagacgattcacagtgtcaaaggccttagaggagattccagttaagaacacaccattgccctctggcagttcctgactgctcataagtctgaacagcaactgcggctgctactaaagaaccattaggggaaatcagttcaaggtacaaagcggatctgagcccggaaaatgctaagctcctcagcacattcctaaatcagactggcctagacgccttcctgctagagctgcacgaaatgataatcttgaaactaaagaacccccaaacccaaaccgaggagcgcttccgccctcagtggagcctgagagacactctcgtaagttacatgcaaactaaagaaagtgaaattcttcctgaaatgccatctcagttcccagaagagatactgctcgccagctgtgtctcagtgtggaaaacagctgctgtgctgaaatggaatcgagaaatgagatagaattatttcctcagctatctttggatgactttggagagaagactcctctctcctcgtctgcggcgtggacttgatcatgggctggtgcccttgcattcagaaggagagctgtcagcgtagccccgaattcaagaccaaggcgtgctacctgagctgacagctttttgaaagccgagctgtttctgaaccatgtacatacatgtcctgaaactttctcatcattttatgagtactgttcattgagagatgccaatgaagattagatgaaattggaaataaaccaacattgtttacattccaggagacttgtagctcagcctgtcaat

SEQ ID NO: 4230 - DNA, 943 bp, Homo Sapiens
ggccgctataagagcgcacggggcagacgctcggttccccgccgtgcctcctcgctggccgcgctccctcccggtgccggcttctctgagtcaccaacctgaggctgccccggccgcctgcgcacccggcagcaccatgacagatcaggcctttgtgacactaaccacaaacgatgcctacgccaaaggtgccctggtcctgggatcatctctgaaacagcacaggaccaccaggaggctggtcgtgctcgccacccctcaggtctcagactccatgagaaaagttttagagacagtctttgatgaagtcatcatggtagatgtcttggacagtggcgattctgctcatctaaccttaatgaagaggccagagttgggtgtcacgctgacaaagctccactgctggtcgcttacacagtattcaaaatgtgtattcatggatgcagatactctggtcctagcaaatattgatgatctttttgacagagaagaattgtcagcagcaccagacccagggtggcctgactgcttcaattccggagtcttcgtttatcagccttcagttgaaacatacaatcagctgttgcatcttgcttctgagcaaggtagttttgatggtggggaccaaggcatactgaacacattttttagcagctgggcaacaacagatatcagaaaacacctgccgtgtatttataacctaagcagcatctctatatactcctacctcccggcatttaaagtgtatggtgcaagtgccaaagttgtgcatttcctgggacgagtcaaaccatggaattatacttatgatcccaaaaacaaaaagttgtcaaaagtgaggccatgatcccaacatgactcatccagagttctcatcctgttggtggaccatcttaaccaccaacgtttacctctgcttcaacaattggcttgtcaaagacac

SEQ ID NO: 4231 - DNA, 952 bp, Homo Sapiens
gagcgctcacctctgtttaactcctattgtgttaaattctctgttttatggttgttttttaatatcctttatctcatagaacaggagtggtatctttctctggattttctgtcttccagggtaccttatgcaggctaaatgcttacagagttttggattcagtttttatgtaaatagagattcagggctctataaaacagccctttctaaaagtaaattgttttaataggtttacagtcttacatgaatcctttctaccaaccccttagtgtggatggggcatttgtttagtcattcctgacaaatgacttttgatttttgtttttcagtcttaactccagtattagtgcctcgtcataatgaatccaatcccacaacacagacttctggttcagtttaggaacctgagccacaatgaaccacacatgccacaaaatgccacgtttccagattcttcccaccagcccaacaacactccttttcccttatctccaaacagcccttatcccccttctcctgctagcagcacatatcccaactccccagcaagttctggaccaggaagtccatttcagctcccagctgatacgcctcctcctgcctatatgccacctgatgatcagatgggtcaagataattcccagcctatggatacaagcaataatatgattcctcagattatgcccagtatatccagcagggatgttcagcctgttgcctatgaagagcctaaacattggtgttcaatagtctactatgaattaaacaatcgtgttgggtgttgggcgataacatcgatgttatccccaacacataactatttcactttctcaaaaaaagactttcacttttttcttgaacaaaaaacattcttggtcttttgttttcctaattttgatactttggagtacaaataatttcacttacttcttaacttaaaaaaggtggcaca

SEQ ID NO: 4232 - DNA, 1280 bp, Homo Sapiens
gagtgctcgaattggggttcacaaaggagaagcccagcgaatgcagactggtccacggactcgatgaggttctggtccctgtaggagaggcgccccttctcgttcaggaactcctggtcaaagttactgtactctctgggtgacttcacttcgggcctgaagggtggctccaacctccgcttttccagcagagtccagtttatggtcttgaagaagggatggattttgatgtttcccgtcactcccagcctcttggttggttcccctttcaaagagcttctccaggatgtccttggactccttggtgatccagcggggataatgtggcgtgtccacacggatggactcgaagagttcatcctcatcatcaccatggaagggggactggccaatgagcatctcgtacagaaggaccccgaaagaccaccagtccacagagaaagtgtacttcaggccctgtaggatctcaggggcgatatagtcaggggtgccgcagaaggtgctggcccggctctccccgcaatatgttctctttgcacatcaccaaagtcggcaatcttgatgtggccatcccggtccaacagcacattgtccagtttgaggtccctgtaaatgatgcccttgctgtgtagaaactgcagtccacacattatctcagcggcataaaacgtggcacggtagagttcaaagcggcctttgtcctggatgtggtacatcaggtcccccccgttgaggaactccatcacaaagaacaggtggtccttggtctggaaggtgcagatgaggtgggtgagaaagggattctctgcggcaagtgtcagcacccgcttctcaaccatggtgcactccacgtcgtcgtcgatcaggaccacatccttcttgagggccttgatggcaaagtactctcctctgcccttcagctctccaagcagcaccttcccgaagctgcctttgcccaggaccttgtggaagatgaagttgttgatgttgcacttgctgctgccctcccagatcttgccgtaggtcccactgttgtcttgcatgtcctccccagcaactccggtcttcttctcgaaaccctgatatatcccaacaggctctgaggaggctgagtctgatctccgggaggctctctgggtgacttggttcaaggcctcagccaaaagcttctggttgatgccgcagaggttggccaccttctcccggcatttatggtgcacattcatgccgcagtcttcacactttaatccctgcatcaccagtccccagagcagaagctc

SEQ ID NO: 4233 - DNA, 180 bp, Homo Sapiens
cgccatcatgggattcaaccaagctgggccatcgttgcttcgccctctgttcccctcatggcagcagtgctgggctccctacttcccgttggggtcccgcagcactcggcacctatgaggattggagaatgggctgtactcttttaaagactggggatagggccaggttctgtggctcat

SEQ ID NO: 4234 - DNA, 1081 bp, Homo Sapiens
  misc_feature (62)..(76): n is a, c, g, or t
ttggtggtgttgctcagtcgttgtctctttgctcacagcaaggtcaacagtcccaaaattcnnnnnnnnnnnnnnntcaacctccagtgttcctgccgcatcgtgacaagctctttcgggttccaggtccaggtcttgaaaatctggaaatctggagtccatggctgtggctacactgaaagttatctgctccaactattgcagaacactgtagtgaaatcttttcaacctccaatcctggacatctcatgttttgccacagaatttcaagctttgagttccagttgttttttttccctcctttctgctgaggaaagcatcttatcaccacaggcttaagtcgtttgaggtacatccggatttaattacaaaagagcaaaaagaccaacacttttttttctccaagtcattgctctggaagtgagattatctgtctctgccctttaggaaaagggaatagtcaattgattttttcagacatttgaatgaaatagcataactggctaacatctaatcagacaaaatacacttaaatgtgtttgtgttcacttgcttagggctgtaccacttggtgagcaccactccacaaaacgaaaatgtttgaaatccaattgttcaaatatttttatagtgtttgttggataatggcctgaaatttgataaaagcagctgacaactaacaaagaagcaaaaactggcatcttggacatcctagtattacacttgcaagcaattagaacacaaggagggccaaggaaaaagtttagctgtgaatcacttccacaatctactgattttgaggttccgcagtagttctaacaaacttttcagacatgttaactttcgattaagaaagaaaaaaaccccaacatcttcaggaattccatgccaggttcagtctcttccacgtgagcccgcttgctaaaagtccacgtgcaccattaattagctgggctgcagcaccatgtaaaaagaagcctatgtcaccaccaaccacaccgaacgcgtgggcgacgatatcccggatatccgaccgtaccagcctgctttcttaccactggtctatatgtcacatacgctt

SEQ ID NO: 4235 - DNA, 530 bp, Homo Sapiens
gctgcaagtgcttccatgattcgattccgctactatgcctagcatgcgtcaagaaaggaaaccagtccaataagcagctggtgccttatgtagcatgattgccacaaacacaattaactggacactggtctgtgaagtagatgctgctgctcccaaagcaacaccatcagctgcagcatggacaaccagacccagcgtggtggtgattttggaattgctagaccttgctgcttctggatcgtcagtagaatgcacatgggagttaccaatctggtccaccagcaacatgaaaacgatagcccagaacgagggaaacaccaatataggcatgcagctgtgtgtggtcgtggctgtgctcatgttcatgagacaactgattttcctgctgctttgtctgatgcaatcacattatgtgtttcacttgcttggtggtgttttccctcaagaatatcttcataaagggcatgtactccttcaggcacgatgactgccagagcagttccacagagaaggccagcaccaccaataca

SEQ ID NO: 4236 - DNA, 289 bp, Homo Sapiens
gcgtggcacaggaagcactcccgtggaatgatggtgataacactgcccccaggtatcggctgtcggatgagggcgagtggctggtgagggagttgaacctcccagtggacaggactgaggggtggctggatttccctgcaggatctgcgcaaggtccagagagaaactgcaaggaagtcacagtggaagaagtgggaggtggttgctgaacgggcatggaaggggggcacagagtcagaaatgttcaataagcttgagagcattgctacgtctgacataccacgtaccc

SEQ ID NO: 4237 - DNA, 245 bp, Homo Sapiens
ttgtgggcagaattggtgagattgctcggactctggagtcaggaggtccggctcaaatctggcttcactatgtaggtacatactaggtaagttacctagtctctctcagcttcagtattttcatctgcaaagtggaatgaggaggacaaggatgataacactaataatctctgacatgtatgtttatagtaaagaatagaatttattacatgtatatatgtatataaagatcttaaaatagctgt

SEQ ID NO: 4238 - DNA, 270 bp, Homo Sapiens
taccccttgtgccctgacttgttaacttagctcttactgttcctgtccctgagttttcaagttttcttgctcaaggttatcacctttgatttggtaacattcatctttgccaccttcagcagttactttcccatcttgcctccaaccatctccagctgccacttaaatatccttagattatatagaatgatccatcacccttgacatgatttggataaaaatcattatgataaaatcgcatttttatatctaccagttacatacctactc

SEQ ID NO: 4239 - DNA, 169 bp, Homo Sapiens
gcggtttaggaaggaccgtattctgggaattacttcagaggaacggacaataattctaggatgatagccaagaaggactggaagacttcaggagatgctgcagcttcttctagattttgaatgctgaataagccactgaagtgtgatatctatattatccttttctttg

SEQ ID NO: 4240 - DNA, 305 bp, Homo Sapiens
ttccagcagcgccaaatcatcgaatgctaccttcgccaattaggagaagaaggcataacctttgtgccccgttggagtccgccttccatcacgccctcttcagagacatcttcatcatcctccaagaaacaagcagcgtccatggccgtcgtcatcccagaagctgccctcaaggaggggctgagtggtgatgccctcagcagccccagtgcacctgagcccgtggtgggcacccctgacgacaaactagatgctgactacatcaagagatacctgggcgatttgacgccgctgcgggaaatgct

SEQ ID NO: 4241 - DNA, 1041 bp, Homo Sapiens
cctaggagatcatctgtctcatactctgttccctgagctgaggctggcagtagtagtgaggtggagtggcatgggttgagggactaaacctaagttcccactctagctctgtcactttctggccaggtgactctggatgtatcacatcatccttcagagcctatttcttagattgtaaaatggaagtaaaacaaaaaatgagattcattcagtgttcgttcaacaaatagttttgactatctgggctatgttgccagtcactgttctaggcattcggactacatcaaaggaaaaactatataataccatgctcctttggcacttttactcaagtgacgaagatgatgacgataaaactcatctcaagagctgtaccaagttgtgtgagatacaaacgtgagggcaccttatagaccacagtaaatgatgggtttcattaatcttgtactcaaacaggtgaagtgacttgcccttgggaatgggccggccctggctaaggattcttcccaccccactacccctcgggtattcattctgtgaggacccctgttataatgtccttgcaagcagctcatagcagctgcaggttctctgagggctgggagaggctgaggcgaggggggggtccccttctgtaacctctggccccctcctcccctgccttctcctcctgctcgtttattttccggagccatctccctgcctctgcctggctccactctacagggggcattccctcaactgttgctgaagaatggccacagggcaaggtgtcacttcttacccttcacacacactctgcccagtacacgattttgttctgtttttagtctttgcatttgtttgaggacagaaactaccagctgggaagtaagatggcagcaacacctaagcctgagtcagcccacacctgtcaccaagttcctctaactgtcacctggacacctgtgctttccctatgccctcacccagatgcctccctttgctctgtgtgcctgcctccccatcaacagaaagtccatggacacctgtgctttcccc

SEQ ID NO: 4242 - DNA, 543 bp, Homo Sapiens
cttgatcgatggcttcgccatcgccagcttcgccaccctcgaggccttgcaggaaggatgcatctcttcagcccccagagcgactggaacatcggctgaagcattctgggaagcggaaaagggggggctccagtggggccaccggggagccaggggacagctctgatcgagagcctggccggccccctggggatcgggcccgaaaatggcccaataagcggagaagaaaagaggcgtcctcccgtcactctctggaagctggatacatatgtgacgcggaaagtgatctggacgagagggtctccgatgatgacctcgacccatcctttactgtctcaaccagcaaagcctcgggcccccacggcgccttcaatgggaactgtgaagcaaaactctccgtggtccctaaagtgtcgggcctggagcggagccaagaacagaccccggggaacagacccgatgatagatgcctttacccccaaaggaaacaccgactccaacggtccctcggactcctgtatcaacccctgtaacccagacgga

SEQ ID NO: 4243 - DNA, 592 bp, Homo Sapiens
cttgcgcccgtatgccggggctgtatgggggttcccgcgcgggtcgttcttctggctgctgctcctggtcacggctgcctgctcggggctcctctttgccctgtacttctcggcagtgcagcggttacccggggccagcggccggagccagggccaggcctgccgacacctgcttcacctggccattcagcggcacccccacttccgtggcctattcaatctctccattccagtgctgctgtggggggacctcttcaccccagcgctctgggaccgcctgagccaacacaaagccccgtatggctggcgggggctctctcaccaagtcatcgcctccaccctgagccttctgaacggatcagagagtgccaagctgtttgccccgcctcagggacacccctccaaagtgtatccggtgtgccgtggtgggcaacggaggcattctgaatgggtcccgccagggtcccaacatcgatgcccatgactatgtattcagactcaatggagctgtgatcaaaggcttcgagcgcgatgtgggcaccaagacttccttctatggtttcactgtgaacacgatgaagaaacccctcat

SEQ ID NO: 4244 - DNA, 563 bp, Homo Sapiens
ggaagaataatacaaaaggccaaagcaataggaacacaatggaaaaatattactcctggaggaaaggagcagaagaaaaggtagctaggagttagccagtgaatgaagagctcaggacaaagctgtccttagggacattgtggactggaaaactccatgggagtgaatgcaggacagggggaggaacagacacatgatatctcaataaacccacctggtgtaacatcagcctagtagaagccacacacagactctgaatctttgcacgaaaacgggtcaaggaagacagacatcaaagactattatttgagtatggattggaaaaaagaaggcacctctgagaaacagtacaaaaccaggttgcataaagtgaccaaagctttggtcaaagttttagcttgtaagactgccacaaaggtctgggtggacagacactgcgggaacacacagtaaagcacccttccacagcacgagggcagctagctggagacctggacctgccccgaggcttgtagcagcatcctcagccctgtccgccttgcagcagcaatggtgggtcagat

SEQ ID NO: 4245 - DNA, 210 bp, Homo Sapiens
ggcggtattaataaaaaccaatttattctctaccctttcaaagattaagctcaaaggggggactcatctgtagaagacagaaagagagccccttatagaggctttaaatagctttggattatttttccgaggtcacctttactttctggaactcatggcttcacaaaaaagctgattttaaaatatttctaatgaactgattaagggggg

SEQ ID NO: 4246 - DNA, 494 bp, Homo Sapiens
gctggaaaatatttctgatttatcaagttcaatcaaacttgcttttttaatctttccaaatgaaatttatattaatggaaaaagtaaaccacttaacagagggtcaccattattaattatttcctttactctctattcctcacacttcactggccacttgaaacttctagagttcctttattaaaataactagatcaaacaatagactttgagaaattatttttcatatcaattttacaaatactgcatcacaaacattctacagtacaaatttaaataaagcaactttctaccttattaaaagattcttcacctcctaaatagaaactgaaggagaagcaatgctattaaggatcatacataagctaatagaggcagcagaattatctattaacattttcctaacactattctagtgaccttaacattttaatcacagagctgcagctgtttgcatgtgttctaaagctagcataatctttaagacagtcagg

SEQ ID NO: 4247 - DNA, 555 bp, Homo Sapiens
  misc_feature (455)..(455): n is a, c, g, or t
atcccagctcggtaccccattggatccgcggatgaggggggaccagacacctccgggggtgaggaatctgaagaggactgggttggaggcagcacaagactgtctctaggattttctgcttcaggcacagtgactgatttgtcctcagagacaagcgggacaacagccacagctgcctttttggctgggggttcctgtaggacactgctggagctgagtggcttcacagcggcaatgacagcagcgtgcatctccactgccttacgttttggggccaatttgggggatgacacaactttaaccacagatggcttcacgttcactttgggtttagctttaccccttttttccaaggtctgtgctgcacatttcacattcaataatgagtctccaatccctgaggtttctaccttccaccttctgggatgactttgtgggaagccgcttggtcaggngccgtgtgattcctggcacagcagtgagcactggtttctctgccacttgggtattgcaagaggctacatctccccgaagaggtgtcaagactgatttttc

SEQ ID NO: 4248 - DNA, 259 bp, Homo Sapiens
ccaggaaagatgtgaaaaactctagctggtgaccgagaggaggagtagagtgtgcccttagttcatatgaactagagggagttggtatttgcacagcagtcagggtcacatgagtgatcatggtacagtgagaagttctccctcccagggccaggtcacagggtttgtttctgttcaatccggattcttccagtaaaagcttcaacttcccacactgaagctgagagcctcccaaagtgctggctacctgctgagcgac

SEQ ID NO: 4249 - DNA, 291 bp, Homo Sapiens
gcctgtctttcagatgctgatgatggctgttgttctctagaaacctcctgagaaaaagaagattctgcagcacctgtatttccttcaccactgttttgagaatcagcagctctgagattaccttcacctccacccatactttcttctgtttctgtacctggatcagtcccatcaccaccctcagcatcatcagcttcataaccatcattgccatcggcactaccagttccttcattactatcttcaccctcatctcccatccctgtgtcatcttcatcatcatcatcatcc

SEQ ID NO: 4250 - DNA, 1246 bp, Homo Sapiens
  misc_feature (987)..(987): n is a, c, g, or t
  misc_feature (1011)..(1011): n is a, c, g, or t
tctcccgggagagcgtggagagccccgagcagaagggcctgacgtaccaccgcatcgtagaggctttccggtttgcctacgccaagaggaccctgcttggggaccccaagtttgtggatgtgactgaggtggtccgcaacatgacctccgagttcttcgctgcccagctccgggcccagatctctgacgacaccactcacccgatctcctactacaagcccgagttctacacgccggatgacgggggcactgctcacctgtctgtcgtcgcagaggtacggcagtgctgtgtccgccaccagcaccatcaacctctactttggctccaaggtccgctccccggtcagcgggatcctgttcaataatgaaatggacgacttcagctctcccagcatcaccaacgagtttggggtacccccctcacctgccaatttcatccagccagggaagcagccgctctcgtccatgtgcccgacgatcatggtgggccaggacggccaggtccggatggtggtgggagctgctgggggcacacagatcaccacggccactgcagctggccatcatctacaacctctggttcggctatgacgtgaagcgggccgtggaggagccccggctgcacaaccagcttctgcccaacgtcacgacagtggagagaaacattgaccaggcagtgactgcagccctggagacccggcaccatcacacccagatcgcgtccaccttcatcgctgtggtgcaagccatcgtccgcacggctggtggctgggcagctgcctcggactccaggaaaggcggggagcctgccggctactgagtgctccaggaggacaaggctgacaagcaatcaagggacaagatactcaccaggaccaggaagggaactctgggggaccggcttcccctgtaaacagcagagcagcacaataaatgaggccactgtgccaggctccaggtggcctccctggcctgtctcccccctanaagaagaaaaacccaccacccacnaatcccaaaacacacaccacaccccacaacaagcggggggccgctctagaaaatccctcgagggggcccaagttttacccgtaccccgcttttctggaaaaaagggggtcccctaatagggagcccgaattataaaactagggcactgggcccgccgttttataaaccctccgggactggggaaaaattgcctagacttggggaactttgtggggaagggaaactttaccttttt

SEQ ID NO: 4251 - DNA, 852 bp, Homo Sapiens
gctgaccttcgggtacctggtgctgctgtcccacggtggcgagcgcatggctgtggacatgcggagggccctcttcaggcgtccctgctccgacaagacatcaccttctttgacgccaataagacagggcagctggtgagccgcttgacaactgacgtgcaggagtttaagtcatccttcaagcttgtcatctcccaggggctgcgaagctgcacccaggtggcaggctgcctggtgtccctgtccatgctgtcgacacgcctcacgctgctgcttgatggtggccacaccagccctgatgggagtgggcaccctgatgggctcaggcctccgaaaattgtctcgccagtgtcaggagcagatcgccagggcaatgggcgtagcagacgaggccctgggcaatgtgcggactgtgcgtgccttcgccatggagcaacgggaagaggagcgctatggggcagagctggaagcctgccgctgccgggcagaggagctgggccgcggcatcgccatgtaccaagggctatccaacatcgccttcaactgcatggatcttgggataccctatctatcggagggcttcccctgataggccggacagcagctgaccagggaggagctcatcaatgtaccattcctgcgtggacatcccagtacagtagcaaacggctccatgagccaaccttctcctgtcctggaacggcgctccggtgggtccgggcggcgtcttgactctgccaggtcgcccggggtcttagatagtacatggaccccttgaatcccctggtatccccactggtcctggggcggcctgctgctgtccccatactaggcaggctgcgcttgcttccg

SEQ ID NO: 4252 - DNA, 316 bp, Homo Sapiens
cctcctggcgagtggctggccctgcagtggatagagcaccaggagggccggcacgtgcggcagagggggcggggcttggaggaagaggtgagccgaggcaggtgaatgtcaaacctccacagactgaatctggttcatctgcgcccgcatcacctggatactgttcaggatttttttctggtggccagccaaagtgaccccaacccggagaatgtcctccatcatcatctgagacacgacgtcaaaggaggtgaagccggcattggcgaagctctccttgtactgccccatcttgatgcctccagccactcgtcca

SEQ ID NO: 4253 - DNA, 749 bp, Homo Sapiens
ggtcatggactgaatcagcctactttgtatggctctgagctaagaatcgttttaatattttttaaaggttgttaaaagcaaataacaaagaatacatgatgactctattcttgttctcatgtgtgaaccatatattatagcctgcaaagtctaaaatatttataaaccggccctttacagaaaaagtttgcagacccttcttttacaccagtgctgtagataattctggcagtacaactgcaagtctaagataatgttcattcattcccatcataaatgtaacattctaaataggtgtcttctgatgtcatctgtcagaatttcttttaaactttttcttcatcttcaacattatcaaagttcatccttattcctcttgccttgatttcggagagtttccaatttttcacttattaaggcagcgattgcttttgcatctctggtatttatctgctcttcttgaaaatttctctttgctctttcgtagaaataaaacttaacagttggataggccctgatcccagctttctggcatgtctgagcataagcctgacagtctacttttccagctttcacttttcctttaatcatcctagccaagagctcaaattctggagcaaaattctggcaaggtccacaccaaggagcatagaaatcaatcacccaatgatttttcccttgtagaactttttcactgaaagtctgaggtgttagatctgtggatacttgatcccgggaattccggaccc

SEQ ID NO: 4254 - DNA, 591 bp, Homo Sapiens
  misc_feature (36)..(36): n is a, c, g, or t
taccatttggatagcggataggggtcgtctcaggcnagagaacttggaagaaatgtggaaattgatgaggttctctcccacaaggatgtacgacacaccatagccgtcatcagcaaccggtccaaagccccctccgctggacacgatactctgggttattctccaagtcaaacagctccacttgctgctgaggggtctggcttgttgataatctccaaggctcagataaaacttccttaaggaaaggggactccacagcgagatatttagacaccacgtaaaggcagaagaggtgacgatcgatcccagagccggtcatggcgaggcgatacatatgctgatgcttctcagacgccaacttgaacaacttcagcctctgttccaccgtctgggccgggtccaccatggcccgcacgaagtcgcatgactcagtggtgcaggagcgcacggtctccgtcctcccctctcggaagagccgggtcatggaggcctcgtatgtgaggcaaaacttgcccatgtccttgtagtgcgccagctggagggccagctgcacaaaggcgtctgggctcgtgcgacatttcttgatgattc

SEQ ID NO: 4255 - DNA, 498 bp, Homo Sapiens
attccctgactaccttgtcatccagatcaagaagttcaccttcggcttagactgggtgcccaagaaactggatgtgtccatcgagatgccagaggagctcgacatctcccagttgaggggcacagggctgcagcccggagaggaggagctgccagacattgccccacccctggtcactccggatgagcccaaagcgcccatgctggatgaatcagtcatcatccagctggtggagatgggattccctatggacgcctgccgcaaagctgtctactacacgggcaacagcggggctgaggccgccatgaactgggtcatgtcacacatggatgatccagattttgcaaaccccctcatcctgcctggctctagtgggccgggctccacaagcgcagcagccgacccccctcctgaggactgtgtgaccaccattgtctccatgggcttctcccgggaccaggccttgaaagcgctgcgggccacgaacaacagttcaga

SEQ ID NO: 4256 - DNA, 433 bp, Homo Sapiens
agggcaagagggggacctgccaccagggagcttcctggctctgggggacccaggtgggacttagcagtgagtattggaagacttgggttgatctcttagaagccatgggacctcctccctcattcatcttgcaagcaaatcccatttcttgaaaagccttggagaactcggtttggtagacttggacatctctctggcttctgaagagcctgaagctggcctggaccattcctgtccctttgttaccatactgtctctggagtgatggtgtccttccctgccccaccacgcatgctcagtgccttttggtttcaccttccctcgacttgacccttccctccccgagcgtcagtttcactccctcttggtttttatcaaatttgccatgacatttcatctgggtggtctgaatattaaagctcttcatttctgg

SEQ ID NO: 4257 - DNA, 345 bp, Homo Sapiens
gcttgaagtgactacctgtatcttagatctgagtacaagcctgaggcttttgcttttgtcttttttgatgagggctcactccagcttcatatggtgccaagacgttgctgcttctgaggttggctctaacatctctggtccttagagccaccagatctctctggcccatacagatatcagagcagacggaaatttctccctgcaagcgctcagtctcatcccagcaagtcaaagacctcctggccaagtcctgccctcttaagtctccaggaacgctgcagggaaaacccagctgaggcctgggcctagactgtggtgaggtcactagattctactgctcttccc

SEQ ID NO: 4258 - DNA, 1248 bp, Homo Sapiens
  misc_feature (21)..(21): n is a, c, g, or t
  misc_feature (32)..(32): n is a, c, g, or t
  misc_feature (69)..(69): n is a, c, g, or t
  misc_feature (84)..(84): n is a, c, g, or t
  misc_feature (90)..(90): n is a, c, g, or t
acatatccggccgacacgagntgcttcttganaaaggtggacttcccggccccagggaatcccactgcnacaaccacctccggntggcgntcaggagggccctggactcggggaggcagagaggccctgagcgggagacagtcctcggatcaaaggctgggagctcgaagccggctgctggccacttgagaaagaactcctcaggcgtggcgaagggcaggccaaggttgagggcaaacaggcgatcggcgcaggagaagtctttcttcttccgccccggggcccagttggccgggcgtccggctgcgtctcccacaaagatgctgtccccgatggatatgggcgtgccgtcgttggcctgctcctgcagatggtcccacatgcccgtcaccggcttccggtacaagcctgcgtgcgtggccaccagcacctggaaggggacccccagcttctccaccacagcctccaccttggccttgaactcctcggctggcagcttcccgcgcccgatgctcatctggttggtgaagatcaccagcttgtagccctcggcttccagctctcggagcttacggggaatctctgggtacaagatcctccagtcactggggccagtgggaaagaccttcccagagcgtgtggtgatgagcgtcccgtccagatcaaagccagccaccttgccctggggtttcaccccagctgcggtgaacactagcaacttctccaagttctcccagccggggtttgacttccgcatacgcttcttcggcagctcagcatctctcttctcatcttgggacaccagaggggtgccaggcggagtatctggctgggattctggtgtgcgggtctcttcccagcgcagggtcagtgggtggaggccattgaccaaatacagtgtgtcccccacccccagagagccctccaaccccggcttcaactcctgggtcccggtagttgaggggttaactcccagctgtttcactgccactgtccgggtctcaggatctgcgaccagctccacttgagttctggagcacttccggtccgtaacctgggtcaggggtcccctgcccaggaccagggcttgcccgtccgagggcaggaagatggggggcgctcccccaggggggctctcgagccacaagcggcccggggcctccacctcgcccatcctgggtgccggcccgggaccgcggcttgggctcacggccacttccgaccagggaggtccatcccgggaattcc

SEQ ID NO: 4259 - DNA, 855 bp, Homo Sapiens
ggatatgagcatttcaatccttacacaggaaataatggtatatctagccatgtatatgcgaacccagcctggcctctttgctgaaatgtttcgacttcgaattggtctgatcatacaagttatggcaacagaactggcccactcccttcgatgctcagctgaggaagccacagagggcctgatgaatctcagtccttcggccatgaagaatctcctgcatcacattctcagcggcaaggagtttggagtggaacgaaagccgttcgtcccactgattcaaatgtcagtcctgctatttctatccacgagattggtgctgttggagcaaccaaaacagaacgaactgggatcatgcagttaaaaagtgagataaagcagtcacctggaacctctatgactccaagtagtgggtcctttcctagtgcatatgatcagcagtcatctaaagatagtcgtcaaggtcaatggcaacgccgaagaaggctggatggggcactgaatagagttccagttggattttatcagaaagtatggaaagttttgcagaagtgtcacggactttctgttgaagggtttgtccttccttcctctaccactagagagatgactccaggtgagattaaattctctgttcatgtggagtctgtcctgaatcgtgtacctcagccagagtaccgtcagctgctggttgaagccatcctttgtcctcaccatgctggcagatattgaaatttcatagcatcggaagcatcattgctgtggaaaaaatagtgcatattgccttatgactttgttccttcaagaacagaaaacctactgcgcagatataccacaatgcacgttaacgggtcgtgt

SEQ ID NO: 4260 - DNA, 285 bp, Homo Sapiens
gtcatctcagtcatgaggtctgtgaataccttcttgcagcggtcccgaacactgctctccagattctccagctggatctgaaccttcttatagtccctcagggactgcttgctcttcctcctgctcagccccagggtcaggagaggatggccagatgagtcctactcgccacaggcctgcctgacaatccccaggcacaacccggacctcatccagcacagtccaatgcagtcatgctagacaagctcaagcctagccccgtacgattcagcctataccgggtcc

SEQ ID NO: 4261 - DNA, 313 bp, Homo Sapiens
cctccgggcccctcagtttcctctcctcatctctggcctcagttccagagggttagccccagcaccccactctcctgccactgtcagatagccttggtcatgctccctagaatctacttgtccaagttctcctctccctgggataagttactgcagaaactggggatttagaagcttattcagggctgagtgccaaaagcttgggggaggagggacaggtcctcggcaataaacagtgtcacacacacatcacagccatttgagaaatggcttctttgcagagctggggaagccgggcagaagatgccgcagc

SEQ ID NO: 4262 - DNA, 328 bp, Homo Sapiens
cagcttctcctggtgcctctccaagttctccgtcatctgcttgatcacctgcactacttcctggatgtgggagttgttaatctctctcttcaacctctcctgggccatcttgtctgtggtgacattgatcatgcacaggatccgctccagtctctttgtctccaagctatatcatcatctctttggtgtcgttctccgacgtctccttcagggccttcagctctgccgcctgtttctctctggccagctccatcattttggagatttgatcggccacgtgctgctccatgcgcttcagaacgcaaaagtactgcccctcatcgcttat

SEQ ID NO: 4263 - DNA, 420 bp, Homo Sapiens
gtaattgagaggagacagatattggggaagactggcagtgtgtgctgagttagagttggcaatgtggctcaaattagtcaatattgattaggatattgttttagaaaattttaaatgtgtcctaaattgtggcatattgaaaacgatattaaggaacaacgactcattagccctaaatacaatttaatgagtgccatcaatgggcttaagaaataagcagggatgggggatagagaggcaaaatgaggtgaaagagaaaatagaaagtggaaaatatgcttgaacattggagaatgtgaaaaggccaccaaactgctttagttatcactcagaagtgctcttcccattggctacctgcttctgatcacccaaacaccaactttagagcagaggagcagtaatcccctttatctgcaattt

SEQ ID NO: 4264 - DNA, 468 bp, Homo Sapiens
aagctgattttcaaacctttatctgggctgtctaaaacaagtgagttcctatccaaatacttttgaatggcaatgtaaacttccagccatcaagcccaagactgaatttcaattgggttctaagctggtctatgtccatcaccttcttggagaaggagcctttgcccaggtgtacgaagctacccagggagatctgaatgatgctaaaaataaacagaaatttgttttaaaggtccaaaagcctgccaacccctgggaattctacattgggacccagttgatggaaagactaaagccatctatgcagcacatgtttatgaagttctattctgcccacttattccagaatggcagtgtattagtaggagagctctacagctatggaacattattaaatgccattaacctctataaaaatacccctgaaaaagtgatgcctcaaggtcttgtcatctcttttgctatgag

SEQ ID NO: 4265 - DNA, 875 bp, Homo Sapiens
ccttccgctctggcaggtagttgatgatcttgtcagtctcttcagcagtgaggtacctgttgtctgccagcaggttgatgaggctctggatggctggagggtggcccccacgcactccctcctcagggcctcctctctctctttcctgcaggatggcttcatcggccatcttggctgcctgtctggcaatctcctcacgttccttctcccggcactcattcttgtaacgctcataatttctggccaccagcaccatggcatctgcttggggcatgttgcgatgctcttgcggggttccaaacatgatgttgactgtgcaggagcggtgaatctggtgttgctgggtgatgacaatagcaaaaggagaacctcccctgctaacatcctccaaggcttgtgacagtgacacttctgtgttaaggaagatcaagtccactaccatgcccaggtctcgcaccttccgccccacagactcagcatagtcttttgtctgtttgttgaccacaatcacagaacaatcaacgggcctttcggcatcaaagcgtctctggatttcctcaaaatattgacgataaagctcttctctacgccgttcctcacgtttcaaacgctcttttgcacgagactgactttctgggcctggagggccccgtccatcaaagctatctctgtaacggtcaaaataagagtcatcctttctcctgcaatagtcatccattcgtaggtatcggtcataagagccttctctcctgtacataggatctcgggagtctctcatgtctctgtatctctcgtacatggggtctcgctgatctcgacctcgtgccgaattcgccacccaggcctcgctacctaaaggaccgctatagtactgg

SEQ ID NO: 4266 - DNA, 811 bp, Homo Sapiens
acccttcggcacgctggtctacaccatcaagcagatgaagatgtaccgaggcttcaccatgatgccccatgtgcagtacatccacacggaagcttccgagagtctctgtggccttaagctggaggtcaacaagtaccagtacctgctgacaggtcgcgtctatgatggcaagatgtacacggggctgtgcaacttcgtggagaggtgggaccagctcaccctctcccagcgcaaggggctgaactatcggtatcacctgggttgtaacgccaagatcaagtcctgctactacctgccttgctttgtgacttccaagaacgagtgtctctggaccggacatgctctccaatttcgcttaccctggctaccagtccaaacactacgcctgcatccggcagaagggcggctactgcagctggtaccgaggatgggcccccccggataaaagcatcatcaatgccacagacccctgagcgccagaccctgccccacctcacttccctcccttcccgctgagcttcccttggacactaactcttcccagatgatgacaatgaaattagtgcctgttttcttgcaaatttagcactgggaacatttaaagaaaggtctatgctgtcatatggggtttattgggaactatcctcctggccccaccctgccccttctttttggttttgacatcattcatttccacctgggaatttctggtgccatgccagaaagaatgaggaacctgtattcctcttcttcgtgataatataatctctatttttttaggaaaacaaaaatgaaaaactactccatttga

SEQ ID NO: 4267 - DNA, 831 bp, Homo Sapiens
ttggatcagcggatgaggggttcttaagtgtaagtgaagatgagtctccggttgctcagtgctggtcctcacactggcgagttttatgggctcccttccaggtttcctgcatgctctcgtgtggatgtgactttgtatgttacgaacacgggatcaggccataaacacaatttgctttttaatctcacagtgtatcaggctgcacataggaagcggtctcatccttttcacagctgcttggtgctgcgttttgtgaacgtttgatcatttagccgactcccgtctgtttctaatgctctgctgctataagcattgctgcctcaatccttttaaatttgtctttgtgcacttgtgtgagattgcttcttaggaaagccagttcctagcagtgggattgttgagtctgaggggtctgttctgaggaccctgatcatctgtccagagggctgctctgagtcacacacctgccagggtgcggaggggccgtttccatcctcacctgcaccagatctgacaggtttaaacctttgcagaagtgactgggtggaaaacatctcatttcgtgggcacttccaagattcgcagtgagtggtaggggtgctcggtcctgtctctgtcccttaaagacgctccttgcctctgttcagtttcaaagttctggccaaggaccaatccctgcagcatggggccctcaaggctttgtctgtggtgtgcggggccagggcatcttatcttgagccgcagttatatgtgctgttttgttctctaacttaattgaaatttttgaacacaaaccgttgtagtgggattcgcttctcagaaatatcccat

SEQ ID NO: 4268 - DNA, 202 bp, Homo Sapiens
tcggcattgtctgctcttgacgtctaaccatggacattattatggctcactgatctaggatcattcacagcagattattctcctactggcatatggttaaaaggtcagtaatagcctaaggctatgtcacaaggcctatgtcactcacctcactatctcatcatgtaggcattttatcatctcacatcatcacaagaagaag

SEQ ID NO: 4269 - DNA, 392 bp, Homo Sapiens
caggagtgttcgacgggtctggcagataccatccgctgataactttgaaagaactacagaaatgtctcggaacctacagattccaactatgccaccacccctctcactctgaggtcgtataggcttgaaaggaccatgaacctacagccccactcatggtttcccaaaatgtctccagcggaccttttactatacttggctctggagttacaatttcctactcttcagctgaattaccaaaagccaacaagcctctgagcacatacgctgatcctacagcccacagacacacgtttttccactttcgtcagtgacctgttcctccatctccctgctgacagattcactcctttgtcccttctggttaaactgacttcacttctagtcaacaa

SEQ ID NO: 4270 - DNA, 345 bp, Homo Sapiens
tgcaagcacgacagtggctgagccatatttgaacacaggtctggctgactccaaaacccagggctcgaaaccacggccctttcctgccacccggactgggttctgttaccagtcaagacaaaatgaaaaaggactacttacagcagaagtacagagtacaatgtccatttgtcacaaaaaacaaatctgtattttctctaaccattggacgcttcaacagtgagttagcacagttctgaaagatggcgtaccatcaaacatacactgcgaccctgcatcacatggttttacagtcataaatacaagtcacggtacacatccgctacaattgttttcaaaaaagta

SEQ ID NO: 4271 - DNA, 439 bp, Homo Sapiens
ccccactgcccaaagagtaactatagttctggatttcaacttttcttctaattgtgaatccttctgttttttcttcttaaggaggaaagttaaaggacactacaggtcatcaaaaacaagttggccaaggactcattacttgtcttatatttttactgccactaaactgcctgtatttctgtatgtccttctatccaaacagacgttcactgccacttgtaaagtgaaggatgtaaacgaggatatataactgtttcagtgaacagattttgtgaagtgccttctgttttagcactttaagtttatcacattttgttgacttctgacattccactttcctaggttataggaaagatctgtttatgtagtttgtttttaaaatgtgccaatgcctgtacattaacaagatttttaaaaataaaattgtataaaacattca

SEQ ID NO: 4272 - DNA, 384 bp, Homo Sapiens
ctggggcaatgagcatactttctaggcacattcttaaaaaacctttaccttgtatttagtgtttagaactacctgcactttttgaaaagaaattccaaataaaatgccatctgattaaaaaacattatcactctgaacatacagaggcacaatcaatgacactcttacagtgaagaccattctaggtatgtgcaatatgggctgtcaaaggtgtctaaacacacagcaaggtcatctgggacagcaaactcgaacacaagcaataccagtgctgtggaagctccatcaaatttgaattaaaatgacttggcagcctgctggaatgtctggcttacatatcagggtgaggacagagatatggactctggaggtagcagacaagga

SEQ ID NO: 4273 - DNA, 475 bp, Homo Sapiens
agaggatcgtgtttgatggtgtctgttcaggagatggcttactcctggaggcagcaggactggcaggagctttgtgaaggaaagtacggaccccgccctctgcagcttagatgctcaagacaagtgatcggtgagccctaggcctgctctaccctctaggccactgctgagcgcttctgccccctgggaagcctagcatgcgtgctggggaaccgctgcaggtgtgtgggtgcagagacgggcaggtacctacccacctgtatggaacagctgccacgtaactatttacctatggcaggtactccgagcaagagccaattggagagatgctagcttcaaagacagaaacagcactgtcactgggaactttctcgatcactgtccttgtggtgtggacaagaacatccttattctttcataaacccacactgactcatttagggtacagggcccaatgtcttcaacttttccacat

SEQ ID NO: 4274 - DNA, 563 bp, Homo Sapiens
cttcgacggtgtctgcaacagtaattagcttatactatttcaaatatatatatgatgacttcataatacaaactaggatgcagaaataactccttccctcccccaccattctgtctgtttccagatagaaataaacagattctgatgcaatgtacagtttactgaaaacaaagcagatctacagttacattgtcctgcttcgggtacagatcagctctaacatactgcaggatgggcaaagtaaaactactcaatgaggacataattacaggcactggccttccttcctaacataaatacatgctcaaactatcattgcaaatcttctggcacaaatatattctgttactgtacaattgctgatcaaatttagtgcggtaggtgagtggagaacggaaaacaacataccttatgtgcataggatgatgctaagagaatgtgaagatggaaagatgaaaagaaaattttacttgaaaacacaagaaaataatgttaagggcacagaataattgtgtgattattttaatggtttttgaacccatcaatattatgcaatattttaa

SEQ ID NO: 4275 - DNA, 229 bp, Homo Sapiens
cgttcccgaacagacttggtgacagaactagacactgtctccaaaaataaaatagatgacagatagactctatgcactacttgtctgacaaaacttcctctgtttttagcttactcttgaacaggatgtgtgattgaaataaaccttgtttacttgagtattgaattaagtagtctccaggttgtaactgctgtgatcagagcacgatgtaggttatcctgtacttggg

SEQ ID NO: 4276 - DNA, 544 bp, Homo Sapiens
  misc_feature (191)..(218): n is a, c, g, or t
ctgcgacggtgttctgcccatgtggaatgggcaacaaggtggtcatcagtctgaatcaattactgtaagacctcagataattagagcattactcaaccaaagcaaagtatattccacttttatgggaaagtaagcaatctcaaaataataataatgataataataacaagaagagaaggaggaggggaggnnnnnnnnnnnnnnnnnnnnnnnnnnnntgtttagggatgaaactgagttaataatattgactaaactgaggtttccgaacattcctctcactctcctatcactctgacttcaatagactccagcagcaagaatagatactagcatctgtgattattagtattatcatttataatacctagtatttataatgctttgagacattgtttctaattatctttctttttttctggaatcttagaataagtacaagtatatgagatggtaatatccttaattttttagaaaaaggtcataaggcaaaaatggactcaagtttcagatatttacaaaggaagaatttcagaccctcgaa

SEQ ID NO: 4277 - DNA, 509 bp, Homo Sapiens
gtgcctggtcaggaaggtgaattcggtcgagcaggattgtgctggggagctgctacagtctgaatgtcggtgtctccccaaagttcatagttgaaatcctaaccctcaaggtgatgggatttggaggtaggggctttgggaggcgatccagtcacgagtgtggagtcctcatgaatgggattagtgccttgacataagaggctccagaaagctttctcgccccttcctccacgtgaggacgcggtaagaagacactgaaccaagaagcaggttctcaccagacaccaaatctcccagcgcattgatcttggacttttagctttgagaactatgagaaataaatttttgttgtttgtaaaccacccagtttatgggattttgttacagcagcccacatggatgaacatgggagcaaaggggaaatcatggaaggaggactgttttcgttcaataggcaaacctttcccactctgtgagtggctcaaggtcaacaagggaaaacagaggga

SEQ ID NO: 4278 - DNA, 426 bp, Homo Sapiens
agaaggcaccgtatctctgaagcagagagcccgccctggacactggatctgctggcaccttgatcttggacttcccagcctctagaactgtgagaaataattttttgttgtttacaaattacccaggctaaggtgtttcattgtaacctgaatggaccaagctggtgtgaccctgttggaaaactggcagtatctaccaaaagccgaacatacgtataaactgatccagcagttccactcctgggtatgtacaccacagaaagctatgtccaccgagacattggcaagaatgtttctaaccacacgctgactgtagccccaaacctgaaacaacccaaatgtccatccaccaacccaaatgtccatccacagttgaagctacagtgaagtcacagcgcggtcgcctacgcacgtgcgtaggcgact

SEQ ID NO: 4279 - DNA, 583 bp, Homo Sapiens
cataagcggatgagggcggagcagatacatatagacctgaacattagaagagatggctagattcaagagatagattgatgaggcatctatattaatagttgactcaactgttttctcagaagacattaattttctgacataaatcaaagaatataaattggaaatatgaatctctacacccttcttgaaatataaacataatataaatatccacataaatggctcagtacaatgcaatcatgagttagctaccagtgccatataaaatgtagagcagaaatggattagaaaggagaatgccttcttgtatgcttagataattttcttatttcagttgatttagatgtctgtttgtactctgggtgcttagtctttaaagtgattttatagggaagcaaacagttacagcaatcaactcatgaaagacataaattcactgagctacagaaataaaatgaaatctgcattgctttttccactgaccgacattcttcctctttacttaaacttctgattgtcaaggcttaattctgtgttttatgctaaaatttctaagtacttaacaaatatgatgagaaccaca

SEQ ID NO: 4280 - DNA, 480 bp, Homo Sapiens
  misc_feature (51)..(335): n is a, c, g, or t
tgagtagggaatgccagggattgatgagtaaggttgttctttgttttttgnnnnnnnnnnnnnnnnnnnnnnnnnnnnnnnnnnnnnnnnnnnnnnnnnnnnnnnnnnnnnnnnnnnnnnnnnnnnnnnnnnnnnnnnnnnnnnnnnnnnnnnnnnnnnnnnnnnnnnnnnnnnnnnnnnnnnnnnnnnnnnnnnnnnnnnnnnnnnnnnnnnnnnnnnnnnnnnnnnnnnnnnnnnnnnnnnnnnnnnnnnnnnnnnnnnnnnnnnnnnnnnnnnnnnnnnnnnnnnnnnnnnnnnnnnnnnnnnnnnnnnnnnnnnnnnnnnnnnnnnnnnnntgcaatatcttcttttgaagtgcattctctgcttctgcccttgatttcttattatctgttctccagttattaatagtagctaaagtctgtttcaagatcagcctctcctccctttgcttactctgcctaaccccgtcttccacag

SEQ ID NO: 4281 - DNA, 578 bp, Homo Sapiens
aaggtaacagggaaggtgtctctgagatgatgctgggcaggagccgagggggttgtggtgccagagctgctgatagctgtgttcttataacctgcatcctgatggcttctgagccctggttcctctgaggcctctgcagcctgcttccgggcagggggccacacctgtgctcacctgtcctggtttgcctccagcactgtgtcctgggctgccctcgtggggcagggctctaacaagggggagaaggccctgaggaggtgcgggtgaggccaggtgagaggcacagaggatgtcctggcgcctcctgctcccctctccccacctgtgacctcacctcactcttctgcgtcctggcccagagcactgggacctcatcccagtatcaatcaggatgcctccctgatgtccctgggcacctctcactcaccttgtcccaaactgaccttggcatcttcccccagaagtgtatcttcccctgagtgcccttatcagggaaggcgccactacccacctcatcgatgggaaaagagacctggggcctcatccctgatgcctacccctcatacgcttatgcaatg

SEQ ID NO: 4282 - DNA, 424 bp, Homo Sapiens
gagaatctcagctgtttgtcaaggtcctctgactcctgcccagctctcctgagttggtctcttccccacccttctctgctgtctactctcactctctccatttcagtcatggggactttcatgatacccctcacacataccaagccttgtccggcctcagggcctttgctgatactatgctgtcagcttgggacactttcttctcatatcctcatggctcactctgctgtcatctcctgatctctgcttaaatgtcaacccagaggcactccctctccatcactctgcatcttcttaccctgttttcttgttctttacatcaccacccgacatatcatgttttctgcattttatttatagtatgtctccacaactagatcagaagctctgcaggggtaggggtttttgtctgtttggttcacgc

SEQ ID NO: 4283 - DNA, 471 bp, Homo Sapiens
tatcgatcatagaaattacggtaaccacctctgtttccaggctgcccccagtactgctgcccgtaggcccggttgtcgtagcctcggcgctgcccgcccacatagccttggccccggcttcggttctgccggttacgcttgtttcggttgtttcggcgatttgtccgcttctcggaggggggcagaagcttccttgcctcctccttgtacttagtgacaatgggctgagcttcctccttctccagctccccatatgtcacctcatccatatagtcgcatttttcaggcaaagagaagttggctttcatctccagcattatagattcaggcacatcatctccctctacttccttcctcaactccagcctcttcttccaatattcctcattagggacaaccaccaccactttccgagagaaggtcttgaacagcaatagcttccgccgtcccaaagcaagagggatcttagag

SEQ ID NO: 4284 - DNA, 674 bp, Homo Sapiens
  misc_feature (523)..(538): n is a, c, g, or t
cttgaaagggttcctggccttctactcccaggaggtacgagacctgttccagatgaagctttttgtggatacagatgcggacacccggctctcacgcagagtattaagggacatcagcgagagaggcagggatcttgagcagattttatctcagtacatcacgttcgtcaagcctgcctttgaggaattctgcttgccaacaaagaagtatgctgatgtgatcatccctagaggtgcagataatctggtggccatcaacctcatcgtgcagcacatccaggacatcctgaatggagggccctccaaacggcagaccaatggctgtctcaacggctacaccccttcacgcaagaggcaggcatcggagtccagcagcaggccgcattgacccgtctccatcggaccccagcccctatctccaagagacagaggaggggtcaggaggcactgctcatctgtacatactgtttcctatgacattactgtatttaagaaaacaccatggagatgaaatgcctttgannnnnnnnnnnnnnnngtactttggaacgacaaaatgaaacagaacttgaccctgagcttaaataacaaaactgtgccaactactactggtgatgcctaattatgaatccaacgtgtaaccagttataaatacatatatatatataaaaaaa

SEQ ID NO: 4285 - DNA, 528 bp, Homo Sapiens
gattatgtcacttcctgggtgtggtggtgccactgtcctgtccatgtcagcatagttgtgtttctgaggatgggttcgtggtgggtcatgctgggctactgcaggccctggccatgctgctggttcctacttcatcctggcactcaccgtcctctctgtctgtgccatcagcaccaatggagccgtgcaggggggtggagcctacttcatgatcagccgcacactggggcccgaggtcgggggcagcattgggctcatgtactacctggataacgtctgtggctgtgccgcctccctcctgggcctggtgcagtctgtgcttgatgtctccggggccgatgccacagggcccagtgggctccgggtcctgccccagggctacggctggaacctgctgtatggctccctgctgctgggccttgtgggtggggtctgcaccctgggaaacggcctctatgcccgggcctcattcctcacattccaaatggtctctggctccctggcctctgtgctcattgggttccgatg

SEQ ID NO: 4286 - DNA, 561 bp, Homo Sapiens
  misc_feature (439)..(447): n is a, c, g, or t
ccaggattacttcgacggtgtctgacttcgtgctttttttccaaaactagtgttttgaatcagcaagtcaaattctacaaaacaaagagccttctggaatttcaattgaaatcatgctaaatatatagatcaatttggggagaactgatatctgaacaatattgagtcttccaatctatgagcatagtatatctccccatttcactaggccttattgaatttttccagcaacattttgtagtttccagtgtagaagtcttacacaatttttcctcaacatttatccccaagtatttcataagttttgatgctatcataaattgtattgttttcagtttcaagttctaattgcttattgccagtacatagaaatgcaaatgatttttatattggcttatatactgcattctcactaaactcacgtattagttcagttgannnnnnnnncagattccctacgattatccacatagacaatcatgtggtctgtgcatgcaggtagtagtatactacttttctaatctgtgtgcttactattactttctcctgacttactgcact

SEQ ID NO: 4287 - DNA, 441 bp, Homo Sapiens
  misc_feature (137)..(137): n is a, c, g, or t
atatacacatacgcttttcttcttcagtatgctggaattagtagttacataattaaagcgtgtcactgatttacctctaatgttgacagcagaatttccattcctgtagaaccttggctgtcatttctctccttgtnttttctgaaaagtagcaaacaatttttttctcaaacataaatttttaaaagtatgtatagttttgttgcatatagctaataaagattcaacaagtctccactggtacagtaaacactctaacttggttcacagacgttcttccctcgtgatgttgctaattctaccatatgtggacttcgagatatcagttaacatggcattcttcacatttcatcacagctcctgtcatgaattaggtgattcctattcatccatttaaatctaaaatcgataatatagtacatgtgccagaccctcataacg

SEQ ID NO: 4288 - DNA, 457 bp, Homo Sapiens
gacgggtctgggatcatgtgcgtaaatgcaggttgttaaacacacgtgcagaacatgcaggttgttacatacatgtgcagaacatgcaggatgtatacacatgctgtggtggcttgctgtacctatcaacccatcatttaggttttaagctaaaacatctttttaatcatgccaatgataatacttttacctaatataattgattcatctaccagaaataacacaggaaccaacatcagtaactaaaccttttcgaaaaatcacctccacgaaaatcttacaattaaaatttaaaattacttcagctccttaaattttcaccaggtctgactatctacacttcttatagcgaagacgttttaatagcctacagtagtcaactctaactgatgaattccaagggattccaatcaaaatgccaatcataaattttctagaaaatgatgaatgacttcag

SEQ ID NO: 4289 - DNA, 605 bp, Homo Sapiens
tacgtgttggcttggtaagtgaccctaccttggctgtgggcactgaggtgggaagagtgccatgcggctctacagacaagaagccacccctgaatgctgggctccagcctgctgtctgcctgagtgcatgactcgggagccctgtcacggcacgcacgccatcctggcagcctgaggtggggacacaagtctttgaccccagcatcgtgcatctcaggcactagcacagcagacacctctgtttctagttccagggccaggctacatctcactgcctcttacggggaatgccctggtgtgtgagatcaaaaagaaaatgatttctgctgcctgccagtcttctcactgcccttgtttagccctctctaatgttaagagtcataatgagggtagtatgggtaatcgggaaaggtgtctttatacattcactcctttcatcctcacatgcaccctgtgtggaaggtcctatttctccattttgtaggcaggaaattcagactcagagaagttatgtgaattagccacagttataaaccttaacggttagaaccagatacatactacctcagagaagagaagcagtgtgtaatgggaggtgctgaagt

SEQ ID NO: 4290 - DNA, 577 bp, Homo Sapiens
tctgtattctccagaatgtatgatgagtaatgaacaaaagcccacccagagctgtaagggctgttctcagcagcaacactcagttctggagggactggaggtcagggctattgttgggctgagcctttattccagaagactgagtaggtgtcaggaaatgaggctgggctcttgaagatgggtgcttcgaatcatgttcggttacttgaacaaaaataatagtaaggagcccattcataaaaacaacatcattttcttcaacaacatgtaccctgtactcacttccctcgtgaacggaataattctacgtctgtgacagaatcccggaagacagaaccatagcaacactggcacattcatttcttcttataactgacaatactggacacacttatgtgggctggggccaagctgtgcactgagcactctatgaacaacacttcctgtcatcctcacaataatcgggtgcaggagacattattaatattcacatcttacagctgtagcaacagatgcatggtgatgcgaacaaactggtcaaaggatcacgcgagcaaggggcagagcctgcaatcta

SEQ ID NO: 4291 - DNA, 305 bp, Homo Sapiens
cttcgacggtgttctgccgtgacagctgcatcagggttattctgtttgtttctgaagggcaggaagaaatgaagggactggatggtatttcgacaatttaacattcctctcataaatgtttctgcaaccacttatctatattagaacctagtataagatggtatctgattaagcagagatgtgtttacttagttatttaaagttgactgtccatttttgtggggagttctgcaaacagtatcattatttccaggtacctgctggctgaacaaattaaagaaccagaacaccgtcgaataagctcg

SEQ ID NO: 4292 - DNA, 731 bp, Homo Sapiens
tagaggatccccggacaagcaagcagaggctgtgcaaaggtgtgagcaggatcacgtggaatctggaggatacatcttggcttgcaaactgcctctgtctcctgggtgggactgttctgtccttgcactgctgttctgtgttacctcttggggtgtaaggttttgcttacaggagacaaactttgggcgtagaatggaagccactgccagcctctgtgctgagaaggaaggtgcttgtttcaaagggagcagcaagggaggcttgttctactcacctgggcctgtttgcctgagaaggggagataagggctgaactgggactagccagggggaccaacacaaatggtgggggatcatgacctgaaggattctttccttcccatgagctgcagggctggttgccgtccttgcaactgtgtcttatttgcctgtgccgttatatcttggtgacccctccacgtgtacactactgacaaacgggtggagtgctggggagaagtcactgtgccgcccacctagtaaaccttctgtctgtgctcatggcatctccaagatggggcactgctgtgtgcagaatccagggtcctctttctgcttgcaactcctttccctggatgccccagaaacaatccaggcctcctttcctatcttacccctttgctttgcttttaccccagcacctctataaccgccttctcttcttttcagactcctgctgtccagtcgcgcgc

SEQ ID NO: 4293 - DNA, 633 bp, Homo Sapiens
gactgctgctttgactgataaattgattgagtctagtttctcagccattggcaaaccatggtgcccctattattggtcatatttcagagtcactgtctaacaaatcatgtggagcactcagacctgtcaatggagcttattaacactcttcagcctgtcttggcagaccacattccaggtgacagctctgatgctgaggaacaattacataagaagcaacgactgaatctcgtctcttcatcatctgatggcacctgtgtggcagctctcggacacgtcctgtactgagctgtaagaagcggacgctcgtacgacccaacagcatcgttcctctttccaagaaggttcaccggaacagcacaatccgccctggctgtgatgtgaatccctcctgcgcacttgttgtggttcaggcagcatcaacaccatgcctcccgaaattcactatgaagcccctctgttggaacgtctttcccagttggactcttgtgttcatcctgttctagcatttccagatgatgtgcccacaagcctgcatttccagagcatgctgaaatctcagtggcagaacacgccttttgacaaaatcaaacttccacaaagtatcggttaggcaagaacaccgtcgacggg

SEQ ID NO: 4294 - DNA, 556 bp, Homo Sapiens
agaattgtaacgtgtgaaacgtgaggctgtttgtctggatagtttcgttcaagtgtcagacggtaaaatagttgtcaaccaaaccttttggacctgaaagtaaatgatctccatgagttacagctgtgtcctgcgaaagagtacgaggggcaactgatatatctttagggtgagttactgaggctgtttcagctgaggcagcatcacccacagaacacgatgttgaagatactggtttctcattactgagagcgtgtaggtcattagtctttttaagtggaaggcaggcagcttctttatctgtcacttgggatatttttctttcccaaataacaatatgtatctctgaagcaggaacttcaaatttcttgtgcctttcagaacatgggccttttaagtcatcacattccagccaacttccatcagcatctaaaatccatgttataaaatgattatttgctcgatactgaattacagaagttatctgataaagacagccttcaaaatgaaatgcatagtgctgcaagtcattctgtggtaagccttctacaaagtg

SEQ ID NO: 4295 - DNA, 280 bp, Homo Sapiens
ggcagccgattccttagcacgaccaatctttttctaggttttcctctcaccgcatggggccaaaacagcacagagcatgagtttggtaccccaagcctgagcagcgggtctacgctgatgccagggaggatccggaccgtgcttccgggggcccccaaccagcatggccttctcagcctggattctgtatgggttagaggcaaatgcttcatttttctgcacagtgtacacgttccttaataagcgaagtgtggggtgatttctaaaaggatttaaatgg

SEQ ID NO: 4296 - DNA, 260 bp, Homo Sapiens
gaagtcctagtgtaacacattccaaggaacacctctgattcattactctttggagactggctcccattagcaattactggaaataatggctgtccacagagcatggccgggagtgtggcatgcagggaggatatcataaggtgggccactgatgtgtggaaattaacccaggagcccacaaaggcaacagctatgggcctggtaggatctgaagatttcttctccagtggctcctggaggcccctatgcttattcaatgg

SEQ ID NO: 4297 - DNA, 803 bp, Homo Sapiens
ctagcaggagctatcgacgggtcgcagatatcttgtatacacattgcacacggcagagaattcaccccgtacatcaccatgatcggatcccccacccattatacgttgtatgtttacataaatactcttcaatgatcattagtgttttaacaaaaaatactgaaaactccttctgcatcccaatctctaaccaggaaagcaaatgctatttacagacctgcaagccctccctcaaacgaaactatttctggattaaatatgtctgacttcttttgaggtcacacgactaggcaaatgcaatttacgatctgcaaaagctgtttgaagagtcaaagcccccatgtgaacacgatttctggaccctgtaacagtatcttacgtgctccaaaggctgaccttctggaggctcaccgcctcatctggctgcttcctccaaaatccaaaaccttgcctcaaaataagctgtcctgtgggtgagttggctgttctgtttcattctgaccattctgactctgcccagaacaccgtcccacctgcagacaccctgctgccagaactccaacaggtccccgaggtagcgaggccaagccatgcccattcactcctgcaccatctcagtgtgctccctcacacagggcctgagatgtgtggggccatggcctggaagtgaaccatctaaaagcattatctatttttcagcataaaccacgcagagaggctcgatgcatcctgggctacagaagtggccccggggaatcggagttgttcagcctgccgaccgaaactacttcagggggaaggtt

SEQ ID NO: 4298 - DNA, 224 bp, Homo Sapiens
tatgctatagctgactcctgaggatcccccacacgccccaaaggccagtctctggccgagatgttgctgctcgttgcgcttctggcgccgacgttgttgttggtcgcggtttgcggcgcgcgggtgggcgtgtggagcgctgatttcagtctgggcgtgctggccctgaaagcggggcgggtgctggcctatctgggcttggcggccgccctggccgcctgcct

SEQ ID NO: 4299 - DNA, 986 bp, Homo Sapiens
  misc_feature (691)..(691): n is a, c, g, or t
ctagaggatcctcacactgggtcgagtccatgtaatatgcatatgggtaggtgtattgcagggtgtatcgacacttggccaagagcttggcagcattctgtaggtactgccagtcgatccatgtccccagattgttcatgaccctctcctgaatcttctcgtgaatccgctggtatgtctgtgcctctagctgcaagcttttattgtggttttcccacctctcaaagtagaataagtacttcttgagggcttccctcgcctgggcttgttggctctggttcacgatgtcaggattctccttgtaacgactgcactcatagtattcactgccatgagtcttccaatctcctagacacatccagcagaagtcgtgtttacatttggagcattgcatgtgattgcagcctccattcttctcaatgcagatgttgcacttgggacagtctttagtgtgagcactaatgtagttggctgtttcagagtcgtctgcacacttcgtgagccatttccggattgtggcacagtctgtgggtgcgtgatacatctgacgacacttgaaacagaagacctcgttgcaccgattgcactgtactcggcgagctctaggctcctgtacccgaataaccatggggcagtctgcaccagggcacagctggagctggtaatgactctccacatagtccctgaaganggtagcgcctgtatttctctctcaattcttcattgggaagccaatggaaacacaaagtcctctggtgtacggagtggacagtcctgagccatgcaagagactcccacgcacacgccgtccttgacgagaactggagcagtgctgctcccagcagctgcggcaaaactggtgctgacaggccagagagagtaggttttcctttcgcacaaactgcatacacactgcacagtggtgagggggatggggatgtgggaacatgtttagatggattaggctgaactcgacccagtgtaac

SEQ ID NO: 4300 - DNA, 256 bp, Homo Sapiens
  misc_feature (47)..(47): n is a, c, g, or t
  misc_feature (121)..(121): n is a, c, g, or t
aagctgctggacactgtgtacaagggcattccgtactcacagcgtcncaaagctgaggacatggacctggagtggcgccagggccgcatgactcgcatcatcctccaggatgaggatgtcnccaccaagatcgagtgtgactggaagaggctcaactcactggcccactaccaggtgacagacggttccttggtggcattggtgcccaaacaagtgtctgcctataacatggccaactccttcaccttcacccgcg

SEQ ID NO: 4301 - DNA, 588 bp, Homo Sapiens
ggcacctgggcacacatcttcgagacatgcggcccaaggagctgttcaagcgaggatgtggaggaggtcacttaccgagccctgagaaacaaagacttccaagaggtcacccttgagaagaacggagaggtggtgttacgctttgctgcagcctatggctttcgaaacatccagaacatgatcctgaagcttaagaagggcaagttcccattccactttgtggaggtcctcgcctgtgctggaggatgcttaaatggcagagccaagcccagactccagacggacatgcggataaggccctgctgcggcagatggaaggcatttacgctgacatccctgtgcggcgtccggagtccagtgcacacgtgcaggagctgtaccaggagtggctggaggggatcaactcccccaaggcccgagaggtgctgcataccacgtaccagagccaggagcgtggcacacacagcctggacatcaagtggtgaagtcagccagggccttccagctgctcttggggccagagccaagagcctctcagtagagggaggggctgccctgagtggagtattaaagacacttaagaaaaaa

SEQ ID NO: 4302 - DNA, 228 bp, Homo Sapiens
agaagagtctggcatacgtgagcgcgctacaaacattagctaccgtggtccaagtgtatccacagcacctctgacagtgtccactgaaccatgtgcttctgatccagccagggctcccaatttcataggtcgcattctcaaaaccgacgttggctgaagcgtcaaagttgacttagtgagtccaccaagaggagcaactgggccaccggggttcagttgaaggaagca

SEQ ID NO: 4303 - DNA, 209 bp, Homo Sapiens
agcagaggagcgtattcgagggtctgtagtgggtgttgaatcctttcttcttgtgtgtctgctctgccagtgaattttatactttcatgtattttcctgatggtagatatagtctctctgcttcccaatgtaggactcccttaagcatttcttctaggaccacaacaaacaagaaccaaacaaacagtctttttcttatctgggaaata

SEQ ID NO: 4304 - DNA, 929 bp, Homo Sapiens
attaatccccttcgacggtgcctgtcagtgatactacaggataagaaagctcaggcatcctttgaggaagaagataaaatatctcatatttttcacagaactacctgttcccattcccaatagagcttcagtatcaccttgaaagaaaatccacaggtgaccatgaagctgctagtccagtgttctggacaacggactctcagatcactggggctgaggccaaagctgccatggacagctgtggaacatgggctaaacctcacctggaagacagcacaacaacatgatgcctggcacataccaagctcatcggccatcatgacagtcacgcatgctcagttagtcccacaggacagtcctctactcaaaaccctcccgcatcagcttggctcatttggagtaaaagacgaagttcccactgcagccacagcgccctcctgtgctcactgctccctggccttgtccatttccaggcacactgacctccttgctgtctctgggcacactggcacttttgctcttcccgtccgtctgtcaagaacatcctgcccagagactggggactggtggtccttcctgacacagcgaataaaaccacaaaagtcccccaccatgtggatactccctactcccctgatttttctgatacaagcctttcttatgcttacacaagcactccccaaagcctaaagaaaagtcaaatgtccaaacacacaatccttctacaaacttacacatgatgtgccttttcaaatgtgccacccaccttcacaccacagtgcaggaagtcaaagcttctggaggaagggacagtcctggtccccggtgccccttggaatcagctcaagctgggacagttacactcactaccccagcatcagcatagacacaccagtttctcgcccagacccgtcaagagatcctctgat

SEQ ID NO: 4305 - DNA, 278 bp, Homo Sapiens
tgatgctcataattaggctgtgcgggccccgctccgcttcgaatggttgtgttgatgttcctgtcagctggtcctatagtaccccgccgtcaggaaggtctccccaagtgcaaggacaaagactgaagagactgctatattgatggactctcaagccaactatgaagttgaaacaaagaaagtgatcacctgaagacacctcctctgctaagaaacacccccaaattgtgcagcttcatgccactagaactctcagtacccgtcgaaaagcatccgct

SEQ ID NO: 4306 - DNA, 796 bp, Homo Sapiens
ggcacgattgaaagtagctgcacatgaagctgagaatctgataatatgcagaagacttcttggagggaaagatggaaatagatgattttctcagtagcttcatggaaaagagaacaatttgccactgtagacagagccaaggaagagaaacttcagcaggcgatagcaatgcacagccaatttcatgctccactaatagcattttcctggaaacatgaactgccaagagaggaatgggacacaaaaccaaacactgttttatatttatggtttgcaaactggcatttcatcagtggctaaattcacagatatcctatatagattgtatacagaactgagactgattttgtaccgattagaatgattgctatgatctttgagaaatttttctgcactatttgcactgaaatgtttatttattgttgataaattgtatcatatttaagttccactgctgttcctcttaccttgattaaatgcctatgcatgtacttttagctagtttttaatattttataaaacttcatttaaatttgtatttttaacttgaagttccatttcgttatcaaggatggtatttagatttttttcctcttaaccttttttcaaaaactattttcaactgtgaggaaacccttatttttctttctttgtggataaaactttcaaaagcaatttaagatattcatagtgttaggaaacaccaaacctgcctatgtgccatctcacaaaagaaacttttaatacctacaataaatcaaaagaataaaccagctgttcttatatattgtttcat

SEQ ID NO: 4307 - DNA, 1706 bp, Homo Sapiens
gacggcagtgaatctcgttatttggttatatgcagtctccagaggatccctcgtgagggatatgatcggcatttattgtgattaggaacgaattatcctaactgatggattctgtaattgtgctgctgacggatggggaagacaacactataagtgggtgctttaacgaggtcaaacatagtggtgccctcatccacacagtcgctttggggccctctgcagctcaagaactagaggagctgtccaaaatgacaggaggtttacagacatatgcttcagatcaagttcagaacaatggcctcattgatgcttttggggccctttcatcaggaaatggagctgtctctcagcgctccatccagcttgagagtaagggattaaccctccagaacagccagtggatgaatggcacagtgatcgtggacagcaccgtgggaaaggacactttgtttcttatcacctggacaatgcagcctccccaaatccttctctgggatcccagtggacagaagcaaggtggctttgtagtggacaaaaacaccaaaatggcctacctccaaatcccaggcattgctaaggttggcacttggaaatacagtctgcaagcaagctcacaaaccttgaccctgactgtcacgtcccgtgcgtccaatgctaccctgcctccaattacagtgacttccaaaacgaacaaggacaccagcaaattccccagccctctggtagtttatgcaaatattcgccaaggagcctccccaattctcagggccagtgtcacagccctgattgaattagtgaatggaaaaacagttaccttggaactactggataatggagcaggtgctgatgctactaaggatgacggtgtctactcaaggtatttcacaacttatgacacgaatggtagatacagtgtaaaagtgcgggctctgggaggagttaacgcagccagacggagagtgataccccagcagagtggagcactgtacatacctggctggattgagaatgatgaaatacaatggaatccaccaagacctgaaattaataaggatgatgttcaacacaagcaagtgtgtttcagcagaacatcctcgggaggctcatttgtggcttctgatgtcccaaatgctcccatacctgatctcttcccacctggccaaatcaccgacctgaaggcggaaattcacgggggcagtctcattaatctgacttggacagctcctggggatgattatgaccatggaacagctcacaagtatatcattcgaataagtacaagtattcttgatctcagagacaagttcaatgaatctcttcaagtgaatactactgctctcatcccaaaggaagccaactctgaggaagtctttttgtttaaaccagaaaacattacttttgaaaatggcacagatcttttcattgctattcaggctgttgataaggtcgatctgaaatcagaaatatccaacattgcacgagtatctttgtttattcctccacagactccgccagagacacctagtcctgatgaaacgtctgctccttgtcctaatattcatatcaacagcaccattcctggcattcacattttaaaaattatgtggaagtggataggagaactgcagctgtcaatagcctagggctgaatttttgtcagataaataaaataaatcattcatccttttttttgattataaaaaaaa

SEQ ID NO: 4308 - DNA, 329 bp, Homo Sapiens
gtttaggctggggacacggatggttggcagcggctcttcttgtgcaatgggctctgatcctctcaaaggagctgggtgtcattatgagcgagaagggggcgggtcaaatgaaaaaccatgggtgtgaaattttggacataaggtcggaggtcaggagctaccccaggacgtggccctcatgggggggttgagcttctaggtctgaggccgcattctggagggaaaggcacaggaaaggacgcagacccagccggggtggcggtgggtgtctgtggctccaacctggagcgggtgacaagcaagagaagggtcttgagtcctccggccta

SEQ ID NO: 4309 - DNA, 151 bp, Homo Sapiens
tgattgaatcccaggaatttggcatacccctagattcggagggcggacggtactaccggagctgtcaggtggattttccaaggctttgcattggtctgtacctgaaacttatggtggcctagactccccagtatccactcttccttatctt

SEQ ID NO: 4310 - DNA, 454 bp, Homo Sapiens
agctcggcccatgatatgagaagcacgaagagcacgccctggcaggatggtaagtcgaacttggtctggaagctgaagacggtgactgagagggcagacaagggccgtgatgcccaggcacagcagcacggaggtggtgttgtagtagctggacagcatcccagtgaggtaggccatggacagggtaaagacggtcaggagaatcaggttccaggggaaatgcctcctgggtccagaacagcaagccagggtcagctaggttgcaaagaacacagcataggatgcacagtaccagcctgggttgccctggacatagtccttgacagggtcacagaaagtaaagagagccacgacagccaagtcaccagcactgaatcagcaggatggtgtagacctttctgacaagactcgacgactttctgtcatccagctaaagtgtgaagagctcatgtct

SEQ ID NO: 4311 - DNA, 306 bp, Homo Sapiens
tggaggtctgaggaataacatttaaggaataaatgaagaggccaaaggtggggggtggttcaggagtgagcaaaatgtaagaagtcaagggaataaatctttaaagtaggggttgtcaaaaatgtcaaatacagaaaaaaagtcaagtactagcttgtgaattaaactgtggatttagaattaagattttagactttacaggaagggactgttaaccagagagccaaatggcagattttagttaaggagccagtagaaggtgacaaagtagaggtaagaatattccttcaaaaagatttggcagct

SEQ ID NO: 4312 - DNA, 835 bp, Homo Sapiens
gggatatgacagtgtgtaagaagcaggtggtaccggtcggaatcccgggatatcgtcgacccacgcgtccgattcaccagagcagagcatctgaaaggccacagcataacccacctaggcacaaagccgttcgagtgtcctgtggaaggatgttgcgcgaggttctccgctcgtagcagtctgtacattcactctaagaaacacgtgcaggatgtgggtgctccgaaaagccgttgcccagtttctacctgcaacagactcttcacctccaagcacagcatgaaggcgcacatggtcagacagcacagccggcgccaagatctcttacctcagctagaagctccgagtcctcttactcccagcagtgaactcagcaagcccaggccaaagtgagctcaactaacatggatctttgcttgcactcttctcctgacacacctgccaatgctagtggtcctgcaggtgggtcggattgaggctctgaacctccggaatcctgagctattgacgtgcacttcatgtgagctcctaaaatgggagggaacctccctgctaataatagctccctagggccgatggaacccctggtcctggtggcccacagtgatattcccccaagcctggacagccctctggttctcagggacagcagccacaggttcctgcaacagggcagcttcagtgtggatgacgtgcagactgtgagtgcaggagcattaggctgtctggtgcatctgcccatgaagaacttgagtgacgaccactggctttgaactccaatagtaactaagcagcaatattacaaacgacttttgaagacccgaaaaatgccggg

SEQ ID NO: 4313 - DNA, 309 bp, Homo Sapiens
agtaattgtcatctaaaagttgcactttaatgaccctttagtgcctgaaatccctcagagttccaagccaccacagctacttcatagaactgctgtagctcatagtccataggtttcgtggtctctagctacaatattcattattgtatggtttgtaaggtgataacctaaaacggcccttcaccatccaggtagcagttaaccttgctatttaccttctggatctcttatggtgaacaacgcaatgggagtgttcacgggttccagttcttccacatcacccacaccatctatctcgtttgctatgta

SEQ ID NO: 4314 - DNA, 526 bp, Homo Sapiens
gcgctggggcagaatgaggaatctcccaaacagggttggattactatctggcaactgtcagatctgagtttctggtcctaaaaattgcactggcaaattccctactctcataactgacccatttccgtatttaaacacacacccacagtggtctatctgagcaactactgagacatgtttagtgacgcttgtgccaaatctattatctcttttgttatggatgtttccccacagctaagaaaatctttgtgtggagcagatgcgtggatgtgttgcatggatctcacatagtttatctttgattggatgctgtggtttgaggctgagggctgcttccatgctttcctctattgtgcgacaccctaaggctactcatacggaaagtccagggaattgtccttgtctgggctgagagcctcatttctgcatgtgatataatggactcagctcttgatgtgctacttttatctgggtgacaaaataaaaacaatttcatttcaggctttcattcttatgcatctgcttc

SEQ ID NO: 4315 - DNA, 967 bp, Homo Sapiens
tctctatacttctacgcacatatagtattaagtcttacctcttatattactgtaaaccttgccgtctacaatttctagatacacttatttgccataagtgtacaatccccaactatggatctctcccttctgatgaacaccatgatattgttcatgggctatactctaccacctagactttgcatattatatcatgggaatcagagattattttcataatttcttggtttccggtggataagagtggttttaaagtgcctattctatactgcatctcctaataatatatgtgtgttgcatacatctacatatacacacatgtaagtatgtatatgtcacctagctatatccagaagtgacattcatttattactgtagcattgctatattcccttggaataacaccgtcatctcgtcctgttatctttctggtaattgacaaaatacatgcttgacagctcccataaaaagcaggtatgcaagtcgtacatctgttgttttaggaggtgaatcaataaagtttgggtggggactaatagaatcctcaggttattcacttttataaacttttctttttaacctcccagcagtcccttttcctaagttaacagctttttgtatatgctgttattcaggttactagagcaggtatccattttacttgccatcaactgcccactgctgttataactgctgggatcggaactttctttgcagcataagatactgtagacgtacctctggcactcagaggaagcgtaatagtaaattagggggtcgactgcagcagctttatgctgctgaaacagacacagaggaggtaggcaaaagtaggcagcctctgtggtggaagtgtgagaaaggaatgagtaatgcgcaatcaggaagacgtttgtgggtccgaagcaaatactgaagatgccgaaaacagcggctgacaggaacaaagcccgggacttcttgctgg

SEQ ID NO: 4316 - DNA, 134 bp, Homo Sapiens
ccctaatattgcctgtggagtggtgactggttaaatactcctcaacagcaagctgggaatgcatcaagacccctattaaattcctggggtgtgggtggctctgcaagaaaaacaatcagagacacatgaaaagg

SEQ ID NO: 4317 - DNA, 325 bp, Homo Sapiens
ggctgctgctggggaagggaggcccacccatcctgagcctaagccaaagggcactgagggtagagaaaccagacacagactgggtataagaacaggcacatcaatcatttcctatgtataggtcgggggtggcttcatccccagatatggccctaggagtgggtgagtggactgcccaagcttactgctggcttcgtaagaagacaatgaaatccagatgacctcattcactccaaattccaaagctccaacttgcccaaggctggaaaaaaccatctcagtggctttcaccaagtggcaaataaattttaaaaaatgaagaaag

SEQ ID NO: 4318 - DNA, 1038 bp, Homo Sapiens
ctgctgtgccacaaggaggcgcgacagcgctgccagagagcgggtggggccgtcctgtctatcctggatgagatggagaatgtgtttgtctgggagcacctgcagagctatgagggccagagtcggggcgcctggctgggcatgaacttcaaccccaaaggaggcactctggtctggcaggacaacacagctgtgaactactccaactgggggcccccgggcttgggccccagcatgctgagccacaacagctgctactggattcagagcaacagcgggctatggcgccccggcgcttgcaccaacatcaccatgggtgtcgtctgcaagcttcctcgtgctgagcatgagcagcttctccccatcagcgcttccagagaacccagcggccctggtggtggtgctgagtggcggtgctgctgctcctggccttgctgaccgcagccctcatcctttaccggaggcgccagagcatcgagcgcggggcctttgagggtgcccgctacagccgcagcagctccagccccaccgaggccactgagaagaacatcctggtgtcagacatggaaatgaatgagcaacaagaatagagccaggcgcgtgggcagggccagggcgggaggagctggggagctggggccctgggtcagtctggccccccaccagctgcctgtccagttggcctatggaagggtgcccttgggagtcgctgttgggagccggagctgggcagagcctgggctggtggggtgccaccctcccacaagggctgggctgagacccagctgagtgcagcgtggcgtttccctttctgggggggcctgaggtcttgtcacctggtcctgtgcccccacaggaaccagaggtaggatgggagggggaacgagagcctctttctccccagagcccccgtgccaggcctgttgatccgcgccccaggagccccttctttgcagagcccgaggagcctcccctgtcccctcgggcagatctgtcgtgtctctcttcccagctggcagcctcagctctgtgcccctc

SEQ ID NO: 4319 - DNA, 450 bp, Homo Sapiens
cagtcggtaccgtgtgttgacgtggcttgaggctcaggagagctgtgaacgactttcagatgtgggaaggctggtccagaggagcctggggacagccctcccctgagacaccgcccccagtgccgagggttccatctggagcttggagctgcaggacaacctcatcgtggtggggcggagcagcggccggctggaggtgtgggacgccattgaaggggtgctgtgctgcagcagcgaggaggtctcctcaggcattaccgctctggtgttcttggacaaaaggattgtggctgcacggctcaacggttcccttgatttcttctccttggagacccacactgccctcagccccctgcagtttagagcgaccccagggcggggcagttcccctgcctctccagtgtacagcagcagcgacacagtggcctgtcacctgacccacacagtgcc

SEQ ID NO: 4320 - DNA, 560 bp, Homo Sapiens
  misc_feature (503)..(516): n is a, c, g, or t
ggtctgctgctgggagtgaagcaaaggaggaaaaggacaaactcccaagtggcctcacttggggaccacacacgggcccactccctccatcaccaagtggtgttcacgatgagctgtgtgggaggtggagacaggtccagagaaagcagcaggctccggaagaggaaggaaggaaaatgacaggttacagaaggcttcagggaaagaaatgtgtgaaaaacacagcacccctgcagggcagggtatggagccccagaagcagagcccacggggcctgggatgggcctgtagtatgtcagctcaccccatctgggccaacctgggagccaccagcagccatctccatgatttgtctctggtgcccagcaaatccactggctttagaggagcccaggacagggaccctgtgtgattctcatgctaaaactgtccatcaacttcatgggctgcctgtaagcgccctgggctcatcaagccaggagctggaacccaactatgactannnnnnnnnnnnnntacctgcctgcgtataatggggatgctctagagtacctcacaca

SEQ ID NO: 4321 - DNA, 688 bp, Homo Sapiens
atttgccggacaaatgcacccttgaaaggcagtaccgtttgtctccctggaaaacagctgttgtacctcagggttgtctgtggaaccttaaactctccaaactcagagtcctttgtttccccagaggctgttgcagacctccttcagcaacggcagttcccttagagctagccaaggggatagaaatggcatcagaagagaggccaccagcacaagcattggaaataatgatgggactgaagactactgacatggcaccatctaaagaaacagagatggccctcgccaaggacatggcactagctacaaaaaccgaggtggcattggctaaagatatggaatcacccaccaaattagatgtgacactggccaaggacatgcagccatccatggaatcagatatggccctagtcaaggacatggaactacccacagaaaaagaagtggccctggttaaggatgtcagatggcccacagaaacagatgtatcttcagccaagaatgtggtactgcccacagaaacagaggtagccccagccaaggatgtgacactgttgaaagaaacagagagggcatctcctataaaaatggacttagccccttccaaggacatgggaccacccaaagaaaacaagaaagaaacagagagggcatctcctataaaaatggacttggctccttccaaaga

SEQ ID NO: 4322 - DNA, 257 bp, Homo Sapiens
ccagaggatccttctgggagattgaccctcactggcccggctggaggcatgggagcgcgcagagcccatggtagcaggggccacagtgcccccactcccggatggcagcccagcaccagggacagtgacagaggtggctgcagcagtagtgatggtggtggtagctgaggcccggccttctcggagtagttcagtgcacttgtccacaatgtgccacatttggagcacagaccccactgtaaggaagttgacaatgt

SEQ ID NO: 4323 - DNA, 310 bp, Homo Sapiens
atggctgctgctggctggggggctggggggaacaccaaaacaaacctggagagcatcctctcttaccccaaggacttcacctgtgtccaccaggccctgaagggcttcacgaccaaaggtgtcacctcagtctctcagatcttccacagcccagacctggccataagggacacctttgtgaatgcctctcggaccctgtacagtagcagccccagagtcctagcaacaacagtgacgccaacttggagctcatcaacacctgggtggccaagaaaccaacaacaagatcagccggctgtagacagtctgg

SEQ ID NO: 4324 - DNA, 429 bp, Homo Sapiens
tagatctgtgaggaaatgaatttattcatacgctgcaccttaaacacacacccgcaaatgtaacatccattaggatgagccctaagtctcagattccaaagtcaacagcctttgagacatctccacagaacaccgctggtacctgcacgtcagcatcctctctgccccaggccccggccccgtatgacggcctgctacactctcactgcctcagccaggcctcaggtcaccctaactcccaccccttactccccactcagccaggaagtacttccaggggtgcccccggagccccacggccacccctcaggctggccacagcgctcagcagtcaccttgacttgctgtgattagaaaagcaacacttattaactctagacatcgctaagatacaagaataagtaaaaagcaagaccacaatcttatgat

SEQ ID NO: 4325 - DNA, 228 bp, Homo Sapiens
aatttgcggaggaagtcttcaaccctgggaggcagaatgccaggcatagcgcgctggctaggactccagtaccgtgaagggaggcagtgagagcagacatctgtgcctcattcctgatctcaaggggaaagcaagaacaaggagagagcttcctcaggatctcaaacctacggcaacggagggaccagtctgtgtacttctagccaagtcccagcttggacttacaga

SEQ ID NO: 4326 - DNA, 392 bp, Homo Sapiens
ggatgggacagcacacgctgatggtggtgggacagacatctgatccagaggcaggacgataagtaaaatgacttcttagagccccttcctgctttcccagctcccctcccccatctcaagcatctgcatcccagcacctatttcagaatctcctatctctttgctcagtggaagcagtgatatgacatgatgtgatctcatttgacgggctaaataaagccattgtgtgagacccagacctggcctctcccctgcaacatttcctgagctcaagaggctaagggaaaatgggaggggggctaggagagttaatctaatggaaaaagaagcaacacgatgatgggccccccagtttgaatttcagacagtggaggagggaatattgctaggag

SEQ ID NO: 4327 - DNA, 305 bp, Homo Sapiens
  misc_feature (49)..(89): n is a, c, g, or t
tctccagccagagcagctcgtcacaggctagcagatgcctcagacaacnnnnnnnnnnnnnnnnnnnnnnnnnnnnnnnnnnnnnnnnnagaaggcctgaagcccgggagatgggcatgatgcaggagggggagcacacagtcacctctcacagctccattatccagcggctgccgggctctgacaacctatatgatgacccctaccagccagagataacccccagccctctccagccgcctgcagccccagctcccacttccaccacctcttctgcccgccgccgggcctactgccgaccgcga

SEQ ID NO: 4328 - DNA, 168 bp, Homo Sapiens
acgtgcgtggcctcctggagcccctgggcctcgaatgcaccttcatcgacgacatttctgcctaccacaaatttctggccggaagtccactgtggcaccaacgtccgcaggaagcccttcaccttcaagtggtggcacatggtgcctacctgccggggcctgcgttca

SEQ ID NO: 4329 - DNA, 1124 bp, Homo Sapiens
  misc_feature (42)..(133): n is a, c, g, or t
  misc_feature (798)..(815): n is a, c, g, or t
  misc_feature (950)..(970): n is a, c, g, or t
  misc_feature (978)..(1012): n is a, c, g, or t
  misc_feature (1015)..(1078): n is a, c, g, or t
gggcccaactgcttgctgttctctctttcttgggctctaagnnnnnnnnnnnnnnnnnnnnnnnnnnnnnnnnnnnnnnnnnnnnnnnnnnnnnnnnnnnnnnnnnnnnnnnnnnnnnnnnnnnnnnnnnnnngcttatccccatggagctctgccggtccctggccctgctggggggctccctgggcctgatgttctgcctgattgctttgagcaccgatttctggtttgaggctgtgggtcccacccactcagctcactcgggcctctggccaacagggcatggggacatcatatcaggctacatccacgtgacgcagaccttcagcattatggctgttctgtgggccctggtgtccgtgagcttcctggtcctgtcctgcttcccctcactgttccccccaggccacggcccgcttgtctcaaccaccgcagcctttgctgcagccatctccatggtggtggccatggcggtgtacaccagcgagcggtgggaccagcctccacacccccagatccagaccttcttctcctggtccttctacctgggctgggtctcagctatcctcttgctctgtacaggggccctgagcctgggtgctcactgtggcggtccccgtcctggctatgaaaccttgtgagcaaaaggcaaaaacggcaaaatgagttttgagcgttgtattccaaaggcctcatctggagcctcgggaaagtctggtcccacatctgcccgcccttccagcccttccccagcccctcctcttgtttcttcattcattcaacaaaatttggctgggnnnnnnnnnnnnnnnnnnccaactacacaacaccgactgcccgcccgtgtccatcactctccggtaacagcccttgcccccaccaaacacccgaattttcttctccaaaccaatcgcaaacgaaaccccaaaaattttcccttgtgtccgcgnnnnnnnnnnnnnnnnnnnnnaaaaaaannnnnnnnnnnnnnnnnnnnnnnnnnnnnnnnnnnggnnnnnnnnnnnnnnnnnnnnnnnnnnnnnnnnnnnnnnnnnnnnnnnnnnnnnnnnnnnnnnnnaaaaaagcttgtgctcccccaaaaaagaaaaacaacccggcgggcc

SEQ ID NO: 4330 - DNA, 972 bp, Homo Sapiens
tcagcattgacagcagcggctcatccaggctcccttccaagtcacagatgctgctgttctcaacaatgtagcacacacatttggcctaatggacacagtcaagaaggttttagacaacagaaggaaccaagtagagcagggagaagaacagtttctctatactctgacagacttggaacgccagttggaggagcagaagaagcaaggccaggatcacaggctgaaatctcagacagttcaaaatgtggtactgatgcctgtgagcactcctaagcctccaaaaaggccccggctccagcggccagcctccaccactgtcttgagcccttctcctcctgtccagcagcctcagttcacagtcatctcacccatcaccatcaccccagtgggtcagtcattttccatgggcaatattccagtggccaccctcagccagggctccagtcctgtgactgtccacacactgccttctggccctcagctcttccgctatgccacagtggtctcctctgccaagagcagctcaccagacacagtgaccatccacccttcatctagcttggcgctgctgagctctactgccatgcaggatgggagtacactgggcaacatgaccaccatggttagccctgtggaattggtggccatggagtccggcctaacctcggcaattcaggctgttgaaagcacctcagaggatgggcagaccatcattgagattgatccagccccggacccagaagctgaagatactgagggcaaagcagtcatcttggagacagagctgaggactgaggagaaagttgtggctgagatggaagaacaccagcatcaagttcacaatgtggagattgtggtcttagaggattaactggggatctcagggccaggagttatgttttgatttggaattttaattatttgtttatttttatcattgtcccactcattcccacataggaccctttttta

SEQ ID NO: 4331 - DNA, 756 bp, Homo Sapiens
taactgacattgaggtttcaaggatgttcagaggacagttctacagccacaagaaaatctgcagctcattaagatcacagaaatttctgaataagtaggtgatcttggtggaaacagagaaggagaagatcctgcggaaggaatatgtttttgctgactccaaaaagagagaaggcttctgccagctcctgcagcagatgaagaacaagcactcagagcagccggagcccgaacatgatcaccatctttatcggcacctggaacatgggtaacgccccccctcccaagaagatcacgtcccggattcctctccaaggggcaggggaaagacgcgagacgactctgcggactacaatcccccatgacatttacgtgatcgggacccaagaggaccccctgagtgagaaggagtggctggagatccctcaaacactccctgcaagaaatcaccagtgtgaccactaaaacagtcgccatccacacgctctggaacatccgcatcgtggtgctggccaagcctgaccacgagaaccggatcagccacatctgtactgacaacgtgaagacaggcattgcaaacacactggggaacaagggagccgtgggggtgtcgttcatgttcaatggaacctccttagggttcgtcaacagccacttgacttcaggaagtgaaaagaaactcaggcgaaaccaaaactatatgaacattctccggttcctggccctgggcgacaagaagctgagtccctttaacat

SEQ ID NO: 4332 - DNA, 778 bp, Homo Sapiens
ctgctgttcttcccatctatgaagaactgaaagaccgcagccgtagaagaatgatgaatgtgtccaagatttcattttttgctatgtttctcatgtatctgcttgccgccctctttggatacctaacattttacgaacatgttgagtcagaattgcttcatacctactcttctatcttgggaactgatattcttcttctcattgtccgtctggctgtgttaatggctgtgaccctgacagtaccagtagttattttcccaatccggagttctgtaactcacttgttgtgtgcatcaaaaggatttcagttggtggcgtcatagtctcattacagtgtctatcttggcatttaccaatttacttgtcatctttgtcccaactattagggatatctttggttttattggtgcatctgcagcttctatgttgatttttattcttccttctgccttctatatcaagttggtgaagaaagaacctatgaaatctgtacaaaagattggggctttgttcttcctgttaaggtggtgtactggtgatgaccggaagcatggccttgattgtattggattgggtacacaatgcacctggaggtggccattaattggcaccactcaaactcaaactcagtccatctgatgccagtgttgagtaaactcaactactatgaaatttcacctaatgttttcagtttcacttccttttgaagtgcagattcctcgctggttcttctgagtgcagaataagtgaacttttaagtacagaaaagaccacataa

SEQ ID NO: 4333 - DNA, 388 bp, Homo Sapiens
  misc_feature (210)..(210): n is a, c, g, or t
tagaggatccccttcgacggtgttctgtaatgcagtgtgggtccaggtagcctgcagtcataagagggaagatgggttcgtaggaatgctgaggtcctctctgaagaagtaggatatgctgctcttccctgctagcttttgtagagaatgcagcattctgagaaaggcttcccagttctgcaatgggaacttagtaaattgcgtaactcnctattaggatatctctatgtaagctccagcattatgaatactatttggggctttgcctcatttcctccaccccaggcgctctgccgatactttgcaaacatttattgcagttcgtgtaagtttgtgaaatcacgagccctcggaagttgcagggcactgcttactggacgaaggggta

SEQ ID NO: 4334 - DNA, 506 bp, Homo Sapiens
cgactacgttagaacgcaggagatggttcttcacaggtattcctgagtggcccaaggtctaagtcagctctcgtctagacaaatcctatctctgccgatcatctacctctcacccaaatgcagccatcaccatgcacagaacactgcgctcctcttgatgatcttcacagagtgcagacgtcttcaggaacgttttttcctcagtggaaccttggggatttctaggagaggggcagggcaatatctggaatcagaggtgaacactttacagcagcctctaaactacttctaattacgttcacctgactaaactgccaggtgaataaacgctatatataaaagtaattcactatggacaagttctggatgttatccccaatgggtacctcaaaacagggtacaagatggaaacctgctcaagaaacagcacaacgtaaactggctaatggtgatgctcaaaaaataatactgaatgcccacacgagcaagtgtcctcttgtgaactt

SEQ ID NO: 4335 - DNA, 538 bp, Homo Sapiens
  misc_feature (419)..(419): n is a, c, g, or t
gagctcggtaccccacccacaaaccccctcgaccaaaaacaccctctacttcatcaaaacttctttggtagaaaccacattcacctctgcctctgcctcgccctcttgaagaacttcgacctctagggagcccccaccactgttcctcctcctcctcgtcctgtcaatcgcaggacagcagcactatttacagacatggaaaagtttctctgttcttcttctgtaaaggggtaccagagccaatggtggaaggggttcctcctggaggataggccagaaattctttatccagaaggtctgaaggtatcttgttgtctttaaggaaaagtgctaacatttcttctctgccgtaacgataatctgctaatttatactatcggcaatgctggagaaagaggaggggatgtaatactcccacnactggacagagctcggaaccattcaggccccaagttcagtgtctgcgtttccgctgccattcttttccgtatttttaccatagattatatgaagaaactgcaatccgggacagggagta

SEQ ID NO: 4336 - DNA, 471 bp, Homo Sapiens
gcacagttgggtggttagtttatgtaggaaggaacttttctagaaaaggagaaattgtgcagcatgtctgtgtctcgacagcagtgacccagtgagagtcaaaatgaggatgcaggaaggaaggaagagccacagcacgcaagggagagggtcccagatgcaggtggagggcagcatcagaaaagaaggagacagcctgccaggcgtggcaaggggaaggggcatgtgtgggctcacaaagggagtccagtgctgcatggctgcacccagacatccaggaccccaaaaccctagccccaaacatggcacagtccaaatgggacctgatgcttctaccgtcaccttggtgtacctgctgcatgtgacctgagaggcttgggtgagggcagaccagaaagtccatgtataacaaatgtggcagaccccgctgcagccggggcaaggcttcagcaagttgctttacctctcatt

SEQ ID NO: 4337 - DNA, 417 bp, Homo Sapiens
tagaagcccagatgtatggacattatttacctgagatcattcctgttacaattagagggcattcatactaacatgtttcctgttttatttgccttttaaaatcgtgaaacatgacatgaagacatttccttatgtaattacaaaacgattagtacacctaacacaattcacaatcattcctgactgtcatcatagtcaaatgaatgtcattatattcagatgttcccaatttaacaaacaacatattttgaaaaattatttaaaaataacacaacatttttttaaaactgcagggtcttgtactagtcatccaggctggagtgcagcacaaatcatagctcaaactgtaacctcaagctcccgggctccaagtgatcctccagccagggtgacagagtgagaacttgccaaaaaaca

SEQ ID NO: 4338 - DNA, 516 bp, Homo Sapiens
cttcgaggatccccgctgtgcggaccatcctcaagtttgacaagttcaatatgaacatcaggggtgttttccatccaaatggaccggaggtgatcattaatactgagatttgggaccttcgaacttttcatcttttgcatactgttcccgctctggatcagtgtcgcgtggtgttcaatcacacgggaacagtgatgtatggagctatgttgcaggcagatgatgaagatgacttaatggaagagaggatgaaaagcccctttgggtcatccttccgaacatttaatgcaactgactacaaacctatagcaaccattgatgtgaaacggaacatctttgacctgtgtacagacaccaaagactgctatcttgctgtcattgagaatcaaggcagcatggatgccctgaacatggacacagtatgcaggctgtatgaagtgggcaggcagcgtctggcagaggatgaggatgaagaggaggaccaggaagaggaagaacaggaggaagaagatgatg

SEQ ID NO: 4339 - DNA, 1119 bp, Homo Sapiens
gggctgtacggtccggaatgtagggatcggctcctggtcccactgctgctcagcccagtggcctcacaggacaccagcttcccaggaggcgtctgacacagtatgatgatgaagatcccatggggcagcatcccagtactgatgttgctcctgctcctgggcctaatcgatatctcccaggcccagctcagctgcaccgggcccccagccatccctggcatcccgggtatccctgggacacctggccccgatggccaacctgggaccccaggataaaaggagagaaagggcttccagggctggctggagaccatggtgagttcggagagaagggagacccagggattcctgggaatccaggaaaagtcggccccaagggccccatgggccctaaaggtggcccagggcccctggagccccaggccccaaaggtgaatcgggagactacaaggccacccagaaaatcgccttctctgccacaagaaccatcaacgtccccctgcgccgggaccagaccatccgcttcgaccacgtgatcaccaacatgaacaacaattatgagccccgcagtggcaagttcacctgcaaggtgcccggtctctactacttcacctaccacgccagctctcgagggaacctgtgcgtgaacctcatgcgtggccgggagcgtgcacagaaggtggtcaccttctgtgactatgcctacaacaccttccaggtcaccaccggtggcatggtcctcaagctggagcagggggagaacgtcttcctgcaggccaccgacaagaactcactactgggcatggagggtgccaacagcatcttttccgggttcctgctctttccagatatggaggcctgacctgtgggctgcttcacatccaccccggctccccctgccagcaacgctcactctacccccaacaccaccccttgcccagccaatgcacacagtagggcttggtgaatgctgctgagtgaatgagtaaataaactcttcaaggccaagggacagtggtctaattcaactctgtgtcccagcacctggcacaccagaagtgccatgctcagaaatgttggttacatgaatgaatgaaccatgaatgaatgaaatctcaa

SEQ ID NO: 4340 - DNA, 699 bp, Homo Sapiens
ggtacctgctgtgttctcctcgagaatggcgtcagtccatcgatgtcaagttcaacggtgcccacatccctggaagtcccttcaagatccgcgttggggagcagagccaggctggggacccaggcttggtgtcagcctacggtcctgggctcgagggaggcactaccggtgtgtcatcagagttcatcgtgaacaccctgaatgccggctcgggggccttgtctgtcaccattgatggcccctccaaggtgcagctggactgtcgggagtgtcctgagggccatgtggtcacttatactcccatggcccctggcaactacctcattgccatcaagtacggtggcccccagcacatcgtgggcagccccttcaaggccaaggtcactggtccgaggctgtccggaggccacagccttcacgaaacatccacggttctggtggagactgtgaccaagtcctcctcaagccggggctccagctacagctccatccccaagttctcctcagatgccagcaaggtggtgactcggggccctgggctgtcccaggccttcgtgggccagaagaactccttcaccgtggactgcagcaaagcaggcaccaacatgatgatggtgggcgtgcacggccccaagaccccctgcgaggaggtgtacgtgaagcacatggggaaccgggtgtacaatgtcacctacactg

SEQ ID NO: 4341 - DNA, 1083 bp, Homo Sapiens
aggtgctcttacagcctgttccaagtcagccgtaatacgacttccaccaccagatctttctccgtggattcctctgctaagaccgctgccatgccagtgacggtaacccgcaccaccatcacaaccaccacgacgtcatcttcgggcctggggtcccccatgatcgtggggtcccctcgggccctgacacagcccctgggtctccttcgcctgctgcagctggtgtctacctgcgtggccttctcgctggtggctagcgtgggcgcctggacggggtccatgggcaactggtccatgttcacctggtgcttctgcttctccgtgaccctgatcatcctcatcgtggagctgtgcgggctccaggcccgcttccccctgtcttggcgcaacttccccatcaccttcgcctgctatgcggccctcttctgcctctcggcctccatcatctaccccaccacctatgtccagttcctgtcccacggccgttcgcgggaccacgccatcgccgccaccttcttctcctgcatcgcgtgtgtggcttacgccaccgaagtggcctggacccgggcccggcccggcgagatcactggctatatggccaccgtacccgggctgctgaaggtgctggagaccttcgttgcctgcatcatcttcgcgttcatcagcgaccccaaacctgtaccagcaccaaccggcccctggatggtgcgtggcggtgtacgccatctgcttcatcctagcgggcatcgccatcctgctgaaccggggggagtggaccacgggctacccatccccttcccaactacctgtcggggctgcccttgctggctggcctcctcctaggccacccccctgttcttcggcccctctaccagttcaagaaaagaatgggggccaacctcggggctttaaaagaagtaaactggcgccccaacccaggccaaataaggggggggcctgggaaccccccaatgtggtgtgggacatccctgaagggccaatcccacctaagtggggaatgtggggcataaacctgggggaacccttggcgccacaccaggaggttatctgtgtacaggggga

SEQ ID NO: 4342 - DNA, 413 bp, Homo Sapiens
gggggtgaagcggagctggacggagcttcggcggggccatgctgcaggaggaggccctcagcgaaggcgggcgccggctggccaagggtccggagctgatggccatcgagggactggagaacggagaaggcccagctacagctggcccacggctcctcaccttccagggcagcgaactaagcccagagctacaggcggccatggcagggggtggccctgaaccactccccctcccacctgcccgctctcccagccaggagagcatcggggcacgctcacgggggtctggccactcacaggaacagccggccccacagcccagcggtggagatcccagccccccccaggagaggaacactcccagagggcacagagcggccccctaaaattgttcgtcacttcctgaccattca

SEQ ID NO: 4343 - DNA, 351 bp, Homo Sapiens
cacgaggggggtcggggcggagggggctggcacagcctggcccaaaccaggctcaccgcattcctgtttcaggcatgtcaaaggccgtgtgctggtggctctggcggacgggaccctggccatcttccaccgtggtgaagatggccagtgggatctgagcaactatcacctaatggacctgggccacccgcaccactccatccgtctgcatggctgttgtgtacgaccgcgtctggtgtggctacaagaacaaggtgcaagtcatccagcccaagaccatgcagatagaggcgagtgccggccttgggccccagtgggggacagggcctgtctgcatgaagtgtaacgaca

SEQ ID NO: 4344 - DNA, 774 bp, Homo Sapiens
agcgccgcccaggagcagcccgcgctccatgaacccctagaactgtcttcgacgtccggggcccgttggaagactgagtgcccggggcacggcacagaagacgcgcccaccgccgtgccagttcacaaccgctccgagcgtgggtctccgccacagctccagtcctgtgatccgggcccgccccctagcggccggcgagggaggggccgggtccgcggccggcgaacggggcatcgaagggtccttgtagccgggaataggctggactcgctgctgctggggggatcacagaccattcttctttcttttcggccaggctgaggacctgacgtggatgggcaaacctgcaggcctgggaaggcagcaagccgggccgtccgtgttccatcctccacgcacccccacctatcgttggttcgcaaagtgcaaagctttcttgtgcatgacgccctgctctggggagcgtctggcgcgatctctgcctgcttactcgggaaatttgcttttgccaaacccgctttttcggggatcccgcgcccccctcctcacttgcgctgctctcggagccccagccggctccgcccgcttcggcggtttggatatttattgacctcgtcctccgactcgctgacaggctacaggacccccaacaaccccaatccacgttttggatgcactgagaccccgacattcctcggtatttattgtctgtccccacctaggacccccacccccgaccctcgcgaataaaaggccctccatctgcccaaaaaa

SEQ ID NO: 4345 - DNA, 597 bp, Homo Sapiens
tatactttgaccttgttggggtgtctgccagctcccacattcaccctgaaggggctgttggggatgctgacgcctccccaggacaccatggctgtgtgcttcaccggcttcctgggcacgtaggagcagctgtaagtgccattgccgttgtccttgaccaacgcctccacagggcagccttcattgtcctggacttggacccgaagtggggccttgccaccgtgcttggcatccactgtgaactctgctggcttgttgacggccacacctgtcttctccaatccaggcccacgtgccttcaccctgtctgggtggaagtcctggggcgcgtcacggatgtcagccatgaaggggctgaggcggatgtcttcgctgttgcacagcacgtgaacggcatactcgccagcctcctgcggccagtagcgcacatcacaggagccgtcgcccttgtcgtcacattcgatcttagcctgcgatggcccttccaccgagaagcccagcgtgcccacgtcgtccccgatagcctccaccacaaagtctgctgacttgccaacgacgccgccctccagcccagggccccaggcccgtaccttctga

SEQ ID NO: 4346 - DNA, 333 bp, Homo Sapiens
gtgactctccttccccacataggcccgtctcctccagagcctctccggctactcggggtcagcgtggggcccctgcagcagatgagggtcttcacttcggtgaactgaacccttgaagcggctgtgggcagggcagcagggctatggccaccccccaggttcgcctttgccgacccaagagcccaactgccctcctgggtgcgtccccacgtcagggtgtatgacaacttaggccatgtaatccgagacgtggcccagttcttccgtgttgccgagcgaactatgccagcgccggccccccgggctacagcacccagtgtgcgtggagaagat

SEQ ID NO: 4347 - DNA, 696 bp, Homo Sapiens
gcccttatgcacttgcttaacaccggtcagttcctgctgcttttctactcttaagtagcttaccctcttctccacctgctccccggctgcccgcaccttccgggcctccgcgtcgaatttcttctttcccctggtccttctcctgggtctggccatctccagcgttcccctgctttacagcatcttcctgatcccgccttctaagctgtgtggtccattccgggggcagtcgtccatctgggcccagatccctgagtctatttccagcctccctgagaccacccagaatttcctcttcttcctggggacccaggcttttgctgtgccccttctgctgatctccagcatcctgatggcgtacactgtggctctggctaactcctacggacgcctcatctctgagctcaaacgtcagagacagacggaggcgcagaataaagtcttcctggcacggcgcgctgtggcgctgacctccaccaaaccggctctttgacccccgcagcccacgtcccgctttcagaccccaggcccatggtaagcctaggtcacaacatctgtaaactaggagaactggagaagactccacgcccttccagctttggtatctggagatttccagggcccctcgccgccacgtccctgactctcgggtgatcttccctgtatcaataaacaccagccgaggttgctgagcgc

SEQ ID NO: 4348 - DNA, 406 bp, Homo Sapiens
actccaaggatccccgctgtgcggacttaggaattaggtaggaaaacaattctatacgatttggtgataggctgactatggaggtcaagaaggggtggaagaggactatgatatttctaacttggggaattggggtagacagggacagcaccatccaagaaagtaaatacaagcaaaagaggtttgtgggagatgttaatgagtaattacataaatactcagtttgaaagacctcagggacttatactgctaaccactcagtctacaactcaatcatatgctgaattattttgatgtgtttaagtagatttctcaaccaatcacaaaacttcgaaaaccttgtattttatttctttcataacatcactagtgtataaaaagccttcattgaggatggtccgcacag

SEQ ID NO: 4349 - DNA, 340 bp, Homo Sapiens
accatcctcaattcagctaatctttgactcagctttagtggttcactggtgcccacctcgtagagtgaattcagtttcccaaaataccattctgtctgtgaccagttggagctgacgatcagagcaagaggaataaagacaagacgctttctcttgttatttacagtctgctccacaggccaaactttacctctggcatacatagctattctctaggtcagtatttctcaaaagcacattccacagaagtacagcgagagacagtaacaaataagcatcacaaaagatttccacggtcgaataagtttgaggagggtccccgcacaggggatcctctgaa

SEQ ID NO: 4350 - DNA, 1240 bp, Homo Sapiens
gaagctcgagatggccaagctggattgtgcctaggactcgttcagactgctccttgtccgacctgaggcccctgcgtgggtgtccagcttcaaaggggttccccactttcctctgctttgctttctccacggttctctcgagaaactcattgtagatggattcttccacgaaggtccgggagccagcacagcagcactggcccatgttgaagaacagggcttcgtggcactgctccacggcatgctccatgtcagcatcggccagcacgatgctggggctcttaccacccagctccagggtgactctcttgaggttggaatcgccagctgctttctggatcacgtggcccacctcggtggaaccggtgaaggcaactttgtcaacatccatgtgctgggcgatggccgcacctgctgttgggccatacccccggattgatgttcaccaccccagggggaaagcctgcctccttgatgagggaggccaaatacagggcagagaggggggtctgctctgccaccttcataaccacagtgttgcctgtggcgagtgccggggcaagtttccaaccctgcatgaccaaggggaagttccacgggatgatctggccacagacaccaacgggctcatgccgggtgaagcagaaatgctggccatccatggggatggtcttgccatgccacttgtcagcccagccagcaaagtaccgatacaccttgatgacctcatccaagtccaaggcgtaagactcttggaaaggcttcccattgtccaaggtctcgagtgaggccaagtagactcgatcccgctccactaggtctgccaggcggttcagcagccggccccgctcagaggcatccatccggcgccatggggaccccaggcggaagacttcccgggctgctttcacggcccgatccacatcagcccggtcaccttcagccacgtgcccgatgacctccccagtggtagggttgaccgtcgggaaggtcttcttgctgactgcatcttgccattcacttgttgatgaacagctggttgtaggggatgtctgggttcagaatggggcttgggagggctgctgccgaggagtagcgggcggtcctgccctggaggctaagcagccggggtgccaggaagcgcagcatgctgacactctgcagcaggctcgggctccggttcaggatcacgcttgggttctggttccggccctcccagctcttccatcccgggaattcc

SEQ ID NO: 4351 - DNA, 426 bp, Homo Sapiens
gcacctgctgcttcgggcttaggccaccgctccctgtccccagaggagatagccccagatggactggaatgttgtggcatgagagcgcatgtgtgcgatggccccgctgtggtcccctctctgtccctccatctgtatgtgttctgtgtcccttgcatgtgtgcgtgttagagtgagcgcgtatgcatcaactcattgggctcttggctgctcacaaggcaaatttgacttggaaagactttcatctccttggaaccaagacttcctgagtccccctcaccctggccctgttccaccatggttatctgggtattggggaatggaaactttgggggagtgactttttaaagagacacttataatttctactactgcactactgtccattgtgggatgattaaacatggtatttaactgtgaaaaaaa

SEQ ID NO: 4352 - DNA, 568 bp, Homo Sapiens
ttgaggacccggcgatgcgcgtgcatgtacattagtatgtctctaatcatcaccatagctgtttgatgatcattccaagcttgatttagcgtttgaagaaagtagttattcaatgaatttagcacatcttctcgcacctagtaacagaagagttcattagtttggcacacacacatccacacactcgtatatacaggcatgcacatatctgtttaataaaataatgaagtggaatctttaatttaaatcaaagaaatgttataggctagtagaaatattttaagctataacctatacacagaagagtatcaaatgtatatgtatagtacagactcctcttctgatctccagaacataaatcaacttcctaggtatttcccaaccctccagtgacttgacatcattgtcagagtaaaatcctatattcttatagtaagttacaagggcctgtaagactggcttcatgctactgctgaatttcctactacaccttcccttccccaactttgaataatggttgagaatactgattttggagtccattaccctgggctccaatcccagctcc

SEQ ID NO: 4353 - DNA, 629 bp, Homo Sapiens
tggcgatgtcgcgtgcatgtattggaagcaagcccaaaagatgataaacaattatagaggagcaggcaacaaaattgcagatttgaagaggcatgtggaattccttgtggctgagaatgaaagattaaggaaagaaaattaaacaattaaaggctgaaaaggccagacttctaaaaggtccaatagaaaaggagctggatgtagatgctgattttgtagaaacgtcagagttatggagcttgccaccacatgcagaaactgctacagtctcctcaaactggcagaagttcgcagcaaatactgggaaagccaaggacattccaatccccaatcttcctcccttggattttccatctccagaacttcctcttatggagctctctgaggatattctgaaaggatttatgaataattaaaatggaaggccacagaaaaggggaaaagaggaaataatacagtaatcgttaatccagcaaaaagaaatgaaaagggaaaaccacatagaagggtaatcccggaaatgcttcatctggtggactgtgggagcagaggcattgccaggacttgggaaacagtcactgtgaaatgcgctgcgtatctcattcactcacttcagctaatgattccga

SEQ ID NO: 4354 - DNA, 643 bp, Homo Sapiens
cccttcgaaataaccactgtggtattattttttctcttgtttttaggatttagaaataccagcagtgcccatactccatagcatggtgcaaaaattcccaggcgtgtcatttgggatcagcactgattctgaggttccgacacactacaacatcactgggaacacccatctgcctctttcgcctggataactcgggtgggtaccttgagctttctcccagattttcactgggttgtggacccataaacttgtgagactggaaaggactctatgtcttttacactaatgatggtaccaaattcagggacattgttgacaaggatgatgactcaattcaagcttcccaaacaggtactgtaatgaaatggaaagaggacaggactgaaagccagggaatggaatttgtggtactgctttgtcgctcaacagccacatgactttgggcagtcacttaacatttcttatctccaattctttcctttataaaataaaagagttagactgtattatctctaaggtcactttgagctccaaaatttttatattaaatattttgaggagttcatttatgttcttcaaacatttattaaatacttcctgtatgccctatgcaagataccgataataaaaacatattaaatat

SEQ ID NO: 4355 - DNA, 628 bp, Homo Sapiens
gtaacagtgcactacagttacaaagtcttttctatctgtcatctcccttgaatatcaccatgaccttgagaattaggggggagttatcatcctcattgtgcagctgacaatgacacttaccacagtgatcataactgttgaatttcctgagtgccttctacctgctaggcagttacttaagcatttccacctttattaactatagtcttcttatataggaaggtgactgtggttcagagaggttaagggactgatttgaggccacactagccagcaagcagcagacccacacgtgaacccgggtctggctgacaccacagcccctggcagggagcgaggggcagcaggaacatgcagccccctctaaatgggtttttttacaacctgctctaagtcacagcgagaagtaggctcagggaatgtaaagtgggtagtgatttttttctcccctattcttttactgcttttgtttattgaaggacaaatcattgctgttttcgtttgtgtttctagcaccaataaaaataaaagatatgccggcaatctttttaaaagcttatacaattccagaatttgagctgtcggatttatgccgcacactgatctcatagacatgcacgcgacatcg

SEQ ID NO: 4356 - DNA, 267 bp, Homo Sapiens
gtcttgccacagaggtggcactggaagggcttctcacccgtgtgtgtgcgcaggtgcatgttgagattggccttttgggtgaaggcgtggctgcagaactccacatacgtgtggcctctcattcctgtgcttggccttgatgtgcatctgcagaccattccggctcgaggcccggtgcccacactcctcacacacaaacagcttctcaccacggtgcttgaaagcttcactgcaagctgcagatctgtccgagacaggaagcacttg

SEQ ID NO: 4357 - DNA, 226 bp, Homo Sapiens
atccggcggcacgaggggagtttctgggctagacagaaggcagcgatgccaacgggccagaaacaactacagcatggagaagacagccaagccgaggtggtcgtggggtagaaatggtgaaagacggctgcctccatcccagtccgagtcactgtcactggatgacatgtcctcaacatcagggggccttggttcccccatgggccatcgccccggcggggatctt

SEQ ID NO: 4358 - DNA, 253 bp, Homo Sapiens
  misc_feature (16)..(16): n is a, c, g, or t
atcatgtaatgtctangatgctaaaatcagggagcttagccatcttctcaggtttccgaaagtctgcaagtaacttgagcatgtcatcattggatagcttattgctgtcttgccctgtagatggcagaaaatctggcatctctgtcaagatttccagcatgcatccttaaacaatgtccttgctgcccaagcaaatggcattctatactgtcctaggtctttggcatgccgtgctttggccattcgttcagac

SEQ ID NO: 4359 - DNA, 855 bp, Homo Sapiens
gttggcacagtgctgggatgactatggagacccaaatgtctcagaatgtatgtcccaggaaacctgtggctgcttcaaccattgacagttttgctgctgctggcttctgcagacagtcaagctgcagctcccccaaaggctgtgctgaaacttgagcccccgtggatcaacgtgctccaggaggactctgtgactctgacatgccagggggctcgcagccctgagagcgactccattcagtggttccacaatgggaatctcattcccacccacacgcagcccagctacaggttcaaggccaacaacaatgacagcggggagtacacgtgccagactggccagaccagcctcagcgaccctgtgcatctgactgtgctttccgaatggctggtgctccagacccctcacctggagttccaggagggagaaaccatcatgctgaggtgccacagctggaaggacaagcctctggtcaaggtcacattcttccagaatggaaaatccacagaaattctcccgtttggatcccaccttctccatcccacaagcaaaccacagtcacagtggtgattaccactgcacaggaaacataggctacacgctgttctcatccaagcctgtgaccatcactgtccaagtgcccagcatgggcagctcttcaccaatgggggatcatttgtggctgtggtcattgcgactgctgtagcaggccattgttgctgctgtagtggccttgatctactgcaggaaaaaagcggatttcagccaaattccactggatcctgtgaaggctggcccaatttgagccaactggacgtccaaatgattgccatcagaaagagacaacttgaagaa

SEQ ID NO: 4360 - DNA, 533 bp, Homo Sapiens
ggtggagtagaaatatcattaggacaggttgctgaagtacggcgcttcgtctggcacccaggaaacgggagcgcaggatcatcacagcctcgcaggtgctctgcttcagctgcatctggatggcgctgaactttcgatggatgatgctcaccatgcgttccatctctttgggggccacgggcctggtgcggctctgctccctcagcaggttcatgacatgggtcgtgaactcattacatgcctgctcatacttctccagctccgagtggtatatgtgacggatctgggcaagtttgctgcgatagtccgagtgttcgatggagttgtcaggggacacaccaccaccagaggctgcagcggctgcagctgctgctgctgagccgccccctttctcgggcccagccacaccctctgccagaagcatgttgtccaagcgcatcagctgtgggtccaccggctcctcctcctgggagctccgaatgctgaggcctagcatgcaggcgagtggacttagggacccagagaccccaata

SEQ ID NO: 4361 - DNA, 721 bp, Homo Sapiens
tgatgttcttagcatttgctgtcatgcctatttttatctagatttttaaatgtagcttgtcataacaaaattttaattacaattggcttgtatgagaagaaaaagtatttttattgttttgagtgatgacgcagagactcaatgaacttgaaaatagcattgcttcgtgcactttgaataccaatcaggtgttttctgtgctactagttgtcacgttgcattcatgttcacctcctgatttaagtatctcgggtgtgcccagccactaaagcactctggactaatcgctaaagagaagcaacgtggggggtggggttgcgagggatgtgttcacatgtacccatcatttgatcatagcactgtgattgcttttgatgtgtgtctctagtggtgtgttgtctgttggcatgcttaaagcacatgtccattaaaattcattttgttccttttattttccttgttttcttggttagtgattcatttgcataaacattaatgatctctgcatactggtttggggttttctctttccttctaactctaaagaaaaaatttttgctgcagaattatcctcagaagaggcttcctggccttcatctaccctgcagtctgaccaagtatgataaattttagccgttttcaaggaaacatctctctacccaggtcattgctgtcactacagctttcaagtcaccacactaatttttttatcctgttactc

SEQ ID NO: 4362 - DNA, 471 bp, Homo Sapiens
ctcttgcaggatcaggcgacctatagtggataatgacgtcgtcactttttttgacacagcatagctatgctgtgtcaaaaaaagtttcctacagactgaggatattcacacgacaggagcctgggggttaaatgagcctttattagaatgttgtagcagttgtgtttgaaggcggtggccctacaaaataaaattaaattaaagtccctaactgcatgggtaggaaaaccagggctggagctcaattggaaccagtggagcccagaactcatggagacatacgtatgtacgtgggcacgggacgccctcgcactggcatgaagccggcccagcctgcaagagacacggaaggcttctgcctttcctcacggaaccagtttttaaagagtgggacgggaaagaaacaaaaatgaaactaaaagcagacctgatccttttaaaaacatttttgtagactctaaagggaattac

SEQ ID NO: 4363 - DNA, 423 bp, Homo Sapiens
attcaccttccacctggtcggtcaacctgtcccaaagaattcttcctcctgcttctgccgcagccgtttccttgtcgggctcggcggcgccgttcccgggctgcctcctcttcatcatcgtcattcctctggtaggcgattctttctgcttcgagtcgcatctcctccctcttttgccttctaagttctctgcgacgctcaaaatcatccatggtgtgatttcaggttcagggagaccagatgatgtctggacaggtcagcaatcagatgtctgagccttctggttggtcaccaatccctgtggaatttgatttgatgatcttgaaatgttccaatgataccttgtagtctgaaacttcttcccgaggactaagtcggaaaggaaggactgatttctttaagcaggagcacagccagagagca

SEQ ID NO: 4364 - DNA, 536 bp, Homo Sapiens
acgaagacgaagtgaagagcaaggagctactccacgcagaacacagcgcagcgtcctgtaaaggaaggccaaaaacaacccaacaaaaatgccaggtgatcaaagcggtcacagcacaatgtccacatccaacgagaaattgctactacgtccagacgcagggaaaggtggtccgtgggaacgtgagtcagcagcaacaggcccagaagggcagccacggtggacttgtcagacgtggaccctgaaatgacaatcacagcatgatttcaggcaggagcctgaaatggtactagctttggacatcggttcggctaaattcttttagagagaaacacacaccttccctaggacccagcaactccactcctaataaccaagtgaaatggaaggagttgtcctcagcaaaacgtgtgtgcggaagttcacagtcactttctcggtgataaccaagagctggaaaccactgcaacacccaccagcaggtgaactggattaacacactgggctagggccacacaatgagatgctccgtggta

SEQ ID NO: 4365 - DNA, 964 bp, Homo Sapiens
gggatcccgtggagtggccggcgacaagatggcagcagcgtgtcggagcgtgaagggcctggtggcggtaataaccggaggagcctcgggcctgggcctggccacggcggagcgacttgtggggcagggagcctctgctgtgcttctggacctgcccaactcgggtggggaggcccaagccaagaagttaggaaacaactgcgttttcgccccagccgacgtgacctctgagaaggatgtgcaaacagctctggctctagcaaaaggaaagtttggccgtgtggatgtagctgtcaactgtgcaggcatcgcggtggctagcaagacgtacaacttaaagaagggccagacccataccttggaagacttccagcgagttcttgatgtgaatctcatgggcaccttcaatgtgatccgcctggtggctggtgagatgggccagaatgaaccagaccagggaggccaacgtggggtcatcatcaacactgccagtgtggctgccttcgagggtcaggttggacaagctgcatactctgcttccaaggggggaatagtgggcatgacactgcccattgctcgggatctggctcccataggtatccgggtgatgaccattgccccaggtctgtttggcaccccactgctgaccagcctcccagagaaagtgtgcaacttcttggccagccaagtgcccttccctagccgactgggtgaccctgctgagtatgctcacctcgtacaggccatcatcgagaacccattcctcaatggagaggtcatccggctggatggggccattcgtatgcagccttgaagggagaaggcagagaaaacacacgctcctctgcccttcctttccctggggtactactctccagcttgggaggaagcccagtagccattttgtaactgcctaccagtcgccctctgtgcctaataaagtctctttttctcacagaaccaa

SEQ ID NO: 4366 - DNA, 440 bp, Homo Sapiens
gcggccgcctcatcagctggagcggctcccaaaagaccctgcgcagccccgcctggacctgactggcagcagcgggcacagcctccaaccccagccccgagatgagctctaggtccaggtgatgactgcaaagcagtgtccaggagcaggccactactgcccagagagcagaggaggaggttgttggcagggactgcagatcctgtcagacctggccaccaccttgggcatggccactctgccctctggacctgtctttcatcgggagaaaccactcagagatggatcccattccctaaaggtctcacagcaaaggagcaggactcccaggcccctgtaccctgcctggcctgattcagggccttgtggcaccagcttctgtttcaagctgggcagaccccaggatcccttccctccctaaggactcagctgaggggccc

SEQ ID NO: 4367 - DNA, 368 bp, Homo Sapiens
gtgtacacacacgtcagcactgtgggcgcacacacctgcactcacacattcatcaggacccatgggcacacgtgcacacacacgtcagccctgtgggtgcacacaccatgaactcacacattcatcaggacccatgggcacacgtgcacaaacgtcagcaccggtgagcgcaaaacacctgcactcaacgcaaacacatgaactcacgcactcaggaccgacggacatacgtgcacacaacaaactcagcaccgtggaccgcacacaccatgcactcaacgcactcgacagggaccccaggggcaaggatgtacacacattgccccagaacccgtggacccattggcacgcgacatcggggaaccgag

SEQ ID NO: 4368 - DNA, 674 bp, Homo Sapiens
gaaatgctatcagaaatagatttccttccagtggaaagaaaggaggaagggagaattgagaaaatatattagtctattattttagagttctaatacactctaaattatagagaaaattgagagtaaatgactgtcttatcactcttatttgacatttcgtaggtgtaagagaaatggaaatgaatggtttccacacagatcatttaatacagcagagcatggcatgaccaagcatctttgtaaagtgttagatggaaaatgctgtgtgctgccctggtaatcagaaataataacctgttagggatgtattctaggaaatccgaagtagttctcttttcttgctggattattgcttagataactcttgttttctggtaaaactttagttgtattgccatcccctcctttttccaatgagtttaatgccataaagctgatattctttgtccgattaatttgaaatctgcaccgaagctgttttagtcattaatgtgtaaccaaagtagcttatagaatatggactgccttattgctgttgcttatcatttgaaaataaaatcccgctccggttgtaacttgttggtactcgtttagtgagttcgttttggaggttctgaaatacctattaattcttaatattacctctcttggaaacaccaaaaaaggcgccgcct

SEQ ID NO: 4369 - DNA, 976 bp, Homo Sapiens
tttgcgatgtgcgtgcatgtcagtagcagaagtgtcattgtggactgcatcttagcccgagtaggggctggtgacagtcaattgaaaggagtctccacgttcacggctgaaatgttggaaactgcttctatcctcaggtctgcaaccaaagattcattaataatcatagatgaattgggaagaggaacttctacctacgatggatttgggttagcatgggctatatcagaatacattgcaacaaagattggtgctttttgcatgtttgcaacccattttcatgaacttactgccttggccaatcagataccaactgttaataatctacatgtcacagcactcaccactgaagagaccttaactatgctttatcaggtgaagaaaggtgtctgtgatcaaagttttgggattcatgttgcagagcttgctaatttccctaagcatgtaatagagtgtgctaaacagaaagccctggaacttgaggagtttcagtatattggagaatcgcaaggatatgatatcatggaaccagcagcaaagaagtgctatctggaaagagagcaaggtgaaaaaattattcaggagttcctgtccaaggtgaaacaaatgccctttactgaaatgtcagaagaaaacatcacaataaagttaaaacagctaaaagctgaagtaatagcaaagaataatagctttgtaaatgaaatcatttcacgaataaaagttactacgtgaaaaatcccagtaatggaatgaaggtaatattgataagctattgtctgtaatagtttatatattgttttatattaaccctttttccatagtgttaactgtcagtgcccatgggctatcaacttaataagatatgtagtaatattgtactttgaggacattgtcaaagatttttattgtgaaaaatgagagctgtaactgaggactgtttgcaattgacataggcaataataagtgttgtactgga

SEQ ID NO: 4370 - DNA, 605 bp, Homo Sapiens
cccggcatgtgctgtaggccagcgcatatcagcatgtcttgcaatggtattccgacgcgtaaatgtttcccacacttagaacagacaaaagccgcagggacgaagttggggtcgtgatagcgcttgaagtgcatgtcgagaagctgcttctggcggaaggtcttatcgcagtggctgcaggcgtaaggcttctccccggtgtgggtgcgcttgtgcatgatcatgtgcctctcctgtctacaagcgtaatcacactggtcacacttaaagcgcttctcattcttgtgtgacttctgatgctggatgagggcatagcgctcatgaaacacagcatcacagtaacggcatttcttgccttgcccaatataggaatgctgctttcgcaagtggacacccaaatcactttttcgggctatgactgtgtcacagtggggacagtgaagtttggccgcattttctgtgtgcttctgtaaaatgtgcatcttcatggtaccactttgggtaaaccgagcatgacaaatataacattcataaggcttttcccctgaatgggttctcatgtgccttttcagcttgtatgtgtccccgctggactacagcacatg

SEQ ID NO: 4371 - DNA, 339 bp, Homo Sapiens
catgtgctgtaggccagcgcagtgagctgggctgtcctcctgtattttgcatatcaaagtgaacatttccgaggagcaggcattctgattctggggcctgtaagactgaatttcaaatccaaatgtttcattatcctgcttctccacagtaacaagctttctttgagaccaggaaaagtcacttaaagaacttgatctggtcaaaacaagctgcttttcgtccccgaggcagagtagccaccgtgtctgctagcatttgaatccttctattatcgtccatcgtaaggctgccggtgagtgtggagtaagagctatacgctggcgtacagcacatgggat

SEQ ID NO: 4372 - DNA, 527 bp, Homo Sapiens
  misc_feature (93)..(106): n is a, c, g, or t
catgtgctgtaggccagcgggatgatgcagcgtacaacagggaccccagggtctgcacggtttacttttaactccatcatcataaggtgattnnnnnnnnnnnnnntctttcaacttatagatcgccatgggaaggcagtcaaagactgggagcctaagacagggaaaagcaaaaaaatgaaacaccccgctcggttcagaagccccgggcgctggcctagcccatgcgcatcacagtgtccagggtgagccgcccgtgtgccggcaggggctgaacaagggggccaggagcagaaccagcccccaaggtccacttttctgctggtgtcgggcaaactaaaggcaaagagagaaaggaagaaagcccacgggaaaggtcccccagcgatgatcctcgtctgcctatgaggcggcaccagccccctagccctgatgaaacttggcagccaagaattgaggtcttgcctctgcagcatggccggtgcttgctcttggggcgggcacggtgtcttcccgagccagcggag

SEQ ID NO: 4373 - DNA, 310 bp, Homo Sapiens
catgtgctgtaggccagcgtctcgaaggtgtcagccagctgcggcagggtcagtctctccccctcccgaagcacctttctatcccggcagaacacctcacacaagacaggctgctgctcgatgacggtccgcttgttttccaagggctgccgccaagcccttgcccacggggaagccctggcgggccagctggatgctgggctggaagaggcgagcccagggcagccgcccatgccgctggtgtgccacgctcatagcctcggatctccccaggcaccgccaccgacagcccccccttctgggactgctc

SEQ ID NO: 4374 - DNA, 912 bp, Homo Sapiens
gacgcctgtcagcatggaaagtcgggggctttcgcccgggtcctcctagaaattccccccgaagaagactcccccacatctgggtatggagagtgcaatcacgctgtggcagttcctgttgcagttgctgctggatcagaaacatgagcatttgatctgctggacctcgaacgatggtgaattcaagctcctcaaagcagaagaagtggccaagctgtggggactccgaaataaacagaacaaatatgaactatgataagctgagcagagccctgcgatactattatgacaagaacatcatcaagaaggtgatcgggcagaagtttgtgtacaagtttgtctctttcccggagatcctgaagatggatcctcacgcggtggagatcagccgggagagccttctgctgcaggacagcgactgcaaggcagtctccggagggccgcagaggcccacaaacacggcctggccgccctcagaagcacagagccgcaaccgaatacatccactcaggcccgtactcgtccttcaccattaattccctgcagaacccaccagacgccttcaaggccatcaaagacggagaagctggcaggagccggaccgaagaacaagaccccccgtggaaggacgtcaaggattgtgatcaaggctagatggaacaattaaaaaccgacacagcacgtcacccagggccggctggatgtcaccatggccgttacaacagttcaaggaggccatgccgtgcggcgagatcacggacataccatgggcactacgaaaccgccctcgggacaaaaaatctcagtcattatagatgtaggcaaaaacgcatgcccaaaaatttcaaccagcacaactacccatcatcatcacgggaccacggcatctgggacccacgaacgcaaccacaa

SEQ ID NO: 4375 - DNA, 2347 bp, Homo Sapiens
  misc_feature (418)..(449): n is a, c, g, or t
gtaattgtgctaataacctcactcgcacattttctaccgcaatcagaccactgtcttagtcaccattacatgtcctgcagtgggtggtatctttctcctgtggctctaattaccttcttggtgtgtttgtccccacattatgtgctacccctacaactagttgtgtcggtcttacttataattttcactctgctcggcagtcttttctcacgccactcctgtgtttgtgtcaactcgcgcacgacttggttcatttttttagtgtcggcgctcttcgtggggtcgtctgtgcgccgcgcctcgttgcggtcgcacagtgtggctgcccccgtgcggtggacttttagcgcgcgcgcctccttgtggtgttggttggtattgcgtgtgattcttatttttattgttgttggtgttttgnnnnnnnnnnnnnnnnnnnnnnnnnnnnnnnnaagaaataaaagtccctttattttatattctacccaaggacagcaatgcgactaaaggggtggccttttagctgagagggagttgctcaaaaatgatagaagtggcaaaagctcagggtgtgtgcaagggagttcctcccacctctcgagtctggcggcctccttcgtctccctcctcatctgagacatggcagcagccaggaaccactgtgccagagctggagcctctaggacaagccccagcaaggcggagactcagctcagcactgtctctgcaggaactgcaggcccactttcttattgggaaccaggacaatgcgggccacactcttcaactcccccgtctccggggccaggaccaccttgtacttctggatcagccttgcgaggagtagctgcatctccagctctgcaatcctgcggcccaggcaggcccggaccccatagccaaagggcacagagccaaatgggtgctggatcctgggggtagcaggctggctgtttctcagccagcggtggggctggaagctttcaggctcagagaaggcagtggggtcccgggacaccacatagtggcagaacacaaactgggtgttcttggggaagaggaagccatcaacttcaatttccttgtctatgatccgggagtttgtggggaccacagggtagagacgcagagtctccttaagcacagctttgagcaacagcatgtgggcaaagtccttgtgctggggcacttgcccggctggcaccacacccaccacttcctcgtgcaaggcctcctggatctcagggtcctttgagaggtggtacagggcccatgtcagcgtgttggatctcgtgtccactccagccatgagcagctcaggcaggctgcccatggcctcccgaggactgagctgtccactggccagtaagaagtgcaggtagccagacacctggatgccatctggccctgctgcctgcagttgggcctccatatcttcgagcttctcatcaatcagcttcttcccaaaggaaaagatggcattccaaccatccaggtatcgcttccagaaaggcagcacggggcgagtccacttggggaggaaggtggcatagagtgagttctggaacattaacccgatggatctgacgaaggtcacggtgtcctcggggatggatcgctgcaggcagccaatgcgtttctcgaacaggatgtagcaaatagcttccaaggcaaagtagtagaagagttgagccatgtccgacacctggttccccgaagcactctctgcccgcagctggtccagtcgagtcataaagtcatcaatcacctcattgaaagcatccgtatagagcgctgcttccgctggcttcagcaaccgctggttcagagcctggcgcagctggtaccagtggtgtccttccgtggtgaacggcccataggtcaggtcgtgctggtcccggtgctccttccatagctccatgtcgttccgtactgggtacttgccctcttgccgcatcacttgctccaagagcggggcactggccaggttcacgtgcatctgaggccctaagtaggacatccacattggaccgtacttggccttgtaaagcacctgtaactggtgcagttgcagggcatagccttgaacgaacagctgaaagaagaagcgcagctgtcctagacgtggaatctcctctaagctccgttgccgccgccggacaccaggcccggctccgggagctccggtggccttgtccgaggggagggcggcagggatcgcggccttggctctggccccgtgggggcagaggccacggccggcccctcgcagcgcccacctcagcctcgcgcagcccagcgcagccatgggttgtgctcgcgatcccgggaattccggcccagtatctat

SEQ ID NO: 4376 - DNA, 671 bp, Homo Sapiens
agggacaacccagctagttaaacgtgagcattaaattttttttaaaaaaaatccccctagtttcccaagacagcatttccatgaatttagtcttctgtaaatcactgggcatttccgtgagccctttctgcctccactctcttctctgtctttgcagtttccttatccccgaccgcgcccccccttccaacccaatcaccccacaaacaagatttctagacccagtataaaatgatccttttagtgacagtttcttgttatctggccgatccactggggaccgggctgcagcctttaaaatttttgatcctggaggccgccgagctgaactttccggcaggacccgggcgaggggggcttagcccttcgtttcgatcttcccaccaacatccgagagcctaatcagcgcgcccacggaggcgccttaagggcagttggggaagatgagcagagccgggaaacagcaagaggtatagaccctctgcagcacctctccaattccgcggcccttccgggtggcgtatacagctccaggattgggaaaggggctccggtggcccggcccgcaggtctccccgcgccccggccgcgcccacaggcccgccccctagccgccggggttgctatgcgttgccgtgaaacgcctgtcaataaaccctgtttggacagtg

SEQ ID NO: 4377 - DNA, 579 bp, Homo Sapiens
tcggtttgatgtttccattaagctcaatgagtaactctaatagttactcttgaatctggattgaaaaacaccatgcatctgatgagataattcataaatgttgccccttttttaaatgatacaaccctaaaagtgactgaattgcccaagtgcttgaacatggcagaggtagttactcttattttgcagtttgtgcacttaaaaattcctacagtgattgttactttactggggaaaaaagatgaggtgaaacttcctcccaaggaattaaaatatctgtagaagccatggcttgcttttataatgtggaaatcatttgatttgctgtaattcacgcagatccctccttttgtcagggggaaatgatttgcatcatgttcttttttcataatgcttttacttcctgtttggatcagttgtatgtaaatgtacatttttgttactttggctgtgcccgttagaatttatcttccataaagtatttctcccattgagtctaatgatgtatactttgcctaggtctttccaaaattaaatttatgtaaatgtctattttatataaaatatgattaaaataaa

SEQ ID NO: 4378 - DNA, 387 bp, Homo Sapiens
caggccccatgccctcagcacgtgctgacacgctccctccggctccaacaaccacaccagaaccttccgtagaacatttaagtaatgaagtctcaacattacagtaaaaaggtgcaaagggtctcttttacaaatatttatgtacagccaagatcttgttgagttcagtatagcatgctgcgcgtacacatacgcagtgtgcacacggattcagggaactgagcggcacactgaagacgagatcacacgtgtgcacacggattcggggaactgagcggcacgctggaagacgagatcacacatgatgctattttacttttgatcccatgtgctttcctgggcatgatattttagatggaactttttctggtctgtgatctttggtag

SEQ ID NO: 4379 - DNA, 468 bp, Homo Sapiens
atcaccccacccgcgtactccctcctgacctagctgtcgcgagcctgccgcgaggaggccagggtgagggtgggaacacatcctagaaggctaacacgtggttttctatcatttaagccggggacaagccggaaggctgactagcgccatcactctgataggcaccccgcagtggggatcctgcttgattattaaaggcagacctccaagttcctccctgctctgcaacctttctcttctcacgggtctgcagtgttttaaaagtcgtcattctgtgtcgttgagttagagaggaaaacatcggataaaagaggatcaagaagaacgaaccctagatacatctgtctggtgaaaggagtctaggaaaagaagtttcattcttagaacaaatctttttggatatttattatgtgtgttttgtgtcaggtttcgggccaaaaagctgaaataaagaacgaagtcaataat

SEQ ID NO: 4380 - DNA, 484 bp, Homo Sapiens
  misc_feature (86)..(86): n is a, c, g, or t
cgacacactctatgaacttcggtgttccttacagttagcggaaacggaaagggaaggaggattttctccacacatttctcctttcnctgctgtccatgaccttggacttctggcttggaagagctggctttaatactctgactgtggacactgatgaaattcaagttaactatcctggaatgtttgaattgatggaagatttacaaggtatgggtgagagtaactgtgcttggaatagaaaagccctgctgcatcgagacacaatgctggcagctgcggcagtgtacagagaaatgtacagaaatgaagatggttcagtacctgctacataccagatctattacatgataggatggaaatatcatgagtcacaggcaagaccagctgaaagaggttccgcaactgtgtcatttggagagctaggaaaaataaacaaccttatgccaccggggaaaaaatcacaataaatatttattcagtgtta

SEQ ID NO: 4381 - DNA, 539 bp, Homo Sapiens
  misc_feature (499)..(499): n is a, c, g, or t
atggcgatgaggctaatatcattccctgagaatagtaggtatcaatgatgtgaatctgtgtaggagaggggattcaaagttaaatagggggtcaaagtaccacttggacttgtgtttcaagcaggaagcctctggaattaggtccagtgatccacaggggagaagagagctaggtgagcagttcttggagcagacagtcttttaatcctattggatgagcctgtattattgtctctgcagatgttctgtacccttctgcaaaagaggcaagctggcttttcccataactgatgaaatcaagagagcaggtctggaaaaaaacaagggaaatctccttatatcttacgaccgtgtaaaaagatgattctggaattcccgagtgcctactgaattaataaaccaggaagctgatttattttaccactctaaatccaacatggaagaaaccgtcagacatctactacatgtcatccagcagtaccagataggagaagttaanctctggtcagcccacctttatccaacagtgtaaattaatc

SEQ ID NO: 4382 - DNA, 315 bp, Homo Sapiens
  misc_feature (97)..(97): n is a, c, g, or t
acttgggcgttatgttacccactgatgatctgaatttttgtccatttcacctgtctgagtttgtgtgtctctgagcactggtgggactgagcgtgtnccgtggcttgtggccactcctgcttcctgtttgtgaattttatgttcatgacgtctgcccctttctttgggtttttcactttattcttattattttgtaaattccttaagtattctggatacttaccttttgttattctattctagtagtcactgtccccaaaacaatgttcataaatttgttcttataaagatgagaaataaaaaacattgaatttt

SEQ ID NO: 4383 - DNA, 495 bp, Homo Sapiens
cggaacgtaccagactatgttacggaagtatttccgtacttaagtatgacccttcaggctctgttggtgtgtaccagttcaatattagttctgccaagaggtgttcagtcattgcctgtagagagcttactgttctctaaccataagagacagttatgatatagtttgagaggtacttatgtaagtatataaacgtgcataggggaagattgcatgcatcttttttgggaaaaccaggaaagacttccataatgagtagaaacttgccagacaggtttaaggaggagattctaaacaagcaaaggggaaaataacaatttcaaaggcataggggcataagagagcatagtggattcagagatcaacagttaggagcaggagaggatgaagtttttctctgacacttgctttttaaattggataaaatacatattaagatcacgtttatagttttgaaattgctccatttttgatagatgtattagttcattcttg

SEQ ID NO: 4384 - DNA, 383 bp, Homo Sapiens
tcatgggcagctgaaggggagctttctaccccaggttcctttccttactgaaaagtcttgagcaaacagttgccgctctccaccccctgctttttaaaaaaaattttttctcacgtaagaaaatgttatctgtgtgctggggaaaattttgaaaataacaaaaaccagaatacaaacacccataatcaatcacagagataaccactgttcataattccttccagtcttcttacttggcacatatacatttgtctttctttatatatgacatatggatattttacaaagttaggatcctactctatgcactgcttggtgatcggatctattcaatgtacaaaatattttgaaagtttctgtgattaaatgttctttgaaaacat

SEQ ID NO: 4385 - DNA, 425 bp, Homo Sapiens
gtaactggctagctgaccaaatcagaaggaaccgtgtggtggaaggtccaggaacaccatccaaagggcagcgctggtgcactctgcacacagaatttctctggtatgatggcagcttgaaatcggctcctcctccagactttggcacccctacactgcattattttgaagactggggtgtcgtgacttatggaagtgcactacctgcagaaatcaatagatctctcctttccttcaagtctggaaaactggggggacgtgcaatatatgacattgtccacagaaacaaatacaaagattggatcaaaggatggagaaattttaatgcagggcatgaacatcctgatcaaaactcatttacttttgctcccaatggtgtgcctttcattactgaagctctgtacgggccaaagtacactgccttc

SEQ ID NO: 4386 - DNA, 788 bp, Homo Sapiens
gcaagatggcgtcctggatcgggtgaaggtactggtgttgggagactcaggtgttgggaaatcttcgttagtccatctcctatgccaaaatcaagtgctgggaaatccatcatggactgtgggctgctcagtggatgtcagagttcatgattacaaagaaggaaccccagaagagaagacctactacatagaattatgggatgttggaggctctgtgggcagtgccagcagcgtgaaaagcacaagagcagtattctacaactccgtaaatggtattattttcgtacacgacttaacaaataagaagtcctcccaaaacttgcgtcgttggtcattggaagctctcaacagggatttggtgccaactggagtcttggtgacaaatggggattatgatcaagaacagtttgctgataaccaaataccactgttggtaatagggactaaactggaccagattcatgaaacaaagcgccatgaagttttaactaggactgctttcctggctgaggatttcaatccagaagaaattaatttggactgcacaaatccacggtacttagctgcaggttcttccaatgctgtcaagctcagtaggtttttgataaggtcatagagaagagatacttttaagagaaggtaatcagattccaggctttcctgatcggaacaagatttgggcaggaacattaagagccttcattatgactgagattacactcatcctttggaagagtgagcaagccggggcagtttcacagtcatctgctgtgtcaattattaccttc

SEQ ID NO: 4387 - DNA, 510 bp, Homo Sapiens
acatgtaaatgcacaatgtgactcattctcatacttttttgttcagctctgagcctcaaaagtgatttgtcagcagcgctggcattgcaggctttgcctggctgctatctctagaggcaagtctgccacgagagggcactgcaggcgaagcagttgtgcttgctcattgcctcagcccaagtgtactcaaagaaaagaggcagccagctgtgcgtgctgtacggaaagcctcccgccctccctgcagctccccgccctcagtggcccagggctttgttgaagtggaactccccacttccaacctggtatggctccttctgcgaagggaagctgatcccagcctcctgagctgaatccttcaaaggcacagcaggcagaatgagggccacaggcaggagtggtgtgggcacactgcttaggagtcaacatcttcatcattgggctttctttaaaacgtgcactttgtaatttgaaagagaattattaaagcatactgaaaaaaggaaattt

SEQ ID NO: 4388 - DNA, 537 bp, Homo Sapiens
tgcgatactttgtggaccacaatacccgcaccaccacctttaaggatcctcgcccggggtttgagtcgggacgaagcaaggtcccctggtgcttatgaccgcagttttcggtggaagtatcaccagttccgtttcctctgccattcaaatgccctacctagccacgtgaagatcagcgtttccaggcagacgcttttcgaagattccttccaacagatcatgaacatgaaaccctatgacctgcgccgccggctctacatcatcatgcgtggcgaggagggcctggactatgggggcatcgccagagagtggtttttcctcctgtctcacgaggtgctcaaccctatgtattgtttatttgaatatgccggaaagaacaattactgcctgcagatcaaccccgcctcctccatcaacccggaccacctcacctactttcgctttataggcagattcatcgccatggcgctataccatggaaacttcatcgactcgggcttcaccttccctctctacacgcgtatgctccatcatgca

SEQ ID NO: 4389 - DNA, 642 bp, Homo Sapiens
  misc_feature (309)..(363): n is a, c, g, or t
gtgacggtggcacaaccttgtgattacgctagaagccactgagctgcacactttaaaaggataaattgtgtggcatatgaattctcaattctcaataataagaatgctgtcccgaaagcctctttctactaagagaattgccttgtccccaacgcacatctcttagtcgttgggacatctaggcagaggtcatcaaacctagccactgcgtagaaccacctggagagtttttaatatccatgttcccaggccacagccacaacctaggttgttaaatcagtaaacccaggttggacctaaatcttagtnnnnnnnnnnnnnnnnnnnnnnnnnnnnnnnnnnnnnnnnnnnnnnnnnnnnnnnatttagcccgtggtttgaaccttcctgatagtactcattgataatttattttgatcctcataatttattgagcacagcagggaccggggtcctttccccaccttagagagattattttcactgctaaagatcataagcctagtgagagactgggagggagatggacctagctctcctgacacaggtcccaagcccttacctccacggtgtctaccctccctccaggacttcctccgtgtgccagctccagcaaaggatctgattcagcatcgcccccca

SEQ ID NO: 4390 - DNA, 624 bp, Homo Sapiens
  misc_feature (38)..(38): n is a, c, g, or t
tgctgtaggccagcgcccttcacccatgcttcagcatngtgcctatactcacttcctgcaggagtctgctggatacctgcagctggagcacaggagagatttcagctcttctgggagtaggaagctctcctttgacactcgttccttagtgtgctttctggaagaccatgggtttgctactcagcaagcagaaatcattgtgtctgcattgatccaggtactggaggccaacgtggacatcgtctacaaagatatggccaccaagatgaagcaggagatcgctcttcagcaaataatgtctcagactgtgaatgtgaaaaacgatatgattactttggagaagagtgaattttcaagccctcagagcagaacgtgagaaaataaaactcaaactacatcagttaaaacaagtaatggatgaagtgattaaagtccgaacagatacaaaattagacttcaacctagaaaagagcagagtaaaagaattgtattcgttgaatgaaaggaagctgctggaattgagaccgaaatagttgacattgcatgcccagaaagattgggacgtcacccagagagataggagatagaaactggggaggttggctacaggacatgccgggtacg

SEQ ID NO: 4391 - DNA, 652 bp, Homo Sapiens
cattgttgaagacagtggaagatcgaatgctgctcccaggaggggtaggccgagcattggtttaccagcactccccctcaacttacattgacctggctgtggatgagcatgggctctgggcaatccactctgggccaggcacccatagccatttggttctcacaaagattgagccgggcacactgggagtggagcattcatgggataccccatgcagaagccaggatgctgaagcctcattcctcttgtgtggggttctctatgtggtctacagtactgggggccagggccctcatcgcatcacctgcatctatgatccactgggcactatcagtgaggaggacttgcccaacttgttcttccccaagagaccaagaagtcactccatgatccattacaaccccagagataagcagctctatgcctggaatgaaggaaaccagatcatttacaaactccagacaaagagaaagctgcctctgaagtaatgcattacagctgtgagaaagagcactgtggctttggcagctgttctacaggacagtgaggctatagccccttcacaatatagtatccctctaatcacacacaggaagagtgtgtagaagtggaaatacgtatgcctcctttcccaaatgtcactgctgactgt

SEQ ID NO: 4392 - DNA, 382 bp, Homo Sapiens
gtcaaaccatcttccagggcattcagtttatttcattttcagacagttcccatggggtgaaaaacctatgctttcactgaaaatggttaagatgcagtcctaatcctaataaatactaacaaatcattattaatcaaaccaataacatgcttctcatttttagtagaaatcatgggttggagagactctgtgaaagtaatgatcaatgtggagaagccctcagccagattccacatcttaatctgtacaagaaaattccacctggagtaaaacagtatgaatacaacacgtacggaaaagtcttcatgcatcgccgcacatccctcaagagtccatcacagttcacacgccttcaaacaatgggtacgacctcgattgtata

SEQ ID NO: 4393 - DNA, 575 bp, Homo Sapiens
  misc_feature (82)..(102): n is a, c, g, or t
atctagaggatcccgaggctcaacggaacttacttcaaaatattcacaaggctaaataactcttatttttatgggtgaaggnnnnnnnnnnnnnnnnnnnnncgtataaaataatgccctgaaagaataatagggattataccggtctgtacttaaagattgtcagggtgggctcagacagaacaatcatcggtttgacttcttgggttcctcatgcagcagaaggaagacagaaagatagaaattgattattttaatcatagcggtattcaggatctcgatcaccttgtgcccgtgttttaaacttcgtcatggtaaatcctggctcttcataatacatgagtaggtccctcggtgcgcgtgtcacttgccctttaatagtgttgatgtactcagggccgtcgccgtgtactacattagagacacagaacaaggtattagaatttccagcggtgggtttgaagacttagggggacatccagaacgtgcttcctctttcagacggtgtaaagtcccctggaattacacagctttagtgctgagctttcaacagtgacatgtggcctaggtataag

SEQ ID NO: 4394 - DNA, 634 bp, Homo Sapiens
attgttgagggcagtgagcagtaatgagcggacagcaccaaggaagacaacgtggcccccttacgcttccacctcaaatacgaggctgacgtcctcttcaccaggagcagcagcctgagccactacgaggtcaagcccaacagctcgctggagagatacgatggtatcgggcctcccttcagctgcatcttcaggatccagaacttgggcttgttccccatccacgggatgatgatgaagatcaccattcccatcgccaccaggagcggcaaccgcctactgaagctgagggacttcctcacggacgaggcgaacacgtcctgtaacatctggggcaatagcactgagtaccggcccaccccagtggaggaagacttgcgtcgtgctccacagctgaatcacagcaactctgatgtcgtctccatcaactgcaatatacggctggtccccaaccaggaaatcaatttccatctactggggaacctgtggttgaggtccctaaaagcactcaagtacaaatccatgaaaatcatggtcaacgcagccttgcagaggcagttccacagccccttcatcttccgtgaggaggatcccagccgccagatcgtgtttgagatctccaagcaagaggact

SEQ ID NO: 4395 - DNA, 484 bp, Homo Sapiens
aacgatggtcctcagctaaggaagtacagttacgtgcttctggactccaacgatggtcctcagcggtttcgaaatcttaaacttcctccaactttcttctgctacaagaatagaccagattatgttagtgaagaagaggaggatgatgaagatttcgaaacagctgtcaagaaacttaagggaaaactatattgggatggctcagaaaaatgtagaccctggaaagaaaatacagcagataatgagaaagaatgtatcatgggtggggaaaagaaaccaacagatgaagagaaggcaaaagcagatacgttaaaacttccacctacattttttggtggagtcggtagtgatactgatgaagacaagggaaatggggaagactttcaatcagagcttcaaaaagttcaggaagctcaaaaatctcagacagaagaaataactagcacaactgacagggtatatacagctgaggaccatcgttggg

SEQ ID NO: 4396 - DNA, 431 bp, Homo Sapiens
gtgagcgtaacattcctccacaaagcttcactgcgatggaacagaaggggcacagaagccagagtgacaggggggcagaagccacccgaggctctgcatctgtttgtgtagagatgggaagaactcgaacgtgtttctagactgtggggaagaagcaagaaaggaagagggaaaaacacaaagggaagggaagaacaggaagaagaaggggcctaaaagaaagcagaggggacaggcacaagagctcttgaaaagtatgagaaattgagagaaagattaggaaatgtatattttaaagcttctagaacattctatcaacatataaacatgtcctctggatagccactggccctcggctttcatacgagaggtctacagacctccatgtgcactgcccatcacctgccaaccttcaacaggggatcctcaga

SEQ ID NO: 4397 - DNA, 1587 bp, Homo Sapiens
  misc_feature (374)..(382): n is a, c, g, or t
  misc_feature (1257)..(1257): n is a, c, g, or t
  misc_feature (1491)..(1491): n is a, c, g, or t
tggtgttctagaggatcccgaggcttcaacggaactttaactgggaggaatacatgtttgatcatttttaaaacatctgtgaatgagtgattccggaggcctgtgaatggtgtggggagcgttgctttgatggcactgtgtaaataaaagtagtagggactgtgcacctaagaggctaagaggtcccactcatccgccctgtgaaccagctgtaaagaaatgtagttaagaaatgcaaagaaatgtgttatcttggcactggggtttgattttcctttttttaaagcactgcaaaacttctttaggatactaaaacatcctaatggggctgtgtggtggtttggtttggtttttcagctaaaggcaaagataannnnnnnnncagctgaagtttttcttggtggcaactatgacatgaatggagtgataaaatggctcttggaaaagtagatatggtcggtatggtaaatgcttagtcatattcatggcaaagtgttcattgctggagatggttctttcacaacaaacaagaatcaagatggaacgcaaggaaaatcttttggtttggaccgaggtaaccagtttatgtgtgtcccaatccatagagaagtgggggaaagggcgagaaaggatcagatggatctgggatcagctttgagactgagtacagtgaatagcctcatgggcatctcatggaattgatgcatttgctgtggcatatttaaattttgttcaaaagatttgaagcaagaccttgcaaagactcttaacattactgttcagcttgcttagattgtgttaacagttcatttaacaaagatccgttttaactctgaacaaaagcaacccagagcggccattctctattcccatgctggtcaatacgctttcattaccaattggcccttaccaaacttttcttatatatatatttgtattttactatgatagttgagaaatttagcctcttagtcatttttagctgttattgtggaagacctcaaatacaagattagatgcccttgaacatgttttaatgatgtgtgtcatgttactatcaatggtgatttcaatcgcaatattttaaattgatgagaatgatttgtaaacatgaagttactattacgtaaattctgtttgttatagagtttcttcagttgttacccaagtgtcatcctagagaagtcagaagaatcagaatccatcgtattttagagttatgtgaatctacatcataaatgggcattaacattctanattgcttggtttggagaatgtgttagcagcatagctatattcaactagggagatgctaaatacacagaagttttcaagagccttggggacagaattacagggggaactatatatggatatggatattttattaaacacccatctgcactatcagtattgcacctatgttggaatttgaaagactattttgcctgatactggatatatggcgcatcatttcctgagttaaattgntgtaaaggaacaatcctaaaagatctaagggttttttaataaaatttggggttgaaaaatataccagtgggtccttggagggaaattgcctggcta

SEQ ID NO: 4398 - DNA, 441 bp, Homo Sapiens
tgaaggcggagaaatgtctttgaaaaagtacaaaacaagtttagacaggagaaagggagggaagaagattcatgtgcctctcatggccttcctgtctgtgacctggaatatgacaacagtcgcagaattcaaaatgaggaagactcaaatggaaatacatcttaacacttctcgatctagaaagttaatgataaagaaagaaattgttttgagaaaggctatcacagatgctcatagaaaaatgcttaagacttaaaaagaaaaaggctatagacacagagacttatttgacttcagtttagcatcagagaggtcagtgataatgaatcaaaaaaatttgtaagaaagaattaacagaatctctaatttcttgacagcccaggtgtgagaagcaagccgttcaaggagggccgaagaggattctataattaagtcgtagca

SEQ ID NO: 4399 - DNA, 540 bp, Homo Sapiens
gaggaccttaggctcacggaactttggtatttcaggtagtattaaatggagacttaacatgaactatgttcataacactgaccaaattaagtgtagatcgtctctttaataaagagatcatctggaactgcaatttctaactcatacatcactgctacaaaccttatttgtttactgtttctcttccaaggaccatcagtcatcctttaaaattcatttcaagctctgaaaagatatttttgttacatgggcaatttacttttagtacagtaaaatgttatgtgaatttctacagtatgttagccaaaatgaattatatctagaatacgcttaacaacatattctggaggcagctttcatttgaaattaggttcaccttctgagagtatgaaaaagttaatgggttttggtgcctgaagattttgatgttgcatttggctacatttaatccactttcacccataagttttagcatctaaaaaaattaaatcactgctaatgcaattaaaatgcattatgaaatgcatttctgtccaggct

SEQ ID NO: 4400 - DNA, 607 bp, Homo Sapiens
agcggaactattatctaattaaggactcccccggatttataaaatctgagggcaagtttccagtggaagctttgtcaggatagagagaatgaagagtgaccacaggtatgactgagttataataagaaggagtaaccaattaatcagtattataacaacaaaattgctgcaaggcaataggcttctgtaattaaacataaatcacaaaggtatggattcaggcatcaaaatagtgacgtgatttcactgagtatcaactagtattggcaaagctacttgaattttgctgttgatcttcactgtgtagttaaataatgatagtgtagatggtggtaaaacttcattttgtcaagtgcaggatgatctgagctgaatgagaaaaaaagtaattaagggagggaataaaggtaggcctggcatcagtttgaacaatatattttttgcttctgtatttgatcgtaagagggcttatatctccaaggttaccacaataaagtcataaccatgccagccattttaaggatttcaggattaatcaagaccaagaaagatgaaatgatgaattacaaaccaagccatcactactacaaagttccgtcgaagccgt

SEQ ID NO: 4401 - DNA, 495 bp, Homo Sapiens
gcgctccagaggatcccgaggctcaacggaactttgagacaggatattatgaacttcaaattacttgtaactaacagagatatctgtggagctcatatcttaaccttgtatggtgtagagagcgggtacgttctgatgagactgtataaaaaaagaagaaaatgaagaataggaactaagaatggatggagcaaagagaaaatcaccaacagaaagagagtcatactcttaagtgcaacattactgagaataagtccaggatgtggtatgtcagactactggctacagggaaggtacttgaaagtatgcccaacgttggtagtctctgaaaatcagtttctggggagtagtaaaagaagaggagaggagaggcactcttcagagactatggcataaacagaaagaagaaagtaagagggagaatggcaagggtcctgcagaagtaaaagaaatgtacaaaatcagagatgaaccaaatcctccccctgctaccag

SEQ ID NO: 4402 - DNA, 936 bp, Homo Sapiens
  misc_feature (873)..(873): n is a, c, g, or t
caaagcctggcctcgccgctcgggagctttgccatctgagccacgcctcctccaggccatgctccttgaacttggaaatgtcaaccggagcccttacaccagccctccagcatctaatagacttgaatctactctaaacgaatatttaatccaacctcactacattgtagctcagtccaacgactaaccctgaaatgggggtgttccagccttcagcgagatggccaagcggtcccctgggggctgtggcagcgggcttatccttctctgttgccaaccttgccgtccgacctcctccgcccccatgcggtgaccccgtccgtgtctgtgtctgtccatacgtgtgagtccagctaaaaagacaaaacagaacccgtgggcccagctcggaaggtgcgtggagaaggctccgacgtctccgaagtgcagcccttgggatggcattccgttgtgtgccttattcctggagaatctgtatacggctcgcctatagaaatatagcctcttcatgctgtattaaaaggactctttaaagcctccccccccacttgtgctttgccaacccccacccaaccgccgccgcgggggacatatgaactaccctcttcttgtgcggccggcctcggccccccgaaaaagcttcttaaacccattctttttggggcgcgggcgcccccctagggaacgggaacatggggccatagcgtgcgtccctaagaaaaatccggggcaatagacaagggcgtgggaattccccaccaacaaaaaaaccccccgggcgggaaacccgcgagcgggttctgaaaaacgtccccacaagtggcgccccccccgcgcgctcttttacccgcgcttcctttccacaagggagantccacagccgagcgccgccgaacatacaaaatcacgggcgcccgcgccgcggcgtcgatattc

SEQ ID NO: 4403 - DNA, 518 bp, Homo Sapiens
  misc_feature (338)..(343): n is a, c, g, or t
ctccatcctgggcgataagagctggcctcccccaacacctgctgcgctgggtagtgtgtggtggcgttatggcagcccggctgctgcttggatgcgagcttggcttgggccggtgctgggggcacagctgtctgccaggcactctcatcaccccagaggccttgtcatcctcccttgccccaggccaggtagcaagagagcagcgcccaggcctgctggcatcaggtctgggcaagtagcaggactaggcatgtcagaggaccccagggtggttagaggaaaagactcctcctgggggctggctcccagggtggaggaaggtgactgtgtgtgtgtgnnnnnncgcgcgcgcacgcgcgagtgtgctgtatggcccaggcagcctcaaggccctcggagctggctgtgcctgcttctgtgtaccacttctgtgggcatggccgcttctagagcctcgacacccccccaacccccgcaccaagcagacaaagtcaataaaagagctgtctgactgcaaa

SEQ ID NO: 4404 - DNA, 612 bp, Homo Sapiens
  misc_feature (181)..(211): n is a, c, g, or t
aaattttgtagccattcttatgatgctcttgatttgttggttacacaaatcaattttattaaaaatccaaagataagtctttaggtatattttgtaccaaattaaattagaagacaaaaattgtgctttcatagttgctacaaaggtaaataatggagagatttggtacaaaacaacaaannnnnnnnnnnnnnnnnnnnnnnnnnnnnnngctgataaaattacctgaggagtgtaatgcttatttttttgtgtatatctttgcaatctattttatatatattgacaaaagagactgtgaaatacttagccatgcagaatatgtgaccagaccagagcatgtgtaggaagactttacggtaatcattaactctaccccgaaatgatggactacaagttataatgtgtgttacctacacttcaatcagtaatattagcaaatctccaaatgttagtcacattggtttgtctcccttgtacattctttattcatgatattacagtgctgtaactgggtggtcctttttaaacaaaacattatttgcaaaacagagggtattatttgtttttaaagcttttgtaaataaaggcttcaaaatgttttcttataaa

SEQ ID NO: 4405 - DNA, 461 bp, Homo Sapiens
caaatttcgaataatccagggaaacccaagagccttactggtcttctgtaacttccaagactgacagctttttatgtatcagtgtttgataaacacagtccttaactgaaggtaaaccaaagcatcacgttgacattagaccaaatacttttgattcccaactactcgtttgttctttttctccttttgtgctttcccatagtgagaatttttataaagacttcttgcttctctcaccatccatccttctcttttctgcctcttacatgtgaatgttgagcccacaatcaacagtggttttattttttcctctactcaaagttaaaactgaccaaagttactggctttttactttgctagaacaacaaactatcttatgtttacatactggtttacaatgttatttatgtgcaaattgtcaaaatgtaaattaaatataaatgttcatgctttaccaaaaa

SEQ ID NO: 4406 - DNA, 445 bp, Homo Sapiens
  misc_feature (36)..(36): n is a, c, g, or t
ctcacagggttgttgtgagggtgcacagaggagcanagtccctgaaggccctcaggcagtatataggggccgcccaccttcagctgccctgggatgggaaggacccagcccgacccctgggcataacactgtgtttgcaaatggagattcaggtattggggatgcaggttgtggggagctggcctggcagagtaggggtagttggcttggccttctctttggtgatcccacccccagccatttgcattgctggcccagcgcctggcctggggggcggggagagccagcagaaggggctgggcaggggcggtggaggactcaggaactgcccggggagagtgggtatggcggctgagccaggggccctcctgtgtttgacttcccgggatgggtccttgcttctcagctgtgtccgaccccaccatgtaataaaacccaaaggaac

SEQ ID NO: 4407 - DNA, 477 bp, Homo Sapiens
atggccaacattcagagattgcatttcatgaaaggactttggaaatatctgaaatttggggaaatgtacttaggaggtggggtcagtaacagtttaggtcttatatacacaaggacaaaatttcaccctcctcctagaacattagggagatggattaatgggagagatgtgactcaccaagggcaatattacatttataaacactgaaagaatatactagtttagaaagttttatcatcagccctgctttttcagatgtttttattcttgcattttttgcacatttttattatttgctaatgtaattctcctttccaaagaaaatctgacttgcttaaatgaatgtttaaagaagttaaaaactgcacagtggaatccacatttaagaaacccctttatgggcaaaagtatttgtctctttctcaaacagaaattttatgttgctgttaaaacaaaagtggcttgatttcttagata

SEQ ID NO: 4408 - DNA, 513 bp, Homo Sapiens
caagtctctctctcctgagcctcctcttgatgcaagctctaaagggagaagttcagccctgcctctccagggtatagacggccctgataggcccaagttcttcctccttcccccattcccaggaaaggccagcccagtccatggccttcttgggcctctgggcacagagccaatgttcgtcattgcagctctcagcaaactgggtcatagctttccccacagctcagcctggggcctgggcagggctcccagcctgcaccgcctcccactgccagtggggcatgattctctcaggcttctgccccgaggccttcgtcgtcctcagggtctggacttggtcagtggcctttcaccagtggagctgccttcccagggagaaggagccgtgcgccagggcagggcccgtgccttagacttctcccgacccccagagcgctggtacacaggtctaggcaccacacagtgctttggaaattctcagtgaatgatgtttaataaagcaaaaaatgtcaa

SEQ ID NO: 4409 - DNA, 549 bp, Homo Sapiens
ccatgttcgaaggcagtgttagggaacgtctgtacaggtcgtgagctgggagtgacaagccattattatatccacaccaaagctttgaatgataaaggggttgaaccactgtcattcattaaattcattaactgttggaattcctctaaggatctatctgcaggccccttctcttctcactctgtacacggtctccccaggcaacttcataatggctaaaattaccatctattccaagagcatgctcaaattgatatttctggctgaaatctcccttttgagattaaagcccttatcacctacttcctccttgacgccggagttctcaggacaccttaaaaccaagttcagtatctctgcccatttctgcttccttaccctttaaacctgttcctcattcagtcctttctgtccccaggagtggcagaaacataaatccatttgccctagcctcaaacctgggatgtctgtcttcctccgtctacaattaatcatcagccagctcctatcagtgtcacttgaatccatattttctcccctactcactgc

SEQ ID NO: 4410 - DNA, 609 bp, Homo Sapiens
agccgcgtccgttgaaggcaggttgaaggtgtccatgtcccatacgtggcagttaggaactggtatcaggactcatatctctgaagcaagcactttagctacctgttcataggtaacagctcattgatagggaaagaaggtagaattaagcttatcaaaggctagaactgtgtctgattcatcttggggtcctccctacctagcttaggatgctacattgtttaggttttagtgaatgtttgttgagtgaagagatgagttggtgttctctatcagcaaggtctagcggggccaagtggcccaggacagatgggtctgctgctaaagtggtttttatttgaagtgtgtgttgatcgtgggttatcttacaggattttttaattattccatatggctctaaaccaggaacctgcccttagtacctctgaaaaaaagtcactaattcttattttgggtccagacagtaaccattttctctccccagtttacccgggcagggacaatttcaaacatcatcttgacttctctgtctccttggcgctgatccctaatgggtcatcatcctctctgctcacatacagcgttccctccccactgccttcaaacatg

SEQ ID NO: 4411 - DNA, 448 bp, Homo Sapiens
tccatcaccaacgccaaaaccaaagaaaatcacttagtctccactttttctcacagggagaccctcattaaggtcctcctagccagcagtttcgtgcccatttatgcaggactgaagctagtggaatacaaagggcagaagtgggtggacggaggcctcaccaacgctcttcccatcctgcccgtcggccggacagtaaccatctcccccttcagtggacgactggacatctccccgcaggaaaaagggcagctagatctgtatgttaatatcgccaagcaggatatcatgttgtccctggcaaacctggtgagactcaacaaagccctttttcccccaagcaagaggaaaatggaatctttgtatcagggtggttttgatgacactgttaagtttttacttaaagaaaattggtttgaataaaatgcataaaagtttataatgcaaa

SEQ ID NO: 4412 - DNA, 672 bp, Homo Sapiens
tttaccaggtgaggtgatgtagtcgtgtggatgctctggatttcagccagctaggtaggacctcagacaaatcacataagtggttttctgcttcactgtctctatcacgatcaatgagaacagtcccacctacccctgtctccttggggccactgtgaagccactgccaagagtctaaaaatcacagttctttctctgatgtgtccagtaacatcttctacagagctttcacatctattaacaccaaattcttccccctcagtaaagttgaaagtaaagaacaaagattttaagttcagtgacaagctaagtgacaaaggggactcataagcccacttgaatagggcaatttccacttcacaagcaaagcacatactttcacatgtcggaattcaaaccactctcacagatcttcaagctatttcactagagtcttagggtgcaactctcttaacaagcaaccccattgctggcatctctgaggcagcaattcaaaccccaaattggcctgttttccctgacagactgctgggatacagattcctgaacaacagcagaaaagctggcagctcactacctcttccagagttggcttggccaggggcatgccagaacaatggtctcctgccttcaacatgggtacgactcgaatctacgcttcttgttttttat

SEQ ID NO: 4413 - DNA, 361 bp, Homo Sapiens
tgctgtaggccagcgaacaagtgtaggccctgaccgcagcagcaggcttggggctctcaatgtgtggcgtgcgccagcagatccccagtgaggaggagagagcaaccacaggcagcacagagctggccacaaacgataagggcagaggtatgtgaaagagggagccattcccaacccaacactggggagaaaagaatccctcttatttgaaataactgtaagagataaactgcacaagagcctccagttatcttccgtatttgccataggtcatacagtgtcgcttctgctgaaagaggaccacaaaaaggattctgctgcaactgaaaactcaagatgcaaagggacctgacccaacact

SEQ ID NO: 4414 - DNA, 516 bp, Homo Sapiens
  misc_feature (89)..(98): n is a, c, g, or t
gtgagccccagaatcccagtcaatgtgagttactgtcacactgctgcactccagcttgagtaacagagtgagaccccatctcttaaccnnnnnnnnnngaataaatgaaaatttaagactaagaattaaatagaagtttagattcatcttactgatttataaattaatatttttgaagagtctctgatgaatctggcagagattttaaaacactgccttcattttgttaaaacaactttaggtgtctctttgttagtattctgtcagcgtatgtagttaatgaataagtttatttgggtcatgaattccctatcaccatgatactcaactagagttaggatgacccagtagggatattactatttggattaaagcactagattatgtgtaggtcaaatgagtttcagttttctgaagagttaataagattgtgatttgatgtaatacatttaaactttcctggttttgaattaacttgcttggattttattcagttaccaaaactgtgcatggggt

SEQ ID NO: 4415 - DNA, 281 bp, Homo Sapiens
  misc_feature (135)..(206): n is a, c, g, or t
  misc_feature (261)..(261): n is a, c, g, or t
catgtgctgtaggccagcgaaaggaaggaattttttaaaatattaatatttaactagaaggttcaaggggctcatgcatttgacaggttggacctgttttggatatggttaagatctatcaaataattttttatnnnnnnnnnnnnnnnnnnnnnnnnnnnnnnnnnnnnnnnnnnnnnnnnnnnnnnnnnnnnnnnnnnnnnnnntaaccatagaatttatcaaaattaagagattaaccttggtaatatcttttaaccngcgctggcctacagcacatt

SEQ ID NO: 4416 - DNA, 582 bp, Homo Sapiens
  misc_feature (572)..(572): n is a, c, g, or t
gctagagattggcgcccatgaatgctagtattaatgaatctgttaacaaaggaaagcttaggacactttgtgtttccccaaaagaatgttttaacttcagacacagaggccacgcagtggggatgtggactggaatggtattgcctgtgaactatgacctggcacaaagtagcttatcagtaatgtttgccaatactgtttttaaagttccagcagccagtcttcagaattgtcctctttcctgtggccatggccatgatgacattttgttcatgaattcatgcatgatttatttattgagcatctacctctgggaacatgagatttgtttgttttctccaagagcgagtgacccatggggagccatgggttcccgtgtccaagaccagacattctcagggagcatctgcttcccccatcaggaaggaacgagctttcatacctagtttaagttaacgaacccagtgagctatgaacagcctccttgctggctgttgttcctccctccagcctgtcctgcccactgcagctagacagagcttcctaaaagcttgctttcatcctgtcactgncttcaaacaa

SEQ ID NO: 4417 - DNA, 666 bp, Homo Sapiens
cggcatgtgctgtgacagcatctgtggggcctgcagtggctgtcctccctgcactggcacctgagccagaggctgctggtagtcataatacaggtgcccttgggtagggtgctgcccgacctgaagagctggtttggacagcccaccagtgaaaccagggtgaggctgctggggcacctgctggtagcgggaagggatagccggtgctggggactccatgggcttctgagacagcagctggcggagagcactgtcaggggctccatccatcactgctgactgagtgtgcagcacctgggccatattgttgacctgaattcgcaggttttggttggcaaacacctgggtgaaagagtccagcttgtgcaagacaacgctggtaagcttctgggtccggatctcgctggcctgggagtaggtgtattggtagccatcagtgggctcagcctgggctggtgccccccacatcatgtttgagttggccaggtttccacgtagctggacatggtttccaggccctgcatgacttccccaccctccctgcctcgaggtatccatttggccaaggtttttggagccaacaggcaagcccagaccatcccgtgtatcttgagggaagtggggggagactcgcgaggcctcaggggcatccattccgccaactgt

SEQ ID NO: 4418 - DNA, 786 bp, Homo Sapiens
catgtttgaaggcagtgtgtccctgtgtgctcaagggctggctgagtcctcctgggtggagtggcgccagttaggaggtatgggttcttgtctcaactctgtcagcctggaggtgctccatggtggccaaccctgtcatccacctgattcttgcttctacctccaggccagcagccctgccaacctccccatctgtcctctgcccctgtcacgccccacgtatctcggcccaatctctgctcagcctctcagagctgtttgttgtctcctgtttatgaccttctgttctcagctcttggcctttgctcatgcctcctcccacttggaaatctccctggagcagctgcgtgttgccctcatgcaggaaatccacatgggagccatccaggctgcccagctgtgggtccactgggctcctgcagcacccacctgagtggtcctgcatgttctgaagtgccccattggtgtgggaatcacctgctacttcttaaaggctaggacggtcttttgttcatttcgagggaagccgatggcacagctcccaagaactggattctggattccgacccagctgcacctctatggcctttccctgagcataacccctagctcccctgggccttgagtgtgcggtgggagaagcacctacccttagaagcacctaagaacatgatgagtaagcatgctctgtctaaacatgtaacatgttctacagtatgtaagggcttgtcttcattgtggacccctaccactgcctcaaacaatgggggtatcctctgagatcga

SEQ ID NO: 4419 - DNA, 199 bp, Homo Sapiens
ctgtaggccagcgtcatgagaactgtaacaaggttctcttatccaagctgattgtcaaataaccaacatgaaaatggggagtgaaataaaatgttattctggaaaccacctaagaagaacaaattcacaaatgtatactgacagcaagtttaattttgcaaatattaaagaggcagtgttgtatcaatcttgccaatat

SEQ ID NO: 4420 - DNA, 458 bp, Homo Sapiens
catcgtttgaagacactggggggagatgggatatactgattgtctttgaaagtctgagtcctttggcctggtaatggggtcaactaatccaggaccatatggattattaaaaagaggtatagaaataatgggaaaatgaaaggaaaagtggttgtcagaaagcaagcacatgtctgttactattacccggtacactcttgtgtttattgactggggtacagagtccaagtgagactcagagattccaaggaaaaaaatgcctgatgtcctctaaccttcagtccagagctctttctatcatgctgacttcttcacaatccttctgcttagtttcttctaaacctttctaataaaatcgtaggtcattttccattagagttgtaaaatagtagtaagtaatgaattcttagttgtattctactgctcattttcttgtgttaatcactgcctcaacaatg

SEQ ID NO: 4421 - DNA, 235 bp, Homo Sapiens
ctctcggctggatggtggaattggtgtaaaagccatagtacatcactgtgtccctaaaataacccaccccagtgaaaaactccagcccagtgaactggagggtgttcttttgggccacggtaaactgagggattattgatgaaagctgaagttcaggatgaatgagaaaattgttgaacttcaaaagccatctcagaaagttgaaataggagaggacgctggcctacagcacatg

SEQ ID NO: 4422 - DNA, 313 bp, Homo Sapiens
atggctttcccatttgcctttatagaactactttcattactttaaaggcacaaaaaccaaggagaaaaattcaatacttcttgaaaattatctaagttgacagttctcttgagttttagacagaaagggatacaaataaaggtttcttttgtacaattaaaaagtgatggtgtgtacttcaaagataaaaaaaagcttatttagcttcagatgttaacatacaatttcacacaatcctcaaaactctgggacaaaatgaaatgtcctatcaattttattttgtcactgccttcaaacatgggtaccggctcga

SEQ ID NO: 4423 - DNA, 223 bp, Homo Sapiens
tggtaggccagcggggtcagatgacacatggaacgatgggggacagcatgctgaactgggtgaggctctgtgtccccaccccagctcacagaccacatgtgctcacctagctggggtctctgatctcaggcaggatggatgagcaacctctaggatttaggccaaagaaggggctttgaggaacaagtggaacctggagagttgcgctggcctacagcacatg

SEQ ID NO: 4424 - DNA, 560 bp, Homo Sapiens
ttgaggcagtgagaaatggtctgtgcttacgaaatagtgagctgacggggctccttaggactgcatgaaggtgtaagaaagagaggaatcaaagggactttagataggccaaggaatgttttggcatgggtgaagatttgagtttggtttggatatggctacttggcgccaaagtaacacatggagatatggaagaggtggccagaaacaccaggctggaaatcagaagagaggccagggctggagctgtgaagatgtcaaggaaagctggcattaaagtcaggaggctgggtgacatcacaaaggagagggctacaacaagagagtctaagactgggcaagccagccagaagcacatttcctaccccaaggtcacggtgagactacaaaacaacccctgggaagtgctccacacagcgcctggccgcaaagggctcaaaggggagctctctgcccgtaggcctccccactgctccagctgaccaaacaccgcatgcaaaccctgccttgccaacaagactatcggacaggaacgggctcacggcaagctcccctggacc

SEQ ID NO: 4425 - DNA, 481 bp, Homo Sapiens
gtaagacttaggatatctattagtgttcacggttcgggcaagaggcctaaagggaagcaaattatgggttggtggtttgaaagtggccagaatgccttcaagcacaagtataagaccattagcaaatcacaaggaaccaaagcagttcatcttactcaacaaagctatgatcagttaggaacagccaaacggaatgggactggcccggggccggaaggtcagtaaaccttagcagttggtgtttctgagaatcaagaggctctccgtcccggagtgcaggccataagtccacaggttcggcggtcatgtttccaaaaacattcaggacaggtgagagaaacgaagcacagggcgtgtgtgtgcgtgtccttcccttggtctttagtcagcacctctaagtcaaaccatccccactttggctatatacagactaagtagaggagaacccaaacaattacaaggttccgtcgaagccgtcggg

SEQ ID NO: 4426 - DNA, 430 bp, Homo Sapiens
cctctcctcttccccaagtctacacttcactgggaactccactcaccaacaggtttcagcttcaactacgaactccactcccattaatgtgcccagtatgaagcgcccataacagcccgtacttcccctatcagagcgcttactctgcatatctgtctggttccccagcgaaatatgttacgtcctcactttgcatcatccatcagctttggcctcacttattcctccacatagtgtttgttggccggtccatctattaattgctcatctcaaatttgttatggctcatcagcaatagtgaagataagaagtacgaagactacagaatgcccctctctgcaccagatgcggtagtgatgttaaaatacatacatgacacagaactaggcctcaaatatattaaagtggggaaatgacataagaagttcac

SEQ ID NO: 4427 - DNA, 636 bp, Homo Sapiens
agaggactcaacggaacttggcattatgcaaatcatctgcatcatctccactgacattactcgataattcgcaaccatcgacactatccatttctagaactttttcgtcatcccaaacagagcgctctgtattcataaaaaaataacttcctacctgtctctccccctagtctttggtaaccttagttatactggtaaacttggttgtgctctctgtctgtgtaaatttgcctattctaggggcctcatataagtgtaatcatacagtatttgtcttttggggtctgtctgatttcacttagcgggttttcagggttcattcatgttgcagcatataacagtactgcgttcctttttctggctgaataatattccactgtatggatagaccccatttggtttattcacacatcatttggacatttggattatttctggtgtttggctataatgaacaatggtgctatgaacagttgcgtacaagtgtgggtgtgaacatatgttttcaattctctcattatatacctaggagtagaatgactgggtcgtatggtaactgtatatgttgtgaggaactgccaaactattttcccacgtccatgcaccatttcacattcccaccagtaagtaagaggg

SEQ ID NO: 4428 - DNA, 1024 bp, Homo Sapiens
  misc_feature (489)..(588): n is a, c, g, or t
  misc_feature (727)..(825): n is a, c, g, or t
gttttaaagtatgccttcttaccagcaatagttcattttaaaaatcatgccagatttttgccaagatcagtgtttcctcaacatgaagatagaaatagatttgtatagtgtgctcttgtacctctacatagattattatataattttgagcagttacacatttatctaaaggaaataaatcaactgtgaataaatgcatgtttaccaaaatggctgtttacagtgcatttagttctgatatttataaagatgacatttcacagaataactttaaaatagtttgaaattctatatagtttagacatcgatcacatctggagacaaaataaaatgtgcaatattttttatgtaggcgagctaacacagtgtacctaattgcagaattatctgattaatttgtaatagataagttgtataacattttcatatcttaaaatgttttttagatcaatcttgaagtgaaatattttcaaaataaaattctacagnnnnnnnnnnnnnnnnnnnnnnnnnnnnnnnnnnnnnnnnnnnnnnnnnnnnnnnnnnnnnnnnnnnnnnnnnnnnnnnnnnnnnnnnnnnnnnnnnnnnttgggcggccccccccgcccctccaaaaattttttaaaccttttctttgggggcggggccccaaagggaaaggagaaggggcccaaactggttccaaaggaaaccgggggcaaagaaaaggggctggaattcccccccnnnnnnnnnnnnnnnnnnnnnnnnnnnnnnnnnnnnnnnnnnnnnnnnnnnnnnnnnnnnnnnnnnnnnnnnnnnnnnnnnnnnnnnnnnnnnnnnnnncccccagggcgaggctccatatataaaaaattaggcccccgcccccggggcatattttttggagagaaggtggggggaaatttctataaaaactctttccgccccaaagggggaacccctttccacacacgggggtggggggaacacccgaaaatccccccgcgcggacaataacacccccttgtggcgcccctgtggg

SEQ ID NO: 4429 - DNA, 968 bp, Homo Sapiens
  misc_feature (299)..(299): n is a, c, g, or t
  misc_feature (604)..(615): n is a, c, g, or t
  misc_feature (627)..(818): n is a, c, g, or t
cgagaatagtagagggtgtgtgggtggcggggaagaagacacaaataacgtgcgcctcgattggtcgccccaccacgggggcgtgtttgtatggaggagagagagagagtgttttttatgattaataaacaaacgagtattttgggcgtcgggcgggtttgtttttcaccgcgcggggaagaagtttataaccctccggcgcgcatatgatatagtcgcttgtttttgcggcggcgcccgggcgtttgttcatattttggggaagccactattttgttgcggagggaggggtgctgtangggcggggggaggggacagcttttagataaaattaaaagggccccttctgttgctcgggggtatgtatagagtggtggcgagggaaaattgcaaacaaacgtctattcgggagagggcgcctccccaaattacaggaatcgcgcccggggcggggggtttttattttgtaatgagagaaggttctcccagagattgttgttggtagaatgcgcggttaattctccttatggaaacttctccttattttttttcaggggcgggccgctgttggaaaaaaggttttttaaatgaaggaattccaaannnnnnnnnnnncgccagaatagnnnnnnnnnnnnnnnnnnnnnnnnnnnnnnnnnnnnnnnnnnnnnnnnnnnnnnnnnnnnnnnnnnnnnnnnnnnnnnnnnnnnnnnnnnnnnnnnnnnnnnnnnnnnnnnnnnnnnnnnnnnnnnnnnnnnnnnnnnnnnnnnnnnnnnnnnnnnnnnnnnnnnnnnnnnnnnnnnnnnnnnnnnnnnnnnaatagtaataacctttatttaaaatagatttaatttaggaaagctcattttatatgagtttccaactaattattagagtcagaaacaaagaaaataaaatcagagaaaatcctctgtagaaaaaatacacaaagaacatttctacatgcc

SEQ ID NO: 4430 - DNA, 1055 bp, Homo Sapiens
  misc_feature (870)..(870): n is a, c, g, or t
ggcactcaaagtaaaggatcggaagaagaagaagaagaaaggacaggaagcaggaggattttttgaagatgcatctcagtacgatgaaaacctctcgttccaggacatgaacctttcccgccctcttctgaaggccattacagccatgggcttcaagcagcccaccccgatccagaaggcgtgcatacctgtgggtctattggggaaggacatctgtgcctgtgcagccactgggacaggtaaaactgccgcctttgccctgcctgttttggagcgtctgatttataaaccccgccaggctccagtcacccgcgtgctggtgctagtgcccacccgagagctgggcatccaggtgcactctgtcaccagacagctggcccagttctgcaacatcaccacctgcctggctgtgggcggcttggatgtgaagtctcaggaagcagctcttcgggcagcgcctgacatcctcatcgccaccccaggccggctcatcgatcacctccacaactgcccttccttccacctgagcagcatcgaggtgctcatcctggacgaggctgacaggatgctggatgagtactttgaggagcagatgaaggagatcatccgaatgtgttcccaccaccgccagaccatgctcttctcggccaccatgacagacgaggtgaaagatctggcttctgtctccttgaagaatcctgtccggatatttgtgaacagcaacacagatgtggctcccttcctgcggcaggagttcatccggatccggcctaatcgtgaaggagaccgggaagccatcgtggcagctttgttgacgaggaccttcactgaccatgtgatgctgttcacgcaaaccaagaagcaggcccnaggcagtgcacatcctcctggggctcatggggctgcaggtgggtgagctccatggtaacttgtcacagacgcagcggctggaggccctccggcgttttaaggatgaacagattgacatcctcgtggccactgatgtggcagcccgtgggacttgacattgagggggtcaaaacggtaatcaactt

SEQ ID NO: 4431 - DNA, 1170 bp, Homo Sapiens
  misc_feature (140)..(165): n is a, c, g, or t
ctcagacaccgtgtcctcttgcctgggagaggggaagcagatctgaggacatctctgtgccaggccagaaaccgcccacctgcagttccttctccgggatggacgtggggcccagctccctgccccaccttgggctgaannnnnnnnnnnnnnnnnnnnnnnnnnccctcaggggccaagccaacacaggctgctacgggatcccagggatgcccggcctgcccggggcaccagggaaggatgggtacgacggactgccggggcccaagggggagccaggaatcccagccattcccgggatccgaggacccaaagggcagaagggagaacccggcttacccggccatcctgggaaaaatggccccatgggaccccctgggatgccaggggtgcccggccccatgggcatccctggagagccaggtgaggagggcagatacaagcagaaattccagtcagtgttcacggtcactcggcagacccaccagccccctgcacccaacagcctgatcagattcaacgcggtcctcaccaacccgcagggagattatgacacgagcactggcaagttcacctgcaaagtccccggcctctactactttgtctaccacgcgtcgcatacagccaacctgtgcgtgctgctgtaccgcagcggcgtcaaagtggtcaccttctgtggccacacgtccaaaaccaatcaggtcaactcgggcggtgtgctgctgaggttgcaggtgggcgaggaggtgtggctggctgtcaatgactactacgacatggtgggcatccagggctctgacagcgtcttctccggcttcctgctcttccccgactagggcgggcagatgcgctcgagccccacgggccttccacctccctcagcttcctgcatggacccaccttactggccagtctgcatccttgcctagaccattctccccaccagatggacttctcctccagggagcccaccctgacccacccccactgcaccccctccccatgggttctctccttcctctgaacttctttcgcgacgtcacttgcttgttcgtgcgtctcctgcggacaactttacgcctctcgcctctcttgggtacctgcccattccttcccggctccctctctctccacccgattccggacccggcgtttggcgccggctccaaa

SEQ ID NO: 4432 - DNA, 1010 bp, Homo Sapiens
gggacatgaagaaagagcttcctgcaattcaaggactgtacaaagctgaaacgcagagattttcatattatttgggagactcagaaatgagcttttaaggttgtccctggacttgcgggtcaataagcgcacaatggtgaagaaaaggctgccttctagtgacacggtgttccggttggagactccgggcagcccaaggaaggccaacgtggaggcctcacgcagctccacagacagccccagctcggtgttcctcagctcagaggctgagaatggtgtggaggagaaaaagaaagcctgcaggtcgccaacagcccaatcccctaccccatctgtggaggcggactccccagaccagaagaaaatcattagcctatggtcaaaatccagttttgatggtgcctctttagcaagtgataagaacgactgtaaaacagaaagcaaaaatgaccctaagactgaaagaaaaaagtcttcatcttccagccagtacaaggccaatatgcactttcacaagttggttcttagtgtcccaaacggaggaaccactgaagcaaagctttacctgtgcctctacagaaaagaaatactataccaaggaaaagctccttggatcagaaaacctggatttgtttttcattcccaaagtctttggaaaaagacacaaagatctctattccagctttctccggtaaccctaataaagaaaaccaaaactgtcttctagtgccaaacgccctgatcatagcaacagtcacagacaggtacatattgtgtctccttactctccagagattccaatttacaaaactactaaaaatctgtggtgtggacacttaggaaaattccaagtgttggtaaacagtccccaatccattcttcctgctggaaaaacagtttccggaagcaggaaccgcctttcatcttgtggctcggggattcacatgatggaattcttcacgaccgggatggacggggttcaccaaagaaaggcacggactgggaggata

SEQ ID NO: 4433 - DNA, 414 bp, Homo Sapiens
ctctgatcccccatttatccaccccatgtgcctcaggactagagtgagcaatcataccttataaatgacttttgtgcctttctgctccagtctcaaaatttcctacacctgccagttctttacatttttccaaggaaaggaaaacggaagcagggttcttgcctggtagctccaggacccagctctgcaggcacccaaagaccctctgtgcccagcctcttccttgagttctcggaacctcctccctaattctcccttccttccccacaaggcctttgaggttgtgactgtggctggtatatctggctgccatttttctgatgcatttatttaaaatttgtactttttgatagaacccttgtaagggctttgttttcctaatagctgactttttaataaagcagttttatatat

SEQ ID NO: 4434 - DNA, 828 bp, Homo Sapiens
  misc_feature (49)..(63): n is a, c, g, or t
gggtacgcctaagctgttaccctcgagggatactctacagcggcgcccnnnnnnnnnnnnnnngaagaaaaaataaaacaatttaatgatggcttccttgatttacacacaactctaagacaagaggacaaaattttctctccatgcactggtacaacgaagttcagggacaagaggcaacccaagtacaggggctgtggtgttcagatccacgctcagcctcgagtctcatgttccaaccgaccgtctggctcagtgactgtggacactggggagaggagggactgcccagacccctcaagtgcaggtgaggggaccggcagcagagtatgcatgggcactccatgccccagtgcgagaagtgcacaggggacagcgaacaccagcttccagtgcaccctgaagacccagtgggctcagggggcccagctctcccatcagagctgtcctcagggctggagctggggctggggctgaggcgctggggctgggagggaggtggtgataaagaaccactgcagaaaggaacacatgctgaatgctgggccatgctttcctcccagacactgagttcctgaagacccagctttatcttccaagggtaacaacattcccaagactcagagctggaaggcggcaagagtggagccaggagagacagatcgcatccactcctgaggccgcctcgaatgtctccattcccttctggcctgccttccccctcccttaaaccccaaagacccaagaagacaacagagatcagagaccacatccctcttccctaatcaaatagccaagtacaacatttctaaagttagggagaaggag

SEQ ID NO: 4435 - DNA, 602 bp, Homo Sapiens
  misc_feature (398)..(509): n is a, c, g, or t
  misc_feature (571)..(571): n is a, c, g, or t
ggggtgtttctccggacttcgagccatggcggtgacggaagcgagcctgttgcgccagtgccccctgcttctgccccagaaccggtcgaaaaaccgtgtatgagggattcatctcggctcagggaagagacttccaccttaggatagtgttgcctgaagatttacaactgaagaatgcaagattattatgtagttggcagctgagaacaatacttagtggataccatcgaatagtacaacagagaatgcagcactctcctgatctaatgagctttatgatggagttgaagatgcttttggaagttgccttaaagaatagacaagagctgtatgcactacctcctcctccccagttctactcaagccttattgaagagataggaactcttggttgggannnnnnnnnnnnnnnnnnnnnnnnnnnnnnnnnnnnnnnnnnnnnnnnnnnnnnnnnnnnnnnnnnnnnnnnnnnnnnnnnnnnnnnnnnnnnnnnnnnnnnnnnnnnnnnncctggcctaggatgaataaatgactttcgatttagctgctgttacttaatcatttgttttanactgtttaaaaataaagaatgttttagcaga

SEQ ID NO: 4436 - DNA, 592 bp, Homo Sapiens
ttgctttttataccactttattccaacctgagcacctcaatataaaactaaacactggtgaaccgttttcctaattctgcattatcataaatgtacaagttctcctagcagtccaacacttaaatagattaaatcatctctgacacatggtagctttcatataatgaaaatacctaaaataattagtgcaatatactgaactgatcaaaataaaatgaactttggaaaggaaggctgcaagattgttactaacatattgcaatactttatgttacaaattacgggtacattgtttattatggttctagccatggaggaacaactgaagccccttcctgtcaaagggggagagagaaataattagctgttttagtaacagtacattttgtatgcttttaagcaactcttaaatattacagaaaagtaatacagatatggagactacaatgcagtaccctatttacagtacagctgaagatcgaatttaaaataatcaagtttgaatatacataattgttagtgcattgactatattatgtcaaaagggaacaaaagccccctccccaccccaaacaacaaaacctgtgtaatg

SEQ ID NO: 4437 - DNA, 470 bp, Homo Sapiens
tttgcaaatgaaactagacagacatttattttgtgtttgatttcactggttcaaatgtctacatgctggagtaaatccacttgcctctcttcagggcttttcctctgcagtatattaacctggccgaggatggcatatgccactgttgactcctggtcctccaaggcctaggaggctcaccccaccggcagggcctggagccatagcaaactcagaagaaggccacaggtacagtctcagtgacatcagacattgggctgattcctgaggcatcgctcctgtctcccaggacagcagggtctggctctctgataagtagctaccaggtcacaatcacatgaccactgcaaaagcatcagccccagctggtccaggctccagcaagtttcctctgggcagcatgttagaatgggctacctgcctttttgttttgatcatccagatctagcttcaaggggctccaaaatgtg

SEQ ID NO: 4438 - DNA, 480 bp, Homo Sapiens
caagagaggagcctgtggaagttagtgggaccgaccagctttggcattcgctgcgcagaggtgaacaagcctggggtgtacaccggtgtcacctccttcgtttctgatcttcactaagaacaaaagaagcagcaacttgcaagggcggcctttcccactggtccatctggttttctctccaggggtcttgcaaaattcctgacgagataagcagttatgtgacctcacgtgcaaagccaccaacagccactcagaaaagacgcaccagcccagaagtgcagaactgcagtcactgcacgttgtcatctctagggaccagaaccaaacccaccctttctacttccaagacttattttcacatgtggggaggttaatctaggaatgactcgtttaaggcctattttcatgatttctttgtagcatttggtgcttgacgtattattgtcctttgattccaaataatatgtttccttccctcaa

SEQ ID NO: 4439 - DNA, 933 bp, Homo Sapiens
ataaaaaatactgtaataaaagtacttataaacatactaatcctctttcaggaccctaaagttgcaggttagtaggtcttcaaggacaaatctgtaagtttcttatttctgtagtgcaagtaaaatttcactttttgaaactatagagagatccctttctgattagcctacagaacttaaagtgagggaaccatttcctctcacagacaaagaggcctgggatattaggactttggggtttgagagcatcatggggcagacagatggtggatggtctggacaagaagcgagtaagccactgcggttggtcatactgaagggaattgatggcaagaggatcccctgagcaagtcagaagttactctcatcagtcgttcatggtcacaacctgaggtactctgctgagtgggcaaggctgaagaagaggcctgtggaatgcagcattacctgctggacagagcagggcaggcagttctatgccttggagctcctgactgcagggactctgtccccacactcaagaaagactcagctcactcaatgagagaatgtgatttactttatagaacgtataatcaactttgttgaataatttgttctattaaggctgtctaaagtatgtgatgtcttcatcatagtatgaagtgttgaaaattaataacgagcctagtttaggaaaaagctgcttaaaactgtggctctaaaagagtaatcataaaataccttagataaaattgcactatggaattttcattgagtatgtttaaattattggcttgtctactaatacacatctgcttcaaaatgaacatatttcataaaattggcatcaattttaatgacgctcctggtatggaacctcagatataccctattggagacaatcctttgatcataaattctccccaactataaatcattttatgtctttaa

SEQ ID NO: 4440 - DNA, 413 bp, Homo Sapiens
  misc_feature (214)..(226): n is a, c, g, or t
tttttcttatgttaggctgatttataagtgctgctttgggcagttacacagtttgtttacaatgaggagttatttgactttgaacatactgtacatggcaattagaagttgtcatggcaaaagaaaaccacagctggcctgccacagccaacacaagaaccagaaaatggtagatgaaatgaaggaataaaggtggggtttattccttattatnnnnnnnnnnnnntaattcttcagcagtcttaacaaagacatcaagatacaaaattacaagtgttttgactccagccctgtccccatctcctccaagagcagaggtaggagacagttgaagcaaacaagcaattctgtaaaaattacctagaaaccctacaaatttgattaaaatctaaacttctataattttgcttttt

SEQ ID NO: 4441 - DNA, 1319 bp, Homo Sapiens
gctgtctggcccggaatttcgggatggcgcttgtcccctgccaggtgctgcggatggcaatcctgctgtcttactgctctatcctgtgtaactacaaggccatcgaaatgccctcacaccagacctacggagggagctggaaattcctgacgttcattgatctggttatccaggctgtcttttttggcatctgtgtgctgactgatctttccagtcttctgactcgaggaagtgggaaccaggagcaagagaggcagctcaagaagctcatctctctccgggactggatgttagctgtgttggcctttcctgttggggtttttgttgtagcagtgttctggatcatttatgcctatgacagagagatgatatacccgaagctgctggataattttatcccagggtggctgaatcacggaatgcacacgacggttctgccctttatattaatcgagatgaggacatcgcaccatcagtatcccagcaggagcagcggacttaccgccatatgtaccttctctgttggctatatattatgggtgtgctgggtgcatcatgtaactggcatgtgggtgtaccctttcctggaacacattggcccaggagccagaatcatcttctttgggtctacaaccatcttaatgaacttcctgtacctgctgggagaagttctgaacaactatatctgggatacacagaaaagtatggaagaagagaaagaaaagcctaaattggaatgagatccaagtctaaacgcaagagctagattgagccgccattgaagactccttcccctcgggcattggcagtgggggagaaaaggcttcaaaggaacttggtggcatcagcacccccctcccccaatgaggacaccttttatatataaatatgtataaacatagaatacagttgtttccaaaagaactcaccctcactgtgtgttaaagaattcttcccaaagtcattactgataataacattttttccttttctagttttaaaaccagaattggaccttggatttttattttggcaattgtaactccatctaatcaagaaagaactaaaagtttattgcacttctttggtgagaactatgttaaagtcaaaggggcatatatagagtaaggcttttgtgtatttaatcctaaaggtggctgtaatcatgaacctaggccaccatggggacctgagagggaaggggacagatgtttctcattgcataatgtcacagttgcctcaaatgagcaccatttgtaataatgatgtcaatttcatgaaaagcctgagtgtatttatctcctgagttaatcatgtga

SEQ ID NO: 4442 - DNA, 773 bp, Homo Sapiens
atggtgtgacaggcgcgtatttaattactggtttaaatggtgttgcttgattgtggttgctgttgaaataattaaaatttgattttttagaacgagatacttctcatgcttgaagagcgccctcattatatgctaaagggcctcaggtttttccttattgccattatgctgcagattctaatacatttgtctgaaaagatctaagacagaagggctgtttaataccttcccttttctcctgaacttcccctctcctctcccccatcaggagctaagtaggaaccccttcaccttgttaccatcagatttcatcaatggtctgtctttacaatgaaggaagtagtactgcattctgggcagaggccagtcctgaggcatgccttttcaaggacattgttactttagttacactggctcttctgttttaactcttatcccccagactctaatcctgttgctttttttggtccccatctcccacctttcatcatctgaaatccattcattgtaacttctggaactcagtcgttagaaaatcctttatattctcaatcttgtgaatgttcctttctttcttattccagctgtaacctagccttctccccaagaatgctacttcccttgcagctctctcaggtggtgaatttttcccttcttgcacaccttataacactgaactaggaggtgtgtggactaaatgtctgcttttgttccttattgtcacttcttgacctttattttccaaacttcagctttgattttgaagtagatac

SEQ ID NO: 4443 - DNA, 549 bp, Homo Sapiens
ctcagtcctaatttgaacaggtcaaagatgtgttcaggcattccaggtaacaggtgtgtatgtaaagttaaaaataggctttttaggaactcactctttagatatttacatccagcttctcatgttaaatatttgtccttaaagggtttgagatgtacatctttcatttcgtatttctcataggctatgccatgtgcggaattcaagttaccaatgtaacactggccagcgggcccagcaatctccatgtgtacttattacagtcttatttaaccaggggtcctaaccactaacattgtgactttgctttgagacctttcctctcctgggtactgaggtgctatgaagccaactgacaaagatgcatcacgtgtcttaggctgatgccactacccgatttgtttatttgcaatttgagccatttaaagaccaataaacttccttttttaaaatgtttgtggtgttacttgatgtttacaatgtaacatgtaacattcaaatgtatcaaatgaggcatctttaccaaacaactaaatcttttgagctctc

SEQ ID NO: 4444 - DNA, 688 bp, Homo Sapiens
gccatcgtcatagctgactctagaggataaacctaggtgcaaagagacctagactcccagccagggccaaacatagatcatttactcaccaacattggaaggacaggagtctccccaggagatgtatcagattcagctactagtgactcaacaaaatctaagggttcttggggatctggaaaggatcagtatagcagggaactgcttgtgtcctccatctttgcagctgctagtcgcaagaggaagaagccgaaagaaaaagcacagcctagcagctcagaagatgaactggacaatgtattttttaagaaagaaaatgtggaacagtgtcacaatgatactaaagaggagtccaaaaaaagaaagtgagacactgggcagaaaacagaagatcatcattgccaaagaaaacagcactaggaaagaccccagcacgacaaaagatgaaaagatatcactaggaaaagagagcacgccttctgaagaaccctcaccaccacacaactcaaaacacaacaagtcaccaactctcagctgtcgctttgccatcctgaaagagagccccaggtcacttctggcacagaagtccttccaccttgaagagacaggctctgactctggcactttgctcagcacgtctttccaggcctccctggcaaggttttccatgaagaaatcaaccagtcca

SEQ ID NO: 4445 - DNA, 355 bp, Homo Sapiens
ctggatacacattagtaccaccaattttatttatataagaaatgcctggtccactggacttttcaatttaactcagtaataattactgctgtttcttgacagaccagtgatatttcccccatagttttaaagtacaaaaaacagaatagttaggggaaaaaaatctcaagtataaataatgcaacctttaacctaccaagggtcactaaattgttaacactgattattataaatgattcaatttatttaaactaaaaagcattaattaaacatttcctcttccatttgggccaagggacatgcttaacaaaacacaaaaaagcaatagaagcacaaagttgtatgattttttcag

SEQ ID NO: 4446 - DNA, 478 bp, Homo Sapiens
acggcttcaacggaactttaagattccagtcatataattccaaaatatctctgaataggaacagtgaaaagagttcaagccctttcacaccaaaattctgcggcatcatctcttcaatgaaatgaatcgtgtagtctatgttgaatctaattactttacacacgtggaatattggtcaggggggcatgtgcaaacatagaaaatccttccaagatatactcgtgatcatcgtattctataacagttggcctgtcagttaaaaagttcgtaggcggggagactgtgatccggtagtggaaaagtctgccagcattgttggtcataggacgacagggcttgatggcctcttctccaggataaatgctgtgcctaattcctgtgcgtcttgcctttgcgctgcatttgcagagtggtccatcattcatctggcctggatcgttgtaccaagttccgttgaagcctcgggatcctcgagagt

SEQ ID NO: 4447 - DNA, 812 bp, Homo Sapiens
gaacacagcggtgtgagaagtgcagcaagccctgtgcccgagtgtgctatggtctgggcatggagcacttgcgagaggtgagggcagttaccagtgccaatatccaggagtttgctggctgcaagaagatctttgggagcctggcatttctgccggagagctttgatggggacccagcctccaacactgccccgctccagccagagcagctccaagtgtttgagactctggaagagatcacaggttacctatacatctcagcatggccggacagcctgcctgacctcagcgtcttccagaacctgcaagtaatccggggacgaattctgcacaatggcgcctactcgctgaccctgcaagggctgggcatcagctggctggggctgcgctcactgagggaactgggcagtggactggccctcatccaccataacacccacctctgcttcgtgcacacggtgccctgggaccagctctttcggaacccgcaccaagctctgctccacactgccaaccggccagaggacgagtgtggtaagacagggagcccagtgtgcgcactccccatctgccagcacacagcagtgcccagggggccctggcagcagcgttcttggacttgtgcagactgcccgtctctgtgcacccttcttgactcagcacagctctggctggcttggcctcttggcatggcttctctagctgggtcctacctgccttggcatccttccctccccctctgtttctgaaatctcagaactcttcctctccttcccctcagctttgcttttccctctaggaatatcgtgtca

SEQ ID NO: 4448 - DNA, 422 bp, Homo Sapiens
  misc_feature (50)..(58): n is a, c, g, or t
aggatcccgacggtccaacggaacttttcggtacaaataaatttaatgcnnnnnnnnnctgattctgtgaagaaggttatgggtagttggataggaatagcattgaatctataaatggctttgggtagtatggccattttaacaatattgattcttcctatccataagtatggaatgtctttccatttgtgtcatctctgatttctttcagcagggtttagtaattgtggtggtagagatctttcatctcccgggttagctgtattcctaggtattttattcttggggtggcaattgtgaataggattgcattcttgattaggctctcagcttggatgtcgttggtgtataaaaatgctaccatattttgtatatggatttcgtctcctgaaagttccgttgaagccgtcgggtaccgagct

SEQ ID NO: 4449 - DNA, 600 bp, Homo Sapiens
ccaagatctttgagcatcaccctaaaaaagcaaaaccaaaataatccgttgactgtgtattaatgagaattttcaacccagccaccatttttatgagttctatgcttgatctataaggtcccggagggcagtgctaagtattttcatttccactgggcacttaacactactggaactatctacgtggcaaagtaaattcgtgtgggaaatactgatgttataagcttttcctagaaggcaaagggaacttgaaattagaaaaccccagaaacagtcacaatggctaaactcacttcttcatctaaaaaggatgatttagactagatcactgttactcaaactttagtcattctcaaaccaccttcatggctttggccacattcatgcaccactataatattatatattatcatgtattttaaatatactgttatgcaccacataacaacgtttggtcaatgaggaaccacatatacaatagtggtccaggaagattacaaatggagctgaaaaattcctatcgtctagtgacatcatagccgtcattatgtcacagcacaacttattacttatattcgtggtgatgctcaaagatcttgg

SEQ ID NO: 4450 - DNA, 428 bp, Homo Sapiens
aaagaagaccagcaaaatgaatgattatactttaaatgaatgtgaggactgatgcttacagattcagtgtcattccaggcagaattctgacaggatttgttgttaaatgtggcttgctgatcctaaaattcgcaagcaagacttaaagagccaagagtaaccaagtcaaggtgataaataaagtcttgctaaacgtagcagcattaattaagtgcagtaattaaaacagggtgctattggccaggataaaaataagtaggacagatcagtaagcccagaagctcccaaacattagtggaatcttagtgcaagacagaaatgtcattataaatcacggggaaagatactgtattcataaatagttccagggcaattgattacccaaaagggggataaggggcggatccctaccttacaccactgccttc

SEQ ID NO: 4451 - DNA, 519 bp, Homo Sapiens
cccggttgaaggcagtgggacatggtgcttgaaagttctatataaaggggaagcacagaacactgtcccagatggatatcagcagagtgtcagagctcaaacctctttggagatcatcaaacttcccaatcaccaacgaaagaactaattcctagagagaagtgacttagccaaagtcacccaaagtttattggtagagctgaaactcccaaactggatttttgctactatagcaaattgcccaggaaatataccaacgagttagagaaaagaagaaaagagagtactgataataatgtttgcctacagccatccctaagtgctgccttactgtcctttcccagcttctgctctgattttatctaaatccaaggaaggctgggtgcagaaacaacaaagagccccagacactcaggagagtagtaattctccacttgacccccctctcctgaacatgataaatacacttaactatggaactttgctgaccccctcacaccaacaaaatgactcaaactg

SEQ ID NO: 4452 - DNA, 641 bp, Homo Sapiens
tacctcttggtctagcgtgatgtccagtgtatatccggcgtggcagatggatcgcgacaagtctgggcaaaacatggtcatacatggatgaaagttaggtcagctaagttaacaccatcccacgaaaagtgaagtgaaaacaagagggagaatggccgggaaggaaggggacactcgggccacagtggcccaatgagggctgtcgcctacactgcctggggtcttctgggccatagtgtccactgtgaagcgcagtgaatgacgttgctcttccctaaccacagactcttcagtcatacacgtaccggaggagcctgttgggaggtgattttccgcaggtcggccctggaaggccctggccagccaccactgttagataatggggttgatgcagcagttgatgtaggcaaaggagacaccacagggagtccagctttattcagcagcaggaaggtggctgacgatggctccaggaaggacatcaattatgccaccgtcacctggtagggcaaaccagaagataaagaaactggccaccactgccaccacacaccattgagtgtcattggtggaccgcgtggccctgcggctccacgtccggagcaggatgaaagtgtaccaatcgtgaagcgtgagtagag

SEQ ID NO: 4453 - DNA, 571 bp, Homo Sapiens
gatcaaggatctccaaagatctttgagcatcacctcttttacttggggtagtcatgtaggcgcccccttcctggcacataacaaaatttccagactcccagaaggaaaggtgttcagcgtaaactgtattggtttgcatgaacggtttaggcacagtgaaccactgataccaggtagggagcggtgggaaccttcctgaattccaagttcccagacaccagccaaggagccgaccttggaagcaggcctttccaagggttgtagtttcagtctcctaggcttacacttctctgcacatatggaaactgggttggttatgcagggttctctgagaagctttctgtaaggagcagtgtcgttttggcttacccaggatttatcccccctttcatttatttcatttattcaccagatagttttagtactgttttaaggtatgggggatataccaaggaataaaacaagattcctggagggacagggcaacggacagcaaacaatagacacaatacgatcgtgaggtatatagttaatgttggtgatgctcaaagatcttgggggtaccgagctc

SEQ ID NO: 4454 - DNA, 1235 bp, Homo Sapiens
  misc_feature (568)..(569): n is a, c, g, or t
  misc_feature (571)..(582): n is a, c, g, or t
  misc_feature (584)..(584): n is a, c, g, or t
  misc_feature (586)..(586): n is a, c, g, or t
  misc_feature (588)..(588): n is a, c, g, or t
  misc_feature (590)..(665): n is a, c, g, or t
  misc_feature (689)..(690): n is a, c, g, or t
  misc_feature (702)..(703): n is a, c, g, or t
  misc_feature (705)..(707): n is a, c, g, or t
  misc_feature (709)..(715): n is a, c, g, or t
  misc_feature (727)..(741): n is a, c, g, or t
  misc_feature (791)..(832): n is a, c, g, or t
  misc_feature (873)..(934): n is a, c, g, or t
  misc_feature (1042)..(1051): n is a, c, g, or t
atgacctgtcactataatatactgtatgtttacattttatttaaatttaatctcttatgtatagggtgataaccttccccagaaacaacagtgattgcgattgttttctagaaacttctttaaagtgccacatttggcagtacaaatgagtctgagtgtaatagcccagagatttatatatagttgaatgtctaaaatggtaaaatgtgccactgtgtcaagttacagtggcttatgtttttcatagtaattcaaatgaacttcctatttttgatagtaaatgtcatttaatagtatacttgccatttgagcctcactgcaaaattagtgcagaggagaaaacaatttttaatgtaatcttgattttacctcatatactgtacattccaaaaactctaaactttttaaagattatagatacactaccaaacatatcaccttaaaattgtataaggctgaatgaacttcatacaaatgaaaaaaatctcataaaaatacataaactatgtagcaaaagtatctgtaaaatccatggaaaataaaagttgtatcattctttttgaaaaannannnnnnnnnnnnancncnannnnnnnnnnnnnnnnnnnnnnnnnnnnnnnnnnnnnnnnnnnnnnnnnnnnnnnnnnnnnnnnnnnnnnnnnnnnaaaacccaaaacaccatccccaannccaaacccccanncnnncnnnnnnnttggtttggcgnnnnnnnnnnnnnnnaaaaaaattttttatacaacctttttgtggggggcgcgccccccacaggnnnnnnnnnnnnnnnnnnnnnnnnnnnnnnnnnnnnnnnnnncccccccgaaacaaaacaaggggcgggggacccctcccccnnnnnnnnnnnnnnnnnnnnnnnnnnnnnnnnnnnnnnnnnnnnnnnnnnnnnnnnnnnnnnggagctcttcgggggcttttatttggggtgtttatatccaagaggggggccccccggggtgtctcctcctttaatttaatttatgtggcgccccgcccgctggggtannnnnnnnnngagaagaggggtggggtggtatatttcaataaaaaaacttccccccgccccgcgggagagaccctccccctaaaacaacgggtgttttgaaaccccccctttataccccgcgcgcgggggaattaaacacccccttgggggccccctctggggaaaataaaatatttctcccccccgcgcggag

SEQ ID NO: 4455 - DNA, 888 bp, Homo Sapiens
gggggcacagcctaactatggagacccagggctccttcctgctgcactaggcctgtgctctccctattgccttcaggtggtgtgatcccggcttcctcacagagcccttttttccttctgcccagctccatcccaccagagtttctacccccgctgaggcatctcctgggcacagaccaccacactctaagccggctggcctgggagttagggtcctgcccacctcacctgggagttggggtcctgcccacctggagtttagcacgctggtcgctcactttgctttggtctgcacacctggtgtgtgcatgtgtatactgcttgtgccatctgtgtacccctctcccctggagtacacttgtggtcacactacagtggggacatcaagaatgcaatatttatggattgctgcatgattcttaaaaatgaataaaactgtttacaagggaaagagagctaactgcaaagtaaaaaccccccaaacacaaaaactcaaccttgtcggccgcctccggccctcaaaaaactttcctaaacctttcctttgggccccccgggccccctaagggtaagtgaaccatggcccataacctgtttcccctaagaagatccctgggccaatggactattggctttgggatctctcccccaaaataaaaaacccccccgggcgggacaacccgaaacggtgtcttagaccaaaatccacatatgggaatcttcctgaagggccaattactggggaaccaatccaaacagcgaggtccccaggcgaaggctctcaatattacaaaatttaggcccccgccgccctgggcaaccctcattgcgcaaataaaccgggtgggtaaattctcatataaaccacatctctggccacaaacatgg

SEQ ID NO: 4456 - DNA, 830 bp, Homo Sapiens
  misc_feature (534)..(580): n is a, c, g, or t
  misc_feature (582)..(603): n is a, c, g, or t
  misc_feature (605)..(605): n is a, c, g, or t
  misc_feature (607)..(612): n is a, c, g, or t
  misc_feature (614)..(662): n is a, c, g, or t
  misc_feature (664)..(679): n is a, c, g, or t
  misc_feature (681)..(682): n is a, c, g, or t
ggaaggattttagatcttaatgggttcgatggtagggaatacggaaaggatacactgctaatattgtgtctaacaataaagcaaacaactcgatgctgtaagaagacaagctgtttgagctttcaaacacacatgcacacagcacaattcagaaatacccaggaggattcctgcaggcttaacagttggcatcgtactgaaatgaaacgtgtattaacaagaaaatgtcaaacttttggggaaacaaattttctgttacttcccacccaactaaaagggaagataaaaccatcatcaccagaacaaaacagattttctccaaacaagtacaatgatagtgccgggttggcagttaactctttcaccctactaaattcaagagctcatctccaccctgtcctgtatattttctacatttctattaagaggctacttggtagtgtcagcgggcatcttttacaccttctagtagctcaagctagtaaaaccttgtacttctctattgcgccgccattaaaagcagcattagtgccnnnnnnnnnnnnnnnnnnnnnnnnnnnnnnnnnnnnnnnnnnnnnnncnnnnnnnnnnnnnnnnnnnnnncncnnnnnncnnnnnnnnnnnnnnnnnnnnnnnnnnnnnnnnnnnnnnnnnnnnnnnnncnnnnnnnnnnnnnnnncnncctttgggggcggctcttttccccctaaaaaaatttttttcaaaacatttttgtggggccgccgcggcccccccgccgaaagaaacacgggcccatattatcgttttccacagaaaaaacccgcgcaaaaaacaagaggggttgaatc

SEQ ID NO: 4457 - DNA, 1461 bp, Homo Sapiens
  misc_feature (500)..(518): n is a, c, g, or t
tctaatttagaaggttgtttacaaaccctttggaaaggaatcttttatttcccaatttaaaaggggtttggatttccttaagaagaggcaaaatttttttgtgtgggacccatgcattaaaaaatttaaatgggattttccctagggggagtttttataaaattaaaagggttcaaaaactggaagcttttttaatttagggctttttcccaaatccaaggattcaatttcttacgcacgaatatctagggccaggggggaaagtggaaaatgaccctcagggaagctacgggcacaactggaagctttgtagaaattaaacatattcaaggagcaagaaatgaactttcagcagtctaaattttctaaataaccaatagttgccaatctaaaatggcagagaagatgaaatttgataaactgaattttttttaaaaatccatttaccctacaggtttgcatttgtttgctgaaatttacctttttttagttatatatannnnnnnnnnnnnnnnnnnaatttctgccaataaattctaaattacaaaggtaagagaaaacctagtacattactaaatatataaagtatatgttctgattatgtatacttgttctagtgtcaagtctttttaagtgggtttttaaaagtttgttattggacttgaatggatttgtgagactaggttaattatttttgaggtcttatcctaaaaggcatctaaggtatcatgatatggagtatggtgattttataacattttttatcagaatggaaaaagaactgtttaaaaagtattgatacttttaaatagttggtttttttgcttactctggtaatgattttctacaaatacataataaattgtttttttgattctatattctgtatgcagttgaatatccattacttattctgctgtgcctttaaaagaatggaatggtttacaggcccccttaaaatattatttttaaaacaaccttctgaagatacataccgaagtttttccaagaagattttataatcaatttaataatgtataggtttatcagattctataatagtatagttattaaggcaattttatgttagagactattttgtaatgtagtgagtggtacctttataagaaaagtgactgccaatatatttttatagctgatctttataaattctaatgttgagtttttgaatgattattttaaatgtttatatagtttagtaaaatttgcatctcaaagtatcattcttatattatgggacgttttcagattggctaatattttgcattgtaaattttgtatgcagtttatctaaaattcaaaaatactgtcagtacaccagcgtttaacatctatattccaatttgtatacagtttaaaattgtactgcaaaactattgtgtgctcttacacagtatgcatcatattgttatctgtgaaattaaaggacatttgatagtc

SEQ ID NO: 4458 - DNA, 550 bp, Homo Sapiens
ccatggcctatgccaacacgctgctgcagctaggaatgatgtgaggtgacgggcggggcggcctgcatcccagggccggtccaatcccaccggacccaggccctgggctaggggcagagcaggccccgccccagggcaatgttggacccccttttactttgtaaagtttgtatttattcccctttaggtttgcagagggggtaggggcagagtcaggggctggccagagggtctgctccctggacagagaggaaggaggtggagcagctggggctgggggcacagcctgggcattctgtggggaggccgtcctcggggtggggtggggccgagtggctgccctgcccccctcatttgcatggctcctcccccactcaagcaatagggccccgccataggaagacccccagagagagggtcagcaggggggccccgcctgcgcctcccctcctatagccccatggtggggctaggctggggctcacccccctccccagctattttatgtctgtaattaaatatgttaaaataaagtcattatcggaagtca

SEQ ID NO: 4459 - DNA, 2028 bp, Homo Sapiens
  misc_feature (1881)..(1881): n is a, c, g, or t
  misc_feature (1906)..(1906): n is a, c, g, or t
  misc_feature (1942)..(1943): n is a, c, g, or t
ttcaacaggcttcagatacaacagcttgcatgcagaatgtaagcggtttggaaaagcatataatcttcgatcagtggccgtatatggaggagggagtatgtgggagcaggccaaggcccttcaggagggggcagagattgttgtgtgtaccccaggtcgactgatagatcatgtgaaaaagaaagctaccaatcttcaaagagtctcttaccttgtgtttgatgaagcagatcgaatgtttgacatgggatttgagtaccaagttcgatccatagcaagtcatgttcgtcctgacaggcagactctcttatttagtgcaacttttcggaagaagattgaaaagttggccagagacatcctgatcgaccctattcgagaggtgcagggagatattggagaggcaaatgaagatgtgacacagattgtggagattctccattctggacctagtaaatggaactggcttacccggcgtctggtagaatttacctcttcagggagtgtcctcctctttgttactaaaaaagccaatgctgaagagctagcgaataaccttaaacaggagggtcataatcttgggctgctccatggggatatggatcagagtgagagaaacaaggtcatttcagactttaagaaaaaggacatcccagtcctggtggccacagatgttgcagcccgtggtctggacattccttcaattaagactgtcattaactatgatgtggcacgagacattgatacccacacgcataggattggccgcacaggaagagcgggtgagaaaggtgtggcctataccctactcactcccaaggacagcaattttgctggtgacctggtccggaacttggaaggagccaatcaacacgtttctaaggaactcctagatctggcaatgcagaatgcctggtttcggaaatctcgattcaaaggagggaaaggaaaaaagctgaacattggtggaggaggcctaggctacagggagcggcctggcctgggctctgagaacatggatcgaggaaataacaatgtaatgagcaattatgaggcctacaagccttccacaggagctatgggagatcgactaacggcaatgaaagcagctttccagtcacagtacaagagtcactttgttgcagccagtttaagtaatcagaaggctggaagttctgctgctggggcaagtgggtggactagtgcagggagcttgaattctgttccaactaactcagcacaacagggccataacagtcctgacagccccgtcaccagtgccgccaagggcatcccaggctttggcaatactggcaacatcagtggtgcccctgtgacctacccgtctgccggagcccaaggagtcaacaacacagcttcagggaataacagccgagaagggactgggggcagcaacgggaaaagagagagatatactgagaaccggggcagcagccgtcacagtcacggagagactggcaatcggcatagcgatagtccacgtcacggagatggtggtcgccatggagatggataccgccatccagaaagcagcagccgtcatactgatggccatcggcacggggagaacagacatggaggaagcgcaggccggcatggggagaaccgggttgcaaatgatggtcggaatggggaaagcaggaaagaagcttttaatcgtgagagcaagatggagcccaagatggaacccaaagtggacagcagcaagatggacaaggtggacagcaagacagataagacagctgacggctttgctgtcccagagccgcctaaacgcaagaaaagtcgatgggacagttagaagggatgtgctaaagcgtgaaatcagttgtccttaatttttagaaagaattttggtaactnagtgtctccaggggctgggttgggngtcccaaagtggtaaaggaccccccctggcccttanntgggagagctgggagccttgggagaacattaaccccctttcattcagaaaggaaaatttttccggaatgtttttcctttggggaa

SEQ ID NO: 4460 - DNA, 666 bp, Homo Sapiens
atggaccacaagccgctgctgcaggagcggccgcccgcctacaacctggaggccggccagggcgactacgcgtgcggcccgcacggctacggcgccatccccgccgcgcccccgccgccgccctacccctacctcgtcacagggatacccacccaccatcccagggtctacaacatccacagccggaccgtcacccgctatcctgccaactctatcgtggtcgtaggaggctgtcctgtctgcagggttggggtgctggaggactgcttcaccttcctgggcatcttcctggccatcatcctcttcccctttgggttcatttgctgttttgccttgaggaagcgacgatgccccaactgtggagccaccttcgcttaaagggaacaccaggcccggctttcctacacccagctctctttttctaatgtaaatgttgtgtacaatagttttatttgattaagcttcaggactgttttgtaaagcgaggtgggaccgatgtggcacacgccagctgcggtttcccggagcgtggagaggcagtgctgctgctcccgcccgaggctcatgacaactcaataaagcactgcttttattttttgcagtcttcaatttgagaaaggtgagaaataatgttttcaataaatgagattcataccattaaaaaaa

SEQ ID NO: 4461 - DNA, 1089 bp, Homo Sapiens
  misc_feature (371)..(371): n is a, c, g, or t
  misc_feature (378)..(406): n is a, c, g, or t
  misc_feature (753)..(753): n is a, c, g, or t
taaaacaagtttacatgtgcagagttagaaaatgacatgttcaattctgtaagtggtgactttttgagcacctttcagtattatgtatttgtaaaaaccattgtttttggatataaagctaataagcactttaaaaaggaaaaggcagcctttactattttttctggttgagtcattgctctttagacctagcatcagcaatagatttcaaagataagtattaagcgctaccctaaagtgtgtaagtttttcattttgtcatattgaaaaatgatttgcatagtactgaatgttgacacacagcttatatgtatttacaagaatatctttaagtgtttttttgacacattaaaataaaggaaataaggaanaaaaccnnnnnnnnnnnnnnnnnnnnnnnnnnnnncatgaccacccgccctcatcccctcacaaaagctattctaaaccaattctctgtgggaaccacggccaccacatagttgaaagtggacgcatgcataccaggccggccaatccgttgggaggaccctctggctccctgccccctggggggcattaaaaacatactccaacccaaatgggcaacaccccgccccgctcgtccaaaaccccgaaacctgtctttacgacgccacaaacccccccacaggggccactcccctcaaaggggataaaatataagggggaaaatctattattacaaacaatggggcgagtactccacatggcctgtaagatcccccgactttnttcttttacaatctttatgtgcctgtcttgggtccctcttgtgttcctcactccaccttactctacccagtaacaccgcgcggcggcgtgaaacatcaagactctaacggcaccaatcctcgcaacacaaaaacaatggcaaaacacaccctcactgccctcataaaagcccctccgaccacatctctgagacgcccgcgaagagacccgccaccagcgaagcaccaactcactcgatgaacacacacaacgacggacccgacacaggcccacaataatacagacgtccacgagccccctattgctgacaattacatacctttaacgctccgcccc

SEQ ID NO: 4462 - DNA, 925 bp, Homo Sapiens
  misc_feature (79)..(79): n is a, c, g, or t
  misc_feature (233)..(271): n is a, c, g, or t
  misc_feature (315)..(335): n is a, c, g, or t
  misc_feature (367)..(480): n is a, c, g, or t
cggtgggggtgtcgcgggtgtggagtccggccggcctgtaacgggggcccgcgtgggaggtgctgtgtggtagttgccngtgtggtggtgtcccagaggagaggccgtgtggcggtttgcgcgcgcgggtgggggttttgtgtttttgtgtggggtgaagagactggggggtccctttgtggttcttggcggggaggatgggttttctgatggggaccgagcggttttggacnnnnnnnnnnnnnnnnnnnnnnnnnnnnnnnnnnnnnnnagaagcgtaaggaggaggttgttgatggaggaagtttttttgannnnnnnnnnnnnnnnnnnnnccgacacgaggttgtttatggttttgcgctcnnnnnnnnnnnnnnnnnnnnnnnnnnnnnnnnnnnnnnnnnnnnnnnnnnnnnnnnnnnnnnnnnnnnnnnnnnnnnnnnnnnnnnnnnnnnnnnnnnnnnnnnnnnnnnnnnnaagttatagcacaggttattagctagaaatgaattttaacaggccctgtctcagtctgaatgaggcaaatttaggcccacatcattaggtatttcacaacttaacacctaaaattttaacataaatttacaaaaataaggcttattttaaagtcatctggagaaactgttttacaggtatcttaactttatttagctctctgtagaattaacatctttgcaaatatattattcaaccaagcatttgccataaagataagcatcaactttcccattggacaagtgatagtgttcaagctacttgacttgtgaaaaacaaaaaaccaccatgacttctcaacaaaaacattttaaaatgaaatatgctcaggctgataaacaaacaagatattaaaatggagactgacattgaactacatagtcaacttgaaaaacacaagaagacc

SEQ ID NO: 4463 - DNA, 737 bp, Homo Sapiens
  misc_feature (490)..(686): n is a, c, g, or t
ctcaccccctcttggggagggagttctgggcctggccaggtctgagatgaggccatgcccctggctgctcttatggagccgagatccagtcagggtgggggcgctggagccgtgggagcccggccagggcagggggctcgttgctgtggcaccccctctctgccagcaccaagagattatttaatgggctatttaattaaggggtaggaaggtgctgtgggctggtcccacacatccaggaaagaggccagtagagaattctgcccactttttataaaaacttacagcgatggccccaccaaggcctagacacggcactggcctcccaggagggcaggggcattgggaatgggtgggtgccctccagagaggggctgctacctcccagcaggcatgggaagagcactggtgtgggggttccaccgagaaggggacctcatctagaaaagaggttacaaacctaccattaaactatttttcctaaaacggnnnnnnnnnnnnnnnnnnnnnnnnnnnnnnnnnnnnnnnnnnnnnnnnnnnnnnnnnnnnnnnnnnnnnnnnnnnnnnnnnnnnnnnnnnnnnnnnnnnnnnnnnnnnnnnnnnnnnnnnnnnnnnnnnnnnnnnnnnnnnnnnnnnnnnnnnnnnnnnnnnnnnnnnnnnnnnnnnnnnnnnnnnnnnnnnnnnnnccccaaaaggaaaggaaaaggggccaaacgtgttcccaaaaaaacccgggc

SEQ ID NO: 4464 - DNA, 687 bp, Homo Sapiens
  misc_feature (60)..(73): n is a, c, g, or t
  misc_feature (84)..(84): n is a, c, g, or t
ggataacaaatgtgactattttaattattttggtggcagggagttgttttacatcccccnnnnnnnnnnnnnngccctggttcnaaattcattggtaacaaatatgctaactttctgaatcaaaatggagagcctctcaagaaaaagagctatgcagtcagcaatgacttaaattagtcaggatagcaggcatctggggttaaggctgtttccaccattttggtctcaccaccatatacgagtgggaccacagctgtgtagcacttgtttctgtcataagtgtagcaggtctctgtagcactgtcttcatcacagatattgctctgggtagcagtaactatctgattatccagctccacttctgtaggatcacattttttacagaggtcagacaaatggtacacaaatctggttctcaatggtgaggtgggatcagagatattctccctgttgttcagaggaacaataattcggatgtttctctccacaatgtcctcattaggatcttcggaagaacggatgatcctggaagtaatccgggcacacttacatttgttgtcaacaagaacaatcctttcatcttcttgggctttcacatgaacagccttaataaaaaccgccaggactccccagaaaagcaaatggttcttcatcttgacttcacttcttctgaaaaactggagcaaa

SEQ ID NO: 4465 - DNA, 951 bp, Homo Sapiens
cacccggacatctctagtccaccaacaccacggggatctctggagatgaaggtggagctcatgaaggacttcagcatttgggtccttttggcaacatccccaacatcgtggcagagttgactggagacaacattcctaaggactttagtgatgatcaggggtacccagaccctccaaatccctgtcctgttggaaaaacagcagatgatggatgtctagaaaacacccctgacactgcagagttcagtcgagagttccagttgcaccagcatctctttgatccggaacatgactatccaggcttgggcaagtggaacaagaaactcctttacgagaagatgaagggaggagagagacgaaagcggaggagtgtcaatccatatctacaaggacagagactggataatgttgttgcaaagaagtctgtcccccatttttcagatgaggataaggatccagagtaaagagaagatgctagacgaaaacccacattacctgttaggcctcagcatggcttatgtgcacgtgtaaatggagtccctgtgaatgacagcatgtttcttacatagataattatggatacaaagcagctgtatgtagatagtgtattgtcttcacaccgatgattctgctttttgctaaattagaataagagcttttttgtttcttgggtttttaaaatgtgaatctgcaatgatcataaaaattaaaatgtgaatgtcaacaataaaaagcaagactatgaaagcctcagatttcttccagtttaaaatggtgtctgaggttgtactattttggccaagtctgtagaaagctgtcatttgattttgattatgtagttcatccagcccttgggcattgttatacaccagtaaagaaggctgtactcaagaggaggagctgacacatttcacttggctgcgtcttaataaacatgaatgcaagcattgg

SEQ ID NO: 4466 - DNA, 733 bp, Homo Sapiens
aaaccctcccatggccaaggaaccccagagtcacatgagatagggtggctttcgggacagggggtcagaggaatggtacatggatctcagcccctgatggacacggaacaggtgtggtcagaacctcccaggattctgcatccaggatccagtctctatagaggttatggatcattccttcactcattccccccttcatgagagagctactgagcaagcgtgtgtctcactttgggcctctgttggcacagggtgtgagtggggagagaaagcgaagtcctttcctttatccttccgtgggagtgacactgacacatcgggaaacacaggatttgaggtcatgtgagggggctgtggatctcagggagaggacagaaccggtcagagaggaactcttaggtgtgtcaattacataaagggagaaatgatgccaagttaggagaagcaatgtgtgtgatgttagtaaatttagaaagcgctccctgcccctagttcctgtgcagagttaggcaaaaagaggagaagcctcaaaacaggcatgtgaaaggttttcttcctctcctatcaacctcagaaaacacaactagagtttaagtttttgtaaccgggtagagtctaagtgagacgccagtggctggttcacttctcagtccaagggactccaccttatgacaatggcatcatcatgaggacacaggtgtaagtggtagagcagccgggtgcgagcagagta

SEQ ID NO: 4467 - DNA, 418 bp, Homo Sapiens
  misc_feature (72)..(130): n is a, c, g, or t
cagaaaaaatatatataccctgtgaacccgaatatggaattcagattgtttctgccctcagtatcatacttnnnnnnnnnnnnnnnnnnnnnnnnnnnnnnnnnnnnnnnnnnnnnnnnnnnnnnnnnnnctttaaaggtgcgtttttgctgtgataaatgaatacggtactctgaaggagaaaaaagtttctcaaatgagcttaaactgcaagtgatttaaaaattagagaatataattcttaaagctattgaaagtttcaaccagaaaacctcaagtgaattttgtatgtaaatgaaatcttgaatgtaagttctgtgattctttaagcaaacaattagctgaaaacttggtattgttgtagtttatgtagtaagtgacttggcacccatcagaaaataaagggcattaaattgaa

SEQ ID NO: 4468 - DNA, 1488 bp, Homo Sapiens
  misc_feature (767)..(807): n is a, c, g, or t
cggtacccctcaacgctttatacttcagtccatgggtgtgacttggtccttaagtcaggtcactatctgcctcccaccctgggggcaggactgaagtatagaagagcatcatggctgtgcaggaggctgtggtttgaaaactgagcccagagggcactttcagctgccctcaataatgtgaatggattagtgctaggagccaaggagcaggactggattatctcatctgactgtgtgcagaatcctgttgaatgtccctgttttctttggttgggcagtcagagctctgctatggtgaacatccagactgtcaccactttctgtctgccgctcgaaagggatagtcctttccactcggtcccctttggatcttcttgacaacaggagcagtccttttattgttagaagtcagagaaagacctccagaatctcctgactttagggaatggtataggggaagatgggaagtaagagtcacatatcaaaactaccctccactttattccctgagcgagggtttatgaagtataaaggggtgggagccccgaggtgagcgggaacggtgctgctttatttgaaatgttttcttacctcattctgtgccccagtagggggtccagcctcatctgtctggcttggccctgtgttcctcctgtcccctgctccactgcctatctggtgccccaggtgctgcttgccactccagctgtcacattgaacagtttcaattcagctcttaatgctcctgcttccgaagcctgcccaannnnnnnnnnnnnnnnnnnnnnnnnnnnnnnnnnnnnnnnnccctggttttggtagaagactcagaggagaatctttcttatggctccctctgttgagattggaattggaagagaacttaatttttggtatttaaaatgcagtgtcatgcctataagcatttctcctatataggactgctttgctagtgtgccctcttgctgtgtcttacttcataaggagttgtatcttcccacctccatttcaatactgccggttaggacctaagtagaagagcagtaaaggctgattgacacacagggggatggagttggtccttgtccattctctcacccttgctgtgcatgtatcaatccttatcccagaaggtactatttagactgtatagactgatttagattacatactttagaggattaaggaaaccatagagtttgggccttggaactgttactgccttgtcctagagttgtcctgatcaggcttggggcctagttacagattagtcttaaagaattgcattaacttaaaaaaaatcaaaccttggcaagagctaaaataatttggagatatctttgcccttgacttgtagacgacatctaagaggatgaagaaaggagagtctaagtgagactctggcctacttccataacaatgtccttggaagtgggatgatggtaaaggagaaaggccacagtccaatcccactgccttcagacaagg

SEQ ID NO: 4469 - DNA, 575 bp, Homo Sapiens
  misc_feature (61)..(61): n is a, c, g, or t
tggtagggtcatgataaaaagtgccgggggtctggtcctgctccaggggttttcatccttncctccctctccctcctctgtgactgtggatatggttataaggtggttgcacctgggagccctgacaactggctgcacaaattccaaaagtaaaggtgtcagtccctgtggccttccttggggcttctctgaccacatgtgcccaacttcaataagagaaccaagggaccctcattttctgaggtgcttggctctgattcagggctttgcaaggggttagaagctgactgtaaaaatgggaagaggcaacggaagacatttatttctcctttggattttggggagaaccaagccctggtagggaagaggtaagggggatgattcacctccatatttcctaagcaggttgtatagggagccggtggcaggaggaaggctgttttcacaaatgacttgtaatgtcgtgattaaaaaaattcctatattcttctgcaaatcaaacgttctttcccaatccaatccagccttggttttattttaaattaaatattaaaattacacatttatattgaaaa

SEQ ID NO: 4470 - DNA, 550 bp, Homo Sapiens
gaaagaaatggaaggagatccagcgtttctccctcatgacgctgcggaattttgggatggggaagaggagcattgaggactgtgttcaagaggaagcccgctgccttgtggaggagttgagaaaaaccaaggcctcaccctgtgatcccactttcatcctgggctgtgctccctgcaatgtgatctgctccattattttccataaacgatttgattataaagatcagaggtttcttaacttgatggaaaaattcaatgaaaacctcaggattctgagctctccatggatccaggtctgcaataatttccccgctctcatcgattatctcccaggaagtcataataaaatagctgaaaattttgcttacattaaaagttatgtattggagagaataaaagaacatcaagaatccctggacatgaacagcgctcgggactttattgattgcttcctgatcaaaatggaacaggaaaagcacaatcaacagtctgaatttactgttgaaagcttgatagccactgcaactgatatgtttggcgcttgaacaga

SEQ ID NO: 4471 - DNA, 460 bp, Homo Sapiens
ctcaagtggtatgttttaaaagagacaacgctttgttacaaggttcttggaaacaaagttgtattgtcattggtgcctctatcacatggttcttgagaaaaaacaaaccaacctgtgtgaattttagaatacggaacagacctatgctctaagcaaaattaggttttcaaaaatgtgagaacagtacaaagtggcagaaccacattttgttccctcttcaagggtgtcttgtatgtgccgcttgaagatttgtgagtttttcaacagttttattttaaaaactggatggcttatgattgtaaagcattttatcacattttctgaaaacaattgttcttggtttgcttatgtagagtcctgccttattgtttgtttttatttatggcagaatgtatgaaatccgttttgtagtttcaaattttaaaagtcctttaaaaaataaaaggattcagaaacatca

SEQ ID NO: 4472 - DNA, 622 bp, Homo Sapiens
ccagtcgtggggtgccgagccatctgagggggaggcaccagcaccgacagggcagccgttggtgcttgagcaaggggtgctctatctgcgtcgctatcgtgagtatgagcggcgtttagcgattggtttgcgtcggattgccgctgcacggttgcccccggctgaatcggccgcggtggcgaccgtgtttgcggcgttgtttccacaggcacgcgctgggcaggatcggcaggcatcggcggcggcgttggcgttgcagcgtgcgttattgctggtcacgggggggcctgggaccggcaagacaacgacgattgcgcgcctgttattgctgcgtgtcgcccaggcgcggcaacaggggcaggcgtcgttacgtattgcgctggccgcgccgacgggccgtgcggccgagcgaatggctgaaagtttgcgtgcggcggcagggtatgtgtctgcggcggggggggatgcggcgttgttcgccgcgttgccgtcgggagcgagtacggtgcatcgtttgcattggggtgatccccgatacgccgcgctttcgtcattgtgaggacaatacgttgccttatacgtgatcgtggtggatgaggcttcaatactgtttacctcaagg

SEQ ID NO: 4473 - DNA, 434 bp, Homo Sapiens
gtatgttggaacgtgccccagaatgaggcagttggcaaacttctcaggacaatgaatccttcccgtttttctttttatgccacacagtgcattgttttttctacctgcttgtcttatttttagaataatttagaaaaacaaaacaaaggctgtttttcctaattttggcatgaacccccccttgttccaaatgaagacggcatcacgaagcagctccaaaaggaaaagcttgggcggtgcccaggtgcccgctgcccatcgacgtctgtcctggggacgtggagggtggcagcgtccccgcctgcaccagtgccgtcctgctgatgtggtaggctagcaatattttggttaaaatcatgtttgtgactgtaaccatttgtatgaattattttaaagaaataaaaatcctggaaagagccagcgtgcccagcaaa

SEQ ID NO: 4474 - DNA, 544 bp, Homo Sapiens
gcatgtgacgaaacgacaatgaagtgggagaaagaatgtgagcgtagagtggcagccaaacagctggagatgcagaataaactctgggttaaagatgaaaagctgaaacaactgaaggctattgttactgaacctaaaactgagaagccagagagaccctctcgggagcgagatcgagaaaaagttactcaaagatctgtttctccatcacctgtgcctttactctctcatcctgatcagaacgcaccaccaattcgtctccgacacagacgatcacgctctgcaggagacagatgggtagatcataagcccgcccctaacatgcaaactgaaacagtcatgcagccacatgtccctcatgccatcacagtatctgttgcaaatgaaaaggcactagctaagtgtgagaagtacatgctgacccaccaggaactagcccccgtatggggagattgaaactaaactaattaagggtgatatttataaaacaaggggtggtggacaatctgtacagtttactgatattgagactttaaagcaagaa

SEQ ID NO: 4475 - DNA, 429 bp, Homo Sapiens
taaggcagtgaataactgtgaaggggaaaatacagaaaactttactctgattcctgtgcagaaagaaatttagaggtcattaagccagagtcctgtcatcttctgtcctcactcccagtgctccagcacctacctatacctccctaccgatccttaccctttttcgtagagaaaaggtatctctaaagtcctgcagtgctttaaacctttgatacatcctgacaaacacagaaaatgataatatttgttcaatacagtggggtaaaaagagtgcctgtttgaggtgactggcccaaggctttcagttccctgaagctcagctaaactgccctaagggactgagtattaacatttccacacccataaagcactcacagatcagcgcagataccacattcccagcccatgttgagaagccctggccctaac

SEQ ID NO: 4476 - DNA, 543 bp, Homo Sapiens
  misc_feature (505)..(505): n is a, c, g, or t
acaactgctctacaggcacgcgtgtgttttaccctctggaacagtcttgctccgatagtggctctcctaccaccacgctatccacgactacccaaatgacaacaaagaatggttgcattcataatactggcatttttaagtcgtgtagaactcacaactttttaaacaccttcccatatactatttcatttggtcctcacaccaatctcatgaaataaacaagatggattttattgttcttgatgaataggtagcaaagctaaggcccagaaaggttaagtaattttcccaaagtcacacagctttgatatacagcaaaactcatatccctgagctttctactcactgttcttccggttattatccctgaggtcataaatctccacccgcaaacccaatagcaccagtacaagaaatctggactggagatactttatccacacctaccactgccccaaaaagtaaaatctgactctgtgattctaatgtaccaatggtactcaanctgggttatagctcaaaagcattttcttactgagctgc

SEQ ID NO: 4477 - DNA, 378 bp, Homo Sapiens
  misc_feature (255)..(303): n is a, c, g, or t
ctcgaggacctcaaagatctttgagcatcaccatagtaaatttatccattcacctggttgcctcaaattcttggctacctggagaaattaaaacccttgaagctagggttctgagtacaagatcagttccaccaattagatttcttcatttgagatttgggaggtaaaggctgtctttctgctgtttgggttgttgctgctggaaagcaagtttatgtacatattgggccttctgcaacagctttccagctttgnnnnnnnnnnnnnnnnnnnnnnnnnnnnnnnnnnnnnnnnnnnnnnnnnactgtaatggataaagttcaacctccgactggacattcacaggtaaaataaatctactctgtaatagtataagtt

SEQ ID NO: 4478 - DNA, 581 bp, Homo Sapiens
  misc_feature (567)..(567): n is a, c, g, or t
gtgtgccctgaaatatttgattggagagctggtctcctccaaaatacaggtcagcaaacttgaaagcagcctgaaacagagcaagaccagctgtgctgacatgcagaagatgctgtttgaggaacgaaatcatttggccgagatagagacagagttacaagctgagctggtcagaatggagcaacagcaccaagagaaggtgctgtaccttctcagccagctgcagcaaagccaaatggcagagaagcagttagaggaatcagtcagtgaaaaggaacagcagctgctgagcacactgaagtgtcaggatgaagaacttgagaaaatgcgagaagtgtgtgagcaaaatcagcagcttctcccgagagaatgaaatcatcaagcagaaactgaccctcctccagggtagccagcagacagaaacatcttcctaaggatacccttctatctccagactcttctttggaatatgtcccacctaagccaaaaccttctcgtgttaaagaaaagttcctggagcaagcatggacatcgaggatctaaaatattgttcagagcattctgtgnatgagcatgaggat

SEQ ID NO: 4479 - DNA, 517 bp, Homo Sapiens
gcggctatttcgctaggtgctgagcaaattcaagaaaaataaacatagagcaaagttatgctatatagcctcagggagaatggggagggacagaggtaacccacactcttccaaatggagcctctgtctactcagagatgacagggatctggattcttgtttccatgatatctgaggattctcaaaagctctgtgtaacagcagcatggtgtaccctcaggtgtgcaagccccgtaacccctgcacggatgggacccacgactgcaacaagaacgccaagtgcaactacctgggccactatagcgaccccatgtaccgctgcgagtgcaagcctggctacgctggcaatggcatcatctgcggggaggacacagacctgaatggctggcccaatgagaacctggtgtgcgtggccaatgcgacttaccactgcaaagaggataattgccccaaccttcccaactcagggcaggaagactatgacaaggatggaattggtgatgctcaaagatctttg

SEQ ID NO: 4480 - DNA, 472 bp, Homo Sapiens
ggggccaccagtctgccaccaaacatgaacaaattctgctgctaatcggtttcccttgtgatctggttcctgaggtcttcggatctgtgcaatgaattatttattgttttattaaaccgacagtggtgtcccagagaggaaccataaataaaatggaaatctggtgctgtgataaagtaataactagcattaatgagacctggttttcctttcagaaagtccagtatacctgtaacaaaggttaaagcaatttatatttaatttgcattctgatgttaacatttaaacagcaattctaacaaaaatgcatcgagtctaattcttacctctatcaaaaaacaactgtataaatttatgaccaacattaaaacaaaaacaaaatgtaaattttctctttagaaatgattaactggaaatgagtgagacagcaccttgtgggttttttagtaataaaaagctcttttcaaccaaa

SEQ ID NO: 4481 - DNA, 546 bp, Homo Sapiens
ggtatctcagaaatgagaaatggtcaactttggatttttccttgagaataaataattaatacataaattcagcccaaaacataacatggaaacatatttccaaagaaaaggctttgagacagtggaaccatttgggtgccatttaaatttaaagaaggaaatagaagaaaaagaagatcaaagatggagactccaagtcttggcaattgattgaacgtgaagtcctgtgaagaccaaaggctccccactctggtgattagaatgaggggctattggctggagaaggaatctactaactagtgaggtaccaacagaatggagacccaaactaggacatttaaaacctgggatttttcttcacgggattgcatgttttctgaatcagtcattctgtttgacaccaaaagtagcttttattgctttccccaccatgggcccttgatttaaaaggcttcatctaccaaacactctctttttgctaaataagaatatttccccatttttattcattaaagtccttttgatccgtgtcttaaaaaaaccaac

SEQ ID NO: 4482 - DNA, 449 bp, Homo Sapiens
cgggaagaccttggaccaagcccgcaaaccagcgcaataacgtggtgcgaggggcatctgggcgtttgacaggtcctccctctgcagggcctgggcctgctgagcctgatagtgacgatgacagcagtgacctggtcattgagaaccgccagcctcccagttccaatgggctgtctcaggggcccccgtgctgggacctgcaccctggctgccgacatcctggtacccgcagctctctgccctccctggatgaccaggagcaggccagttctggctgggggagtcgcattcgaggagatggtagtggcttcagcctctgacagtcaggatgaagccccataccactccacactgctgggacatggcagggacttcacagtgggggtttttagctggctcacagggctccctcagcctggggaacattaaaggttttctacaaatacaaa

SEQ ID NO: 4483 - DNA, 767 bp, Homo Sapiens
  misc_feature (42)..(51): n is a, c, g, or t
aatatagagagtctgggccctcccaaaattcacacaatttgnnnnnnnnnnaaaggaaatttctttttcctttcaaaggggatggtgggaaattccaagtgtaggtccagggaagggatttaatatttggattggattcccaagggggattaaaacgtgggtttttattcccggaaagtttacccgttcccaggattttggaaataggttcattccccgccacaggcccgcctttttttcttcatttcagcccccaggtaagtccccccagaattaaacggcaggtatttgccatctttcccgtctctaatagaagtatgtcctatacttcttcagatatcccagttgtattagtgcccaccaaagcctgatgcgttacatgcccttggaaaacagacctcactgagttgaaaaagctggacttcccagctccaattggacccagcagcagaattcgtatttgttgaaccagggatccatatggttcataagttctcaaggcagacagtaagctcttcctgagctcaatgaccccttttatctttctttcatccagtgaatcttcgcatcgaaaaacttcataatcctgaatagagatagtacaattttgagcaagtccaagattttccattgtctttaagtccataatcacttttctatttcttccatctatctggaaattagttggggagttatattttgtaacatcacaacaaaacagtgtttctggtgtacatagtcctagtttccattctgaaattttagcc

SEQ ID NO: 4484 - DNA, 444 bp, Homo Sapiens
ttaccctcacacatacacttgaaaaaactttcagcctagcccagttctagcccctgtcctcttagatatatccccctttctgggtgaactataggctctgtgcctctcagacaaattctgatctctaagagatccccagacctcacttgcctctgcctccatcttggccctgattcaaccctaagataatagcacaacaaaattcttcataaagatatttttattcacctgttccgtgctatatggaggaggccaagtccatttagtgacatttcttcccataatgtgagtggggaggattgtggggaggaggggctttgggttcctgtgtttgtgcatatgaagggagatgggggttaggtggaggaggagagcagcgtggttagctaaggttattgctttttgtggcaaatctaattaaatgacaggaatctcttcaaaaaa

SEQ ID NO: 4485 - DNA, 1169 bp, Homo Sapiens
gggctctctctcactggcacagcgaggttttgctcagcccttgtctcgggaccgcaggtacgtgcctggcgacttcttcgggtggtccccgtccgccctcctcgtccctacccagtttcttgcttccctgccccatctccgccgctccccgcagcctccgccgagcgccatggctcctaggaagggcagtagtcgggtggccaagaccaactccttacggaggcggaagctcgcctcctttctgaaagacttcgaccgtgaagtggaaatacgaatcaagcaaattgagtcagacaggcagaacctcctcaaggaggtggataacctctacaacatcgagatcctgcggctccccaaggctctgcgcgagatgaactggcttgactacttcgcccttggaggaaacaaacaggccctggaagaggcggcaacagctgacctggatatcaccgaaataaacaaactaacagcagaagctattcagacacccctgaaatctgccaaaacacgaaaggtaatacaggtagatgaaatgatagtggaagaggaagaagaagaagaaaatgaacgtaagaatcttcaaactgcaagagtcaaaaggtgtcctccatccaagaagagaactcagtccatacaaggaaaaggaaacagggaaaaggtcaagccgtgctaacactgttaccccagccgtgggccgattggaggtgtccatggtcaaaccaactccaggcctgacacccaggtttgactcaaggggtcttcaagacccatggcatgcgtactccagcagcaggagagcggatttacaacatctcagggaatggcagccatctggctgacagcaaagagatcttcctcactgtgccagtgtggcgccggagagagcattgcaaattattggccagtgacttgcagaggccagtaatgccggctggatccagagggctggaacattaaggaaggtctcaaccggctcgccaatctgggaggtacggacccaatgaaccccaagtgcggtggcttagggcctctggccctgaaagatttcccctggttggggggtaatcagaggggccgtcccgggaggtcacgggcgtcacgggggtgtccccacgcagcggtggcgggacccaagcccgggggcgaccgggggaggaccacctgggggc

SEQ ID NO: 4486 - DNA, 540 bp, Homo Sapiens
actatattcatataaaaaagttaaacacgctttttttcctgcctaaaacacaaatacaactgccagtatgtatttttaatggaaccctattttataatggtacgttactgaatgtgtttcatatgcgtgaccgttaagatattatcatttaggtgaaggtttcaactcaaaaccacccaacccggtggttaacgatttaatacatataaccaaaccggcagcgtttagagttgggatatacatttaaacattttcctggttaaggttcccaagagagtgtaaaggttttagcagaaagcaaaatatcttgcatctttatggaagtttaaagcatgtttgcaaatattgcagcccactgaaagaatttgcatgtacaggaaagttgtggatggagacggtttgtggaattttaagtgctcattgtagtaaacttttgctttgtagatttgaaggtacagacttatacaggcaagttcacaaaatcatgattagttacaaacagtaaaatgaagttaaaataaattattattttctatttga

SEQ ID NO: 4487 - DNA, 1641 bp, Homo Sapiens
  misc_feature (1014)..(1131): n is a, c, g, or t
  misc_feature (1263)..(1271): n is a, c, g, or t
  misc_feature (1400)..(1412): n is a, c, g, or t
  misc_feature (1494)..(1502): n is a, c, g, or t
acatgatagccatgagatgttggaaggggcatgagatgttggaaggagcaatgagatgtaggaaggccttccaacatctcattccttagtgccagagcttgcatccggagactaaagattgcacttttttgtagttttttgtccaaatgcaatcccatttctgtgcctcttatcatgcagttaaatttggacaaacaagattcctaaggaatgactttattaactataatatggttacagctattatataaatatatattctggttatagttctaatatggagatgttgtgtgcaatgctggcctgtggtggtctgtgtaatgctttaacttgtatggaggaggccaggctcagagctgagatgtggcctgaaccttcccggtatcgatcctttaatttagaactgtcaagatgtcactttctccccctctgccttttagtggtatctgacatatactcaaaacagtaatttcctggtcacatcattaactgctaattctgtatttataaagaattttcagatggacatgtacaaatttgaactcaaaccatccccagtccagatacagggcagcgtgtaggtgaccacaccagagcctcagcctcggtccttctcagccgtcgggataggatccaggcatttcttttaaatctcagaggtagcagtaaacttttcagtattgctgttagcaagtgtgtgtttgccaatagatacccattatactaatgtgccaagtaaatgttcattgcacatctgcttccactgtgttcccacgggtgccatgaagtgtgtgaggagcccctcatctggagggatgagtgctgcgttgactactgctatcaggattgtgttgtgtggaatattcatctacataaattttatatgcacagtaatttccctttttatatgtcaagtaactatttgtaaaagttatactcacaaattattataatgattactaatatattttttccatgtttcattgcctgaataaaaactgtttaccactgttnnnnnnnnnnnnnnnnnnnnnnnnnnnnnnnnnnnnnnnnnnnnnnnnnnnnnnnnnnnnnnnnnnnnnnnnnnnnnnnnnnnnnnnnnnnnnnnnnnnnnnnnnnnnnnnnnnnnnnttttggcgggccccccggccctcaaaaaacttttaaaaccctttttttggggggccgggccccaaaagggaacagaacatggctttaagggttcccccaaaaaccccggccaacacaagggggctggttctnnnnnnnnnaaaaaaagcccccgggcgcaccaccagagtttttaaaaaaaccccgaaggggggtttccgggacccattcccggggcctacaaacacgaggggcgccaggggggaggccgggaaatacaaaatatccgnnnnnnnnnnnnntggaccacatttttgcccggagagaacggggggcgccaccctccttttataccctatttttccgccgccacacgtgggagannnnnnnnntcctccaacacgggggcgtgtataataagcacccccttttacactctccccccagcgggggccaccctaaaaaccatgttgtggggcccccgtgttgtggcggcataaaaataattagtcgcgccccgcccggggcgcg

SEQ ID NO: 4488 - DNA, 629 bp, Homo Sapiens
tcccttgtctctaagtccatgagctccatgtcccctctaccattgcagagtctgcacagtttctgctggagctagaacaggcctcccaagtttaggacaaacagctcagtctagtctctctgggccacacagaaactctttcggggctcctttttctcctctaggtatcaaagtaggcaggaccatgggaccaggatcttggaaccgagcctctcacctgtactcttccgaaaaatcctcttcccctgaggctggatcctagccttatcctctgatctccaaggcttcatcctccctcatgccgactcctgggttgagctgttgcctcagtcccccaacagatgcttttctgtctctgcctccctcaccctgagccccttccttgctctgcacccccatatggtcatagcccagatcagctcctaacccttatcaccagctgcctcttctgtgggtgacccaggtccttgtttgctgttgatttctttccagaggggttgagcagggatcctggtttcaatgacggttggaaatagaaatttccagagaagagagtattgggtagatattttttctgaatacaaagtgatgtgtttaaatactgcaattaaagtgatactgaaacaaaa

SEQ ID NO: 4489 - DNA, 904 bp, Homo Sapiens
tatgtctggaccaagcatgtgcctttaaagaggtcctatggaaaaaacaaaaggataaagtcgcagaactggaaaattctgaattcagagctctctcatcttttaaaaatagggtttatctagacactgtgtcaggtagcctcactatctacaacttaacatcatcagatgaagatgaggatgaaatggaatcgccaaatattactgataccatgaagttctttctttatgtgcttgagtctcttccatctcccacactaacttgtgcattgactaatggaagcattgaagtccaatgcatgataccagagcattacaacagccatcgaggacttataatgtactcatgggattgtcctatggagcaaggtaaacgtaactcaaccagtatatatgggaagatggaaaatgatcttccacaaaaaatacagtgtactcttagcaatccattatttaatacaacatcatcaatcattttgacaacctgtatcccaagcagcggtcattcaagacacagatatgcacttatacccataccattagcagtaattacaacatgtatggtgctgtatatgaatggtattctgaaatgtgacagaaaaccagacagaaccaactccaattgattggtaacagaagatgaagacaacagcataactaaattattttaaaaactaaaaagccatctgatttctcatttgagtattacaaattttgaacaactgttggaaatgtaacttgaagcagctgctttaagaagaaatacccactaacaaagaacaagcattagttttggctgtcatcaacttattatatgactaggtgcttgctttttttgtcagtaaattgtttttactgatgatgtagatacttttgtaaataaatgtaaatatgtacaccagta

SEQ ID NO: 4490 - DNA, 841 bp, Homo Sapiens
  misc_feature (553)..(576): n is a, c, g, or t
  misc_feature (584)..(585): n is a, c, g, or t
  misc_feature (589)..(589): n is a, c, g, or t
  misc_feature (594)..(595): n is a, c, g, or t
  misc_feature (612)..(612): n is a, c, g, or t
  misc_feature (619)..(621): n is a, c, g, or t
  misc_feature (623)..(623): n is a, c, g, or t
  misc_feature (627)..(629): n is a, c, g, or t
  misc_feature (631)..(727): n is a, c, g, or t
  misc_feature (752)..(793): n is a, c, g, or t
tttcctcctataatcttgtgccgtggaaatcagaagggcaaaacgaagcagtcatgatgagaagcacacctcagaaatcaggacatcccccctatcaggtggttttggagaaaacaaggaaggcggaagaatggagtgcaattgtgtgagcagaaaggggggcaggaatcccgggtgctccactgcttaaaccacaggacctggttaactcctcaccaagcttcccacgaccctggttgccaatgggcgcgggagacattgtatacacatcatgctatttaaaatacgttcaaactatagtgtaaatgctaattaaccatattggtatataaccggaattttatattaaaaggggcctcctttttaaatatatgccgtgtaaaaaatgtacttataggaacatctctttgaattgtatttcttgtatattacatacttagagagagactcttttagccaggcaaagtcttttttggctgtggctggaataaatcatttattacttgggagtcccatttttgggacactaataataaaaccttggccaagggcnnnnnnnnnnnnnnnnnnnnnnnnaaagaaannaggngggannggggaaaacaagggggnggggggnnngngggnnngnnnnnnnnnnnnnnnnnnnnnnnnnnnnnnnnnnnnnnnnnnnnnnnnnnnnnnnnnnnnnnnnnnnnnnnnnnnnnnnnnnnnnnnnnnnnnnnnnaaaaaaagaggggcccccctaagannnnnnnnnnnnnnnnnnnnnnnnnnnnnnnnnnnnnnnnnncccgcccttttttttataaacaacccccccttaaaggggggtggaaag

SEQ ID NO: 4491 - DNA, 216 bp, Homo Sapiens
aaggcagtgcgtaagataaaatgtagttaacagaatagaatgctaattatcccattttgttctgtgtatgttggaaaaaaattacagaactctcagtttcatagtaaagataggtaagtagtgtctggataatgtccagaggatagactgaaactctgtgataaacgtgagcaggcagcaggatgctacctgataactgagtataacgcatgcaag

SEQ ID NO: 4492 - DNA, 805 bp, Homo Sapiens
  misc_feature (229)..(283): n is a, c, g, or t
  misc_feature (565)..(574): n is a, c, g, or t
ctcagcgctgaccccaccgccctggccgaggcacttggccttgctgagctggacttcctcctcctcctcggcatgaccggggtgaattagaacgtttttaaagacacccccttcggaattctgtaacacattgtaattggagaagaaggaaactctgcaaggctaaactgtcattcacaacttggctacacatagactctagtcagttttgtctccagaaccttaggcnnnnnnnnnnnnnnnnnnnnnnnnnnnnnnnnnnnnnnnnnnnnnnnnnnnnnnngatgttggaaaagcaggaggtagttgtgcctcaattattgcaaaaatgtaacaataaagttcctcaaaataagatctgttcctcatagctatactgtgtacacataagacgcatatagggttttactgaaatctatttttaactcttatgttcgtagagaaattgtttcaaggattttgagtcataggtctgtaatttatagagatctctagaattcttattgtaattttcctacttctttgataaaagaaaaataagtcagattgttaactccaagattgnnnnnnnnnnctcttgaaagaagattattagttgtaactaatttgggggttctgggcacagacatctaacctggtattgtaaggcagaggctcccattggaatggtagtggtccgggtcagttgttcatggtgtaagctttgcacagtgtattaacattgggagggtctggcttgaaaatttggccaccctcagcctctgaatgtttattaaaataaatttagtctttctttgcttaatat

SEQ ID NO: 4493 - DNA, 740 bp, Homo Sapiens
caacacaagaccaattggaaaagcctcaaaatgaagaaaaatgaaggctcataatctatcaagagtgctgaatttctgcatgttgaaagacttagtggttctgttttcttgagacatttaatctggtggtaactgtggtaacattgcagccctaagcagcatgtgtatattagataatggtgttgtgatgctactcactttgattgcaatgatgatgtccaaggtaagctattaaaaggcaggttacttccaaatcgcactgaaggaaaaggttaagaataatacatgatcacagaaatgcataccactgtctgtaaacccaacaaaattcactgttctcttttggatttatttagcctgatgtatttttaattcaatttttatggtgatgggcaaatcattcttggtaaatgtaaatcaaacatgattgatttaaaacttcatggaatttgtagaaaattatggacatttttggtgagaaagaacaatagtcaaaactcacatggatagagtgtgtttgttttttgccaaaaataccccagactttttcccaaacctcaaaaacgtcttggaaaaattgtaaaagtttgataacagaaacatctttaggatattatttgtctgacatattttgcttctagtatgtgcctactgtgatttttttcatgtggaaaatgcaaaatttgtaacaaaatggttatatggaacatgcctattaaacgaattttactatcttccct

SEQ ID NO: 4494 - DNA, 448 bp, Homo Sapiens
cattgttgaggcagtgtgaggagaggaagagaatgctcaagtggcagctcgaagagtgactgccctggcaaggcctgagctagggaagaatcagtcagtgatctgagaattgggatttccactttaggcattagctaagtgatcatgagaaatactagcttacctgggcctcaggaggttagccctgaaaccaaaatttctgtagctgcagaactgtgtgttcaaagtaaatcttacagtcaagactaacgacaagcaagcacaactgcgctgggagagggaacaggaaggaactcagccccttattctagttgccccatcctgataacctgagggaggagggggcaagaaactcttaggattatgagaagcacagtctaaatgcaaggaggcctaggtagctaaggttcccttcagctcgaaaaactactccaattcaatgtcagat

SEQ ID NO: 4495 - DNA, 482 bp, Homo Sapiens
  misc_feature (76)..(76): n is a, c, g, or t
aatgggctgttccttgggggtttttatcctgctcaccgtggagataagcctgcggcttgtctaaccagcgcagcanaaggtctcaatgccttttggtaacatccgtcattgcagaagaaagtttacacgacgtcaaaaagtgacgttcatgctaagtgtttttccagaaatattggtttcatgtttcttattggctctgcctcctgtgcttatatcatccaaaaactttttaaaaaggtccagaattctattttaacctgatgttgagcacctttaaaacgttcgtatgtgtgttgcactaattctaaactttggaggcattttgctgtgtgaggccgatcgccactgtaaaggtcctagagttgcctgtttgtctctggagatggaattaaaccaaataaagagcttccactggaggcttgtattgaccttgtaactatatgttaatctcgtgttaaaataaaatataacttgtgaaaaaa

SEQ ID NO: 4496 - DNA, 533 bp, Homo Sapiens
  misc_feature (443)..(463): n is a, c, g, or t
cattgttgaaggcagtgtagggagaggagatggcaggacacagcaaacaggacacatttgcctgcttctctcttgcctaattcttcctgacctgtatttactgatgcttaataatacttgtaagactctaggggttcatttcccatttcagcggaaagtacttcactcaacaacaatattctcaagagtcttctactggaagctagaaagaaataggaatttaagtccatagaatgaaggtagttattcctgcctgtgttgcccacctgttcacaaaaagtacctttatgcttgaaaacattaggttctttggttactgcactgtagtttcaaatggatcctccagatggcattcatgtcttactcagaaaggcactgccattgtccccaaggcttctgtctactaattctattggtcttgtgttttgcttgattgcttggcnnnnnnnnnnnnnnnnnnnnntggagctattttctgtctatataaatctacttatatgaataaccattaaagtgattttgtatatgaaaaa

SEQ ID NO: 4497 - DNA, 470 bp, Homo Sapiens
gaaggaactgcccctgaggtaagaaccaagggagggcctcccagaggtcaggtggaaaaagttttaggaaggaggaagtagtcaacagggttacctgttgcaaagtacttaagtaatatgaggcctgatagtggtaaacttgactaccgttggatttcactagtgggaaaggaagtctaattaaaatgcactcaagagactaacagtcgcaggcatgaaatacaatacaggtacatggttttttattatgtgtgcatctgcttcagtaataggtgtgaattactcatttggatcattaggagtttcaaaatctagttaaatgactagatttgtgttgatgtaaattctgtcattctgaactgcagggattgtcagtaacttaactgcaaactaaactggtgataattatggtaaaattgcaagacgagcaataaatctcaaccaacttgagagaacactgataaaaaaaa

SEQ ID NO: 4498 - DNA, 770 bp, Homo Sapiens
  misc_feature (116)..(124): n is a, c, g, or t
agattgtacaggccctcagatataaataaaagaaaaaacattggagaaagaacaagaacctttgtttagagaatgaaatataaatgttaataaacaaagtccacaacaatctcttnnnnnnnnngttactacagttatttctcttgtgaatatggcctggaagaatcacttttcccccaacttaagggaggtggagatttatctctatccaagctttcagtataagcagataagaagtaattctcattttcttgagactgacttgatgaaagggcatatggtgtccccaaaaatgtctgatgagtgagaacattaaaatgactaaactgatgggacatatttaattgactatgataaacctgaaagttactatatgaatctggtcctgtcgaattgctgttctctccttcagagcatactatatcaacagaagttctctcttcagaatcaaggtaagtcttatcttctaataaactgttttgcacatcaggagacgattgcaactcaacttgagtatacttaatgcgatctgttccacgtgatcctttggtctctttctcccatatttctgaatgaaaattgctgcatacttctatatgtgagatttcatcccctgaatccagagacatatcctcttcatccttttcatcgttttctaaaagagctacatttaaaaaacaaaaagtcctcctctattgaaatacacagtttgtttaagttttaaaattatacactactcacacaatataacgcgtcagggtctgcaattc

SEQ ID NO: 4499 - DNA, 640 bp, Homo Sapiens
  misc_feature (594)..(594): n is a, c, g, or t
cagagcatcccccttatatgtctgggggcacatgaatgatacacagaatgaatgtttaaatttccactttgagtcctcatgaatcattatgagactagtaccagctgatcttggtgtacaggctcagggtcagtgcccaagggctcccgcgtgtgtgttctgatcttcagtgcgtagcacattctccatttagaaaagagtggtcagaataattgtggacggtacagtggctttttaaaactacagtctttaggtgtaaggtttggcgccgggagcaattttatgatcaaatatgatgaactcctaagtcactgaggtgtgattgggccaatgttggcatgaggttcttgctctacttccagtgttttgattccactgggagaatttggcctagtgtgtggctttggatgaatccgtgtagagagaggtgagcttgtcctgttacagatgctgtcagacatagcgatagtaggcacctagggaggaagtggccgttagttaaaaactgactttttaagaatggagaatgcacgtgggtttctgtagcggatgattcatagtaagcaagcggttgattgctgttaataccggccncaacccgattgacatttagttcattcagctttcaaaaagatgaaga

SEQ ID NO: 4500 - DNA, 381 bp, Homo Sapiens
gccccagaattcccttacaaggggagtgagattggattactcgggaggaaaccctgtaagcatttgtgcggtcatgtgctttgagctcttcaagatgcactacagtctttgggtataaaagaatgccactcccgaatcaacttaaaaagaacagatcttcagcctgggagggggcaggggatggctgcaattcaaacagttctataaacatctctgggcacatgaggactgttgagtgaagcattttcttggcagctgtcagcaaaatcgccatctgagacacagagaaagagaaagagaaagcagggaccaccttcaggcccttgtgatttgggaacaggaagcaccaggtggaagcagcacagacgcgctactacaccc

SEQ ID NO: 4501 - DNA, 374 bp, Homo Sapiens
cattgttgaaggcagtgggctgttaatagaaaaagaatccaaagaccctgtttcttccatgttgttttcagagataggtgtgttgtccattttccacgtgataattggacgaggataaacacttaacacgctgcatattaagaagctgtttgtgttcctcttttcatacttcatcaagggtgtgagaaaaactcccacctttagcaccactttgtttgtaatcacttgaattgctgttcctacatagcaggtgtaaattccttcgtccagaaggcttactcttctgaaaaatagcgacgcattcccattttgaatctcattatagaaaagggatgtcctgtttgcatatctgggatcttggctttccaaatggt

SEQ ID NO: 4502 - DNA, 771 bp, Homo Sapiens
  misc_feature (636)..(675): n is a, c, g, or t
ggtagggaggctattgaagcagtttttctgaagcctgcattttgagttagtttatagtgctaatagattctatataactgtgagagtttggtagtaaaccagtagggattgttttctctcctaaaaatttgcacactacttcattgtctaccaactttttacatattggaaaatagaaattgcaaatacatacatgtatggaaacatattcagattgggaaaaacaatggacattagtttttaaaaagttacgtggaagcaagatttctatatttgtttttttaaaggaagcagtcattctttctactaaatccatttcaagctagttctctgaaaattttgccatttatctacagaaatttgattataaatatgttcctttttcaaagaaactttattctagaacaaaatagtctatatggtacttgatctacatttaagtggaaaaattaccagtatttgaaagctcagtttatgtcattgtcttaacttcagatacaaataactgaacagaaagttttaacctttaatatctcatgttctgttttttattcacaattttccttttatgttaattcaattatatacttctgaatggcaccttactttttggaaacaaatcttctgttatttacnnnnnnnnnnnnnnnnnnnnnnnnnnnnnnnnnnnnnnnngctgctctcgataatagtcaacatttgcatatatatggaatttcttactttttttctcccaaactctatttaataaacttattttaatgtttgtgt

SEQ ID NO: 4503 - DNA, 567 bp, Homo Sapiens
taagacaaatttaaaacaaacttaactttatttcctcactttcacttaaaacttgattttataaaacacatgaaaaaacatttttaagagttctgtatcacagaacattaaacagtacaaatatccattgcttcataggttcaagttacataaattaaagtcaaataattggaaactgattcaatagggaaaactatacatgaaatgaaggtcaaaaggagctatacagcaatatttcattgtttatagattatgagttactttcaggaccttaacaaagattctgaatatttagacttcctttgttgtattttatacttaaatatctccctacctatactgagtcaaactacttgaccaaaacatctgatttaggaaagcatctagctttatagcacaagtttttccatctacagttactatcttcaaaggaatatacatcacaatgttgacaaaaaaacctcctggttccttttgaacaatgtgcaataaattcatgatgttaactccatggtaagtcaaataggtaccaaaaaaataaaaggaacaattacacacagttcagcc

SEQ ID NO: 4504 - DNA, 727 bp, Homo Sapiens
attggtgggaccaaggatgttttgcaggatgccctgatcctaagaagggggcctgggggtgcgtgcagcctgtcggggagaccccactctgacagtgggcacacggcagcctgcaaagcacagggccaccgccacagcccggcagaggggcacactctggagaccttgctggcagtgctagccaggaaacagagtgaccaagggacaagaagggacttgcctaaagccacccagcaactcagcagcagaaccaagatgggccccaggctcctccatatggcccagggcttaccaccctatcacacgtggccttgtctagacccagtcctgagcaggggagaggctcttgagacctgatgccctcctacccacatggttctcccactgccctgtctgctctgctgctacagaggggcagggcctcccccagcccacgcttaggaatgcttggcctctggcaggcaggcagctgtacccaagctggtgggcagggggctggaaggcaccaggcctcaggaggagccccatagtcccgcctgcagcctgtaaccatcggctgggccctgcaaggcccacactcacgccctgtgggtgatggtcacggtgggtgggtgggggctgaccccagcttccaggggactgtcactgtggacgccaaaatggcataactgagataaggtgaataagtgacaaataaagccagttttttacaaggtaaaaataaaaa

SEQ ID NO: 4505 - DNA, 536 bp, Homo Sapiens
gggcagctggggtgtagttcatgtgaagccccattcccctcacgcttttggggccactgtgaatggggccaggaaacggatttttggtgcagctgcattccctaatagacctagttccctccacgttagtgtagacatggccttgggggctgagcgcagcagccaggctgccagggctgggggcgggtaggaggcacggtagttggtgggtgggaagagggcctgggtggtggcggtcagttagcctggctgggtgaggttggtgaggttgcggggcggggtggtgaggagagcaggggtcccagggaggcattggggtgctgggtaatgacctcggccctgggtttctcctctccctgcgggacaggagcctcagaaagggccaagggcaaggtgggcttggggggctctgggaatctcagctctagccctgtatggccaggatctgctgtctccgtccctcctgggccccagcagctgtcctgcagctgtcagcaggagggcctggctttaataaagagtggacaaaccaaaaa

SEQ ID NO: 4506 - DNA, 1286 bp, Homo Sapiens
cgggggatggggccggccacacccctgactccgccctggctctgccccatacccctgccgtggggccgacctgggggatgcagacatccggctccgtattcctgcctatcggggccaggatgcaaaaacaatttttgcgtaaaagatgtcacactgatctgctggagtggggtggacacatgaattcagttttatcatgaacactcgccactggctgcttgttaattcagggataatggtggcattcttacaaactgctcgggaaatagaatgacgggaacacttttagggagcccaggaagttaccagggacattggtgtcgccggcccaggcaacagcagcgtacgcttttcaaagatcattgagttgtcttagaatttgaagctgtgtaatgacaatgtcacctggagttcgtctccatttcttaactttttgttgcacaagtatttggacagaagtcgaactgtgaatgagatactgaaatgcactaaattgtattacattaaactggagttacttgatacaatgaagaaatgcatctgatctacttgtatttattgtctcagaattgtacgttgtgacaatcaaatgttacttgcctaaatgccaggaaattcaactggccttttaatcagcaaaatcgccagcaagtactgtaactgtaaagaaaaatctctctctctggagaacccacacaaaccattgacctgagtgcgcatgacagccactggcttctttttctatgattgaaaatctgccatcgctgactgttggccagtttcaaagggacccattgtatacagggtgcaaatgtattatacggatgtttccttttgtacacttcatttttacaagttttgctactcacaagctttatgtactggaggatacaggcatttttggtctttacaaacttgtccgggtgagggctgctaacttaccacttcagaggcctgtgtcccaaaggcctggctgcgtttgccgtgcctggccgaagacctgtgtaaacaggcaggtgtgccgcctggcccgagcgcgaataactcctgggcaaaggtgaaatgctgcaagcatctggttataaaaatgcctgctgcgaaagacaggattaaattacccccgcgtgccccctacccaccccgtcaaaaccttcgtccgccgcctcccacccccaaaacttttcaaaaacattccttttgggccccgggcccccgtaaggatagtgaaaatgggcccaaacttggttctcaagaaaatccgtgtccccgaatcagggcttggacct

SEQ ID NO: 4507 - DNA, 322 bp, Homo Sapiens
atatctaagaacttttgccactgtgactaatggtcctaatattaagctgttgtttatatttatcatatatctatggctacatggttatattatgctgtggttgcgttcggttttatttacagttgcttttacaaatatttgctgtaacatttgacttctaaggtttagatgccatttaagaactgagatggatagcttttaaagcatcttttacttcttaccattttttaaaagtatgcagctaaattcgaagcttttggtctatattgttaattgccattgctgtaaatcttaaaatgaatgaataaaaatgtttcatttt

SEQ ID NO: 4508 - DNA, 932 bp, Homo Sapiens
ggggggatctgcgtctctcgctggcgccggcacaggaacttgggatccgtctccgctttcgcctcctgcaccttgggagccctgggctactctgtcacagcccctgttgccctgcgatctgtaggtccttggggacgcatagttaaggtgccaggacatcctggaagctgggaaatgaccatggctggagaaggaaagaaggtgtgttttgcctgactcagtgactatagagagaaccaagttctgcaggcctgtcacctaagtctcagctgggtgccacaaactctgaactggattccaaggctttcatgaatgcacttatgtttgctgtggcagctgcattatgtcgtgggggatgtggatgcagaacctcacattctgtcgtcttgcttatgttactctcctttatgtttcactttctcaaatgaatgtcaagcaggtgattttcagattcaaaagttctaaaataaattgctcaaatttacacattatgtaagctgttaataaaatttcttgtaggtgctacatatttgttaaaatttttggttgtaattttaagctcactgtaggcagaaaggaatcattaagatttctattctgttttagtctgtatctaaatgaccatatattttaattccaaatatttactttatacttcagtaatgctcattgtattttgcaaaatttatattgttcttttatttgaaaatataaggctttttttagctcctgaaagctatattatagtcatatagttttagtatagtatttgataagaagagcagcaacatattgagaacagaataaaattctgctgtctttttaatgattatttattaaattcttctcattaaagcctattattaatgattgtaatgtatttactgtataattttactgcaatttattaaatgccaatgacttctaaaaaa

SEQ ID NO: 4509 - DNA, 464 bp, Homo Sapiens
gggtgtatggagaactgaaaagggtatctgcatgaaggctcctgtctgactattccaggatccaatattactgccttctgaaacttcctctttagggtaaccatcatgtatgcccacgagggtgatagtaattcgtgagactgaagttgcttagagtacttctttgaccaaggaataccacagacaccctaccgatagaacagtggctcagatcttacttgctcctgcttacgaagtattcccaatcactggtcatctgaccctacttgaacactcctgaacagtcatgttttttaaaatcttcctttatatcaagtcagagagtatacttctataaatttcactcatggatgttaggaaatctagtcatcttccctgtgattgccctgttaagtatttaaccatagctatcatgtgtttcccaaatcttctctagattaaatatcttcagttacttcaaccat

SEQ ID NO: 4510 - DNA, 759 bp, Homo Sapiens
gggggctgaaggaggaggacaaagagcccctcatcgagctcttcgtcaaggctggcagtgatggtgaaagcataggaaactgccccttttcccagaggctcttcatgattctttggctcaaaggagttgtatttagtgtgacgactgttgacctgaaaaggaagccagcagacctgcagaacttggctcccgggacccacccaccatttataactttcaacagtgaagtcaaaacggatgtaaataagattgaggaatttcttgaagaagtcttatgccctcccaagtacttaaagctttcaccaaaacacccagaatcaaatactgctggaatggacatctttgccaaattctctgcatatatcaagaattcaaggccagaggctaatgaagcactggagaggggtctcctgaaaaccctgcagaaactggatgaatatctgaattctcctctccctgatgaaattgatgaaaatagtatggaggacataaagttttctacacgtaaatttctggatggcaatgaaatgacattagctgattgcaacctgctgcccaaactgcatattgtcaaggtggtggccaaaaaatatcgcaaccttcatattccaaaagaaatgacaaagaaactggagatacctaactaatgcatacagtagggacgagttcaccaatacctggtccccagtgataaagaggtttgaaataccatatagtggatgtaacccaaagaactcaccaagtaaaatcgcggtttgt

SEQ ID NO: 4511 - DNA, 1706 bp, Homo Sapiens
  misc_feature (47)..(47): n is a, c, g, or t
  misc_feature (64)..(64): n is a, c, g, or t
  misc_feature (118)..(118): n is a, c, g, or t
  misc_feature (1178)..(1178): n is a, c, g, or t
  misc_feature (1445)..(1455): n is a, c, g, or t
ccttgccccccttgggccccaaggtcagccccctgccaccagcccgnctagcagtttaagggcntgaggcttctgggtcctgtggaggggggtggcatgacccggggggtcgtccatnccagtccgcctcagtcgcagagggtccctcggcaagcgccctgtgagtgcgccattcggaacattggacagaagcccaaagagccaaattgtcacaattgtggaacccacattggcctgagatccaaaacgcttcgaggcaccccaaattacctgcccattcgtcaggacacccacccacccagtgttatattctgcctcgccggagtgggtgttcccgggggcacttgccgaccagccccttgcgtccccaggtttgcagctctcccctgggccactaaccatcctggcccgggctgcctgtctgacctccgtgcctagtcgtggctctccatcttgtctcctccccgtgtccccaatgtcttcagtggggggccccctcttgggtcccctcctctgccatcacctgaagacccccacgccaaacactgaatgtcacctgtgcctgccgcctcggtccaccttgcggcccgtgtttgactcaactcaactcctttaacgctaatatttccggcaaaatcccatgcttgggttttgtctttaaccttgtaacgcttgcaatcccaataaagcattaaaagccgagaacaagccaccccccaaggaaccaaaaccgtgtcgcgccgccctcggcccctcgacgaagcttttctagaccatttccgtttgggcgccccgggtccccgttgggtaacgtgacccctgggtccaaaagctggttttcctgaggagacattctggggccagtgacctaggcgcctgggggattcttccggccatatgagaaaaacacttcccgcgccggaacgacccggaaacgggtccctcggagaccacaagctgcagggatggggaaggcgctcggcagagaggcccgaactctaactctgggcgacttctcaatcccgcgccgcccggtggaggttgtctctcacaaggacgggacgagtcgctgttgccacagaacgtacgtataaacactcacgccagccgcccccccgccatgcgactctcgctgtgggatcacacaaacggtgacgccgccatagcgatggacacanacggggcagaaagttcggcgtgcttgtgccccaagcggccccctgcctctcgccgcgcgcaaggctaaattccgcccacgccggggcgagttagggccacctgtatctggggacaaaattcccatccatggcggcaccgccataaataagccccgcccgaccagccgcagcacaatctgaaacccccccgggggtaagtggcaatccgccgcgcgacggcagcggacgccctatatatccccgccgcgcgcgcgcgggtgcgctctnnnnnnnnnnngtgccggcaggataaataaacgataaaagttgttcgcggccccgtcggcgggagcggccacgtaaagatgggcggcgggtgggcgccgtgagaaaataacgagtacgtggttacgcactggaagaagttgcgcccctgcgcccccacgctagtgtataaacttcaccaactaggtgagggtggcacacagatcacccccatctcacggatgcggtcatttacgcgcccgcgtacgccgcatctacccgctc

SEQ ID NO: 4512 - DNA, 443 bp, Homo Sapiens
  misc_feature (390)..(390): n is a, c, g, or t
  misc_feature (402)..(402): n is a, c, g, or t
gcgcccgcggcttgccccgcacctcgcattgcagctcggcaggcgatccctcgcgcacggtcaccacggccctacccttgggcacactgatggtgggcggcactgtctcagaggagatgttgacctcgacgctgaggtcgggcacgggtgcacctgggaaagaagccatgcacaggtaggtgccatagtcactgaagtgcaggtcaatgagctctaggctgctggtgactgcgggcagctcaggatcattgcgggtcaccagcagccgcttggacatgcgtgccggcttgccattcttgaaccactggtaggtcaccttctcctggggcactgcatccacgtggcacgatagcttcaggtcctggcccagctggatgttctcactctctntgatcacgtcanggagtgatctggaatggtagcgttcttcatggatcgcacca

SEQ ID NO: 4513 - DNA, 430 bp, Homo Sapiens
caggatgctgagggtgttacagaaagatatttgcactgtggaattcaggaagggtgaggtgtcaagagtccagcctggggaagaaccaaaagtcctgaactattgaggaacaagtacatgcggcgcagctcagcaaaagacaagcccaggttcagggacagtgtgaccatggggtccaggccatcaggctccgtcccagcatggaaattggggaggggcagggagaggttcagggcctggtagaaccactgaatctgggagtcagacagaggcagggccaggggcctgtcatggggctccggcagagagctctggagttgggggcttgaccaggagttgcaataatcgtactgacagcactgggcctgataccagtactctgcaaagtaggtgttgcgtttttcttggcagcggtaggaaatgtactgtc

SEQ ID NO: 4514 - DNA, 440 bp, Homo Sapiens
ccagaacccggatctccgcaagcgcagcctcgcgccacatggagtgcagtttgccgccctccacaaaccttgcacctattcccctctcccttccctggaccggcgagtcttcttgtaaattaacaagtgacaagggagtgcagtgccttgcatataacaggcgcatagaaaatggcttatttctttgtacagctcttttcgcttaatccatctcttgaaatataagtagttttgagaaggttctgctttagtttgaggcctgcctctccttaactgtcggcctgtttccagtattggcgttttcaaaaactctgatgtaacaatcagtagttctgggtatctgggttcactttgggggttgctaaagctacatgttcttcaaaggaaccgaataactgatttaaggtgaagcaagtaaaaacaatttaggtgaaaaaaaa

SEQ ID NO: 4515 - DNA, 373 bp, Homo Sapiens
  misc_feature (55)..(55): n is a, c, g, or t
gccctctccatggctctggtcaccctgaccctctgccctgcccaccgcaggtccnccggggtccgggaagccccttctggctgcacctgccatgtttacagagggcccctgggctgcgcggccccagcctgggcaccctgatttttaagccatagacctggggtcagggcaggaaggaacttcactctgctgcttccgagaacctcggccgtgacattcggggtcccggggacccgccccacagactccaacttcccctccaaaccccgaagtgaaacccgccaccgggttaaccccacaagggggccgctgcgagaagttcacccacccccgaaaaaataattaaactcgcaggccaggcacggtggctcat

SEQ ID NO: 4516 - DNA, 712 bp, Homo Sapiens
aaagtcgatctctagaggtatcccccatgtttgaaggcagtgtatcactggagcaaggtagcacattaaatagcaacctcagtagtgtgggaagaggaagagaagagtaactctcatcttttaaagctcgaagtcaacaaataatatctaatgatgaagtcaagaaatagaggtatagccaagtacattattcattagtaaggaggtaacagaaggaccagaatgagccgtgtaaactggaactaggaagagttttcccctgcactattttattctctgcaactctatgcatatagccctaactaaaagcttaaaacgaaaagatgaacaggagaggcccacacactaagggagctcatacccctaactaaaattctctctcttccaactaaacttagatgtactgtcctagtacctgatgcacataaatagctcagaagccttgacgtttttaaaacccatgttccttctagatatgtcacgtgcgctgtcaccagaaagcaagtgctggcagaagtaaagtgacatggatgaggaattaattagaaggggatcaaaactgaggaagtcttttagctttgacgtgacctgtcaacacaaactgctttggttgagaaaaatcgggaagactgagaagactgacggctgcattcccgcacagacctctgcggcctccctgcagctactcactcacactctcagaatcactgcg

SEQ ID NO: 4517 - DNA, 201 bp, Homo Sapiens
  misc_feature (76)..(90): n is a, c, g, or t
gccatccatcctgtgcaatatgccgtgtagaatatttgtcttaaaattcaaggccacaaaaacaatgtttgggggnnnnnnnnnnnnnnntcatgccagctaatcatgtcaagttcactgcctgtcagattgttgatatataccttctgtaaataactttttttgagaaggaaataaaatcagctggaactgaaccctaaa

SEQ ID NO: 4518 - DNA, 528 bp, Homo Sapiens
tttaataaggtggattatgatcgcatcaggggatgttggccctgacagggcggcatccgagtggttgctgcgctgtggcgccatggtgcgctaccatggccaggagaggtggcagaaggactacaaccaccttcccaacaggccctctggacaaatacaagattcaggcgatcgacgccaccgactcttgtatcatgagcattggatttgatcacatggagggcctagagcatgttgaaaaaataaggctgtgcaagtgtcattatatcgaggatgactgtttgctgagacttagtcaacttgaaaatttacaaaaaaccatattggaaatggaaataatatcctgtgggaatatcacagacaaaggcatcattgctttgcgtcatttaagaaacctcaaatatttgttgttaagtgatcttcctggagtaagagaaaaagaaaatcttgtccaagcctttaagacagcactgccttctctggaactaaaattacaattgaagtaaaataatgtgtcttatttcagta

SEQ ID NO: 4519 - DNA, 466 bp, Homo Sapiens
cccgacgctttatacttctctcgctcttatcactattgaactggctaatgaagaactagttactgatctcattcgaccgccatatgctttacaggaccgtgcaactatcaatgaggataatttgcccatgatccatcagttgtggcatcacggcacatggttgcagcatacctcaacatttgtaagtcagatgatagctgtccccgcattttgccagcatgttagcaaggttattgaaattcgaactatggaagccccttattttctaccagagcatatcttcagagataagtgcatgcttccaaaatctttagagaagctatgaaaaagaatttgtactttctgaccaacaagattgcagagtcgctaggtggaagtggatatagtgttgagagattgtcagttccgtatgtaccacaagtaacagatgaagatcgactttctagaagaaaaagcattgtggaca

SEQ ID NO: 4520 - DNA, 551 bp, Homo Sapiens
actggcggcaggcacctgaattggtttgcagttatgcttgtgcgcgtcctcataaccccagtctcgccctagcgctgtcccctttcctctccctccagcttttcctggactttttcacctgagggtcctgcagtaatggcaggtggcctgcccagaaccatgcccttacctgcttcttctccccattttgtttaaaggcagtgacagctaccagatactcaggcttgaggctttatccctgaattctgcctcgccctcgccttcctcatggggttcttacgggtctgagcctctggatgctctctcagatttctgctgtggatgaagggactcagctgctcgctgcaggtcacctgacctccctcatgccgtcacccatccactctgacgggtgggtcatatgcagaagcttctcagcacctggccaagttgtagccgatggtctgtccgaaaatgctggttcactctccactggccaactgtctgtctgcactgcactgccagttgcctcttgcctgcgccattgcgctaacatctccactcccgtacca

SEQ ID NO: 4521 - DNA, 425 bp, Homo Sapiens
gggtcatagtcgactcctagaggaacacatgtttgaaggcagtgctttcaacaagacctatgtagatttggaactaatgaataaaaagaagtggtctggaatgatagaattttacagctaaaaaggacctgtaaaatcatgtacatcattctgcatgattcacggactaggagtccctggtcaaaaacttcaaaaactaagtgatgggtcccaagttactcagtggcagaaacttgattcagtaacatgtcagcttgtgggcttgaaaagtcttaagtgtctctacttcttctatccttgtgctttcccgggactttacacaatcccacctcccactggacaattgtcaaatcccagagagtatgggaagtctgttcatctctgatcaccataaatacgtatgacatacacacactgcactcggg

SEQ ID NO: 4522 - DNA, 957 bp, Homo Sapiens
  misc_feature (28)..(28): n is a, c, g, or t
tgcccccctacgggaatctctcaaaggncagcgcgaggtggtctcccacccccatatgagacggggaatagttcatgggcccctctcttggaggaccaccgaggagtgggtgataccaatgtgcacaccactgccccggggagaacctacccaaacacctgttccagggcacgttgtatacggggacacctgtggaaagaggggagagatctcccctgggccattccaagtgaaggcaaaggcaatctgtattgtctcagccacagcccaccggatgacatcaccgggcagggaggggtgctggtggtggttcatacggagtaagctgctctgcctgtgtgagtggctcctgggccctaaacaggcacctttaggccatgggtcactcaccgtgagccatcaatgtgctctggtctgacatggtttctctctgtcttctagtctagacctagtttttttgttctgttccccacgtatggatatagtagagattgttgtctgtgaaatttctcttttgtagattttgagttttcccttgtagggtaaagaatgatcactttctgtaacaataacaagaccactttttaagatttatcctgtttgttctttgctgattgaaacataataattgttaaaattctctacagccttctttttcttccatagctaatcttccttctaatagtttttgctttctgttttgcctgttgttgctttgcaaagctttcccctccatagcctgtacctgttatcaatataaaataatcttcctgttgaatgcttcatgacttgaattctactttgataaaaacattgccatactgctttttatcttgatgaattcatctggcattgctttgccttatcatctcatctggagtttttaaatgccatttgtttcagttgtctttaacaacataataaatagactttgccatttaccaggcaactaccgcg

SEQ ID NO: 4523 - DNA, 788 bp, Homo Sapiens
  misc_feature (77)..(97): n is a, c, g, or t
gggagatgccggctccagatctccacttcattcacaggtgattttggaaatcctgtaagttacacttcctgttctgnnnnnnnnnnnnnnnnnnnnncctttggctgattcctgctgagtgaggccagttcctcatcaggctcagggcaggtgccttttcaggcgtggcctcctttccatctagcacagcatctttgtctctgttctgtctcctccaaatccaagatgattttaattagtacagacatgtacagtctacaattaaagagtgatttgtactaatatgattttgattcttcctcctctttgctgtcctttcaagacacttgcctggaaaaagctttaatgcacttagttttcctttaggttttctatgactcagatgtaaaggactttctcctgtacagtatattatccaatgcatgtttgttctctctcctgatatattgaacaccacacagttgtgaagccgtgcagtggggatgccccacacccccacagaggcatctacccccgggtataaggaaagacattttttcctttgctgtactttgcttgaacagtgtttattggcctgtaaattgtgaacctgtgcgcgaaaagatgtgaaaacacttccaccgcaatgcacttttcctgcccccatgtataccgaattggccatcctgttacaagggatattgcatggtatgcaaacccaacaggcaccccattttttcaaacgggcctacctcttttcgctccacatccccaacactccaacctccccaacttccgccttgccggcg

SEQ ID NO: 4524 - DNA, 936 bp, Homo Sapiens
aaaaataggcaggaggaggcccagtgtttaattcggcacgaggtggcatatgtccgcgaagtcagtacggcccctgggtccacgtggaagcgaaagtaggaggaagacataggccaaggagccagactatcctgtgttaactccttcctctgccactttttaccttgtgggacctcagttaatatgatcctctgttgaagcaagaagacaaactgtatggtggagaaagaagtgggaaggatcttgcgctggaagaagcctgagaagatgatgcacagatagagaggcaccaggacttgagaggcaccaggacttgggaggcatgttgatccatctccaggaaagactgagaaaaagagcgtagaatataagaaaaaatacttcctctgttctcagatcagtatatagtaattaatggccacaccttattagaagttttcagtttgaaacacaacctggactgaaatcatgagggaggttgtgtaggaaagaatcatcaagggacttagttgggagcttctctaccacagcttactccttatggtattaaccccctttaagtgtaaatgtctttggtttaaaacgtttgtacctcatctgttaccagagtgtacatactggagagaaaccctatgaatttactgaatgtggggggaactgttactcatatgtagcataacgtcgaacgttgcaagtcatgctgaagagaaaacctgagcttctaaggagtattgacaagccctatagctagatgacaatctccttgagaagcagaaattcatgctggagagaactagtgaagggtaggcataactccattgagttatacgaaacaattagctagcagaagaaagcatggaatatactgggaatgaatacattaactgctacagccttatcccttacctcgaatagggacatcaatatacggaaaag

SEQ ID NO: 4525 - DNA, 1259 bp, Homo Sapiens
  misc_feature (218)..(218): n is a, c, g, or t
  misc_feature (832)..(866): n is a, c, g, or t
  misc_feature (1088)..(1088): n is a, c, g, or t
tttccctttattggtttttcagtgggtttctaattttattttaaattgatttattaaaagttatttatgaactccttagttacctgtactgggaccctgaatgggaatttaaatacccccccttttctcagttctcccagaaaagggatacttcctaaaccccacccctaaaattatgataaaaataaaatgccccctattctggaaactgttaaacntgggaaaataaaccatgccccacctggaaacaatataagtcataaaagtttatgaatctgtgggagagactacacgaatcagaaagcaattctttggatataagttaggagcttttagaagtatataaactcttttaggcatctagagtagagacacaaagaggatttctccataaataatgatttagccagtgcaatggttggttgcccatggtctgcatctgggatgtcatctgtttttgtaaataaagttttattggaacataactgtgctcatttgtttacataatgtctattgctgcttttgtggtaaaatggcagggttgactagctgtgacagagaccgtatgggctgcaaagcctaaaatatttactctctggcccttccacagaaagtttactgacctcctgatctagttcaccaagtactgctctagttacctaaaagagttaatgcacctcaagaagatttgagcatgtggtgcaagaataacttgcatactgggtttgttcattagcatgtaatgtcaaaccacaccttgaagtggtgctttattttgggcgaggaaataatttgtatacactttcaggaaatacctataaaagtcaatttnnnnnnnnnnnnnnnnnnnnnnnnnnnnnnnnnnngcctgcctatgttcttttaatatttttatattattgtgaggaaagggtgctaagatgattgttctgtcattcttttagtttttctttagtttataaatgtttcttttgtttataaatgttttctcataagaagtgttccctcatgccctcccataacctttaaggcaatctacctaaaatgcttacagtatggtgaagccttattcagaaatatttacttanaccataggtatagaatagctaccatttctgaataataatgtaaaatgaaaacagaaacagctttcaaatttgaagagaaaagtttccctgaccctagtcagctaacaaagcctatttctaacagtgaacttcctgaactcaagcagctgctcatgaagctttaagagttca

SEQ ID NO: 4526 - DNA, 1577 bp, Homo Sapiens
  misc_feature (780)..(815): n is a, c, g, or t
ggggattcggtcccgctgtcctaggcgggatggtgccgctgtgccaggttgaagtattgtattttgcaaaaagtgctgaaataacaggagttcgttcagagaccatttctgtgcctcaagaaataaaagcgttgcagctgtggaaggagatagaaactcgacatcctggattggctgatgttagaaatcagataatatttgctgttcgtcaagaatatgtcgagcttggagatcagctcctcgtgcttcagcctggagacgaaattgccgttatcccccccattagtggaggatagtgcttttgagccatctaggaaagatatggatgaagttgaagagaaatctaaagatgttataaactttactgccgagaaactttcagtagatgaagtctcacagttggtgatttctccgctctgtggtgcaatatccctatttgtagggactacaagaaataactttgaagggaaaaaagtcattagcttagaatatgaagcatatctacccatggcggaaaatgaagtcagaaagatttgtagtgacattaggcagaaatggccagtcaaacacatagcagtgttccatagacttggcttggttccagtgtcagaagcaagcataatcattgctgtgtcctcagcccacagagctgcatctcttgaagctgtgagctatgccattgatactttaaaagccaaggtgcccatatggaaaaacggaaatatacgaagagtcatcaacttggaaacggaaacaaagagtgcttttgggcatccaacnnnnnnnnnnnnnnnnnnnnnnnnnnnnnnnnnnnnactttgttaaactattattattgatcacattttgatttttttctctccacatcaggatagtttactggaagcacaatctcttatactagtgggacaaaagggagaaaaaggaagcaaagataaatgggtatgtaggatgaagggttatttaaaatggaactaaagatagaaggaggactgtaggaagaaatggaataatttaaatgtgaggaaagatatctgtggtagacatgtccttccatgactaatttctaattgtaactcaacacacattgaggtatgggccctcctcagtgactttaactagctcagaaacgtactcccccaccaaccccacctcaccgccccccatcccggttctgggagagcattgttattaaggatgcatgacaggaatgttggcagaactggaaagtattaaaaaagcattatcagacagtcttgatattatacattttcagaaatatattaaaaataataaactaaaacccatgatttcaaaagctcactcccacccattttcccctaccttataccctgttgggccgcctccggcctctgaaaaacttttctaaaaccattctgtttgggccccgcggggcccaattagggaaagccgaacatgggtccataacccggttttcctaaggagaaaacccctggtcttggaattaaccgccttgggatttcctcccccatataaaaaatacgccccggtgcggggaaacccgaatgcggttcccgcaacaaattctccccaat

SEQ ID NO: 4527 - DNA, 748 bp, Homo Sapiens
  misc_feature (437)..(456): n is a, c, g, or t
  misc_feature (458)..(468): n is a, c, g, or t
  misc_feature (470)..(477): n is a, c, g, or t
  misc_feature (479)..(494): n is a, c, g, or t
  misc_feature (496)..(501): n is a, c, g, or t
  misc_feature (503)..(508): n is a, c, g, or t
  misc_feature (512)..(515): n is a, c, g, or t
  misc_feature (518)..(590): n is a, c, g, or t
  misc_feature (597)..(597): n is a, c, g, or t
  misc_feature (599)..(600): n is a, c, g, or t
  misc_feature (604)..(605): n is a, c, g, or t
  misc_feature (623)..(623): n is a, c, g, or t
  misc_feature (625)..(625): n is a, c, g, or t
ggtacagaagtgctccaagaatgagaaaaaaaatacattgagcaaatgaaatgttaaaatgtacatctgcaataacctcattggactcttaaaaaatattgtgttttaacgtatttcttctttctgttttaggatttgagcctccttgattttaatagagaacttctagtgtatggatttaaagatttctctttttcattcatataccattttatgagttctgtataattttttgtggtttttgttttgttgagttaaagtatattattgtgagatttatttaataggacttcctttgaaagctgtataatagtgtttctcgggcttctgtctctatgagagatagcttattactctgatactctttaatcttttacaaaggcaagttgccacttgtcatttttgtttctgaaaaataaaagtataacttattcacnnnnnnnnnnnnnnnnnnnngnnnnnnnnnnngnnnnnnnngnnnnnnnnnnnnnnnngnnnnnngnnnnnngggnnnnggnnnnnnnnnnnnnnnnnnnnnnnnnnnnnnnnnnnnnnnnnnnnnnnnnnnnnnnnnnnnnnnnnnnnnnnnncccggananngggnngggaagcgccgggcgagncncacaaggggcggaagagaaaacagtgggcccaaaaggccccacgccgcaaaaggagacaaccccccggccacagaaaaaccgccgcgggcggggcccaccaccaccccacccgcgcgggagga

SEQ ID NO: 4528 - DNA, 956 bp, Homo Sapiens
aagcaggctgttactggcccggagaggcgttatgcgtggcgggggcaagcggatggtgggcggttcgtacatgaagcggcgcgaaaagctgaagcgggaacgtcggggacggacgtgagtcaggatgggtctgtatggaaggagacttgtgttcccccatccctcatgcttcctgacccaagaagattcagaatggacagtttacgaagatacctcagacagaaaagtctttaaggctcgaaaagacgatgagagtgagtgatcgtcagcaacttgaagcagtgtacaagggtcaatagaagaagctgttgaaaactgatgtcaagctgttaaatggcaaccatgaaaatggagatttggacccaacctcacctttggaaaacatggattacattaaagacaaggaagaggtgaatggcattgaagagattcgttagatcctgaaggaagtaaagcagaatggaaggaaacaccctgtatcctaagtgttaatgtaaaaaacaagcaggatgatgatttaaattgtaaacctttgtctccccataatataactccagaaccaggtctctaaactgcctgctgaaccagtttctggtgatccagcccactgggtgatctggatgccggagatccaagcctccggagtactggcctctggtagatatccacctctggtgatcacaactctagcgagccctcctctagtgatgctgcctctggtgatgcaaactctggtgatgcccttctgggtgatgtgtacactgggtgatgccagctatgtgtgatgcaaactggaggaatgaatctctccagtctggggaaacccaacatcgtagggaatccaatcccaggggaaacgggtaccggaagaaacccaaattactgggggaaagagccagaaagaggagagtaagcagcatagaagaaaaagagaagcggaagcaaagggcaacagg

SEQ ID NO: 4529 - DNA, 769 bp, Homo Sapiens
gaggatccccgctgatctccaggaagaaataatagtttatgtatgtgagtgtacttgtatgtgtgagtgattctgttgatttctgcatgatagaggcaaaaagaaaagaaacccgattgaacaaaacagttgcccacagcaccagctgccagaggaaatactaccatgagggttttggtttccaccttctagttatggaagttctgttagaaagttagtaatggaagttgtgtcggaaagtttaaaagtgttcatcccatatagtttcctattacaaagaggaataacctttaagtaactacacacacacattcatatattcaagtctttaaagaacacctctgccactgggtatggggtaaacatgattcatggacaaaaggaggacgcttcttttaaaaagtgtagaataacactgctacaaatcatctagagggccagacaggggcaaggcccacagttacataatagcacaatttctgcaactgttgaacatcagcattatttattagaattgaagatggtgatgggggagggagagtgtggggggagtaagacacagaaaggaaaacagaacacaacttttctttaaattaaagtattaatgccgataatccttttattaacaagtatatttgaacttttagaaatggaagtgttttaatcaattttgatatgtaatcataaatagactgtaggctcaaacccaggtaaataaagatttaaatgtagtaagcgtaaggcaataagcacctttctatctaatctg

SEQ ID NO: 4530 - DNA, 597 bp, Homo Sapiens
  misc_feature (214)..(345): n is a, c, g, or t
  misc_feature (349)..(456): n is a, c, g, or t
ggattcgatcaaatcaggtaagattagaattactggctcctgccttccaaaagccagccataaatcaaatttctcttggaactaagcaggccaaaaatgtcaaaatcatcccccatctcttttcttcagtaatcaaggaaagagaaaaattagtttaaatgtagaacagaatttcaattaataaaatgtcatcggccaggcgcaatggctcatnnnnnnnnnnnnnnnnnnnnnnnnnnnnnnnnnnnnnnnnnnnnnnnnnnnnnnnnnnnnnnnnnnnnnnnnnnnnnnnnnnnnnnnnnnnnnnnnnnnnnnnnnnnnnnnnnnnnnnnnnnnnnnnnnnnncatnnnnnnnnnnnnnnnnnnnnnnnnnnnnnnnnnnnnnnnnnnnnnnnnnnnnnnnnnnnnnnnnnnnnnnnnnnnnnnnnnnnnnnnnnnnnnnnnnnnnnnnnnnnncagagtgagaccctgtctccaaacaacgattttagagaagatacatgttttatataatcaaatacaacttttcctaataaccacatgaaaatttcagattttccccaattcaagtgatagtctgagatagcgcttttgaag

SEQ ID NO: 4531 - DNA, 180 bp, Homo Sapiens
ctagcacgtgacttttctcgggtgatagctttaatagtatcagcagagcagggaacagaatctagtttaatgtgtcctaatccagtggttttttttaaccacaaaatactgcctttgagaaaaggccaggccagcagagtcagaagttgagcctgggatttgcatagtcacaagtctgtc

SEQ ID NO: 4532 - DNA, 1076 bp, Homo Sapiens
tgggtgatgtcgatctagaggatccgatgaactccagaagaaagcaaatatagggcagaagggtgaacaaaacagaaaaaattgtaccaagatgttcacagtggtactttgggggtgaagcagaaagcagctttctttttattattttgcagatatttgaagtgtattactctcatatgaaaagactataacaacagaaaagcaaagccagtgcagaacttgcagggcatgagctgagcccctacaacatatgaaatcccggccagaattcccttcacagtgatttactatcctcagtcaccaaaccatcagaagcagcggctcttgcctgcagcctgatgggctacgaagtgcattccctgggtgagaagctgcatgtgcatgatgtccatggggatggagaacaacgctaagtgttagacacgacagaaacccatcttcacacctcacagcagaaaatgccaaggcgtgtacctgtttcttggtcctaaataagtgactggtgaatatggtcaggatttcaatgttttacttaagccccattttgctctaaactgattttaaaagatacttctgagtcttaattttctcagtgggatcaatgacttttgctccatgaagatacacttggagaacaaaagcaaagcattctcaactcaacggccttgatttactttaagacaaaagttcgatgccatgggagtatgcccgctttgcccttacaatgaccaagaaaggtggcagaaatgaaaaagcaccccatcaccagtccggtgagccacggtctccacaccaagtgctaacttgccagggttctgggtaccttgcttagagggagctctgaaaagagctaatttatgatttttactttctttggctattattacaaaagagatatacgtatataaaacacaaatttgcagctataagtctctcccactgaataaaaaccaacaaacttcttaaaactccagataatctcaaattgacttttcccatttcacttcacttcttttcccccactatatattttacccatgggctgtttcttctggagatcatcggatcctctagag

SEQ ID NO: 4533 - DNA, 539 bp, Homo Sapiens
agcaaataacccaatggcagagaggccaaggaatgagttaggcttcagaaacaattgggactggatattgaatacccttcattattgtctttacgtcttggtcttgctttacctctgttccagtggcttttgtttgttgttgttgttttatggtgcagtttctcagtaaagcagtaaatatggcttgttaacagcatttgaattttagaaacagtctaccacttgtctcatttcgtagtataacaaaaaatccctagggaagattgtctttggttccagcttggaataaggtgtttccgtcgtgggctaacctgttacacgtactaggagtgttgagagcgaaggccaccagcgcacatctgcgggggagcatcatttacaataaatacaatgttgtgctctagaggcctgtttacgtatgcgggtcacatgctcctaagaaataaaaaggtatatcttacaatagcccatttatcaaatatcattttcctgaaattggtaacaatattaaatcattgctatatgggattaatgcctgg

SEQ ID NO: 4534 - DNA, 511 bp, Homo Sapiens
  misc_feature (310)..(441): n is a, c, g, or t
tgctgggattataggtgtgacccaccgcgcccggccagctccatattttctgctgcctgaattgtaattattctattcctgattttatttgctgattccattgtttttactagttcatattaaatgctaatgacagatatctttacctaaaacattctatttctcttgtcatgagcattatggaacaaacctacaattgttctccattacctagtttatgacaattaaactcttctttcaaagaaataaacaacatggccaaaatactttccagcacagttgtagcaattcccacctcctccatcagcannnnnnnnnnnnnnnnnnnnnnnnnnnnnnnnnnnnnnnnnnnnnnnnnnnnnnnnnnnnnnnnnnnnnnnnnnnnnnnnnnnnnnnnnnnnnnnnnnnnnnnnnnnnnnnnnnnnnnnnnnnnnnnnnnnnaaaccgttttttatgtttattaaagcctgattcctctttttgtaaaatgatgctctcccatttctattct

SEQ ID NO: 4535 - DNA, 569 bp, Homo Sapiens
ccgtgatctcagaagaatgatgatagtccgaagaaatacaatgggaaagaatggtcctcctccagagcctccccctaggagttcacagctctctacacttctgctaagacagcattatcataatgctgcaaagtgccaaagagaattgttttaataaacagggtttttatgctcttaaaaaacttgaagacaagcacttgattctattagctaaagtacactgcagctagcaaaggattcacggtggaatggagccacatactgctgtctccaaactgacatcaccggcacttaaaagattgaattcttaaacacattcggctccagggaagcgctcccagactaattagagttatccatgcaaagttctagaactataagtgtgctttaaatattttttactgcatggtatgattgtgtttctcaactgggggaggccactcaactaaaccataattactattgcagattacctgggaagaaaaacagtatgcattaaaggcttcagtaacagccagctttaaagcacagacagtgaccaggactgtcagatgacttccctaggggac

SEQ ID NO: 4536 - DNA, 598 bp, Homo Sapiens
ttcgatctatatcgatcccgctgagctccagaatgaaacagtagacgagcagcatctatagactatatcgtcgaagcatataagacggaagacacttatgggacttgctcacgctggctgtataggaggtaaaaaagttccatgctacgcatctgtaagctggaaatccagaaaagctagggtgtcattcagctcaagtctgaaggcctgagaagtaagagcaagtggtgtaagttatggaggctgaaggcctgagaaccaagagctccattgtccaagggcaggggaagaagatggatgtcccagctcaagatgagagagaattcacccttcctccaaattctttttgttctgtttgggccctcagtggatgggagacgcccagccacattggagagggacgtcttctttactcactgtcacagacacaacccagaaatatttcaccagctcttggacatcacttcaccgtctcaagttgacgcataaagttaaccattacaagtagccttgaaagactctatgtgtccttcctaatgaccaggagatgtgagtcttgcattgaagctagagaggttcaggctggacttgaagcata

SEQ ID NO: 4537 - DNA, 1312 bp, Homo Sapiens
  misc_feature (261)..(261): n is a, c, g, or t
atgtcattgaaagtattattgaaaaggatcatagtcacattgaatttgtgaaggccaaagaaattgaagggagtgatattttcattttatgatattcacatatttagtaaattttgtgtacaagaataccaggcagagtgttttacccatggaaacaggtttcagattactttgtttttactgttagagtctcaagtttagaaatgctaacacttaaatcagtttttttctcactatacttgaagattgttaaaattttgnatatcttcctagcttgatgaatttaaacatatcttcagatctgtgacagtgacagccaataggactgataatattagcttcaaaccaataatatccagggttaaaataaaaatcatagtgaaagtacgattgtaaaattatgctatattaacttttaagtctgtaataacttgacatcaaaatgttatgtaattaccataaataatggctagcgagaacatctttggaaattctcaaattacctttcttactacactgtttgcagaatgaatgtagaaatgatcctgttagctttctgaatgttctgtggttgaatgtgtttttgcttaaataaagcttttggtatttgtttaaattacacttcttgagaagtggaaattttaggatcatctttgctttgtttcagttttgtgatttttgaaatgaatgtttagtttactgagccagttggtcatttcttcctcatgtcgttaagtccagtgagtaagcctgaactgtgaataaattaccaaaaacttgcttagaatttcattttgaagcaatttgctaatatttgaagtgtatacacatttgtagttatgttaaaaattgtattgtactaagaatgtaatcaatgtctactttagttgtaaacatttctgatgtcaaaactttattcattactgttgattttaagaataagaaatcactgcctaaatattaccaaaagccactgtctctacccgaacttcccagtttgggaaagaatcgttagataaaacaaaggctctgccctttctgataccaaactccacagatactttctcacatcttttaaacattttgcaataacatattgtttataggaagtttacagggtatgcaatgattaaaacttttaagtgaattgatagttgcaaaagaaaagataaatatttaagggtcagtgaagtagcaagacaatctaaagtttcctggtaataatctggcctcctctgttaaattatagaagccaaagtttttcccttaacagaaatccctttttaattgaacagccaaagccaaaaaggtc

SEQ ID NO: 4538 - DNA, 914 bp, Homo Sapiens
  misc_feature (691)..(706): n is a, c, g, or t
  misc_feature (709)..(711): n is a, c, g, or t
  misc_feature (713)..(713): n is a, c, g, or t
  misc_feature (716)..(718): n is a, c, g, or t
  misc_feature (720)..(721): n is a, c, g, or t
  misc_feature (723)..(724): n is a, c, g, or t
  misc_feature (727)..(729): n is a, c, g, or t
  misc_feature (732)..(733): n is a, c, g, or t
  misc_feature (735)..(735): n is a, c, g, or t
  misc_feature (737)..(738): n is a, c, g, or t
  misc_feature (751)..(751): n is a, c, g, or t
  misc_feature (769)..(769): n is a, c, g, or t
  misc_feature (787)..(787): n is a, c, g, or t
ggaccataggtgggcctgtcaactcttaacagactatagtaaaggagagatggtggcacatgtgagataaaacttgtttatatttacattcttattagtggatagatatcacctcagtacaacactgaaattaaactgccttgttcatgctttcatgtctcaaatcaaggcctaaatgagtaaaaagatgattacagattacctaaaacccttaaccagttttggtttttgattatgcatatgtgttggcttgcaattaggtttttagtttctgtttatgtgacttgtttgaaaacattggattcgtcttctctccacagtttctacttgaacctagtagcttattttaattccctgtaagaggaaaataatatagggaatctgttcaactattcctttaataaatcatgtgacttggccaattacagaaattcctaagtgtagtattttgaaatgtggccagtgtcccagatttgtaaggtacagtgtgcatacagtgtgtcttaggatttttttaagtaaattaaggatgtttaccagaaattattgatttactgaaccaagtatttattttcagaagcccacttttggggaaggttgcctatatttttgatagtaattagatggaagattaaatcctgtttaacctggatagaaacagttttaactattgctgaagtaaaatcacttnnnnnnnnnnnnnnnntgnnntntgnnngnnannccnnnggnngngnngagggtggggccngaggattggttgaggggngggaatttgaaaacaagnttggggaaaattaaaataaaagatggattcaagagaataattgaaaaagtggaacgaaaatgggggtaggggaaattgccaaaaaatcctccggtcttcttaagagaaggtatgaaagtaaagaaaa

SEQ ID NO: 4539 - DNA, 794 bp, Homo Sapiens
  misc_feature (50)..(51): n is a, c, g, or t
  misc_feature (87)..(88): n is a, c, g, or t
  misc_feature (102)..(108): n is a, c, g, or t
  misc_feature (110)..(122): n is a, c, g, or t
ccatgttccactttaccctactggggccccgcggcgcccaaaccgaatgnngttctagaaaagctttcttcgaaggggccgaggcgnngccgacccatgttnnnnnnncnnnnnnnnnnnnnagggtcttacaacttctattgtaaactatactagactatagagggacttctacatctttcaagatgtgtttaataaaggtctgtttataataacttttgaggcatgaatctagcaaatagtactttatacaatgtcccttgtcattaccaactcataaatattaagtgttattcagtgacttatgtttggatgtggtagtgctgatcagggccatgtgctgatgtcctggagagcaaaatcaatccaaagtggtgctgctatttgtgacagaacatgtttatttactcagccccggagacaaaaggaaaattgatatgggggagcgggaaataggagaactattaaatgtagtgaagaaatttcacaggtctaaaggaactattaaaaggaaggataaagtagattctatactataaaacagaatcctacctctgataaaagacaaatcagcctgaatttttgaataatcaataggattcaaaatgactattttcaattgcaatctcattcttaatgttcttccagaacccttaaccctgagagaagcagggcaaaatgtggccaaaggattcagaacctttctttccaacattatcccatcagctatgagaaggtaaagatttagccacggcaaggtccgaggtccaaaatcaactcttttcattctctgt

SEQ ID NO: 4540 - DNA, 751 bp, Homo Sapiens
  misc_feature (310)..(328): n is a, c, g, or t
  misc_feature (648)..(648): n is a, c, g, or t
ggacgacgaggaggtagctggctaccaggatagcattgggcagctggagaatgatctgaggaacaccaagagtgagatggcacgccaccttcgggaataccaggacttgctcaatgtcaaaatggctcatagacattgagatagcagctatacaggaaaccgctggaaggcgaggagacacgttttagcaccagtgggttaagcatttcggggctgaatccacttcccaatccaagttacctgctcccacctagaatcctcagtgctacaacctccaaagtctcatccactgggctatcacttaagaaannnnnnnnnnnnnnnnnnncatctaaggtagcctctaagaaaacctcccagataggggaaagttttgaagaaatattagaggagacagtaatatctactaagaaaaccgagaaatcaaatatagaagaaaccaccatttcaagccaaaaaatataattccattgctttgaaaaagttaatgcttaagagggaatgatatgcatttgacttgttaaacagcctattcctgaactataacacctgccaccactataaaatgtcttcaaggcttcagtctcatatttagtatcgaatacttacattctctaataagaaaaccacccccttagattgaagtanactgcagtcctgggagcaatcacagatgaggttatctaagaatacagcttttctggaccttcagctcacgcctttcacagtggatcgaattgattccaggtgg

SEQ ID NO: 4541 - DNA, 409 bp, Homo Sapiens
ttcagcaagttccagaacagaaaagcagctgggcctcatgaagcatttacaaacttctgggagctttgctgtcaaaggctgaagccaaagatgcgctctaaggaacaaatcctggagctgctagtgttggagcaattcctaactatcctgcccacagagatagagacctgggtgagggagcactgcccagagaatagagaaagagttgtgtcactgatagaagacttacagagagaacttgagataccagagcagcaggttgatatgcatgacatgctcttggaagaactggcaccagtgggaacggcacacataccaccaaccatgcacctagagtcacctgcactccaggtaatgggacctgcccaggaggccccagtagcagaggcatggatcccacaggcagggc

SEQ ID NO: 4542 - DNA, 530 bp, Homo Sapiens
  misc_feature (468)..(468): n is a, c, g, or t
tttgatacatgcatatatttaataatgaaacaattcatcaacagcaaaaagaaagtagaaaaattcgtaagacctcagggctgtggaagagaatgggacatcaaggaaaaaagatatatatagcaaccaacccagaaggctgcatgatgagtgaagcaaaggcaagtttggctaagatagtattatatgctctgaaaagagaatggctggataggtacccacttatgtgactgcttactagcaggcagccttactgtatgcctcatggaatggaggcaaaaagccagggaaaggtgggaggggagaaggaagagaactgtataaaacccagggtaaacaaatgagtggggcagaattacagagagaggactctaaagtcttttgtttccttgaaagtctaaaataaaccttaagtttttaactatgtcagtcaaattcaatgaacacataatgagtagcacctaggcnctgtaaaggaatgatagggggaataattataaattaaggaatgcctggatcctgctctcagg

SEQ ID NO: 4543 - DNA, 985 bp, Homo Sapiens
  misc_feature (492)..(515): n is a, c, g, or t
agtttgggcatatttaatgatgattatggagccttagaggtctttaatcattggttcggctgcttttatgtagtttaggctggaaatggtttcacttgctctttgaccgtcagcaagactgaagatggcttttcctggacagctagaaaacacaaaatcttgtaggtcattgcacctatctcagccataggtgcagtttgcttctacatgatgctaaaggctgcgaatgggatcctgatggaactaaggactccaatgtcgaactcttctttgctgcattcctttttcttcacttacaagaaaggcctgaatggaggacttttctgtaaccaggaacattttttaggggtcaaagtgctaataattaactcaaccaggtctactttttaatggctttcataacactaactcataaggttaccgatcaatgcatttcatacggatatagacctagggctctggagggtgggggattgttaaaacacatgcaannnnnnnnnnnnnnnnnnnnnnnngaaattttgtatatataaccattttaatcttttataaagttttgaatgttcatgtatgaatgctgcagctgtgaagcatacataaataaatgaagtaagccatactgttttaatttattggatgttattttccctaagacctgaaaatgaacatagtatgctagttatttttcagtgttagccttttactttcctcacacaatttggaatcatataatataagtactttgtccctgattaaataatgtgacggatagaatgcatcaagtgtttattatgaaaagagtgggaaaaggatatagctttttaaccaaaaggtgttttgccccattcctaagaaaatggagcggattaatatagaaaaataagtgtggggcattttctttccctggttaagggggaaaatggtatgtgggtttgaacatttttcttcccccaattgctcctttcccccaattccgggttttttc

SEQ ID NO: 4544 - DNA, 675 bp, Homo Sapiens
  misc_feature (66)..(101): n is a, c, g, or t
  misc_feature (115)..(270): n is a, c, g, or t
ggggcaaagcattgttcccccgtttcctcttttcttctgggcgggccccgcccccccaaaagaagnnnnnnnnnnnnnnnnnnnnnnnnnnnnnnnnnnnncccccacagggggnnnnnnnnnnnnnnnnnnnnnnnnnnnnnnnnnnnnnnnnnnnnnnnnnnnnnnnnnnnnnnnnnnnnnnnnnnnnnnnnnnnnnnnnnnnnnnnnnnnnnnnnnnnnnnnnnnnnnnnnnnnnnnnnnnnnnnnnnnnnnnnnnnnnnnnnnnnnaagggaagaaagtttctgcttttattgaaaatttatatatgactcagtattgtaataaataaacataaccattttcacaaaaaatgacagtgctatgctaaagaagaaaatattaaatgggggatttacttgtagtggcaagacagactttttatcaatacagaataaatattaacagcattcgtgagccaatgttgagacccaacaaaatgtaggaatcaagcatgatgtaagaaataattatccagagaaaaagatggtgtattctcggatgataagactgtctttgtaaactggtgcgtatcaattagtcccatcctcacagcacaccttcaaaccacagggcttgtttctggctatgttaaaggaccatcctctgaggaaagcagaggagaggaactccat

SEQ ID NO: 4545 - DNA, 1196 bp, Homo Sapiens
aaaaaacggggtttttggtgttggaaaaggacatcttttctgttttccggacctctgcttgcctcatgccaggtgagacaccttcatgcctgtttccatgattgagaacatgggagtacgcttctttccacctacgttcctggtggattttcactggagttgggctgcactgtggaaaaggggttgggcagctcctgtggcacagtgagggggcatagaagcccaaggcagtcggtaagaaatcaccaatttattgaatgaaaaacccaacatcaactcagtccctcccacccccatctcctctctttggcccaggagacgctcagggacagcagggcttgagccctgggaagggctggaggagagcttgggggaggtaatggagaatgagaaaaaccactttcaaaatgaagttctggccaaaaacttctgggaaggagtgagaggacaagagaaaaagctccaaaggggctgtggggcgcagatgaccgggctggggggtgcagagggttgggctggggcccctgtgtcctcaaccactcctgagaacacggacggtcaggaatgaggggctcagaccccgggttggtgagagggaggtgacagggagggaaggagcctgctggagggaaacctggctgggaggatgggtctgggcccaggctggggcctaaggagggggaagaacagagcagggaaaggcagaaaaactgacacggtgggaggagggagatgaatgggagatgaaacagaatgtctgaggggccacagacagcatgtatggtggtgggggtctgcctcccatctctccaagtccaggcagagctgtgctgggtgaggggctgggaggcagaggcaggagcatcattaacaagggtggaagccacgaagacagcgaccagtgcacagggtgtgtcacatggtacaaccaagagacattctgtttcatctcccattcatctccctcctcccaccgtgtcagtttttctgcctttccctgctctgttcttccccctccttaggccacagcctgggcccagacccatcctcccagccaggtttccctccagcaggctccttccctccctgtcacctccctctcaccaacccggggtctgagcccctcactcctgaccgtccgtgttctcaggagtggttgagacacaggccccagcccagccctttgcaagaaccac

SEQ ID NO: 4546 - DNA, 607 bp, Homo Sapiens
tcagaataagagagcaggaggaggatctgccaactcaggtacagcagtgggggatggcaagtcttcggagtattcataaaccaaatgctaagggaaacttttgttgtttgtcttagaattttaagaaaataaagtctgttgcagtttatctgctttccttcctggagagtggctaaactagtgttctgttttacaatgtagaatgcaaaagcagaaaacattcaagaaaattctatactgtatttgaaaaacatcaccatttagtcttaactgctctttgtttcttattataaaaattaatacctaactatgaaaagttagaaagcctggagaagtatggaggtgagttgtccaccattgggccactagagagtgccctatgagcctgtccgtggtgtcctggactctggtggtgtgcactgcatttgctggcagtgagccagggggtgggccacatctgggcccgggcggggtggatctctgcagaagtttatccatctcttggttgacagggtgggcgagatgggagcagctctgagggtccctgttggcagagaatgtctttgattatcaacaacatgcctttttgttgtgggcttgtgatcct

SEQ ID NO: 4547 - DNA, 701 bp, Homo Sapiens
gtgaaatgttagtatgcactttgtgtaggaaaaaatggaatggtcttttaaacagcttctgggggggtactttggaagtgtctaagtaaggtgtcacaagtttaaggtagtaggtatttcgtgagaagttcaacaccaaaactggaacatagttctccttcaagtgttggcgacagaggggcttcctgattctggaatataactttgtgtaaattaacagccacctatagaagagtccatctgcggtgaaggagagacagagaactctgggtcccgtcgtcctgtccacgtgctgtaccaagtgcaggtgccagcctgtgacctgttctcactgaaaagtctggctaatgctcttgtgtagtcacctctgattctgacaatcaatcaatcaatggcctagagcactgactgttaacacaaacgtcactagcaaagtagcaacgagctttaagtctaaatacaaagctgttctgtgtgagaattttttaaaaggctacttgtataataacccttgtcatttttaatgtacaaaacgctattaagtggcttagaatttgaacatttgtggtccttatttactttgcttcgtgtgtgggcaaagcaacatcttccctaaatatatattaccaagaaaagcaagaagcagattaggtttttgacaaaacaaacaggccaaaagggggctgacctggagcagagca

SEQ ID NO: 4548 - DNA, 539 bp, Homo Sapiens
cgcacattagcttaaaacttataaattcggggcatatttggacatcttgtttgatttaaacgctagaattcctgttccaaggatgttctaggtttttggcttattgcccttgcatcttaaagcagtttgttccgtaattcgagagccagtagcattggattgatggaagtgtagggtttatgaattattgcagatgactaccatacctcacacagcgttggtgttgtgagcggcccatgaaaagcctaaattaaaaatcaaggattcagtcaaactaagcaggtactcatgccaggtactcctttctctacccacatccatgtttgaatgctattgcctgtgatctttacgcttaactgttgtgtatcttttttgttctttacaagaagtgcagaggggttttttgtgtattgcgtgaaaacttataaaacaaatgttaacagaatggaattttttttcaactgtatgtagggctgcagtggtggccagaattagatatctttaaagaattttaaatacaataaacacttcatattaaa

SEQ ID NO: 4549 - DNA, 328 bp, Homo Sapiens
  misc_feature (1)..(1): n is a, c, g, or t
nagcattttcataagacttccaggtagttcctatgcacattaaagcttgagaagcagtaattaagagcaaggtccaagagcaagaagggagaagacaggaaggaattgattatgtgaatttaccctcaagagatctagaaatctttatctttggaaaagataaagaattgctcaaggtattcatcctttcttctttccgtttctatttaggaagaggcatgtctaagcaatgccaaggcagtcattaatctgttgagtcctggctggtttgaaaaacagtgaccttgcttctcttacctgcttgtatcatgaccggataagcggacgg

SEQ ID NO: 4550 - DNA, 666 bp, Homo Sapiens
cggttctataagctgatcaaagctcatagtccccactctgagagggacgacgtggatggtgagccacaggaagctgggaaagatgcggaagattcgctccatgaatggcaagatattaatttggaggagttggaaactctggagagcaacctcttagcacagcagaattcactgaaagctcaaaaacagcagcaagaacggatcgctgctactgtcaccggacagatgttcctggaaagccaggaactcctgcgcctgttcggcattccctacatccaggctcccatggaagcagaggcgcagtgcgccatcctggacctgactgatcagacttccggaaccatcactgatgacagtgatatctggctgtttggagcgcggcatgtctatagaaacttttttaataaaaacaagtttgtagaatattatcaatatggggactttcacaatcaattgggattggaccggaataagttaataaatttggcttatttgcttggaagtgattataccgaaggaataccaactgtgggttgtgtaaccgccatggaaattctcaatgaattccctgggcatggcctggaacctctcctaaaattctcagaatggtggcatgaagctcaaaaaaatccaaagataagacctaatcctcatgacaccaaagtg

SEQ ID NO: 4551 - DNA, 298 bp, Homo Sapiens
ctgctgggcgatctagaggatcccgatgttatcccaacacatgatgtaagtcagccacgccaaaaacaaaggcaacccagaaagttaaattacggcagttaaagaaaaatccattccaacagttttaaatttggctgtgcaaaacaggagccttaggctacgtaacaatatccacagttaaaactgtaggttcgtactgtgtgtagtcactctgaaatcagtcctcagggattgagcaggcttttaaatccaaattgaatttctgagttggaaaaagcagtttgggtactgtgaagca

SEQ ID NO: 4552 - DNA, 321 bp, Homo Sapiens
cccaaataaaaaattcagcaacaaggctggcattactatgtacaaacttacagacacaaataaatagcatcttctaactgttggcagcttaagcactcaaagttaggtctgagtaatttctttctgaactctgcatcttagactcctaaataaaccaaggaatataaattcctcattgttagtaatctattctctgaaaaacttgggacttactgaataacattaatatcccaaactcttgtagagctagaagtttctagtgagcttaccaaaggatcagtccttcgacatctggaagccaggagcgattaccagatcccg

SEQ ID NO: 4553 - DNA, 555 bp, Homo Sapiens
  misc_feature (534)..(534): n is a, c, g, or t
  misc_feature (541)..(541): n is a, c, g, or t
tcccatcttcccaccaatgctccctccccacaatgtacacggactcttccaactccacatgtggagtctctggcagcttttcaattttggttgacacagatggaaattaaccaaactgaaattatcacccacttatctgaactgaggctataaccgcagtttttcttttcttcactgttatgtgtctaaaacctatgtacagctaaattttagtacagcattaaaaatccctctctctgcattcacaggtgggtgacactttaagcccattagctctgtagaactgctctatcgtagaggtgctagaatctgatgaacatttgagacatttgctagcataaaattctcagctcaaacaatgtaaggtatcgagattcattataatgcagcaattgcatgattcattttatgtgcggctcaatttcttaggtctaggctgtttacatgatcaaaacgagggacatatttttcttcttttatgaagctactcatactcaataactgcatatttttaccagcgctgtggctcaatcntgcaatntccagcactctggg

SEQ ID NO: 4554 - DNA, 1121 bp, Homo Sapiens
gggaccggaaggggtgggctttgcgaagatggcggcgctgggggtgctggagtccgacctgccaagtgccgtgacacttctgaaaaatctccaggagcaagtgatggctgtaactgcacaagtgaaatcactgacacaaaaagttcaagctggtgcctatcctacagaaaagggtctcagcttcttggaagtgaaagaccagctgctgctcatgtaccttatggatttgacccacctcattctggacaaagcctcaggaggatctcttcagggacatgatgcagttttgagactggtagagattcgaacggttttggaaaagcttcgtcccttggaccaaaagctgaagtatcaaattgacaagctgatcaagactgcagtgacaggcagccttagtgagaatgacccacttcgttttaagcctcatcccagcaatatgatgagcaagttgagctctgaggatgaggaggaagatgaagcagaagatgaccagtctgaggcttcagggaagaaatctgtgaagggagtgtctaagaaatatgttcctccacgcttggttccagtacattatgatgaaacagaagctgagcgggagaagaagcgtctagaacgagccaagagacgggcattgagcagctctgtcattcgtgaacttaaggagcagtactcagatgctccagagggaatccgtgatgctcggcatccccatgttacccgccagagtcaggaggaccaacacaggattaactatgaggagagcatgatggtgcgtttgagcgtcagtaagcgagagaaaggacggcgaaaacgagcaaatgtcatgagctcacaaattcattcccttacacacttcagtgacatcagtgctttgacagggggaactgttcatcttgatgaggatcagaatcctattaagaagcggaagaagatacctcagaaaggtcggaagaaaaaaggttttcggaggcggcggtgattatgggtgtacatatttgtatattttttgtcatcctgagatacttctaatttcattgtatataggtggttttccctggaattcattaattgtttgctttggacatgtggaaagagccttactaataaaattgattttacttatg

SEQ ID NO: 4555 - DNA, 808 bp, Homo Sapiens
gggggcggcggcggcggagagagctggctcagggcgtccgctaggctcggacgacctgctgagcctcccaaaccgcttccataaggctttgcctttccaacttcagctacagtgttagctaagtttggaaagaaggaaaaaagaaaatccctgggccccttttcttttgttctttgccaaagtcgtcgttgtagtctttttgcccaaggctgttgtgtttttagaggtcctatctccagttccttgcactcctgttaacaagcacctcagcgagagcagcagcagcgatagcagccgcagaagagccagcggggtcgcgtagtgtcatgaccagggcgggagatcacaaccgccagagaggatgctgtggatccttggccgactacctgacctctgcaaaattccatctctaacttggtcattctctctctacttggggagatcggatgtggcactttgaggtgtctgtgtttctggtagagctctatggaaacagcctccttttaacagcagtctacgggctggtggtggcagggtctgttctggtcctgggagacatcatcggtgactgggtggacaagaatgctagacttaaagtggcccagacctcgctggtgggacagaatgtttcagtcatcctgtgtggaatcctcccgaaggagggttttccttacctaaacatgaaccttctgaccatgtacccttggaatggggttcctcccttcccggggatgatcccgggagcctccccctctcggccagcgattgggcacatctggggcaaagacctgggatgcccggcacaaca

SEQ ID NO: 4556 - DNA, 1096 bp, Homo Sapiens
ctgagtgggtttcagactttctctcaggatttccgctggcttcaggttccggtcaggcgtcgggacagagcctgatccaggcttcggcggccggtggcagctctcgatcagctctcgcagtcggagaggcggctaaggaaaggtgccacagcagagacgcgaaggagaggccctagaaccttttcaaagaagaatggaagaaaccatgaagcttgctacgatggaagacacagtggagtactgcctgttcctgataccagatgagtcaagggactcagataaacataaagagattcttcagaagtacattgagagaataatcactcggtttgcacctatgctggtcccctacatctggcagaatcagcctttcaatcttaaatataaacctgggaaaggaggtgttcctgctcatatgtttggcgtgacaaagtttggggataacattgaggatgaatggtttattgtttatgtaataaagcagatcacaaaggaatttccagagttagtagcaaggattgaagacaatgatggtgaattcttgttaatagaagctgctgactttctccctaaatggctggatcctgaaaatagcaccaatagggtatttttctgccatggggaattgtgtattatccctgcaccaagaaaatctggagcagaatcttggttacccaccacaccccccacaattccacaagcattgcaatataatcacagcacattcagaaaaaaatacttgcttcagaatctatacgagctgctgtgaataggcgcatcagagggtacccagaaacaaattcaggcctcacttcatcgagcacactggattccttccagctggcattggtggcaggggctaaagcagcgccccagtattgtgggctgcagcagtccaagcatttgtaaccttacgaagaacctaattaaccatgcgacccatgaccggggtatcaaagacgtttcttgccctgtaaagaccgaattaatagacatgtgtcacagttgcacaaaatggtgtatgtttgcacattatgaaggcaaccaaagttatatgacgacacgcgtgacatgacaactaacggcgtacgtcatt

SEQ ID NO: 4557 - DNA, 478 bp, Homo Sapiens
gcgccgtcccgcgccctcggctttgccagcgcagcctgcgaggagaggcaggatgaagatgactgtggatttcgaggagtgtctgaaggactcgccccgcttcagggcagctttggaagaagtagaaggtgatgtggcagaattggaactaaaacttgataagcttgtgaaactttgtattgcaatgattgatactggaaaagccttttgtgttgcaaataaacagttcatgaatgggattcgagacctggctcagtattctagtaatgatgctgtcgttgagacaagtttgaccaagttttctgacagtcttcaagaaatgataaattttcacacaatcctgtttgaccaaactcagagatcaattaaggcacagcttcagaactttgttaaagaagatcttagaaaattcaaagatgccaagaagcaattcgaaaaagtcagtgaagaaaaagaaaatgcgttagtaaaaaaatgc

SEQ ID NO: 4558 - DNA, 1761 bp, Homo Sapiens
cactgtttttgaacgccagcctcagttttggccattgaaagtgtcacaatacttttaatcccttgaagagctgcactgactggtggaggaacctcattatctgcagactttattgctgtgtctttcaatattcttgcaattaagaacagaattgtgggcaggattgccatacatccagcgggtgaacaaagggatggtaaatcagagagtatggtaactgtggctgccaccaaacgagcactttcttctgatagtcgagttttagtggctatgtgacttggagagtctgacaccttggtactgagatgtggcatatgccgtactaaaatgaacatcagcagctccatagttgcaaacacaagagattttccaggaatgagaccaccgctgtcacctccttctcccaatacggtacaggcctctttttccatatcatcttcatttagagtgtttcttttctcttgcaaataatcctgagcagctcttactatctgttgtacaactccagtaaccaacagctggacagatgatggattccaggtcaatagaaggcggtgcaaaacactcagcaactcaacacctatcagctgatcttctgcaatatggactcgagcataaggggagtctagcaaggtatgtaaggcctgcaggcatgctgtaacatgttcaatgggctcctcaggtctaggggaacaaagaaactgtatactcacacctaaaatcagatgcattctgtctttgttaatttctggcaaagatttagcactacccactgctcctgatgcctggtttaaattgacagatgtagaacgtttttgtaaaccagatattgctgctgcttctgtagactctgagcacgtaaatcctgtgctatttaaccaaagtgccaccgcatggagaattggggcccaggaattccgatagtgaagtctagctgtatcaatagtttcaggggtataaaatgctccaccatctggaggaagctgactagaaaattcggctggtaaagtcaagagtgcataatcttttaatgctgctaaccacaggcgactgagtgttggtagttcaggttgtaccagtgttattaaactatctggtggcagttcatcgatggtaccacagtcgtcatcatcatcgtcagtatttttaattgctctttttggttttgactctgcttcctttttaatattcatagcgaccacatatacctctgcccaagctttgagaacagccagtttttccatggtcgtggcactctctcggtacagctggctggaagatccttttccagcctgaactttgtccagagaagaaacaagaagattgtgtactcgacggagatcattgagatcactgacaactccacttcctatccatgtactacatacctggcaagctttcgctattatatctgatggtgtatcttgtgaaaaggctggtcttagagcagctcccacattagcctgatactgctccagtatcacatgacctggaaattctggctcaggcacagacgcaaacttcttgataatgtcttcaagcgcctggagcccagccattcgcagctggttgctatgatcagttgcagccatgaatgccatgcgaatgaggtcagagagatgaagtaccaagaggtcatttgtagggtttcgaagtttagcagaacgtgccaaggcaagatcaaagtgagcctggtctgcattctcacacaaattgatgattcgacacaggcaatcggcagcaaatactcgagtggccccc

SEQ ID NO: 4559 - DNA, 760 bp, Homo Sapiens
aaggccaaaagggcgccgacccaacccaaaaagtttaaggttacccactttcccccagggccagtaaaggggaattgttaaggatcccacccttgcttaagggaggtttggcaggacagaatgcacctaaagattttcagcttgttttagggtcactttttctcaaaaatatttattaatctggcaaagggggatgggagtggggaacacttctctgtgaggcaaatggtatctcaacaaataccgacttttcaaggaagaaagctctccacttctctcataaacttatatactaccttaaacagtatgcagtattcggcatattttttaaaaatgagtccagagaaatagaaggatatagttacctcataaagttaactgttagcaacagacgtcttcgtatgtgatttataaatttcttggcaagaacaagatttttagaagaggcttactcacacttaagacagagtgaaaattactctcacagaatgcaaagtatagaataataaacatcaccattacctttaaatgccatacaaacatcctacattgcaggttgcagtatcaggtttccagaatttccaataaggcaatacctacacaaatattgccaggctaaaaatgatgcaatttttctaaagcttcaactttaaagacttgcacgactagattctagttaaatcagagctagcttttgtctcaaagtgcccatgaaatagcaatactgcactccaactatttgagaaagagggatctggaa

SEQ ID NO: 4560 - DNA, 539 bp, Homo Sapiens
cctctgactcccaaagtgctgggattacaggcatgagctaccacacctggtttggagagtcttaattaaggaaatttccctaatgttcatttattttctaaatccagaccgtgtttcagaataatccttacttgagagtagccattttcttgcctgtacttgtcagaactagaggaaatagccaagactaatgaaaaagattactctaacccttaaaagacttttaaattcactactagagtggtcattttaaaaatacatccatgttttaacttatttgagccttctttatgagtaaatgattcctccttgttctgtctttcaaaccagctaaatatttgtcacaaaagtgcttttttctcactgttgcctattttcatatatcaggttttaaatagttttaattttttaataaaattttctctacgttctatatgcaattgttatatatctaacttgcatagctgaacggactaaaatacttttttaagagataacttcaggaaaccattatattttactatctgcatgctgttaac

SEQ ID NO: 4561 - DNA, 816 bp, Homo Sapiens
  misc_feature (93)..(93): n is a, c, g, or t
  misc_feature (191)..(199): n is a, c, g, or t
  misc_feature (227)..(227): n is a, c, g, or t
ggggctcactgcaatctaggtggaggtctttttaaataacctcatgttacttcaggcaaatctggtacaggagaagcccaagctaactgagcntgggtgaaggcttgtgcatcaccctggccttgagttccttgcctgtcacagatgataggttcatgtacacgaacattaatgtttgataaggaaagcannnnnnnnngttaaaattgaattgtcagtactttacnttttttccccccaaaataggtatatatagactgcagaagcttcagtcccatatataaacgttcatgtcattttagaggattatatggtttgtctcccagagaaattaacttaccatttatcaaaaaattctttgtcctaatatattggagtctttaaaagtgttgaagaataaaatattaattagaacaacttcaaatgctaaggtgatgttttaccgggacttaattaaatacaactttttcctttcgaaaaagactgttcacatttgcttccaggtgtaattattgctttcattccttacccccctcaagcaaatgtgaaaagtatactgacctaagattctcattagttttagttcttaaaacgaatagtaaatgatttcacagcgtaaaatttgatgttatttctggaagctggatgatatggaagagttcatgtgcctggacacaccagttccctgtaatcctggcctctagggaaataaatctgttaaaattttgatgtggggttttttgcttatatttctatgcataaccaatgaatttaaattcctcaaaaatgaaatcctaaaggaactttgcttttgca

SEQ ID NO: 4562 - DNA, 1671 bp, Homo Sapiens
  misc_feature (151)..(151): n is a, c, g, or t
  misc_feature (880)..(880): n is a, c, g, or t
gcacgctctcatctataatggcattttaaaatacaaggtgcaccttgttatttgtaaacttgaaagaaataacctatttttaaaaaattatatcttggtctacagacgtaccaatacataatagaatcatggttacaccatagtctgtctnttcaagatggcatgaatatataggaaactaactaggtatgcatctttgaatgcataactctgtgctagaaaagaaagacaatgttgttcttttagacaggaatatcacctcagcacaaatatcaattaaatgtacaaagtgtataggcaacagtgtgcagtggatttccagaaaatgttgtcttttcttctggttaacatgcaatatgtggatgtcttgtggctgaggaacttttgtgtgtgttgcttgacgatatatacaatatggctaatgacctcgtcctttactctaaccaagcacactgtcctttcctctttagcatgattgtttagtgatgaaaattctacatctgggtaacatacttgtggctagtcagatgttcggcagatattatgggtatctggttggctgtggctgttgcagcgaagggaacacttgtggcagatgttgttgctgcggacacagtggctggcgtagcaccgtgcaccatgggaactggtgggagaaatgctgtatgctgttgtaactgcatgttggctagagcctgttggtattggaaaataccagtgttaaagactgcggtggcaccgttggttttttcaagagcaggcctctttggtaatgggggaagtacagcttgaggaattcccaggtcaaaggttgcctcgaggggtcgcttcagtgatttgacagccgactgagtcatggcagctgcggtggctgcaaccntggtgcagcctgcagccctgggttgacctgggtattgggcagccttgatcttggcttgcaaatgtgcagggggatgaaagtatttgcacttttccccgagagcatctccctttgatgtaatccatacacacagtgactgtgttgtcattggtgtcaatcattgtgctgtcagcaggaatgagcaaacccgacaatcattttctcctcggttgcaattgccacgttggtactctcgacaatacctcaagtctgtctgttcgcattaagtgtctgtgcagcagctgcagcagctgcaggtacagggacacccggattccctgtaacctacattggtgcagtcggcaagatctctgccgggaccaggcttggagaaacaggtcccagatagggattaaaggcggctgctgatgcattggtggctaagcttggtgcaactgaaaacattggcacgggttgtaatggggcaccaggcatcatggcattggctagttgcatttgctgggccaacatggccatgttcttctgctgaatcaagttattgcgtccatttatctccaactgcgtttttaaatgtgggggtggatgaagatatttgcagttctccctggagcaacggccctctcacattgttttgtcagaggcggccccactgtcgaccaagtgcccaaggcattgtgggagtcatgattccaagatgcccgcgacggaaaatggaacttgtcagctccttgtcatgggagcattgtgggcgccacaactcattcagctgcagtgaaaagactgttgcatgt

SEQ ID NO: 4563 - DNA, 985 bp, Homo Sapiens
  misc_feature (434)..(446): n is a, c, g, or t
ggtgcacagatttactccactatggaaaagggatgctgtaggttgaaccattatagcctcagattcgatcttttcctaactaaaaatattaaagcctcatgtgtgaaataaatttttaaaaagatttatctggatttagagaattttagatcaacagatacctctcagtgtgtttgctaattaataaaaatcagtttcttacaaataaagtttgtaagaaaatgttcattttaagtgatagatagtggagaagatttatcacctaaaatatacccatcagtataaggcaagcaaaagtcttaacatggcagccattctgcctttgccgtggccctgtcctgtttagttcttagtgggttaatttttgtacttttgcagaagaaacttcagcaagctagaactggaaggtactttaatttttcatatatatttgnnnnnnnnnnnnnaatgaaggctcatttacttgaaatgtaaaaactttcactgaatacaaatagaaaaagtgatgtgttttatatcatattgctttttgtccatctttgtggtttagtttatttactcacttcatgtttttcacctataaaattgtcaagctagcaaaaaaactcttgtttttttaattgggagagaagagacctgccagattatcagacctcttcatgttaaaagaccatctcctgtaaaactgacctagtggacaagctgaatttgaaatagactgtgaagtaagctgtaacttgtcattttaattttgtttaacacggttactgacttagatgatgtattaaataccaagataaagaaaaatgcacctaaaatctaattagaattctctgggtcaccaagtcaaggtggtattgatctgtgttaatctgagtaacttattgcctagcctataaataaattccaaaatatccaattcatttcttcttgaaatggtgcttgttttgttttctttccattacacaattagactcctacagtt

SEQ ID NO: 4564 - DNA, 359 bp, Homo Sapiens
  misc_feature (96)..(119): n is a, c, g, or t
caaaatgaaaacaaaactaacattgatttgtttaatcagaatgacattaagcatatgcttctcttctatccttccagtttcccattgaaatgactnnnnnnnnnnnnnnnnnnnnnnnngaagaaagcatccatcagtactaggcaaccccataccagaaactttgggaaactgtctgcaagtctaacagtgggtggaagtggagtgagaaaaaggacaactgatgttcaacccttttcaggctgagtaagaatacagatgagaccttagcggcagtacctactattaatacccttatcctggggccaactaagacaagaccaaggtggattatgatgcagttggaaggccacaggggg

SEQ ID NO: 4565 - DNA, 403 bp, Homo Sapiens
ccttaataccatggaccttatagcatgagctaacactatatgaatattaatattaggttcattttaccacctaaaatgttttgaggattggaaggtatatgatttcagcattttacagtccaactatgacacagtcatgtggtatggatcttgaggacagccttctcatgaagctccaatgtactaaaatattcaagtcagtaagaaccatttctttctggatgtgaatataatttaacaattactgccttgcaaagtatataatcctagagtcaaaccgttatataaaaaaatttccctgtagatatggcaaaattcaaagatgaaaaacagcccctaaaacaaattgctataaactctcttaagaactcattgtgataaaatatataacacctcactcaag

SEQ ID NO: 4566 - DNA, 530 bp, Homo Sapiens
ccaatctagtatgtgaaaagtaaattagaattatttttataccacacattatcagttaagattttctatataattaattaggaacaagcaattttaacaaaaatgagtagaagagaacggtatttgttatagcacagttattccctatacgcttatctgctggactcttaagaattggtacatttgcattgtggggtagaccagcaccatgatgcacaaatttggctgaactctacaggggagcagcagtgtatccatagtccatattctcctgtgtgttcattcatccattcagcaaatgttcattgagtgcctactgttgtcaggcacttgttctaggtgcaatgaaggacttctgtaggcgtgaggagtgggaccagtgagtgtctctatcttgtgggtcttatacatttgccatttcaaaaacatcctccacctttgcctctgtcaggagtcttcttttgatggcaagatatgatgggaattgggaagatgaggctgtcttacttttagagcttttattcatttat

SEQ ID NO: 4567 - DNA, 612 bp, Homo Sapiens
cagccaggggccacactcacatcctgtgccgagaaagatactggctcatcctcggatccagacccacatctctattctgccctgagatacgcgctttgcacttgcgtgctcagagctgccgtctgaaggtccacacagcattgacgggacacagaaatgtgactgttaccggataacactgattagtcagttttcatttataaaaaagcattgacagttttattactcttgtttcgtgttaaatggaaagttactattataaggttaatttgcagtcctcttctaaatagaaaaccatatccttggctactaacatctggagactgtgagctccttcccattccccttcctggtactgtggagtcagattggcatgaaaccactaacttcattctagaatcattgtagccataagttgtgtgctttttattaatcatgcctaaacataatgtaactgggcagagaatggtcctaaccataggtacctatgaaaagcgctagctatcatgtgtagtagatgcatcattgtggctcttcttacatttgtaaaaatgtacagattaggtcatcttaattcatattagtgacacagaacagcacctccactatttg

SEQ ID NO: 4568 - DNA, 451 bp, Homo Sapiens
tggatgtggaagctggttagaaggctgcgattttcacctggcaagaggtcagggtggcagaggagacagagcaaatggacagtatgtctatgtcagtgaaggtgcggtgaccggtgccactcacacgtaaggaatgcttatcctggagggctgggagtgatccagtgtcatctcgatgcaaagccccttgcacagaacatccattgtggcactctgttaatagtggctgtcattgcataaagagatggccaaggagatgaaccacatgaaaaatgagcctccttctccccaaatcctcaagtcctggtcagtttactctaaatcaaagtttccagtcgtcatgatgagtatgatcatcatcattataattaaaaggcaacagaacccatttctaaattgaaatatgcttcagttgactcaggggtgaggttcctggaactccctcttggtg

SEQ ID NO: 4569 - DNA, 974 bp, Homo Sapiens
  misc_feature (266)..(266): n is a, c, g, or t
gactgagaacaaagaaaaggatggaaaccttcatgaacgtccttcatcagaggacatgaagtcagatgatgatcctcccacaaagataccaaggtgtcatctagaggcagaacaagcagtactaatgaagatgaggatttgaaccctgtacagaagatagaaagggagaaggagagacggatggctaacaatgccagagaacgcttacgcgtgcgggatattaatgaagcattcaaagagcttgtgccgaatgtgtcagcttcacnttgaagagtgaaaaaccccaaacaaaactccttattcttcatcaagccgtggcagtcatccttagtctagaacagcaagtcagagagaggaacctttaccccaaagcagcctgccttaagagaaagggaagaagaaaaagtttctcccgtatcggcagagccgccaaccacactgccaggaacccatccggggcttagtgaaactaccaaccctatgggtcatatgtaaacatcagccagttccagagttatcagtaggctagatagaaggtgacctctcctcataaggacttggacaactcagattatctgaagacaccaaacctgacaggagggagaagaaaaaacaaaacacttgaaccaagaaactcaaatgtaatcctacgatcaaagcaactggtcaacacttccatcagaagtgaagataggaagctcatcagatagaacatcagcccagtgagatgttggcaacaaatctttggtggcaagcagggtgtcgcttctgcacaatcagagactgtctcgatctctccacccaccgtggaagtggccttgtgcctaaactgaatggacaaatgcattgtaactacaaattttatttattgttatgaaactgtaaggtctacatataaagggaaaaagttaatgtggaaagctgatctacactcagctgatgccagcatacattaaagcggttcacgtgcagag

SEQ ID NO: 4570 - DNA, 491 bp, Homo Sapiens
  misc_feature (16)..(16): n is a, c, g, or t
  misc_feature (121)..(177): n is a, c, g, or t
  misc_feature (383)..(383): n is a, c, g, or t
ctcgtccccaggctgnagtgcagtgcgatcttagctcgctgaatctccgctcctgggttcgggcggttctgctgcctcgagcctcctgagtagctggagtagcggtcatgcgtcaccacgnnnnnnnnnnnnnnnnnnnnnnnnnnnnnnnnnnnnnnnnnnnnnnnnnnnnnnnnncagctgggctcttaatgttacttattgtaactcacttcctgtaagactcaatctactcttcaagttgatgtaacctctataaatggaattcccggaaatctgcagttatgctgtggggatcttaagcgtagattgagttccatgcaaattcaaattctgttgataatgtgtccataatcaaatcatcatcttgcaatgcaagggcntaccccataattatcagcacattaaaatagtttatttctttttccattctgtaatcttaaaataacatcagcttcagtgcctgttcacaatacaaaaaaagtcaaaaa

SEQ ID NO: 4571 - DNA, 511 bp, Homo Sapiens
ttgcttagtcattctactgaaatcttccttctgcccaatttacattcttcttttaaattttctacgtaaattctgtctcctccatgaagccagctctaatcaatttaacagcacatatggtttattctgcttatttgaaacataatgtcatataatttttataagatagctttgtactgccaggcttaaagcccagaaactgtatttcccagaatcttctgccagtgggattctggtaaatgtcttccagtgagaggatttctcttgagatttgaaaggcagaggaaaagacaatgctactttgggtattatagctggcacatggacctgactgaaagcaaacagatcaaaagtcaattgttacatttttgagtgaacttactgtcaacttccttcaagccacaacaaaccaactaagcaactaccactactatcattaaaagtaaataaataaataaatcatcccagactaaacagcctttgtcgttcaaggcttaaaacaatccttgag

SEQ ID NO: 4572 - DNA, 887 bp, Homo Sapiens
ggggagatagcaccaaagtggataaactagtacgagatatttatggaggggactatgagaggtttggactgccaggctgggctgtggcttcaagctttggaaacatgatgagcaaggagaagcgagaggctgtcagtaaagaggacctggccagagcgactttgatcaccatcaccaacaacattggctcaatagcaagaatgtgtgcccttaatgaaaacattaaccaggtggtatttgttggaaatttcttgagaattaatacgatcgccatgcggcttttggcatatgctttggattattggtccaaggggcagttgaaagcacttttttcggaacacgagggttattttggagctgttggagcactccttgagctgttgaagatcccgtgatcattacctggggaggggttcctgaaaccttccacaatgggatctgtggactttcatttttttaagagacttactcaatttcatgactgtactacctgaaacaaagtgagaaaggacaggtgtatttttctaagtcatcaagataaatccttaagaattcagtctaaattagcaaccaggaaggaaaaatatattaaaaacaacaaaaaagtggcacatgtccaggcagtgtgaggatttgctgtatataagttgcctggctttgtatttttgaaatctctgcatcactcattgggaagtgcttctgaagagagctgctctgtgttcagttgactggttttgtgtcctgtttgaacttgctgaatgtaaggcaggctactatgcgttataatctaatcacaatttgtcaatatggtcttggcaatcatctgtgcattactctggtttgcattaagcctgtgtgtgaacttactgtaaaacatgttttatttc

SEQ ID NO: 4573 - DNA, 802 bp, Homo Sapiens
  misc_feature (784)..(784): n is a, c, g, or t
ggggagtgtctccaagcaagatggcggaggagccgcagtctgtgttgcagcttcctacttcaattgctgctggaggggaaggacttacggatgtctccccagaaacaaccaccccggagcccccgtcttccgctgcagtttccccgggaacagaggaacctgctggcgacaccaagaaaaaaattgacattttgctaaaggctgtgggagacactcctattatgaaaacaaagaagtgggcagtagagcgaacacgaaccatccaaggactcattgacttcatcaaaaagtttcttaaacttgtggcctcagaacagttgtttatttatgtgaatcagtcctttgctccttccccagaccaagaagttggaactctctatgagtgttttggcagtgatggtaaactggttttacattactgcaagtctcaggcgtggggatgaaccacaaagaaaatcaacttgctactacatgaaatggattttcacggaagagacagctctgaaaagttttgatgcttgtggcaagagacttaacagatgtgatctatttagtatgtgtctactctatgtttatgcataagaaaacatccatagcatgaatggactcagaaaaatgtgatttgtattaatgcaccagtcatcataaaagatggtcatgatagtacacccattgctccctacttgttactattattgctgcagatctgcctccaagggttgaaaagggagactaagactgtataaacatcttcattgtcagttctcaaaatgactggaattgnttttcatggggtaaagta

SEQ ID NO: 4574 - DNA, 348 bp, Homo Sapiens
attatgtgaaaaaccaaatgctttaatgaggctatcaagaacaagtcgattatttcattggatacattaatatcgatccataatatacagtgctatggaccatacagaaattattgctgcatccaacagcaggtgactattattaacattacagtaccaagcatccgcaagagacagtcatttgtcattttttatcaagaaatagggctgttttatactgttattgacatcaactttttcccagtgcatttttcaaaaatattaataagttcattcctttgtgcttttaacttcctatgtattgtatttgttcttattgctttattgtttaaaaacaaccagaaagcc

SEQ ID NO: 4575 - DNA, 473 bp, Homo Sapiens
tggtcacactccttggcttctcccaccgcaagcaacgctgcctgcctctgccgctcctccacatcttgccgctgcccagcagagctggcttctgggtccacctgagcactggacggtgctcccagggcgttggagcaggcggaggggtgtgtggccaggtactaggaggcaccaggaaatcccgcggggtggcccatgcagaccaggcgcacgtggctcatggggcagaattgccaaggacagctcacgacagtgccaccttctcaccattccagccaaggagagatgtgacgttggaactgctctggcacttctgtcaagcctcccccgccccaattgccttgagatctctgctctttgtcagagatttgcaaagactcacgtttttgttgttttctcatcattccattgtgatactaagaaactaagaagcttaatgaaaagaaataaaatgcctatgttgttgttctaaa

SEQ ID NO: 4576 - DNA, 1610 bp, Homo Sapiens
  misc_feature (127)..(165): n is a, c, g, or t
ggggtgggagctccgtgcaaagtgaagctgaggcctctgtggatcccagtttgtcgtggggtcagaggaaaaaactttactatgacacggactatggttccaagtcccgaggccggcagagtcaacnnnnnnnnnnnnnnnnnnnnnnnnnnnnnnnnnnnnnnncacagatcattcagcggcgcctagcccaagcgctgcaagaggatgattttggtgtcgcctgggttgaggcctttgcaaaaccagtgcctcaggtagatgaggctgagacacgggtcgtgaaggatttggctaaagtttcagtgaaagagaagctgaaaatgttgcgaaaggaatcaccagaactcttggagctgatagaagacctgaaagtcaagttgacagaggttaaggatgagctggagccattgttagagttggtggaacaagggatcattccacccggaaaaggaagccaatacttgaggaccaagtacaacctctacttgaataatagctcgaacatcagttttaatatgatcctgaaagctaggagagtcccagcacatggacatcctgtcatagaaaggcttgtaacctaccgaaatttgatcaacaagctgtccgttgtggatcagaagctgtcctcagaaattcgtcatctgttgacacttaaggatgatgctgtaaagaaagaactgattccaaaagcaaaatccaccaagcccaaaccaaagtctgtttcaaagacttctgctgctgcctgtgctgttacagatctttctgatgattctgattttgatgaaaaagcaaaactgaagtactataaagaaatagaagacaggcaaaagctaaagagaaagaaagaagaaaatagcactgaagaacaggctcttgaagatcaaaatgcaaagagagctattacctatcaaattgctaaaaataggggacttactcctaggagaaagaagattgatcgcaatcccagagtgaaacacagagagaagttcagaagagccaaaattagaagaagaggccaggttcgtgaagttcgtaaagaagagcaacgttatagtggtgaattatctggcattcgtgcaggagttaaaaagagcattaagcttaaatgaagtttttgcttagcataaggtttttggcagttttggatcaataaatttttacttttaactaaagtcattgtattaatatataatactttaaattttaaaaattcttgtccacaaggaaatttgtctgggttattggacaatttataagaactatgggagcaatatgaaggtgcttgagaaaagagatgatgttgaagttttccaatattctgttgaagttttccaatattaagtattagcttagggaaatttcacagttcattgtggagtgttaaacttagaacatgtgtaacttttcacataaagagaatgcatctttgacagttatcttatttgtaaggcagcctataaaatagttctgaagtattttatttacctaactataattattgggccagatacttgttaataaatgggcttaatgttaacatggatttcatatgttctgtgtggtttaaaagcataggaatgaaactttggttaaaagcagaaaaagga

SEQ ID NO: 4577 - DNA, 993 bp, Homo Sapiens
  misc_feature (817)..(829): n is a, c, g, or t
gggtgagacataagcttgtaggaataataaacgttctacaataaacgttttggctatcttaagccattgtatgggggggattaggaagtaggagggattgtcctacaacaggcccttatacttcaacagcccaaatattttggtttattcctttttatccataaagtctttattcttcaagtttgggtattatagattaccattgttagcctcccttaatgggaccatatgagccaggcttttaagacggactcattttgaattgagtttcaaactttgaaagtgcaaggatttaatttttaagttgaatcccatgaaaggtgtcatcatcactaggaataacaccctttgtaactacatatagaactgttacaatggtagcagaaaatcctattgatttcatctcacccatttcagataccttcagtgaaattaagggtagtgtgatgtcccatgtaataaaacaggcttagaacatcaattcctctgctgccatttatgtgcttttattcccccttcaaaaattttttattggatatatatatttttcagtattcagactctgaaatctgtcattacaatcaagtgcttgtcacagctgaaagatttctggtggcttaaagtttactagcagtaaatttatgatatggtacagttctttgtacagaaaggcaccattatgttagaataaatttccagaacttagtgggaagaatcaggttttaaccttgtgtgtctgttacttctgagtgcatttctataatataaatgttgatttgcgtcaacattataaaagagcacttctgtggctcatttnnnnnnnnnnnnnggttaagtcttttaaattttggccttgtttccaaatcctgtcttccatgttgtttttctgcacttcctgaccactcttataaaaagctcacaaacctttgaagaaactggagtaggctgttatttcattaaggtttacaaattaaatgcttgatttttaatgta

SEQ ID NO: 4578 - DNA, 1294 bp, Homo Sapiens
caggctgtaccggccgagtctaaggatggacttggggctagctgcggcggggctggaggaggccagataaccatgtcagccacagttgtagatgcagttaatgctgcacccctatcggggtccaaagaaatgagtttggaagaaccaaagaagatgaccagagaggactggagaaagaagaaggagctagaagaacagcgaaaattgggcaatgctcctgcagaagttgatgaagaaggaaaagacatcaacccccatattcctcagtatatttcttcagtgccatggtatattgatccttcaaaaagacctactttaaaacaccagagaccacaaccagaaaaacaaaagcagttcagctcatctggagaatggtacaagaggggtgtaaaagagaattccataattactaagtaccgcaaaggagcatgtgaaaattgtggggccatgacacacaaaaagaaagactgctttgagagacctaggcgagttggagccaaatttacaggtactaatatagctccagatgaacatgtccagcctcaactgatgtttgactatgatgggaagagggatcggtggaatggctacaatccagaagaacacatgaaaattgttgaagagtatgccaaagttgatttggcaaaacgaacattgaaagcccagaaactccaagaggaattagcctcaggaaaattagtggaacaggctaattctccaaaacaccagtggggagaagaggaaccaaattctcagatggaaaaagatcataatagtgaagatgaggatgaagataaatatgcagatgatattgacatgcctggacagaattttgactccaagagacgaattactgtccggaatctcaggattcgagaagatattgcaaaatatttgaggaatttagatccaaattctgcctactatgatccaaaaactagagcaatgagagagaatccttatgccaatgcaggaaagaatccagatgaagtgagttatgctggagataactttgttaggtacacaggagataccatttcaatggctcagacacagttgtttgcatgggaagcctatgacaagggatctgaagtgcatctacaggcagatcctacaaagctagagctgttgtataagtcctttcaaagtccaaaaaagaagatttcaagaaacgcagaaagaaaccctcctgggaaaaagtatgggggggccagaaacatttgggatgccccctccccgcctgaaatggctttttaacccccgaacatgaaaaaatttttgggggaaggacctc

SEQ ID NO: 4579 - DNA, 532 bp, Homo Sapiens
ccgcatgcacttgccccacattcactgctgactgggttcactggaataggttcaggtcaccgggacttctctcagagtcagcagcccacccaactccctcataccgtcgcatctgaaaattttcagagaggaattctctttgtagtcggcttgtcagggttttcaagtttttctatggttatttttaaatctctttttttaaatgctaaaattaatgtcctcattaatgcaagtaattttagagcacagtgtagccatgtacagtttccattatttaaaataaataaatgtgttggttcatttggtgtatggggggacatcatggtaactggaaatgaaagtttaatctttcacaaatgtgcttgataaagctgttaagaattgtctttcctaagtatgttaactgttgtatctaactcaactgtgagctaagtttaaaaactgcaatcatgaatgtttgtgatattttaaatatctactacagcacattcagccaataaagaatctgcctttaatgtaagttgtaatttaa

SEQ ID NO: 4580 - DNA, 872 bp, Homo Sapiens
  misc_feature (251)..(468): n is a, c, g, or t
  misc_feature (573)..(581): n is a, c, g, or t
aatgttgcaactagcaactcatcttcggaagacacagccaggagaatgaagtagaagtgaaaggtttataaatccatttgtaagcatttatcccatatattttaaattcaagaaaaattgtgtttatctttagaattttgtattcaatactttatgtactatgtgactcatgcttctggataaataaagcaccaaatatgtatctgtaaccacaatcacacatattatattaaatatatatctatataacnnnnnnnnnnnnnnnnnnnnnnnnnnnnnnnnnnnnnnnnnnnnnnnnnnnnnnnnnnnnnnnnnnnnnnnnnnnnnnnnnnnnnnnnnnnnnnnnnnnnnnnnnnnnnnnnnnnnnnnnnnnnnnnnnnnnnnnnnnnnnnnnnnnnnnnnnnnnnnnnnnnnnnnnnnnnnnnnnnnnnnnnnnnnnnnnnnnnnnnnnnnnnnnnnnnnnnnnnncacccggtcggggccgccgccccctaaaaagatacaccaataacaaacctgcggtcctaaaaagaaacccgtgaaaagcaactctggctggataccttcaaaccnnnnnnnnncccgcgggggaacgcaaccactcatacgcgacaaccccccgggaggggccaaagttccttaactatagaccaccccaccaaggagagccctgaaccaaaccccgaatttataatccggtccaccccccccggcctaaacctattactaagggaaagatgtatcaacacttattacacacccgccgccatcaacacaacactattccataaagagagactgttgaaaatactccccccacgaccaggatcgtcctacccaaccaatttgtgcacccaaattaaatatatttt

SEQ ID NO: 4581 - DNA, 549 bp, Homo Sapiens
aggatggaagatcatgccccaagggctggcagcccttccaactcagatatgtagattcttggatctacgatagctcattggttctaggacatacactcttatagctctgaaatcaaacctcctataactggtgactcatcatggttgaattggcagctctgtttgcgtctgggtagtaaaaatgtgatacttttacggtaacgttaagtcttttatagaagtaggatttgaaaattaaaaggagttttagaaatcatttgcttgcgtcccttcagtttatagatgaagaaacagaagcccaggcagagaagatgatctgtttaaagccatacagttagtcatagactggtcagatgcatattttgtttctgatctctggtaccttagccgcttcacctttttgttccaaatagtcatcagtgaatgataatgctttagcagatggagttggagtatctaataaatgtggcagagtatctaacagatactgtcctcaaacaatcagcggtatattaaatgcctagcatatacctgaaagcaagttacata

SEQ ID NO: 4582 - DNA, 415 bp, Homo Sapiens
aaaagcagaaagggtttggtccatgaagggctcacctgatgcagtcaggcccacacagggtgtttctctcttgattggctcagtcagctgattcaggggctctaattacagctgcaaagttccttgtctttgccacataacctaagcgcaggagtgacatcttgtcccgtcagagtcacaggccctagcccacactccagaggaggggcaccttggctccatgttagagacctacctacctcagtgctcacatctctccccgtgaggagggcgggctcactggtcaggctggtgccaaggacctgaacatctgcatctgaccccatcttataggtgagtttcattttgcaggggagggacttgagcaaagagagagggagccgtggaggtgaaagctaaagcctgtggaggtgca

SEQ ID NO: 4583 - DNA, 614 bp, Homo Sapiens
ttggcgcttggtgtatagagaacaaaaaacacacagtactatcgtctatcattggatgaagtggctccggagatctgcatatccccaccgtttgaatctcttttaccttgcaagtgatgtcatacagaactgtaaaaggaaaaatgcaatcatattccgtgaatcatttgctgatgtacttcctgaagcagctgctctagtgaaggatccatctgtctctaagtctgtagaacgaatctttaaaatctgggaagatagaaatgtatacccagaagaaatgattgtggcattgagagaagctttgagtaccactttcaaaactcagaagcagctgaaagaaaatctgaacaaacaaccgaataagcagtggaagaaatcacaaacatctacaaatccaaaagctgctctcaagtctaagatagttgctgaatttcgatctcgggccctaattgaagagctgttgctatacaagcgctcagaagatcagatagaactgaaggaaaagcagttgtcaactatgagggtggatgtgtgcagcacagaaactctcaaatgcttaaaagataaaacaggtgggaaagaagttctccaaagaatttgaagacggcaagcgg

SEQ ID NO: 4584 - DNA, 595 bp, Homo Sapiens
tgattcccaaagtgaaaagcagtgatttcattagtaggcgattacatctaggaataacatttggtaaggccaatataatagcaggtgctttcgttagagatatgtgtgcgtcattgtactgggtcattaaatcttaagaataaaaatagaatgacttatttagaattaacgcctattagcagtgagaacaaatgacagattgttctatttattaatttgttctaggatcttattctattttattcaaagacaagactaaatgctcttgtgatagcattctttccatgaaacaacaggaaagctgtatcatacatacagtgactggcctccagtttaaccaagaccctggaaaagcagctctccttcagggctggagttctgctgctgctttcttggtggggataaagccttcagggcatgacttccatcgtggctttaaaacagctttgcttacctggcataaaaattgagtggtacctctactgaaaccagttacataaaacactgtgaatgacacttcataaacccattgtgtaccttaaaattgttactgattgtttaagacgcatgactgtcagtggtgaataaaggaacc

SEQ ID NO: 4585 - DNA, 766 bp, Homo Sapiens
ggtacccagaggctcctacacctcttactggatgacatgccagtgaaaccatactcagatggtgaaggaggaatagaagatgaaaacaggtctgtttctgggttccttcactttgacactgctacaaaagtacgtcgaaaaattctaaatattcttgactcgattgacttcagtcaggagatccctgagcctttgcagttggatttttttgatcgggcccagattgaacaagttattgctaactgtgaacacaagaatttacggggacagacagtctgcaatgtcaagcttcttcatagggttcttgtagctgaagtaaatgcccttcagggtatgcagccataggacagagacctctactaatggaggaaatcagcactgtacttcagtatgtggtaggaaaaaataaattgctgcagtgtcttcatgcaaaacgtcatgctctggagtcgtgggagcaactagcaaaaattatactgacagcttgtccccaggacctccttcagggaaaaagatccacaacggattattcgtgaaattttccaaaaggggcatggaaagaatactgggatgaagaaacctgccccaagagttaatggctggtggcccccccggggcaagggttccccactgacctgcccccccaaatacaggccggtccttccctggaatagaaagcaaaccattagtccttggggaaccaccctcagggcccctttacgacttttaggcatggataagttggttttaacttaccctcctatct

SEQ ID NO: 4586 - DNA, 887 bp, Homo Sapiens
  misc_feature (17)..(17): n is a, c, g, or t
  misc_feature (790)..(794): n is a, c, g, or t
  misc_feature (796)..(799): n is a, c, g, or t
  misc_feature (801)..(801): n is a, c, g, or t
  misc_feature (803)..(804): n is a, c, g, or t
  misc_feature (807)..(807): n is a, c, g, or t
gtcatgaatgtccatanaatgctaggcattcctatttccaatattttgatggttggaaattatgcttcagatttggaactggaccccatgaaggatattctcatcctctctgcactgaggcagatgctgcgggctgcagatgattttttagaagatttgcctcttgaggaaactggtgcaattgagagagcgttacagccctgcatttgagataagttgccttgattctgacatttggcccagcctgtactggtgtgccgcaatgagagtcaatctctattgacagcctgcttcagattttgcttttgttcgttttgccttctgtccttggaacagtcatatctcaagttcaaaggccaaaacctgagaagcggtgggctaagataggtcctactgcaaaccacccctccatatttccgtaccatttacaattcagtttctgtgacatctttttaaaccactggaggaaaaatgagatattctctaatttattcttctataacactctatatagagctatgtgagtactaatcacattgaataatagttataaaattattgtatagacatctgcttcttaaacagattgtgagttctttgagaaacagcgtggattttacttatctgtgtattcacagagcttagcacagtgcctggtaatgagcaagcatacttgccattacttttccttcccactctctccaacatcacattcactttaaatttttctgtatatagaaagggaaaactagccctgggcaacatgatgaaacccccatctccactggcnnnnnannnnanannaanaaattaggaaaggaccaaacccaaccccccaaaaaattacctggggtatgaagggccacgggccctgttaatccccagtt

SEQ ID NO: 4587 - DNA, 644 bp, Homo Sapiens
ggcaagcaggagcaggtctctctgcatctgttctctgaggaactcaagtttggttgccagaaaaatgtgcttcattcccccctggttaatttttacacaccctaggaaacatttccaagatcctgtgatggcgagacaaatgatccttaaagaaggtgtggggtctttcccaacctgaggatttctgaaaggttcacaggttcaatatttaatgcttcagaagcatgtgaggttcccaacactgtcagcaaaaaccttaggagaaaacttaaaaatatatgaatacatgcgcaatacacagctacagacacacattctgttgacaagggaaaaccttcaaagcatgtttctttccctcaccacaacagaacatgcagtactaaagcaatatatttgtgattccccatgtaattcttcaatgttaaacagtgcagtcctctttcgaaagctaagatgaccatgcgccctttcctctgtacatatacccttaagaacgccccctccacacactgccccccagtatatgccgcattgtactgctgtgttatatgctatgtacatgtcagaaaccattagcattgcatgcaggtttcatattctttctaagatggaaagtaataaaatatatttgaaatgtaaaaaaa

SEQ ID NO: 4588 - DNA, 1163 bp, Homo Sapiens
  misc_feature (34)..(34): n is a, c, g, or t
  misc_feature (259)..(259): n is a, c, g, or t
  misc_feature (280)..(280): n is a, c, g, or t
tctagaggatccctcaacgcttatacttcctagntctagatgactacttttggactttatggttgtttttcttccttaaaaaccacttctccttacacagtacaattctttttaacttggggctttaaattttcggttaaggatagagaatgacacagaagcaccaaaataagattaatgaagatgagaatgatttcatatttgagtacatttaactgaagatctagacatgtctttaaagaaggtccaaagaaaattngcaacccaaataaaggctttnggtattagcagaacaccaccatcctttgattcaataaacatctaatatgcaccttccatgtaaaagatactaagaacaagaaacactaaaatgaaagacactttccctactctcaaggaaaacaggctagtagaaaacgcagactcaagagtgaagatatggaaaataaaataagtgataccaagaagaagcaggggatgaagaagaggagcaacagtgaagtggaagacgtgggaccaacaagtcataacagaaagaaggccaggtgggacactttagagcctttggataccggcctgtctttagcagaggatgaagagctggtgttacatctgctaagaagtcaaagctaaatacttcctgcgcctgccttctccttgaaaccttggttatgactgcgtaggcaagaagttgaaaaacagttgatttgggggcacttaggtaccatatgccccattcccaaagggcacatttctggatagaagcgatcgtatctccaagtccctctcacaggacatgctttgtgccatcactgagcatactcagatcgagggtggatgataccatttcctgaccccgttttccagcatgtgttctgttagatttttatccatgggttcctacgccttgtcattggaaacactgcctttgtcttactggcaagttctggagctcttgtgtcattgttagaaatccctgtcttgcttactggacagaaagtttctggtgctgttaaaattgctcatgaatttccacgtaatttaataattttcaaagagactatgatgggaccagcccctgaaaaaagaaatggatattttttgaaatggggaaggatccctaattaacccctattttcccaaaaaagagggaaacgcagttc

SEQ ID NO: 4589 - DNA, 1206 bp, Homo Sapiens
ggggtgttcttgtgatgcatccacgcaatgggttcacagaagactccaagcctggaatatggagagaaatatcggtgtgtggaaatgtatttagcctacgtgaaaccagatcggctcagcagagaggaaaaatggtggaaattgaaaccaatcagttacaagatggctcgttaattgacctctgtggtgcaacattgttatggcgtactgcagaaggcctttcccacactcctaccgtgaagcatttagaagctttaagacaggaaatcaatgcagcacgacctcagtgccctgtagggttcaacacactagcatttcctagtatgaagaggaaagacgttgtagatgaaaaacaaccatgggtatatctaaactgcggccatgtacatggctatcataactggggaaacaaagaagaacgtgatggaaaagatcgtgaatgtcctatgtgtaggtctgttggtccctatgttcctctgtggcttggatgtgaagctggattttatgtggacgccggccctccaacccatgcgtttagcccgtgtgggcatgtgtgttcagaaaagacaactgcctattggtcccagatcccacttcctcatggtactcatacttttcatgcagcctgtcccttttgtgcacatcagttggctggtgaacaaggctacatcagacttattttttcaaggacctctagactaacagaccattgcccttgcaggactacattataaatttataagctaagtggagttgggtttttcaaacctgttgtccacgtcacagtttttctgctctggtcatttgcattaagatgaagaattttttaaaacatttataataaatagtagcaatttctgagcaaaaatctgggaaactcaagcaaaggaatttctgaaagtatcagtcttctgaattctgagttttgaaaatatattttgaggagaaaaagacatagtctaatttgatgccttccttttagtgtttttgaatcacctatcctcagtgctgaaattgttttgtataactgagggtactgttggttcaaactatgttagtttacagtttgttgcaaacattgtaaaatacagcgacatgtatattaacttttttctatttatctttattatagaaaataccttagaatgttcttgatagagtagcatggtaacgatggtgtcacacccttggtgtgaatggtagctt

SEQ ID NO: 4590 - DNA, 803 bp, Homo Sapiens
tcttcttgcaaagaaatgtgagtagaattattcaagggctcagcatgagtagaatcattaaagggcctggcttcagacgtcttagcctcaactactgtggagctaccattttcatattgagagagcagatcttcatcagcttgctcatgcttttccactaggagcaaaagtctttcttagaagaagcctgcggttcttcttttttaaaaagagctgctttactttcagggctgatgtgaaactggaatttccactggctggtaattagcatggatatatggttcttcagaaagcatataacctttactgaaacactctagcaaccactttgctcccactacatgaggcctgtgggctgatttattccaaaactgcttcaattcatcatcataatctcccacaataacatgagttacatcttcatttagctggttaaaacgaactccacctccactgttaataagtcttctcagtttatctagctttctgccactaaaaccgcaaagatatatccgacaaccatctaataaatcttcaggtgcttgaaatgcactgacatccagattttctagattttcaagtgtaggctccagtttgctgttaagtgaattacatattgattcacttacgcaacttgcatttatgttggaaatattgctgacattatcaattgtgttgatctggctggtaggagttgaagaattgggcatagtctttgcttctggtctaggttctgtcttgtatatggattcatcctgacaaaaacctttctcaatactgtcaaaaaaccactgtgtggtccc

SEQ ID NO: 4591 - DNA, 1108 bp, Homo Sapiens
  misc_feature (838)..(838): n is a, c, g, or t
  misc_feature (866)..(871): n is a, c, g, or t
  misc_feature (873)..(921): n is a, c, g, or t
  misc_feature (923)..(930): n is a, c, g, or t
  misc_feature (932)..(953): n is a, c, g, or t
  misc_feature (955)..(955): n is a, c, g, or t
  misc_feature (960)..(960): n is a, c, g, or t
ggggatgatctccagagccgtggtgctggtgtttggaatgctttatcctgcatattattcatacaaagctgtgaaaacaaaaaacgtgaaggaatatgttcgatggatgatgtactggattgtttttgctctctatactgtgattgaaacagtagccgatcaaacagttgcttggtttcccctgtactatgagctgaagattgcttttgtcatatggctgctttctccctataccaaaggagcaagtttaatatatagaaaattccttcatccacttctttcttcaaaggaaagggagattgatgattatattgtacaagcaaaggaacgaggctatgaaaccatggtaaactttggacgggcaaggtttaaaccttgcagctactactgctgttactgcagcagtaaagagccaaggagcaataactgaacgtttaagaagcttcagtatgcatgatttaacaactatccaaggtgatgagcctgtgggacaaagaccataccaacctctaccagaagcaaaaaagaaaagtaaaccagccccccagtgaatcagcaggttatggaattccactgaaagacggagatgagaaaacagatgaagaagcagaggggccatattcagataatgagatgttaacacacaaagggcttcgaagatcgcaaagcatgaaatctgtgaaaaccaccaaaggccgcaaagaggtgcgggtacgggtcactaaaatacaaagtgaagaaacgaccacaagtgtatttttagtcatctacacgtcaaatatcccaagacagataatgctaaatacatcgacttcatcttctaacatgatatattcangatttacacattaaaatgattatttaannnnnnannnnnnnnnnnnnnnnnnnnnnnnnnnnnnnnnnnnnnnnnnnnnnnnnannnnnnnnannnnnnnnnnnnnnnnnnnnnnanttgtngggcggcctcgggccctaaaaaaatttttcaaaaacatttcttttgggccccggggccccatagggggaaagggaaaagggggcctaaactgttttccccaaaaagaaaacccgggccaaaaacaaaagggctggggattccccccac

SEQ ID NO: 4592 - DNA, 456 bp, Homo Sapiens
gcattgtcctgctaacccacaaacctgtttggaaataaacatggaagaatatctggcaggcttacttttagaagacgacaaatcggtaaggcttattcatggttcattgccaggagcagatatgcttttgagatcacttttatttttgaaatggcctttgttcattgtattgtgatccaataacactttgtattaaattgtttagcagccatttgtgttgtgaaggggtagaagatctctgaaacttgtcttgagattgaactcattccctgttccacaaacccatatgtatcctttcctctacctcctcctttcccaattaatttcaaccatagtacgatgtttggggttgtatattttgttaaaaagattaaagaatttatgagttggcttggacaagtttaactttatttttaatgtgttaattacttggaataaatgcattaatctcaaaaa

SEQ ID NO: 4593 - DNA, 799 bp, Homo Sapiens
gggagtgttacagctcttttagaatttgtctagtaggctttctggctttttaccggaaagcccctcttatgatgtttgttgccaatgatagattgttttcactgtgcaaaaattatgggtagttttggtggtcttgatgcagttgtaagcttggggtatgaaggtttgggccacgcctgggcgcttccggctgcgccggatgctgtttcctttccgctcccaggggcgttgggaacggttgtaggacgtggctctttattcgtgagttttccatttacctccgctgaacctagagcttcagacgccctatggcgtccgcctcgacccaaccggcggccttgagcgctgagcaagcaaaggtggtcctcgcggaggtgatccaggcgttctccgccccggagaatgcagtgcgcatggacgaggctcgggataacgcctgcaacgacatgggtaagatgctgcaattcgtgctgcccgtggccacgcagatccagcaggaggttatcaaagcctatggcttcagctgcgacggggaaggtgtccttaagtttgctcgcttggtcaagtcctacgaagcccaggatcctgagatcgccagcctgtcaggcaagctgaaggcgctgtttctgccgcccatgaccctgccaccccatgggcctgctgctggtggcagcgtggccgcctcctgagagttggccctcccttgtgccactgccaggggaggaaaggccttgatgttccagacaataataaatgcgcctgtgacttagccttggtgtcagtctcttgcggacctgac

SEQ ID NO: 4594 - DNA, 1002 bp, Homo Sapiens
  misc_feature (540)..(540): n is a, c, g, or t
  misc_feature (619)..(621): n is a, c, g, or t
  misc_feature (730)..(730): n is a, c, g, or t
  misc_feature (733)..(734): n is a, c, g, or t
  misc_feature (743)..(743): n is a, c, g, or t
  misc_feature (760)..(760): n is a, c, g, or t
  misc_feature (771)..(771): n is a, c, g, or t
  misc_feature (774)..(774): n is a, c, g, or t
  misc_feature (832)..(832): n is a, c, g, or t
  misc_feature (922)..(930): n is a, c, g, or t
ggggccgcggggcttgctgggaagagaggcgaagccaggtcacctttcaaggacccagaagtagggttttggcctaggtaacggggcagagatgtggttcgagattctccccggactctccgtcatgggcgtgtgcttgttgattccaggactggctactgcgtacatccacaggttcactaacgggggcaaggaaaaaagggttgctcattttgggtatcactggagtctgatggaaagagataggcgcatctctggagttgatcgttactatgtgtcaaagggtttggagaacattgattaaggaagcattttcctgattgatgaaaaaaataactcagttatggccatctacccctgctagaaggttacagtgtattatgtagcatgcaatgtgttatgtagtgcttaataaaaataaaatgaacccgaccccaccggaggacccccgccccacacgggccccccaggcaaacaacaaaaaagggaccgcagccccaaggcacggcacaaagatgccaccctaccaaaacctgcagnagcggcacgaaaatgccgcggcaaccctgttcttgcgcaacagccagaccgagagaaagacaacagaaaaaaacaagannnttcatctttgcgctggggggtgcccccctccttcgcgcggcccccgccccagaagaaaagaaagaagtttttttgtgtgtagaaacacaccgcaccctccccctgtacncannagatggaangagaggagcgcgcagcnccccacacccnaanagaggagagacggcgcaccgcacgagcacaagaagcgcggcgcacaccacaacgcgtntggtgtgttgtccccacacgaagaagaaataaaaaccgcgccgcggccgggaccagacagccaaagagaggcggcgttgggtagctccgnnnnnnnnngccacagacaaaacaaccacacacccgcgcggcgcggggtgacacaccacgcgaggaggccgccttcattat

SEQ ID NO: 4595 - DNA, 941 bp, Homo Sapiens
  misc_feature (842)..(872): n is a, c, g, or t
  misc_feature (879)..(879): n is a, c, g, or t
aaaatcaggcatttataaatatcccacaaagttttagtaataaagattgttgattgccctgcttgccagtaagaaggaagagattttgaatacatataatgcagaactgtgttgtttaagaatgcccaattcatgaagtcttaacaattggttctttatttttgttttcaatttatggccgagtttggttttgctgttttggactgtctcaactccctgctgatgccaccatacagagtcagatcagcaaccacatcccatcactagcctttgaagtacaacgacacagctgtcttcattttacaagtgcaaaaaccgaggtctgcggggtgactgccccagacgccgctggtgacgcgtgcgccgaggtcgagacgccaggcttcagcgccagcagccctgtggtggcgacgacgatggaccaggagccagtgggcggtgtggaacgaggagaagccgtcgcagcctcgggagctgcggccgccgcggcattcggggaatctgcagggcagatgagtaacgaaagaggctttgaaaatgtagaactgggagtcataggaaaaaagaagaaagtcccaaggagagtcatccactttgttagtggtgaaacaatggaagaatatagcacagatgaagacgaagttgatggcctggagaagaaagatgttttgcctactgttgatccgacaaaacttacctggggcccctacttatggttttacatgcttcgggctgctacatcaactctctcagtgtgtgacttccttggagagaagattgcatctgttttgggtatcagcaccccaaagtaccaatatgccattgatgaatattatcggatnnnnnnnnnnnnnnnnnnnnnnnnnnnnnnnaacaggntgtctgaagaagcagaaaaacaatatcaacagaataaattgcagactgattccattgttcag

SEQ ID NO: 4596 - DNA, 378 bp, Homo Sapiens
ttaaaatacaacacttcccagctgcccttatagttaaggtctggccagtgaaatgtatgtggaaatgttacatgacacttctagaaggattcttaaaagacaaatacaccctttcttcccccttcctatttcctggaatgtgggtgtgatggctggagccctggcagccatactgccacgtgtacagacgagtgccgtcctttagggatgacaggagcctggttccctgatgatggcagagccagatatcagcacaaacttacttaaatgggagagagaaggggagaaccaatctcaacttctaccttgtgtaagctgctggttttgggggttttctatgacagataccaaaataaaccctaactgaacatgtactcc

SEQ ID NO: 4597 - DNA, 806 bp, Homo Sapiens
  misc_feature (525)..(525): n is a, c, g, or t
  misc_feature (577)..(595): n is a, c, g, or t
ggactcctttgaatttgcacagtttgacaactttcttgtggaagccacacgctaatacttaacagggcatcatagaatactctggattttcttcccttctttttggttttggttcagagccaattcttgtttcattggaacagtatatgaggcttttgagactaaaaataatgaagagtaaaaggggagagaaatttatttttaatttaccctgtggaagattttattagaattaattccaaggggaaaactggtgaatctttaacattacctggtgtgttccctaacattcaaactgtgcattggccatacccttaggagtggtttgagtagtacagacctcgaagccttgctgctaacactgaggtagctctcttcatcttatttgcaagcggtcctgtagatggcagtaacttgatcatcactgagatgtatttatgcatgctgacccgtgtgtccaagtgagccagtgtcttcatcacaagatgatgctgccataatagaaagctgaagaacactaagaangtagctttttgaaaaccacttcaacctgttatgctttatgctctaaaaagannnnnnnnnnnnnnnnnnnaagatgatacttttgaaatgccagatatgatgagtgggatgattttaaaaaagccctctttataaactaccccctacactatttctgcgggaatagatattaaccgaattaattgggttattggcattaatttaatttttttgaattccaagttttgggccttggtaacccctatcctttcctgtggaacggtttttccagggggcctggg

SEQ ID NO: 4598 - DNA, 1407 bp, Homo Sapiens
ggggggcgccgactgcagagccgggaggctggtggtcatgccggggttcctggttcgcatcctccctctgctgctggttctgctgcttctgggccctacgcgcggcttgcgcgtaagtctgcgggacccggaatgccacccagaggatgtttgaaattgactatagccgggactccttcctcaaggatggccagccatttcgctacatctcaggaagcattcactactcccgtgtgccccgcttctactggaaggaccggctgctgaagatgaagatggctgggctgaacgccatccagacgtatgtgccctggaactttcatgagccctggccaggacagtaccagttttctgaggaccatgatgtggaatattttcttcggctggctcatgagctgggactgctggttatcctgaggcccgggccctacatctgtgcagagtgggaaatgggaggattacctgcttggctgctagagaaagagtctattcttctccgctcctccgacccagattacctggcagctgtggacaagtggttgggagtccttctgcccaagatgaagcctctcctctatcagaatggagggccagttataacagtgcaggttgaaaatgaatatggcagctactttgcctgtgattttgactacctgcgcttcctgcagaagcgctttcgccaccatctgggggatgatgtggttctgtttaccactgatggagcacataaaacattcctgaaatgtggggccctgcagggcctctacaccacggtggactttggaacaggcagcaacatcacagatgctttcctaagccagaggaagtgtgagcccaaaggacccttgatcaattctgaattctatactggctggctagatcactggggccaacctcactccacaatcaagaccgaagcagtggcttcctccctctatgatatacttgcccgtggggcgagtgtgaacttgtacatgtttataggtgggaccaattttgcctattggaatggggccaactcaccctatgcagcacagccaacagctacgactatgatgccccactgagtgaggctggggacctcactgagaagtatttgctctgcgaaacatcatccagaagtttgaaaacagtaccagaaggtcctatcccttccatcttacaccaaaagtttggcatatggaaagggtcacttctggaaaaagtttaaccgacagctgggcagccagcttctgggtacattctggtgttcccttctggggcccattgaaaaggcttttattccttggacctttattcccggtggaacacagcattcaggggtctgggctggtccgcagacacccttctccaagaatggagcaccaaggaactctttttttacactccgaatgggttccgcaatcg

SEQ ID NO: 4599 - DNA, 1192 bp, Homo Sapiens
gcagacccgggccgtgcaaggcatgctggactttgactatgtctgctcccgagacgagccctcagtggctgccatggtctaccctttcactggggaccacaagcagaagttttactgggggcacaaagagatcctgatccctgtcttcaagaacatggctgatgccatgaggaagcacccggaggtagatgtgctcatcaactttgcctctcttcgctctgcctatgacagcaccatggagaccatgaactatgcccagatccggaccatcgccatcatagctgaaggcatccctgaggccctcacgagaaagctgatcaagaaggcggaccagaagggagtgaccatcatcggacctgccactgttggaggcatcaagcctgggtgctttaagattggcaacacaggtgggatgctggacaacatcctggcctccaaactgtaccgcccaggcagcgtggcctatgtctcacgttccggaggcatgtccaacgagctcaacaatatcatctctcggaccacggatggcgtctatgagggcgtggccattgggtggggacaggtacccgggctccacattcatggatcatgtgttacgctatcaggacactccaggagtcaaaatgattgtggttcttggagagattgggggcactgaggaatataagatttgccggggcatcaaggagggccgcctcactaagcccatcgtctgctggtgcatcgggacgtgtgccaccatgttctcctctgaggtccagttttggccatgctcgagcttgtgccaacccaggcttctgaaactgcagtagccaagaaccaggctttgaaggaaagcaggagtgtttgtgccccggagcttttgatgagcttgggagagatcatccagtctggataccaagatctcgtgggcaaatggagtcattgtaccttgcccaggaggtgccgccccccaaccggggcccatggaactactccctggggccaaggaactttgggtttgattccgccaaccctgccctcgttcatgaaccagcaatctgccaatgaacgaggaacaggaagctccatcttacggcgggcatggcccatcaccttaaggtctttcaagggaaaaagatgggccattggcgggggtcccccgcgcccccctctgggttccaaaaaaaggggggcctaaagaacttctgtg

SEQ ID NO: 4600 - DNA, 746 bp, Homo Sapiens
actattggctaggtagcgaggactgggtgtcgaatcggcacgaggagccgagtgtaaagcatgcttgaggtcgccagacttatttttgagctcgctgtaagactgagaaatcacgtagtccttcctgaaaccactaagaggaaaaatgtctgtgacactgcatacagatgtaggtgatattaaaattgaagtcttctgtgagaggacacccaaaacatgtgagaatttcttggctcttggtgccagtaattactacaatggctgtatatttcataggaatatcaagggtttcatggttcaaacaggagatccaacaggaactggaagaggaggcaacagtatttggggcaagaagtttgaggatgaatacagtgaatatcttaagcacaatgttagaggtgttgtatctatggctaataatggcccgaacaccaatggatctcagttcttcatcacctatggcaaacagccacatttggacatgaaatacaccgtatttggaaaggtaatagatggtctggaaactctagatgagttggaagaagttgccagtaaatggagaagacataccgacctcttaatgatgtacacataaaggacataactatacatgccaacccatttgctcagtagctatgatagacctggacaaatcacttgacaaattgctggaacacacttattgtggtttacccggttttaattatgtcagagattgcatcatccttctgcttgtctacaactat

SEQ ID NO: 4601 - DNA, 1070 bp, Homo Sapiens
tccagctttagtctctgctcgccgccgccgctgtcgccgccacctcctctgatctacgaaagtcatgttacccaacaccgggaggctggcaggatgtacagtttttatcacaggtgcaagccgtggcattggcaaagctattgcattgaaagcagcaaaggatggagcaaatattgttattgctgcaaagaccgcccagccacatccaaaacttctaggcacaatctatactgctgctgaagaaattgaagcagttggaggaaaggccttgccatgtattgttgatgtgagagatgaacagcagatcagtgctgcagtggagaaagccatcaagaaatttggaggaattgatattctggtaaataatgccagtgccattagtttgaccaatacattggacacacctaccaagagattggatctgatgatgaacgtgaacaccagaggcacctaccttgcatctaaagcatgtattccttatttgaaaaagagcaaagttgctcatatcctcaatatcagtccaccactgaacctaaatccagtttggttcaaacagcactgtgcttataccattgctaagtatggtatgtctatgtatgtgcttggaatggcagaagaatttaaaggtgaaattgcagtcaatgcattatgggcctaaaacagccatacacactgctgctatggatatgctgggaggacctggtatcgaaagccagtgtagaaaagttgatatcattgcagatgcagcatattccattttccaaaagccaaaaagtttgactggcaactttgtcattgatgaaaatatcttaaaagaagaaggaatagaaaattttgacgtttatgcaattaaaccaggtcatcctttgcaaccagatttcttcttagatgaatacccagaagcagttagcaagaaagtggaatcaactggtgctgttccagaattcaaagaagagaaactgcagctgcaaccaaaaccacgttctggagctgtggaagaaacatttagaattgttaaggactctctcagtgatgatgttgtttaagccacggtcaatccacggggattt

SEQ ID NO: 4602 - DNA, 860 bp, Homo Sapiens
  misc_feature (533)..(548): n is a, c, g, or t
  misc_feature (660)..(757): n is a, c, g, or t
  misc_feature (801)..(801): n is a, c, g, or t
gattcaataactgtataagatgtatcaatgccaaatgtgcagatgctaacggggacattctgggaactgggcaccaggagtgccttcatacactgtaccccagctctcttctaaaagagaagtgggtgggcacactgaactgtttggtggccccaaccacaggaagctgcaattctctggcttagggtgatacttttgccctccttgtgcccctctcagctttccatccccagctaggaagaaagaatggcactcttgggcttggcccagaattagagttattagagcaagagagagcttaggaagcatgagggcaactatagtgaggccttattgccaggagggagggttttggttgctggcgcttgtgtataaaggggcaagagcagctcctttggactattcctgggaggactctgatgcagggcgtctgttgctcccctgggtcacctcctccctgctcgctgacatctggggctttgaccctttcttttttaatctacttttgctaagatgcatttaataaaaaaaannnnnnnnnnnnnnnngtgtgagggacaaaatgcaaacctatttcccttgcctcataggcttctgggatgtcatcacctccagtttgttggttttgtttccaactgttaataaagcattgaaacagtnnnnnnnnnnnnnnnnnnnnnnnnnnnnnnnnnnnnnnnnnnnnnnnnnnnnnnnnnnnnnnnnnnnnnnnnnnnnnnnnnnnnnnnnnnnnnnnnnnttcttaaacacccttttttaaggaacacagcaaaaaaacggttngggccctcgccccgcgcgggatattaaaaaaaatttctatccctcttgcgggggccgcg

SEQ ID NO: 4603 - DNA, 776 bp, Homo Sapiens
cccgaggattacgacgggatagcgggatctgaccagcttttgtaaaaagtagtatactttctgtattaccaacagatagctagacagatatgtgaaacttgtgccttttaagcaaatacattaacattgggggttttttaatacttctgtatctttaatatgtgtgaaaatgttacatattaaatacagccggtgtgtgatctatacaattgttgtgcaaggtctatatgaaagtctcaagggtgccagaattggttcagatttttccattttcctgttttccattttaacactgacagtcaagttgcctaaagtgttgaacaaatactgacatgtaaagggagtttcactctatgtctttgtgaaggaggaccttaaagagattttttttctgtattatacgttgatacagtacactgccaggtgaaacaagagccttaataaagcatgcatcgcccacacccctgtatgagacccccacagaagggatcgcttgcgtaaggcaccattatgaaggtcaacagtgcattaacagctagaaaaccagaaattagtcctcaaggcataaataagagaaacatagctgcatgagaaaacagtttctaagcgttagtggttttatccacccaactgagaaaaattttaggttcttaagtctaatgaaacattagaccagcaattcccagccccagctttgtgacactcaatacgtgtccaatttcttctaagggcatcacagaattctccaaaaagttaattcaaattcagaatcatcc

SEQ ID NO: 4604 - DNA, 831 bp, Homo Sapiens
  misc_feature (412)..(412): n is a, c, g, or t
  misc_feature (685)..(693): n is a, c, g, or t
cagactgtgttaaggttttttctttgttgatgttgttgttttaattctaatgtgcacggtgtgactggcagagtgagtttaaaagctttacgagtgattaattgcttggcaggcacccacgctatctgcatttccagaactttactgatgcatccatgtacatttccactgaggaattttggtgggtggggggaggttgtgctgcctcacaatgtcacgtgtattaaagtctaagcagtcacttctgattcacttgcactgtttgggaaatgtcaggtttacaaaaacatacatgtttggaataaaaaatggctgcaaacaattcagaagttcaatctgtaatttacttgctaataagaactttttaaagtgttgaagctagggtttcaatgtaatacaacatgagcattanagagaactcaaggtccatctaattcacatgaacaacccacctgatgtggctgaactgtctgcagtccttggcctccacacaagaggtaccaccctcctctctgcatcaccctgactcccctggccccggggctacaccctagggttcttgattcttgagaataaattgtgccccaaaattaaaatgggaatgggaatttccctttatttattcaggtaagaaactttcctttttccccatggtggcccttggcccagtttaacctaaagccannnnnnnnncccagaaagccattttttgaataaacaattttctttaaccccattttttaacaaaaaaatatgggaatttcccccccttaaagggtttttttcaactcctccccttttcaattctgggggccaaattaaaaaaagatt

SEQ ID NO: 4605 - DNA, 338 bp, Homo Sapiens
gggggttcgtgcatcggaagagagaagattgctcacctgcagacaagccctacattgacgaggccagaaggaatttaattgagtggctgaacaagtacatgtagcaagaatcaagggcaagccttcctagaatagctttcatcccaaaatttgcttggaaatagttagatcatttgatttaattttcacttttataaaataagtgtaggaatcctaaaattgattatttcatttgaaacacaaattcagtaggacgtaatgcatgaaataatttaatttttgacatgtacatcgaatcataatttaaaaacaaggtctgaccaggtgtagtgcctcat

SEQ ID NO: 4606 - DNA, 542 bp, Homo Sapiens
  misc_feature (286)..(374): n is a, c, g, or t
  misc_feature (377)..(402): n is a, c, g, or t
  misc_feature (416)..(434): n is a, c, g, or t
aaaaacccactctcataacagaagtgcagactcattgctagattcagtgcccttgagtgtgccagaggtcctctgtgtttgagacaatcctgtgtgtgccaggaggctccgtgtgcaccaggggctctcagaatcccgcttacccagctggagaccatgcctctggcagccccatctcagccagccctgctctctccctcttccctccaggtgaggcaaacttcataggaatctgtacctgaatgtgagctcctgataataaaactctgaggctttggtgagcgcnnnnnnnnnnnnnnnnnnnnnnnnnnnnnnnnnnnnnnnnnnnnnnnnnnnnnnnnnnnnnnnnnnnnnnnnnnnnnnnnnnnnnnnnnccnnnnnnnnnnnnnnnnnnnnnnnnnnaaaaaatgtggggnnnnnnnnnnnnnnnnnnnaaaaagatttttataaacccttttttttgtgggggcgggggcccccccaaaagggaaagggaaaacagggggccaaaatgttgtttcccaaaaagaaaacccgggggc

SEQ ID NO: 4607 - DNA, 783 bp, Homo Sapiens
ccaggtagcaatgatgagacccttttatctgctgttgccagtgctttgcacacaagctctgcgccaatcacaggccaagtatccgctgctgtggaaaagaaccctgctgtttggcttaacacatctcaacccctctgcaaagcttttattgtcacagatgaagacatcaggaaacaggaagagcgagtacagcaagtacgcaagaaattggaagaagcactgatggcagacatcttgtcgcgagctgctgatacagaagagatggatattgaaatggacagtggagatgaagcctaagaatatgatcaggtaactttcgaccgactttccccaagagaaaattcctagaaattgaacaaaaatgtttccactggcttttgcctgtaagaaaaaaaatgtacccgagcacatagagctttttaatagcactaaccaatgcctttttagatgtatttttgatgtatatatctattattcaaaaaatcatgtttattttgagtcctaggacttaaaattagtcttttgtaatatcaagcaggaccctaagatgaagctgagcttttgatgccaggtgcaatctactggaaatgtagcacttacgtaaaacatttgtttcccccacagttttaataagaacagatcaggaattctaaataaatttcccagttaaagattattgtgacttcactgtatataaacatatttttatactttattgaaaggggacacctgtacattcttccatcatcactgtaaagacaaataaatgattatattcacaga

SEQ ID NO: 4608 - DNA, 1419 bp, Homo Sapiens
  misc_feature (587)..(587): n is a, c, g, or t
gggggagctcccacagctaacatggcggcgccctgtgtgtcctacggcggagcagtttcgtaccggcttcttctctggggtaggggtagcctcgcccggaagcaaggcctctggaaaaccgcggcccctgagttgcaaacaaatgtcagatcccagatattaaggctaagacatactgcatttgtaataccaaagaaaaacgttcctacctcaaaacgtgaaacttacacagaggattttattaaaaagcagattgaagaagtcaacataggaaaagagacatttagccaacatgatggggagaagatccagaaactttcactcaagaagatattgacagagctattgctttaccttttcccaagtggtttgtttggaaaaacgagccaggccagtaatgaagcatcctgaacagatttttccaagacaaagagcaatccagtggggagaagatggccgtccatttcactatctcttctatactggcaaacagtcatactattcattaatgcatgatgtatatggaatgttactcaatttagaaaaacatcaaagtcacttgcaagccaaaagtctgcttccagaanaaactgtaaccagagacgtgattggcagcagatggctgattaagggagaactagaagaaatgttagtggaaaaactgtcagatctagattatatgcagttcattcggctgctagaaaagttattgacatcgcagtgtggtgctgctgagggaagaatttgtgcagaggtttcgaagaagtgtaactctttgaatcaaaaaaacagctgattgaacctgtacagtatgatgagcaaggaatggcctttagcaaaagcgaaggtaaaagaaagactgcaaaagcagaagcaattgtttataaacatggaagtggaagaataaaagtaaatggaattgattaccagctttacttcccgatcacacaggacagagaacagctgatgttccctttccactttgttgaccggctgggaaagcacgacgtgacctgcacagtctcagggggcgggaggtcagcgcaggctggagcaatacgactggcaatggcaaaagccttgtgcagctttgtcaccgaggacgaggtcgagtggatgagacaagctggactacttactactgatccacgtgtgagggaacggaagaagccaggccaagagggagcccgcagaaagtttacgtggaagaaacgctaagggtttgctcccaggaaaggagaggaagagctatatatatgtgccgacatgtggcagacacacagtaaataatggctgaccagcatgagggcagtactgtcagaaatttctttgagctgtgagatggatttatttttaaatgctactttgtaaaggtgacctttaaaaaataaaaggaaaataaagaatgttagtttcaaa

SEQ ID NO: 4609 - DNA, 1688 bp, Homo Sapiens
  misc_feature (511)..(552): n is a, c, g, or t
  misc_feature (1143)..(1143): n is a, c, g, or t
  misc_feature (1595)..(1595): n is a, c, g, or t
  misc_feature (1600)..(1600): n is a, c, g, or t
  misc_feature (1671)..(1671): n is a, c, g, or t
agcctgggttaaaatataacatcactatttggcttttgttttgcatgatttttaaaagcagtactcctagggaaatggcctctgaagtatatcagtttcatctcttaccaagactgttaagaagaaactagtgggattttgaacaagttatataattgtggtctgaaaagaccctaaactgaagttctgtttaaatatagttacatgaatttctctgatactaatgtactcaacagccaggtataaactatatctctctagtaacattttccatttttgtttaatcaaatacttgcttatgaaggatttcagaaatttgtaataaatgtcagcttttgatagcatagcagtaattgacatttcaaaaatatatatttctttctgtgtttggttgggtgtaatgaggaaaatacctgataaaatgtctgaagacactttctaatgttatcttggtgcataagctgtaatttttattcaaaattaaatttcaaatgtttgcagttttggctannnnnnnnnnnnnnnnnnnnnnnnnnnnnnnnnnnnnnnnnngcagcccctcgcgccagatgtgggtccaccgcacccctccctgggagggagtcttcccttcacccttgcatctgggattgccggcgcaacttcggttaagaacccggtggcccaaagaaggatttccccaagcacctacgggcctcttggaccccagcccgtcaacacaacactccctcgtagaaaaacggggctcgcggggagaaggaagagacccccctgcagatgcacgccggacagagctctgcccggaacgcccgctccgccgagggatgtctctctagcggcgcccctcccgccacacgcgcactatccccgtcctgggcacggcgagagcgcgggtgacgccgcccccagagcactcgttgtttaccagaccttcaccgtctcgcgtgcagattctcttgcatttcggacgcgggcgtgataggttgccgctagaaccgcgcgctatgtgccccgtctattcatctacagtcacccgcttaccatttgcggcgcccggcggcccgccctatacttctcagccgcccgacccatgtgcttgattacataccgcgcctcatggccggtgtctcgtgtaccgcctgnccgtgttgcgccctgagctctatgcaaagagagacaatatctctcccctcccgccgtcgtgtggaggactcacaaaaccagcaccatctgggtcgccggcgccaaagaaaatccgccggcgctcgcagcataacagcgcataacgtgaaggtgtcaccaccacgacgcatggaggatggtagttgatccctcctctgacgcggtcgttgggtgcggtgcatatatcggggccatcgctttcgtgcgcgacataataacagtgacgggcgtctatatacttccccccccgaacagcacactcaccgcccgttctcccttaaccggcggcgccaccaaaccacgcccgatccaaggcggctggtctaacctgcgcggcaccgcgcgacgcgcatgcggtcggcacccccgcccctttctgagcacgaggacgctcgacgattgtgatctacggngcgtntactaaatcgcggtcgcgggctacataaagacactcttctctccagacgcacgtcgagtcagtcggacgtnaaactagatgaaaacta

SEQ ID NO: 4610 - DNA, 542 bp, Homo Sapiens
tcctacgatctgcattatgtaatcacaggtccagagagctttatggaagcgggagaggaggagcacttactcatgttgtatttgttaatggaggatgtcatcttttcatagatgctggaactagagtgcacttgttagatgctaaaggtttgagctttacacaaaatgtcttcatctgtatttgttattgtctacaatatatttgaatttggggcagcatattaagatgtaatggcctgttatgtcttgaaaatacttgttttgcctcttccaggcatactgcattctgtggatcagtttgaacagcttctccaccttatttggacagtgataaattgaaccaagagtgtagatttacaagtgtaaccttcaaaagaggaagaactatttggggtctgtaggtaatgaacagtcacaccaaaatagactatgatgcttttgttaagaaaggtttcatgttttagatattttccgtgtcctaaataattttcaataatctataatccctaaaatgcaataaaaactagtatgtttccaaaaaa

SEQ ID NO: 4611 - DNA, 1736 bp, Homo Sapiens
  misc_feature (1543)..(1554): n is a, c, g, or t
  misc_feature (1557)..(1560): n is a, c, g, or t
  misc_feature (1563)..(1564): n is a, c, g, or t
atgaaactcagactggattcaatagtcattcaacaagggaggcttgtggatcagaatctgaacaaaattgggaaagatgaaatgcttcaaatgattagacatggagcaacacatgtgtttgcttcaaaggaaagtgagatcactgatgaagatatccgatggtatttgggaaagaggtgcaaagaagactgcagagatgaatgaaaagctctccaagatgggcgaaagttcacttagaaactttacaatggatacagagtcaagtgtttataacttcgaaggagaagactatagagaaaaacaaaagattgcattcacagagtgggattgaaccacctaaacgagaaagaaaagccaactatgccgttgatgcatatttcagggaagctcttcgtgttagtgaacctaaagcacccaaggctcctcgacctccaaaacaacccaatgttcaggatttccagttctttcctccacgtttatttgaattactggaaaaagaaattctgtgttacagaaaaactatggggtacaaggtacctcgaaatcctgagctgcctaacgcagcacaggcacaaaaagaagaacagcttaaaatggatgaagctgaatcccttaatgatgaagagttagaggaaaaagagaagcttctaacacagggatttaccaattggaataagagagattttaaccagtttatcaaagctaatgagaagtggggtcgtgatgatattgaaaatatagcaagagaagtagaaggcaaaactccagaagaagtcattgaatattcagctgtgttttgggaaaggtgcaacgagctccaggacatagagaagattatggctcagattgaaaggggagaagcgagaaattcaaagaagaataagcatcaagaaagcacttgacacaaagattggacggtacaaagcaccttttcatcagctgagaatatcatatggtactaacaaaggaaaaaaactatactgaagaagaagatcgttttctgatttgtatgcttcacaaacttggatttgacaaagaaaatgtttatgatgaattgcgacagtgtattcgcaactctcctcagttcagatttgactggtttcttaagtccagaactgcaatggagctccagaggagatgtaataccttaattactttgattgaaagagaaaacatggaactagaagaaaaggagaaggcagagaaaaagaaacgaggaccaaagccttcaacacagaaacgtaaaatggatggcgcacctgatggtcgaggaagaaaaaagaagctgaaactatgaatatgtttttgtttcataatcactaactttaaaccagtagttctttaatttacgggtcttcataagatgtactgtacaatgctcaattgttatgtcatttaaagacatcaggttcatctgtttactgagctagaaacatagtatgtagtttcacttttttaaatgcaacagctgtgctgaaatttttttatcattaacacttgaagtaataaaataggcttcattttattaaaaaaagccaaaaannnnnnnnnnnnaannnnaannaaaaatgtcggccgccctcgggcctcgaagaagctttcaagaacatttcttttgggcccgcgggcccccagaaggtaagttgaacatgggccatacctgtttccctaaggaaatcctgggccatgaacaaaaggcctgggaatccccccccaataaaaaaacgcccgggggg

SEQ ID NO: 4612 - DNA, 869 bp, Homo Sapiens
  misc_feature (699)..(699): n is a, c, g, or t
gggccttctgcttcggtgcgtttgcttctgaggatctccagtgtcacaacaaacacatgccagccctgttttacagggagccctggaggagttgggatagaggccacattgactgagggtagttgccagggtcctgcagttatacacaaagtccttaggataagaccatggccttgagagcatgtggcttgatcatcttccgaagatgcctcattcccaaagtggacaacaatgcaattgagtttttactgctgcaggcatcagatggcattcatcactggactcctcccaaaggccatgtggaaccaggagaggatgacttggaaacagccctgagggagacccaagaggaagcaggcatagaagcaggccagctgaccattattgaggggttcaaaagggaactcaattatgtggccaggaacaagcctaaaacagtcatttactggctggcggaggtgaaggactatgacgtggagatccgcctctcccatgagcaccaagcctaccgctggctggggctggaggaggcctgccagttggctcagttcaaggagatgaaggcagcgctccaagaaggacaccagtttctttgctccatagaggcctgagctgactggagcagagtcatttgcttcagcaggatccttgtgggccttctaaaatgaagccaccctcaggtccaggaaaggttgtgcntggtatttggctcatgacagccaagagcagatttgtgaaatcggctcaactcccaggtgagagcaagcaaaaattttggttgggtggaaaggaaggcaaaagagtaaaaattaaaaaggccaggcccagtaagtgtcccttgtactttataaataaacctcaagcagctc

SEQ ID NO: 4613 - DNA, 766 bp, Homo Sapiens
cggtcccactctgcagactcagtgccttattcagtcttctctctcgctctctccgctgctgtagccggaccctttgccttcgccactgctcagcgtctgcacatccctacaatggctaaaacagcaatggcctacaaggaaaaaatgaaggagctgtccatgctgtcactgatctgctcttgcttttacccggaacctcgcaacatcaacatctatacttacgatgatatggaagtgaagcaaatcaacaaacgtgcctctggccaggcttttgagctgatcttgaagccaccatctcctatctcagaagccccacgaactttagcttctccaaagaagaaagacctgtccctggaggagatccagaagaaactggaggctgcagaggaaagaagaaagtctcaggaggcccaggtgctgaaacaattggcagagaagagggaacacgagcgagaagtccttcagaaggctttggaggagaacaacaacttcagcaagatggcggaggaaaagctgatcctgaaaatggaacaaattaaggaaaaccgtgaggctaatctagctgctattattgaacgtctgcaggaaaaggagaggcatgctgcggaggtgcgcaggaacaaggaactccaggttgaactgtctggctgaagcaagggagggtctggcacgccccaccaatagtaaatccccctgcctatattataatggatcatgcgatatcaggatggggaatgtatgacatggtttaaaaagaactcattat

SEQ ID NO: 4614 - DNA, 812 bp, Homo Sapiens
ggtgatgaggtggaattgaagccagataccttaataaaattatatcttggttataaaaataagaaattaagggttaacatcaatgtgccaatgaaaaccgaacagaagcaggaacaagaaaccacacacaaaaacatcgaggaagaccgcaaactactgattcaggcggccatcgtgagaatcatgaagatgaggaaggttctgaaacaccagcagttacttggcgaggtcctcactcagctgtcctccaggttcaaacctcgagtccctgtgatcaagaaatgcattgacattctaattgagaaagaatatttggagcgagtggatggtgaaaaggacacctacagttacttggcttaacccttctggaagggtctgactgtgtgacccgcagcaaatagttcatgttggaaagaatgaaaacaactcaagttcatagcagccagcctgccgccattggacctcccttttaaaaactgagaccaagactcccatcagctggtctcggatttacatcggaactgctcaggattgatacatttcaagtctgtaaatacggacaccaacgccatttaccctaatttaagaacagcggggactgaccctccgtgccgagggctgcatgctaccgcactaagtcaatacatgggctccccgattcgcagctgtcgtcttggcagcacttgtcacgttggcagcactttgagagcaagtctgagtggacccacatgtaacctgctatgaaaaccatttgtatagtgtgtttcattttttaatgtgtgaaaataaagaaaattaaaggatttatgaac

SEQ ID NO: 4615 - DNA, 269 bp, Homo Sapiens
cctggaagcaagtcttttttattgacggaataaacacaacattgatggtagtaggatagagttggtggcaatgtcctgtcactgcaattatgacattcaaatcagacctacataactgtggctgcttttgattctttcaactttgaattttgattatctgtacagaggggcttctaaatgaaaacgaattcacttgcaccacccctactcacctatttactgtttctggagaataacaaattttttaaaaggtggtaaggctaaaagac

SEQ ID NO: 4616 - DNA, 129 bp, Homo Sapiens
ggggaggcagggaggcagccgccccatctgccccacagtctccggcctctccagcctcagccccctgcttcagtcccttccccatgcttccttgcctgatgacaataaagcttgttgactcagctatgg

SEQ ID NO: 4617 - DNA, 765 bp, Homo Sapiens
  misc_feature (37)..(37): n is a, c, g, or t
  misc_feature (67)..(67): n is a, c, g, or t
  misc_feature (150)..(159): n is a, c, g, or t
  misc_feature (161)..(177): n is a, c, g, or t
  misc_feature (505)..(514): n is a, c, g, or t
gtttaatggtggggatatcccaagccctagtccatgncccaggttttcctaagggaaccagctatgncccatgtccccttacttactggggccgccgcgcaaaaggaatggtttagaaagcttttggagggccggaggcggccgccaggnnnnnnnnnntnnnnnnnnnnnnnnnnnttctaattattcaactgtttatcatacataagaccgcatgactataatacaaaggggggttcttttttcatttaacgttacaatatacacagcaagtccggactagatcttacaatctgaacacaggtatttaaccttttccatgctgtttatgtttacaatgcacagaagtcctgtaaccaaactgtgtagtaaagcacacaaaactggactgtaacataacacagtatgcagaagcattggattttatgattttctttacgtaaatatcggtttaaaaactgctttagttttttggtgcttgctaagatgtggcaaccagcacagnnnnnnnnnntgacctgacccatatgatatcttaaccttatattcctaaacagcagtaactactgaattccttttgatattgctatactcaagatgatatccttttattcactgtaaacctttatgaactaccaagttcaaaaaaatcatccacaggcttgacagttaattacaaaataaatatggatttcctgataaacaacaaaaagtttttgtagtttataaaaacgagtatttccaagtttccattcacatttaccc

SEQ ID NO: 4618 - DNA, 640 bp, Homo Sapiens
agcccctgcttctcctggggctgtgccggggaagtgcgtgcgttccttcaggagaacacacacgtgagactgcgcatcttcgctgcccgcatctatgattacgaccccctatataaggaggcgctgcaaatgctgcgggatgctggggcccaagtctccatcatgacctacgatgagtttgagtactgctgggacacctttgtgtaccgccagggatgtcccttccagccctgggatggactagaggagcacagccaagccctgagtgggaggctgcgggccattctccagaatcagggaaactgaaggatgggcctcagtctctaaggaaggcagagacctgggttgagcagcagaataaaagatcttcttccaagaaatgcaaacagaccgttcaccaccatctccagctgctcacagacaccagcaaagcaatgtgctcctgatcaagtagattttttaaaaatcagagtcaattaattttaattgaaaatttctcttatgttccaagtgtacaagagtaagattatgctcaatattcccagaatagttttcaatgtattaatgaagtgattaattggctccatatttagactaataaaacattaagaatcttccataattgtttccacaaacaaaa

SEQ ID NO: 4619 - DNA, 835 bp, Homo Sapiens
gggggcgcgggaggcgcccagcgagccagagtggtggctggtcccgcgcgaaaattctgagctgtacacctctaggaaatgaaacactagttcagaagaagcctgtaaactctcttacaaatacatttggttattcaccatgaggttagcaaagcctaaagcgggtatttctcggagctcaagccaaggaaaggcctatgagaacaagcgcaaaacaggccggcagcggcagaagtggggcatgactattcgatttgactcaagcttcagtagactcagaagaagcttggatgacaaaccctataaatgtactgaatgtgaaaagagtttcagtcagagttcaactctttttcaacaccagaagatccatactggaaagaaatcccataaatgtgctgattgtgggaaaagtttctttcagagttctaatctcattcagcatcgacggatccatacgggggaaaagccctacaaatgtgatgagtgtggagaaagcttcaaacagagctcaaatctcattcagcaccagagaattcatactggagaaaaaccctatcagtgtgatgagtgtggccggtgtttcagccagagctcccaccttattcaacatcagagaacccacactggggagaaaccctaccagtgcagtgaatgtggcaaatgtttcagtcagagctctcatctgaggcagcacatgaaggtgcataaagaagagaagcctcgtaaaacccggggcaaaaaatatcagggtgaagactcacttaacctcttggaacagctggtacagggacacggaagtctctggctggtcttcgttcaagtatagggctttacg

SEQ ID NO: 4620 - DNA, 567 bp, Homo Sapiens
tgagtccttttgagggtgatttgtcttacaactgactgacttagcaggaatttaattaggtcatatttggtgatgagacttatggagtgtgcctctctctcccaactgctgcttaaaatgcaaggacaagcaattagaagccatcctaaggtgcttacctcacacgccacccatgaggcttgtggccacagtggcacttgggtgtggctcctctgttatttgtcctcatgtgagaaagcagatcatctccaaatcttgccatttgtatacttttggtggagacttggatgtcatatcttctttgttttgggttttcttccctagcttattttgtggcttttaaagaagtggattgtattgtgagatcctgtgattcctggtggccagtatcctggattcctctaagatcttgcctctttcctcctcatgaaagcagcacacattgtgttaacttatgtctcttgttaaatgagcttaatgtctttgtgttttgtccaaaactgtattgaaaaaatattgtttaatgcaaatgaaggaatgcaataaagagtaaatatacttgaaaaa

SEQ ID NO: 4621 - DNA, 823 bp, Homo Sapiens
  misc_feature (669)..(670): n is a, c, g, or t
  misc_feature (676)..(677): n is a, c, g, or t
  misc_feature (679)..(680): n is a, c, g, or t
  misc_feature (687)..(687): n is a, c, g, or t
gggagagaagcagtcttcatacacgcggccagccagcagacagaggactctcattaaggaaggtgtcctgtgccctgaccctacaagatgccaagagaagatgctcacttcatctatggttaccccaagaaggggcacggccactcttacaccacggctgaagaggccgctgggatcggcatcctgacagtgatcctgggagtcttactgctcatcggctgttggtattgtagaagacgaaatggatacagagccttgatggataaaagtcttcatgttggcactcaatgtgccttaacaagaagatgcccacaagaagggtttgatcatcgggacagcaaagtgtctcttcaagagaaaaactgtgaacctgtggttcccaatgctccacctgcttatgagaaactctctgcagaacagtcaccaccaccttattcaccttaagagccagcgagacacctgagacatgctgaaattatttctctcacacttttgcttgaatttaatacagacatctaatgttctcctttggaatggtgtaggaaaaatgcaagccatctctaataataagtcagtgttaaaattttagtaggtccgctagcagtactaatcatgtgaggaaatgatgagaaatattaaattgggaaaactccatcaataaatgttgcnnccaagnntnnattaaanaaaccttcaacatgtccggcccgcctccggccccccaaaaaacctttctaaaaccctctcgttttgggcgccgggggcccccgtaagggtaagtggaccctgggtgcctcaccccgcgcttccctccgaaaaaacc

SEQ ID NO: 4622 - DNA, 443 bp, Homo Sapiens
gggttttgaatttgaaatcattcttattccctttaagaatgtttatgtatgagtgtgaagatgctagcgaacctatgctcagatattcatcgtaagtctcccttcacctgttacagagtttcagatcggtcactgatagtatgtatttctttagtaagaatgtgttaaaattacaatgatcttttaaaaagatgatgcagttctgtatttattgtgctgtgtctggtcctaagtggagccaattaaacaagtttcatatgtatttttccagtgttgaatctcacacactgtactttgaaaatttccttccatcctgaataacgaatagaagaggccatatatattgcctccttatccttgagatttcactacctttatgttaaaagttgtgtataattgttaaaatctgtgaaagaataaaaagtggatttaaattaaaaaaa

SEQ ID NO: 4623 - DNA, 524 bp, Homo Sapiens
gccggggagccgggcggagaagcaaaggagagggaagctggaagcacctttggcccgggacagaaatctggagagcttggctacctccatcctcctcaggccggagcaggcttcctgagagagtccaggtcgtaggagttttacgacttagaaaagcgggctgcagattccttcctgggtgtttggttcaagccttggctccagcctcactctcagtcttcccgggagttcgtgggatttggaccttagattattagtattattttgagggcctcctgtgtgtaagcactggttgtgcgcagatggctgtgcagagggccatgaggtagaggctggggaaatgagggcttggaggtgcttgaggtatggtctttacctacgtgaaatgttggaggttgagatgaaaactcttgctttgaattcttcatggaggactacatcatttcaatcctgaatctggctcaattctattattcacttattactgtattaaaaacgtttaattggccaggcacagtggttca

SEQ ID NO: 4624 - DNA, 986 bp, Homo Sapiens
gggggccgtcgggtagaggctgaataccagtttccgagcggcaaggcagcgatggcgatttttagtgtgtatgtggtgaacaaagctggcggcttgatttaccagttggacagctacgcgccacgggctgaggctgagaaaactttcagttatccgctggatctgctgctcaagctacacgatgagcgtgtgttggttgctttcggccagcgggacggcatccgagtgggtcatgcagtgctggccatcaatggcatggacgtgaatggcaggtacacggccgacgggaaagaggtgctggagtatctgggtaaccctgctaattacccggtgtccattcgatttggccggccccgcctcacttctaatgagaagcttatgctggcctccatgttccactcgctctttgccatcggctcccagctgtctcctgaacagggaagctcaggcattgagatgctggagacagacacattcaaattgcactgctaccagacactgacagggatcaagtttgtggttctagcagatcctaggcaagctggaatagattctcttctccgaaagatttatgagatttactcagactttgccctcaagaatccattctattccttagaaatgcctatcaggtgtgagctctttgaccagaacctgaagctagctctggaggtggcagagaaggctggaacttttggacctgggtcataggctgaacctgttatggacccccaaattctgagagttcctgcaacaagaatactgctgttgacactccagtggaaatcccagcagccttgttagtgcacttgaaagtgggagaatgctgaccctgatgacttgtactgattcctgagccttaacactgtgctctttccttctgtatataccatggtcttactttccaactctgtacagatttatttatggaggagctaggtccataaatgttgtaataaatattcctttgatcttggtgtttgcaa

SEQ ID NO: 4625 - DNA, 1594 bp, Homo Sapiens
  misc_feature (893)..(1006): n is a, c, g, or t
  misc_feature (1164)..(1173): n is a, c, g, or t
  misc_feature (1230)..(1305): n is a, c, g, or t
  misc_feature (1351)..(1359): n is a, c, g, or t
ggcactggcttccagaagtcgtgttttggaagagccgccacggcttggctttagagctgtgtgaatccattttggtggttggttttaacccaaactcagtgcatttttaaaatagtaagaatccaagtcgagaacactgaacacacagaagggagaccccccctagcatagatttgcagttacggctgggatgccagtcgccagcccagctgttcccctcgggaacatgaggtggtggtggcgcagcagactgcgatcaattctgcatggtcacagtagagatccccgcaactcgcttgtccttgggtcaccctgcattccatagccatgtgcttgtccctgtgctcccacggttcccaggggccaggctgggagcccacagccaccccactatgccgcaggccgccctacccaccttcaggcagcctatgggacgcagggccccatctgtccctcggtcgccgtgtggccagagtgggtccgtcgtccccaacactcgtgctcgctcagacactttggcaggatgtctggggcctcaccagcaggagcgcgtgcaagccgggcaggcggtccacctagacccacagcccctcgggagcaccccacctctgtgtgtgatgtagctttctctccctcagcctgcaagggtccgatttgccatcgaaaaagacaacctctacttttttcttttgtattttgataaacactgaagctggagctgttaaatttatcttggggaaacctcagaactggtctatttggtgtcgtggaacctcttactgctttcaatacacgattagtaatcaactgttttgtatacttgttttcagttttcatttcgacaaacaagcactgtaattatagctattagaataaaatctcttaactattannnnnnnnnnnnnnnnnnnnnnnnnnnnnnnnnnnnnnnnnnnnnnnnnnnnnnnnnnnnnnnnnnnnnnnnnnnnnnnnnnnnnnnnnnnnnnnnnnnnnnnnnnnnnnnnnncttttgtggcccccttggcccttgaaagctttttagacacatttaatttggtcgaggcccccttttgggaacccaccccccccaaaacatgtctacagggaaaacccgtgtcctaaaaaaggcttgggtttccccaaaaataaagaacccccgcgcgnnnnnnnnnngcgctcgcgggaaaacacccaaaggggtttcaaaagcgcccaatggggggctctttnnnnnnnnnnnnnnnnnnnnnnnnnnnnnnnnnnnnnnnnnnnnnnnnnnnnnnnnnnnnnnnnnnnnnnnnnnnngggggcgaattttcctaaaaaaacgtttcggccacaatttgaaaannnnnnnnnaaaagcgggtgaatccaccactccaaacgccgcgggggggaatcctaacactctttgggccgccttagggaaaaaaattttctgcgccccgggggaaaaacacgcgggccgccaaaaaaatataaccctcgtgtgggccacaaaatttccaccccaaagaaggggggggagatactactccccacggggtgttgttctcccccaccaccaaaatattatttgtgtaacaaaaaac

SEQ ID NO: 4626 - DNA, 1166 bp, Homo Sapiens
  misc_feature (653)..(657): n is a, c, g, or t
  misc_feature (659)..(665): n is a, c, g, or t
  misc_feature (669)..(669): n is a, c, g, or t
  misc_feature (671)..(671): n is a, c, g, or t
  misc_feature (675)..(675): n is a, c, g, or t
  misc_feature (679)..(712): n is a, c, g, or t
  misc_feature (715)..(715): n is a, c, g, or t
  misc_feature (1095)..(1105): n is a, c, g, or t
gggggaagaggcgtgatctggccttcgactcgctatgtccactaacaatatgtcggacccacggaggccgaacaaagtgctgaggtacaagcccccgccgagcgaatgtaacccggccttggacgacccgacgccggactacatgaacctgctgggcatgatcttcagcatgtgcggcctcatgcttaagctgaagtggtgtgcttgggtcgctgtctactgctccttcatcagctttgccaactctcggagctcggaggacacgaagcaaatgatgagtagcttcatgctgtccatctctgccgtggtgatgtcctatctgcagaatcctcagcccatgacgcccccatggtgataccagcctagaagggtcacattttggaccctgtctatccactaggcctgggctttggctgctaaacctgctgccttcagctgccatcctggacttccctgaatgaggccgtctcggtgcccccagctggatagagggaacctggccctttcctagggaacaccctaggcttacccctcctgcctcccttcccctgcctgctgctgggggagatgctgtccatgtttctaggggtattcatttgctttctcgttgaaacctgttgttaataaagtttttcactctgaaaaaacaaaannnnnannnnnnnaaananaaanaaannnnnnnnnnnnnnnnnnnnnnnnnnnnnnnnnnaanggggggggcccgctcttaaagtatccctcggaggggcccaagctttaccgcgaacccagcttttctttgacaaagggggcccctataggggagccgaattataaactagggccctgggccgccgtttttacaacgccgcgaactgggaaaaactgctaccttgggaactttgggaagggaacctaacttcttggggggggacaaaattgggaccaacttccctacaaagatttaaaggctcctagggaaataaaaaaatttttaagggggtaaagggggtaaacctaaccgccataagcttgccgcctttgaaaatttttccttcccggggatgggtttttggaaaatttttatacccgggggcgctgggggtccaaatnnnnnnnnnnnatttaaaaatcaccagcccccagggggttttttaggggcccctcaagccttcacaaggttt

SEQ ID NO: 4627 - DNA, 1181 bp, Homo Sapiens
aggctgatgccaaaaacgtaaacttacgcaacacgataaatgaggagtagattcccacgacatatacaaggattccctgacgtctttctccagagtgtcttaataaagcaagcttcccctactgaactggccaatgctgtagatgttttcaaagcagtaaatattatttgataaaagatgtgaggtaaaaaagctcaaaagctccagtgtcaaactgctataaaatgaagacacatcacagctggaataatttaaatcaaagtgacaatgggatttgacttacaaaagttctatttacacatctattaggtaaagcaaggtacacccacttcaaaacacatctgtatgtgaatgcacatctgagtaccattcagcaagaagttttgaagagaacgtcagtttaataaagctaaatggggagaattgaagtttgcatttgacatggtattaaacaaaaccaaagggctgaaactcatgtttagacaacacaggtcactagtcactaggcaaagaaaacagtccacagcaggtggcacaaataattcctatacaaaacaaatgttgcaaatattctgcttttaggaaacatgaaacaagggctgacatgtcatttacaaacacataatataaaaatgcacagccccattgaacaaaactccagcaaatgttttatagctgacttccctcagacccacccccacaagaggccattctgtgaattactagcatctgccatttcatcttttaaaattaaaagaatgacgggcacatgtgctgtgcagggtggaagagaagtgtcatacaaaaaggggccggagctggccagaaacatttggacaactgtgtctcaaaaacagtgtgttctcgtttcgcttctgtgcctcagtctttaagatacaaaactatctcaggacaccacatcctgggcccagcctgcagagtggtcacttttctgccactgccctcaatatgagggagcactgaaaggctcttgacttagaaccccttcccctttctgtctaaagccgaggagccatctgtggttgcgagcacgcagcacaccaggcctgtccatccccagtgcactgctgggtggtgggaggtccgccgggccagagtgaagtaaggcatttcctgtctcccagcgtcccgttcactttctcagaaacagcttggcaacc

SEQ ID NO: 4628 - DNA, 1604 bp, Homo Sapiens
  misc_feature (454)..(525): n is a, c, g, or t
  misc_feature (594)..(715): n is a, c, g, or t
  misc_feature (882)..(894): n is a, c, g, or t
ggtgacaaggtcatgcagcagaacctggtgtattaccagtaccacagggacacttggggcctctcggatgagcacttccagcccagacctgaagcagttcagttctttaatgtgaccacactccagaaggagctgtatgactttgctaaggaaaatataatggatgatgatgagggagaagttgtggaatatgtggatgacctcttggaactggaggagaccagctagcccacagcaaccaaagagacttcctcttggcgttcaggaaacacagattctttgtccttttcccaacagcccaggctgttgatacctcagagccttctctttactctccaaagtgaaagggaagcccccgtctctctaactgcatgtcatcaggggtgagcctgcctttcctatcttcacacctgccacctcatgttcacacctatctttctcaccttttttttgnnnnnnnnnnnnnnnnnnnnnnnnnnnnnnnnnnnnnnnnnnnnnnnnnnnnnnnnnnnnnnnnnnnnnnnnttggggttcaagcaattctgctgcatcagcctcccgagtacctgggattacaggcatgtgccaccacgnnnnnnnnnnnnnnnnnnnnnnnnnnnnnnnnnnnnnnnnnnnnnnnnnnnnnnnnnnnnnnnnnnnnnnnnnnnnnnnnnnnnnnnnnnnnnnnnnnnnnnnnnnnnnnnnnnnnnnnnnntgagccaccatgcccggcctctttctcacctttacacctgtcttcttatcctcacatctgttttcacaccttcatccctgtcttcctcatgttcacacttgtcttccccatgttcatagctgcctttcttaccattttggtttgaagggcagtcttctctggcttgnnnnnnnnnnnnncccagaaaatcagtattattttttaaataagaaaaacattcctagaagatgataattgtgaaaacctcctttggcttatttgcttttccagattttagtctcctttctccccatccgggaaagatggtggaagacataagctaaatttctccagcctcacaatggtcttcacttggtctgaattgtaccaattctagcacccactgaaaaacaagttggagtagcagagtgtaaagtggcagaaaatgtgggcttttttgccccaccttttgcatcctcccaaaattaccaacgggttggacccgactccccccctgatacatcacccccatcgatgcccccgcccgaaaccacccggaggcccaagagggagaaagcgcccctccgtaagccctcgaatcccccgataacccatgggtcggggccggccctccggcgcccctcgagaaagagcttgttcctaaccccacctttctcttttgggcgcctcgggggcgccctcactatatgtgcaacagcgcaacccgcggggtccaagcaatgggtgtttctcttacaggaggagaccgcggggtcactggaacctggcggcgctgggagattcctccacccacaaaaaaacaaaggcccctcggcgggggtaaacccggagaggcatcttttgagaaacacccctccaaagagggagctgtcctccggggggcctctct

SEQ ID NO: 4629 - DNA, 647 bp, Homo Sapiens
gggacgggacggaaaactggcggcttggtttgttcagcgcgtcgcggtcatggctctcgtttcaggcctccacggtgtgcacctggagtcaggagcgcgcttgtgcgtacagttcggttcagttactaaaagatgtaactgaactgcagatccttggtgaaatatctttcaacaaatctctatatgagggactgaatgcagagaaccacagaactaagatcactgtcgtcttcctgaaagatgagaagtaccattctttgcctatcatcattaaaggcagcgttggtggacttctggtgttgatcgtgattctggtcatcctgttcaagtgtggcttttttaaaagaaaatatcaacaactgaacttggagagcatcaggaaggcccagctgaaatcagagaatctgctcgaagaagagaattaggacctgctatccactgggagaggctatcagccagtcctgggacttggagacccagcatcctttgcattactttttccttcaggatgatctagagcagcatggagctgttggtagaatattagtttttaaccatacattgtcccaaaagtgtctgtgcattgtgcaaaaagtaaacttaggaaacatttggtattaaataaatttacacttttctttgcaaaa

SEQ ID NO: 4630 - DNA, 720 bp, Homo Sapiens
  misc_feature (354)..(366): n is a, c, g, or t
ggcatcaattagaaggaaagtttgaaacttctgattacctttatgttggtttctcttattatttgtctcttgctagatctgctaaaccaacccagcttgctcagagatctcatattgaagcaacatacaggcaatccacatctttctttccctttgaagtatagtcattggatgggatgaggggcagggcctgttgggttcacagggccttgcactgcatgggcacatacttaaaagctcttgtgcatggaatccctgtctgttagccacaggcctctttagctctatacattcaaaataactactgtagtagaaaatagataagcttcagctgagttggcttttgatagtggnnnnnnnnnnnnntttgactttttatggccaaaattccttgttgacagctgtgatgttctaatatgatttgggaatatgtcagtctacagaacctgcatcctgtaaaaacacctttggggtagacgataaaagtcatttttaaggcaaatacctaccatgtgactttttattaccaaatgcatcagtagtggagctggtatgttgtttcataggatggaaacattagaagtccagagaaaaataaattttaaaaaaaggtggaaaagttacggcaaacctgagatttcagcataaaatctttagtatgaagtgagagaaagaagagggaggctggttctgttgctcgtatcaataggttatctgtag

SEQ ID NO: 4631 - DNA, 1076 bp, Homo Sapiens
cggagtgatcatcgatcattgcaggagagagcgagcgagcagtgaaagctagagaaacttgactgctaacctccaggcccaagaaggactgaccacttttctctccaccacctatgggctataccccagctcttgtgcacctatatgttttatccctaatataggaagttgtggatgacactgagccccctgtagtaaccttaggatccccactctttcctgctaatcctgtcataatgaatgtagcttctcagttcactgtatatgattcggtattgggggtttggaggcacccagaccctggcaatattatgtgtccctttggaccagtctcccaagaggagaggggcaggcagaaaagagtggggatcctaaggttactacagggggctcagtgtcatccacaacttcctatattagggataaaacatataggtgcacaagagctggggtatagcccataggtggtggagagaaaagtggtcagtccttcttgggcctggaggttagcagtcaagtttctctgctttcactgctcgctcgctctctcctgcaatgattgatgatcactccgtggatagagaggcacactgtcagaggtgaccggagaactgagttgcaaaatatattaagatctggtagaggtaccagcttcctttccagctggagaggccccaacactggatggttctgtagggagcctagggagcctggtcatcaacttgcaatacctcacagagccagttcacatcccactctgagctcccacgagaaacactgcttctccaggcccggggttgttggggagagaggcagaggcagctggagcgccgttctctcctgctgggacaccgcttgggctttggtattgactgagtggctgacagttatcttccaaccccaactggcttgggggcaggacaagggctaggcttgatggtggccaggcttgcctgctccccacctgggatgcccctgctctggacctctcatttctcttcattggtttatttttcaatgcatctttaatttgtaaagaaataaaataaattaagatgtaaccattagcctcaaaa

SEQ ID NO: 4632 - DNA, 542 bp, Homo Sapiens
  misc_feature (128)..(138): n is a, c, g, or t
gggggactgatttgcttcccttcctgccatggctggagctttgggaacagtctgtccttacagagctgcaataagaaataaccaaagatgaagctggtcaaatattttcataacttgcttctgttgannnnnnnnnnngtaaaactttcccaagacattttcagacttaaaaataaagtcagtgttacaggtgctggtcagccttcttacttgtacctcaaacactgggataaaggaggcggtccagggcaatgcagtgatgtctgtcaagacattccccctcccctaaactcagtagcagttgaggatgacatttcaggctagagagacccaaaatacctctgttccacctgagagcaaggtggaagttgcatcagctactgccccaagtgagcttcatcttctgattgtgggctttggaggaacgagagaactggctcttggccactgtgaggggtacagctttgccactcaaatataccttattgtggcattcagggagccagggtccagagctgcagggctgcggtccctggctcact

SEQ ID NO: 4633 - DNA, 1917 bp, Homo Sapiens
  misc_feature (1249)..(1399): n is a, c, g, or t
  misc_feature (1401)..(1402): n is a, c, g, or t
  misc_feature (1404)..(1408): n is a, c, g, or t
  misc_feature (1423)..(1433): n is a, c, g, or t
  misc_feature (1478)..(1568): n is a, c, g, or t
  misc_feature (1576)..(1668): n is a, c, g, or t
  misc_feature (1700)..(1715): n is a, c, g, or t
  misc_feature (1733)..(1745): n is a, c, g, or t
  misc_feature (1766)..(1806): n is a, c, g, or t
gggcggtcggcgtggtcttgcgagtggagtgtccgctgtgcccgggcctgcaccatgagcgtcccggccttcatcgacatcagtgaagaagatcaggctgctgagcttcgtgcttatctgaaatctaaaggagctgagatttcagaagagaactcggaaggtggacttcatgttgatttagctcaaattattgaagcctgtgatgtgtgtctgaaggaggatgataaagatgttgaaagtgtgatgaacagtgtggtatccctactcttgatcctggaaccagacaagcaagaagctttgattgaaagcctatgtgaaaagctggtcaaatttcgcgaaggtgaacgcccgtctctgagactgcagttgttaagcaaccttttccacgggatggataagaatactcctgtaagatacacagtgtattgcagccttattaaagtggcagcatcttgtggggccatccagtacatcccaactgagctggatcaagttagaaaatggatttctgactggaatctcaccactgaaaaaaagcacacccttttaagactactttatgaggcacttgtggattgtaagaagagtgatgctgcttcaaaagtcatggtggaattgctcggaagttacacagaggacaatgcttcccaggctcgagttgatgcccacaggtgtattgtacgagcattgaaagatccaaatgcatttctttttgaccaccttcttactttaaaaccagtcaagtttttggaaggcgagcttattcatgatcttttaaccatttttgtgagtgctaaattggcatcatatgtcaagttttatcagaataataaagacttcattgattcacttggcctgttacatgaacagaatatggcaaaaatgagactacttacttttatgggaatggcagtagaaaataaggaaatttcttttgacacaatgcagcaagaacttcagattggagctgatgatgttgaagcatttgttattgacgccgtaagaactaaaatggtctactgcaaaattgatcagacccagagaaaagtagttgtcagtcatagcacacatcggacatttggaaaacagcagtggcaacaactgtatgacacacttaatgcctggaaacaaaatctgaacaaagtgaaaaacagccttttgagtctttctgatacctgagtttttatgcttataatttttgttctttgaaaaaaaagccctaaatcatagtaaaacattataaactagnnnnnnnnnnnnnnnnnnnnnnnnnnnnnnnnnnnnnnnnnnnnnnnnnnnnnnnnnnnnnnnnnnnnnnnnnnnnnnnnnnnnnnnnnnnnnnnnnnnnnnnnnnnnnnnnnnnnnnnnnnnnnnnnnnnnnnnnnnnnnnnnnnnnnnnannannnnngagaagtgcgcccgnnnnnnnnnnnacaaaaaaattttttacaacctttgtgggggggccgggccccccnnnnnnnnnnnnnnnnnnnnnnnnnnnnnnnnnnnnnnnnnnnnnnnnnnnnnnnnnnnnnnnnnnnnnnnnnnnnnnnnnnnnnnnnnnnaccgcccnnnnnnnnnnnnnnnnnnnnnnnnnnnnnnnnnnnnnnnnnnnnnnnnnnnnnnnnnnnnnnnnnnnnnnnnnnnnnnnnnnnnnnnnnnnnnccccccggcggcttattaaaaataaaaatttnnnnnnnnnnnnnnnngccgctttattggggagnnnnnnnnnnnnnaaaaaatattaaaaacatctnnnnnnnnnnnnnnnnnnnnnnnnnnnnnnnnnnnnnnnnnagtgagaaaaacacttgtaacacccgcggcgggaaacacccaccccaccttgtgggcgccctgtgggaaaaataacatactcgccccccccgggggaaaaaacacgggcgg

SEQ ID NO: 4634 - DNA, 1564 bp, Homo Sapiens
ggatctcttaggctttctgctcagaaggatttggaacagaaagaaaagcatcatgtaaaaatgaaagccaagagatgtgccactcctgtaatcatcgataaaattctaccctctaagaaaatgaaagtttctaacaacaaaaagaagccagaggaagaaggcagtgctcatcaagatactgctgaaaagaatgcatcttccccagagaaagccaagggtagacatactgtgccttgtatgccacctgcaaagcagaagtttctaaaaagtactgaggagcaagagctggagaagagtatgaaaatgcagcaagaggtggtggagatgcggaaaaagaatgaagaattcaagaaacttgctctggctggaatagggcaacctgtgaagaaatcagtgagccaggtcaccaaatcagttgacttccacttccgcacagatgagcgaatcaaacaacatcctaagaaccaggaggaatataaggaagtgaactttacatctgaactacgaaagcatccttcatctcctgcccgagtgactaagggatgtaccattgttaagcctttcaacctgtcccaaggaaagaaaagaacatttgatgaaacagtttctacatatgtgccccttgcacagcaagttgaagacttccataaacgaacccctaacagatatcatttgaggagcaagaaggatgatattaacctgttaccctccaaatcttctgtgaccaagatttgcagagacccacaggactcctgtactgcaaaccaaacaccgtgcacgggctgtgacctgcaaaagtacagcagagctggaggctgaggagctcgagaaattgcaacaatacaaattcaaagcacgtgaacttgatcccagaatacttgaaggtgggcccatcttgcccaagaaaccacctgtgaaaccacccaccgagcctattggctttgatttggaaattgagaaaagaatccaggagcgagaatcaaagaagaaaacagaggatgaacactttgaatttcattccagaccttgccctactaagattttggaagatgttgtgggtgttcctgaaaagaaggtacttccaatcaccgtccccaagtcaccagcctttgcattgaagaacagaattcgaatgcccaccaaagaagatgaggaagaggacgaaccggtagtgataaaagctcaacctgtgccacattatggggtgccttttaagccccaaatcccagaggcaagaactgtggaaatatgccctttctcgtttgattctcgagacaaagaacgtcagttacagaaggagaagaaaataaaagaactgcagaaaggggaggtgcccaagttcaaggcacttcccttgcctcattttgacaccattaacctgccagagaagaaggtaaagaatgtgacccagattgaacctttctgcttggagactgacagaagaggtgctctgaaggcacagacttggaagcaccagctggaagaagaactgagacagcagaaagaagcagcttgtttcaaggctcgtccaaacaccgtcatctctcaggagccctttgttccc

SEQ ID NO: 4635 - DNA, 653 bp, Homo Sapiens
  misc_feature (452)..(469): n is a, c, g, or t
gggaatatggcggcgcccagtggcggtgtgaactgtgaggagttcgccgagttccaggaattactcaaggtgatgaggacaattgatgacagaatagtacatgaattaaacactacggttccaacagcttcctttgcagggaaaattgatgccagccaaacctgtaaacaactttatgagtctttgatggcagctcatgccagtagagacagagtcataaaaaactgtatagcccagacttcagcagtagtaaaaaacctccgagaagagagagaaaagaatttggacgatttaacattattaaaacaacttagaaaagagcagacaaagttgaaatggatgcagtcagaactgaatgttgaagaagtggtaaatgacaggagctggaaggtgtttaatgaacgctgccgaattcacttcaagcctccaaagaatgaataaagagagattcnnnnnnnnnnnnnnnnnnaaggactgggtcatctcataagagctaagcatgacagatatcaacagggcgggctttctaggatgatttctgagccaacagtccaagaccttttgttgatttcagccccacttagccaagacctcaagtataaataattctgataattatggagaaatcaactgctattttatactgattctgt

SEQ ID NO: 4636 - DNA, 453 bp, Homo Sapiens
tggagttcattcaaaatttattgagctgcaactgtgtgctcagcaatgagaatatagcagtgagcaagatgtgaacaagatctctgccctcgtgagcttacaatctagcagcgcagccagcctattacagccataattttacaattgtaataaaaactctggaaaatgcatggtgctaactgatttatcagaaagtcttgacccaccaagaaatcagaaaagacctccctgaggaaggaacatttaggatcagctaggtggaaagtgaaaggaagagtgttgcaggcagagaggacagtgtgtgagggtctgaggcaagacatgtaatgaactgaaagccagtgtgtctaggccatagagaacaaagagggtgttgcgagatgagcctgatttatacaagatctttgaatttaggactttattccaaaagcagttggaagccactgaagaagc

SEQ ID NO: 4637 - DNA, 1138 bp, Homo Sapiens
  misc_feature (414)..(475): n is a, c, g, or t
  misc_feature (517)..(534): n is a, c, g, or t
  misc_feature (695)..(705): n is a, c, g, or t
  misc_feature (848)..(860): n is a, c, g, or t
cttaaaactggagtgacaggacaaataatcattactttcaattcatgactgctttatattcatttgatgaaatcatttgtatacaaaccagggagagttttctttacacccttgacaatatatcacatactcttcaagatcataataatatcattaatataaatttaaacaacatggcttgttagaaaatatgctaattgctatggtctcattatgtttgcttagcttttatttgtttttctgtgaacagttagagagctaatttttttcaaaggtgattgtaagtcatattttatatagcattttgcttgattatttgctctgtactgaatttgtactctattgccattagatcttacaataatgttccactctgcaaatttttaaggttcaaataaagtttaattgtttgcnnnnnnnnnnnnnnnnnnnnnnnnnnnnnnnnnnnnnnnnnnnnnnnnnnnnnnnnnnnnnncacaacaaaacaaaccaacggaggaaacgcccccaaaacggnnnnnnnnnnnnnnnnnntgcttgtgcgggccgccccgccccctaaaaaaacttttaaaaaacttttcgtttggggcgcggggccccccgcataagaaagtgaaaacagggcaaaacctgggtttccaaaagaaaaaaccggggcataggcaaaaagggggttgggcgttccccccccnnnnnnnnnnnccccccggggggggaacaccgggcggttttttgaaaaaaactcccaaacggggcgtttctcggagggggtctttcgggggggtctcatccacacaagggggggtccccaggggacggccccccaaatattaaaaattatacannnnnnnnnnnnnggggacatttgtttcccagaaaaaaacggggggggaaaattttcttttaacgaatattcttttcgccgataagggggaagcccccccctccacaaaagcgggtttgtgggggaacccctgtaaaatccgccccaggggggaaataccacgcacacttttggtcgccccctctgtggggtataactaaaatttgggccccacacgcgggggaacaaaaacggcgcgggccacaaaaaaataatatgtgccctcactatttttgggccaccaccctctta

SEQ ID NO: 4638 - DNA, 434 bp, Homo Sapiens
  misc_feature (254)..(254): n is a, c, g, or t
  misc_feature (295)..(336): n is a, c, g, or t
ctggaaccttccgtggggacccgtaagtggctgtccagaaaggcgggagggtgggcacggggcacggggggcagctggggtcgtcgttaagggtcacgcatctgtacagttgaatttcctttctcttatcatgttttacccaccttgtcccttttttccccaattgtgcttttgcatttttttccttggcaaatgtaaactcagcctttcattcatgacgtgtgaaatttcagtttctctggagtttgtcaagnacggcgtgggaaccacgcctgaaactcaggtaataggaggnnnnnnnnnnnnnnnnnnnnnnnnnnnnnnnnnnnnnnnnnntactctctacctctgctggcccagcctgtctcgccctggccgcggcagggtggcctgtaacaatttcagttttcgcagaacattcaggtattaaaagg

SEQ ID NO: 4639 - DNA, 598 bp, Homo Sapiens
  misc_feature (313)..(335): n is a, c, g, or t
gggaccttgagagtcatgatggaggtccagaaacgtcaacggcttgaaacagctgagagatttcaaaagcacctggaacgagtaattgaaatgattcagaattgcttggcttctttgcctgatgatttgcctcattcagaagcaggaatgagagtaaaaactgaaccaatggatgctgatgatagcaacaattgtactggacagaatgaacatcaaagagaaaattcaggtcataggagagatcagattatagagaaagatgctgccttgtgtgtcctaattgatgagatgaatgaaagaccatgaaagatgnnnnnnnnnnnnnnnnnnnnnnngataatagcatcatatattagttcattttcttttggacagtcttaagagaagtttcactaaaaatgtaaacagctttaatcttgactccaaatttttcaattatgagatgtcataggcagtaatttcgctgtataacaagcatagacaaatgagtgtccctgcactaagaagaatcactttaaaaagcaaagtgttagctgctgttgtatgggacattcctatgttttagagttgcagtaaaactttgatgataacctcaaaa

SEQ ID NO: 4640 - DNA, 762 bp, Homo Sapiens
  misc_feature (347)..(355): n is a, c, g, or t
  misc_feature (576)..(604): n is a, c, g, or t
caaccccataaggaaagtaatcaaaaatgagagtagatggaaattcatctccttacctaaagggctcatgtacatttcagagaaagcaatttctcttagctatacttattctcttatggtccttgtttattactataaacaagcaagttcactttatcatttactttttattgggtggcttgaagtacctatgtaatgcaagtatgtactgtactaaaatacctatatttccaaataacatatgtggtgtagcccacagtctctgcagaagcatcatgagtaacctgtgcctttacactttacaatccgttattggttgctgttaaaagtatgataacagatgaagnnnnnnnnnctaagtatgaatacacttttccaaacacgcacatacacagcttacaatggaatcccaatggaaataagtgacaacatctgatgtagaatctataaaatgtagactctgcaataaaaagccaaaggcacgtaaaaatatattttaactttaaaaataacttagttacagtaatactttgcctgtgtcttaccaacatgtagctgacagtcaaaattttgcannnnnnnnnnnnnnnnnnnnnnnnnnnnngaactacaagaaaatccccaaaacccataaagttcaaatgtgaaaacagaaaagttttaacactggagaattcgctatggtgagcctaagcaatatatagaaaagagtctacaaaaaggcttaggtgttaaataaattttgacttcctcttgctcacc

SEQ ID NO: 4641 - DNA, 680 bp, Homo Sapiens
ggaactctggaggtgagtgcccgcaagcagttcccctgctttgaaagaagatggtcagcccgctgcctccccagcggccacagctcctttgagtgtggggggtcacagccaggatgtattcctgacaataaggatccttttattttcatttctgcataatgaaagagcctttcgatttattagaagtggtttttcctccctacatctttaaattcttggttctctttagtcctcatcccttgaatggacttgtcagctacctccccaggaggagttcagaagcttctgttggccatcacttgagtagatgacaagctgtaaggtatctgctgctaacgtggctgcttctccgagagcacattgaggtccagacagatccaaaccttggccctaaaaaatgtgtgctgtaaagttacttgatgtatatttattataattatttatggttgcatttaacaaacttttcattcaatctgatgctatttacaccatgctgtgtaaaggaagctcactaaaggaaaaaagtcacaccaataaataaccttcatctaattttgatttaccttaagagttgtgtgatcatctactcttgctgagcaagttcaaaggctggcatgcttggatggctctgatatttaagtgctgccaagtggctaggaattaaagtgtttctaattata

SEQ ID NO: 4642 - DNA, 786 bp, Homo Sapiens
gggtcccgtgaccatgtaccagctgcgtcctctgggccacgctccacttgcccgcttccacccggaaagccccccaggctgagtgcggcatgatctccatcaccgaatggcagaagattggtgtggggatcaccggtttcggcatcttcttcatcctctttggaacactcctgtactttgattccgtgctcctggcctttggaaacctgctgttcctgacgggcctgtccctcatcattggcctgaggaagaccttttggttcttcttccaacggcacaaactcaagggaaccagcttcctcctggggggtgtggttatcgtgctcctacgctggcccctcctcggcatgttcctggaaacctacggattcttcagcctctttaagggctttttccctgtcgccttcggcttcctgggcaatgtctgcaacatccccttcctgggtgcgctgttccggagacttcaaggcactagctcgatggtctgaaaaacagagatgagctccttgaacttggatcattggttgagggggctagagggagaatgggaaccaccccctcagtcccctgcactgactcactccccgacatatccggacctccccaagtccagaaggaaggaatggagctgagcaactgacgtcaaatccccaagtcgactcaagaggctgccaggaagcagagatgcagaccccaaggagactgggctggggctggtatcacaccctcactctatatttatgggaggaaaagtgaagattaaattcccaagttgtgcgtgtgagg

SEQ ID NO: 4643 - DNA, 893 bp, Homo Sapiens
cgagccggaagctccgactgcggcggcatccgggacggcgggcgggctggccaccacgggacaggaaggcacagagcatggagaatgatgaacttccgtcagcggatgggatggattggagtgggattgtatctgttagccagtgcagcagcattttactatgtttttgaaatcagtgagacttacaacaggctggccttggaacacattcaacagcaccctgaggagccccttgaaggaaccacatggacacactccttgaaagctcaattactctccttgcctttttgggtgtggacagttatttttctggtaccttacttacagatgtttttgttcctatactcttgtacaagagctgatcccaaaacagtgggctactgtatcatccctatatgcttggcagttatttgcaatcgccaccaggcatttgtcaaggcttctaatcagatcagcagactacaactgattgacacgtaaaatcagtcaccgttttttccctacgattacaaaactgccagtcctatatggagtctgatcacaagactgcagtttcttcacagatctcaggaagttgtcgtggggcagaggctttttaaaaacatgtgattagggagctatctttatctgaataataacgaatttttaggtaaaacctgagatagagtactacaaaatcatgttgatgacttcagattttggaagttaaatcatgtctgttatttgcattctttagaaacttgactaagtacctgaattcatatttctattctactgtgcaacatagtgatgattcagaaatttttcctttggggaaaaaaatgaatatgaacatttccattgtgttaagtgtaaaaaggtccagacatgatcataaaatttaaattttatac

SEQ ID NO: 4644 - DNA, 1627 bp, Homo Sapiens
aatattgaaaacaattttacttcaaatgcataaaatgatgcttctgattcagctggtgcgacatttatttcacatttgagttcagctgctcctgatgtctctttcctgaaaatttcaatactaagagctcgagaaaccctgtatttggggaagcttatccttcaccatcaactttgggggtaggggtcagagggaacaagggtggaaaggccgcgctgaatggggccgaagctccgcccctcagcgataagtccagattcctgcggccgacgtggtcctccgagggagcagcagagccgccgaggctggcgagtcccaggggaaggatgttctagccggagtctactcgatggtagggcaggaagccgccttgtctctgggcgcggccatgttggaggctccgggcccgagtgatggctgcgagctcagcaaccccagcgccacagagtcagctgtgccgggcagatgctggaagtgcagccaggattgtatttcggtggggccgcggccgtcgcggagccagatcacctgagggaagcgggcatcacggccgtgctaacagtggactcggaggagcccagcttcaaggcggggcctggggtcgaggatctatggcgcctcttcgtgccagcgctggacaaacccgagacggacctactcagccatctggaccggtgcgtggccttcatcggtcaggcccgcgctgagggccgtgcggtgttggtgcactgtcatgcaggagtcagtcgaagtgtggccataataactgcttttctcatgaagactgaccaacttccctgtgaaaaagcctatgaaaagctccagattctcaaaccagaggctaagatgaatgaggggtttgagtggcaactgaaattataccaggcaatgggatacgaagtggatacctctagtgcaatttataagcaatatcgtttacaaaaggttacagagaagtatccagaattgcagaatttacctcaagaactctttgctggtgacccaactaccgtttcacaaggattgaaagatgaggttctctacaagtgtagaaagtgcaggcgatcattatttcgaagttctagtattctggatcaccgtgaaggaagtggacctatagcctttgcccacaagagaatgacaccatcttccatgcttaccacagggaggcaagctcaatgtacatcttatttcattgaacctgtacagtggatggaatctgctttgttgggagtgatggatggacagcttctttgcccaaaatgcagtgccaagttgggttccttcaactggtatggtgaacagtgctcttgtggtaggtggataacacctgcttttcaaatacataagaatagagtggatgaaatgaaaatattgcctgttttgggatcacaaacaggaaaaatatgaacatgatattttatagcttgggaagaaacttgcagatgatatgtgctgcctttgcttcttatcattcatggcagattgtttgtgctttcaacatttcatttgaaatgggagaagataaaatcacttgatgtaacctggaaactatgctttacatggcaatcaaagccttttgatcatgtacattttatttgatattaaaatcttttataaccagaaa

SEQ ID NO: 4645 - DNA, 871 bp, Homo Sapiens
  misc_feature (661)..(804): n is a, c, g, or t
  misc_feature (812)..(826): n is a, c, g, or t
ggagcatgagaaactgcagcaactgcttcagcgaatggagcagcaagaaatggcacagcaggaacgaaagcaacagcaggagctgcacctggccctgaagcaagaacgtcgggctcaggcccagcagggccatcggccatacttcctgaaaaaatctgagcagcgccagttggcactagctgagaagttcaaggagctgaaacgcagcaagaaattggagaacttcttgagtcgaaagaggcgacgaaatgcaggcaaggacaggagacatctccctttgagcaaagagtaataaggaactatcctctgctctgccactgccccagggagacatggatctgtgaggacagatttggccacggctggtttccgttcaagggcaaggatcacagctgcccttgaatctcattgcctcagagaagactagagggctcttggactatccctagggctacacaagaatagttcagccttctgccatgccacacagcctcagcttgaatctggttcattgcgtcctcgtgttcttctctcatccttgccttaaaccagggattctgataccgaagaagaggggccaatgaaaaccatggagtctgttcgtgactcccagggctgggacattatgtaggagccacttcataaacattctctttactcnnnnnnnnnnnnnnnnnnnnnnnnnnnnnnnnnnnnnnnnnnnnnnnnnnnnnnnnnnnnnnnnnnnnnnnnnnnnnnnnnnnnnnnnnnnnnnnnnnnnnnnnnnnnnnnnnnnnnnnnnnnnnnnnnnnnnnnnnnnnnnnnttttgcgnnnnnnnnnnnnnnnaaaaaatttttaaaaacttttttttgggcccgggcccccaaagga

SEQ ID NO: 4646 - DNA, 567 bp, Homo Sapiens
ggtggggaagagagcaaacttactcccctagtgtacaaccccacagcacagcagagctagcattaacaaatcacaagttggcaaaagcagtaaattctcatcttctgggaaatgttggcattaacaatcaaaaaaagattccatcaacagttgaattctgcagcaccccagctgagaaaatggctgaaacggttctaagaattttagatccagttacctgcaaagagagttcacctgataatccattttttgagtcttcaccaaccaccttacttgctacaaagaaaaatattggacgatttcatccctatactagatatgaaaatataactttcaattgctgcaatcactgccggggagaactgattgccctttaacagtcaatatgttggaggcatgctaaggtacttccttattacccaagagtcattattatttgggagctggggttcttacaatgctagaaataatatcacttcctatttacataatgtatacacccaaagatattttatgtactagactccagattaccctttcttaataaatatctcagggtaaggaaag

SEQ ID NO: 4647 - DNA, 1304 bp, Homo Sapiens
  misc_feature (476)..(478): n is a, c, g, or t
  misc_feature (481)..(482): n is a, c, g, or t
  misc_feature (484)..(484): n is a, c, g, or t
  misc_feature (491)..(598): n is a, c, g, or t
  misc_feature (600)..(600): n is a, c, g, or t
  misc_feature (616)..(616): n is a, c, g, or t
  misc_feature (663)..(665): n is a, c, g, or t
  misc_feature (680)..(694): n is a, c, g, or t
  misc_feature (733)..(742): n is a, c, g, or t
  misc_feature (745)..(753): n is a, c, g, or t
  misc_feature (846)..(846): n is a, c, g, or t
  misc_feature (995)..(995): n is a, c, g, or t
  misc_feature (1044)..(1044): n is a, c, g, or t
  misc_feature (1047)..(1047): n is a, c, g, or t
  misc_feature (1182)..(1182): n is a, c, g, or t
  misc_feature (1276)..(1276): n is a, c, g, or t
accttagtttcaagagtctaaaccccagattcttcagcttgatcctggaggtcttttctagtctgagcttctttagctaggctaaaacaccttggcttgttattgcctctactttgattctgataatgctcacttggtcctacctattatccttctacttgtccagttcaaataagaaataaggacaagcctaacttcatagaaacctctctatttttaatcagttgtttaataatttacaggttcttaggctccatcctgtttgtatgaaattataatctgtggattggcctttaagcctgcattcttaacaaactcttcagttaattcttagatacactaaaaatctgagaaactctacatgtaactatttcttcagagtttgtcatatactgcttgtcatctgcatgtctactcagcatttgattaacatttgtgtaatatgaaataaaattacacagtaagtcatttaaccnnnaannanaaacacnnnnnnnnnnnnnnnnnnnnnnnnnnnnnnnnnnnnnnnnnnnnnnnnnnnnnnnnnnnnnnnnnnnnnnnnnnnnnnnnnnnnnnnnnnnnnnnnnnnnnnnnnnnncnaaccccggaacagccncctctacggccaggccgcccacccacgcaggaacaagaagaaggagnnncttggggggggccgnnnnnnnnnnnnnnngacaaaaattttttataaaaccacccctccctgggtgcnnnnnnnnnncgnnnnnnnnngttggcacgatagaacaaccacgacggttgcctcgctctgtcctctccctccctcacagaagaaacaaccacccccgcgcgggagacacaaancaccgtggggcgcgggtgtgcgatacctcccaccacacccagatagaacaaaaaacacacacccgcccgcggcggcgcgaatcacaaccacgcatggaggtctcctctatagtacaacacacaccacgatagagaaggggcgcggcgtncgttgcggaggggaagccgcacaccggacggagggcgcctcaacactcnacnagaggaggaagcgcgtccgcactcgacgcgaccgcgtctcgctccccacataatacatatgatcgtctcctcgcgccgccgctggcactgggtctcataattagtggaggagaacaacgacgcgtgtaggagtgnttatatatataaataagacactctcacacgcctccgagccaagcgtgtggaaacatacactcatccacgcagaggcggcgggagacatgataantcgttgctaccgctgctccacccctcta

SEQ ID NO: 4648 - DNA, 1235 bp, Homo Sapiens
  misc_feature (538)..(541): n is a, c, g, or t
  misc_feature (574)..(575): n is a, c, g, or t
  misc_feature (817)..(817): n is a, c, g, or t
  misc_feature (852)..(891): n is a, c, g, or t
  misc_feature (976)..(976): n is a, c, g, or t
  misc_feature (1080)..(1088): n is a, c, g, or t
  misc_feature (1146)..(1178): n is a, c, g, or t
gggagtcccaagatggcggccaccatgaagaaggcggctgcagaagatgtcaatgttactttcgaagatcaacaaaagataaacaaatttgcacggaatacaagtagaatcacagagctgaaggaagaaatagaagtaaaaaagaaacaactccaaaacctagaagatgcttgtgatgacatcatgcttgcagatgatgattgcttaatgataccttatcaaattggtgatgtcttcattagccattctcaagaagaaacgcaagaaatgttagaagaagcaaagaaaaatttgcaagaagaaattgacgccttagaatccagagtggaatcaattcagcgagtgttagcagatttgaaagttcagttgtatgcaaaattcgggagcaacataaaccttgaagctgatgaaagttaaacattttataatactttttttatttgtttaataaacttgaatattgtttaaaatgataattttccttcttcaaatgacatggaaagcaaaactttcttttttaaaaattttcatttatttnnnnaacggaaacctgcccagcttcacatgtctgctnncacccattgttatattactaaaagtaagacaggattcacctatggaggctgcagaacgaggaccagaaagtctaggggcttcaagaaatgttattaaaagcaggcgagcaacccccaggggggaaaggagacccgggggcccaacttgttttttctcagggaagacctccgggggccccccgcgttgggggcgcgggttatcccctctcacaaaaaaaagaacaccccgcgcggcgccgganagccgggcggggcttccgccgcgcaaaaatgccgnnnnnnnnnnnnnnnnnnnnnnnnnnnnnnnnnnnnnnnnataaaaaacacaaggcggggcccccacggccgaatgctatatataatcagtgtcccgcccccccgccccgggtgccctccttgtntaggaaagaagggggtggtaagtttatctataaaccgctcttcgtggacggggagagggaggagccggcgcgcaaaaaggggcgcggggagaaaagacgcccgnnnnnnnnngcgggggagttgcaggaccttgggtcgccgccccccgccgccaaatttctgtggccgnnnnnnnnnnnnnnnnnnnnnnnnnnnnnnnnntgtgtccgcttcgtgtggcgcgcccatgatatataaaagctgggtggaccacccccc

SEQ ID NO: 4649 - DNA, 559 bp, Homo Sapiens
ggggagatgatgatgatgacgatgacattgactggctgggatgaagacccaggaaactggtgcaaaggtttctctgcaacccttccctaagcatgattttgcacagccaaccctgggtctaggcgagccacagggtgaggtcaaggtgagcattctgagccccacccccgccagacctggtgaagaggatcataaccctgtcttcaagaacactgggatttcagcagcaagttggaagaaggactggtaggttcccctccaagccagtcacctgtaagagtcctgtcctctgccagactttttaatctcttcattaactctcagactgacctgggagccctctacctgaatccagtgctcaactgtgccccggcaacaagacctgggctgaggtctccctggtagaactaagggagattacaccatctaaatcccagtgcagtcaacagcctggcctatagtcctgggacatgtatcttcttctttgccttaaatctgatacaagaggtcaatgactttgaaaataaaactaaaataaatgtctataatgaaacttgat

SEQ ID NO: 4650 - DNA, 1256 bp, Homo Sapiens
gggggcggcggcagcggcagcggcgctgagttttgtctcccgggccgtctgggcgcgcgcgggtgtcccaggtaccccgccgcctccctccttcccggaggactcgtccctcctgggcctgggccccaacggtgcccgcctgcccggcggtcggtcagcgcacagggcacggcttcctctgcttctcccggaccacttagtctcaacccggaatgaaatatgactgaggactctcagagaaactttcgttcagtatattatgagaaagtggggtttcgtggagttgaagaaaagaaatcattagaaattctcctaaaagatgaccgtctggatactgagaaactttgtacttttagtcagaggttccctctcccgtccatgtaccgtgcattggtatggaaggtgcttctaggaatcttgcctccacaccacgagtcccatgccaaggtgatgatgtatcgtaaggagcagtacttggatgtccttcatgccctgaaagtcgttcgctttgttagtgatgccacacctcaggctgaagtctatctccgcatgtatcagctggagtctgggaagttacctcgaagtccctcttttccactggagccagatgatgaagtgtttcttgccatagctaaagccatggaggaaatggtggaagatagtgtcgactgttactggatcacccgacgctttgtgaaccaattaaataccaagtaccgggattccttgccccagttgccaaaagcgtttgaacaatacttgaatctggaagatggcagactgctgactcatctgaggatgtgttccgcggcgcccaaacttccttatgatctctggttcaagaggtgctttgcgggatgtttgcctgaatccagtttacagagggtttgggataaagttgtgagtggatcctgtaagatcctagtttttgtagctgtcgaaattttattaacctttaaaataaaagttatggcactgaacagtgcagagaagataacaaagtttctggaaaatattccccaggacagctcagacgcgatcgtgagcaaggccattgacttgtggcacaaacactgtgggaccccggtccattcaagctgaacgcacccgctggttgtggaccgtctgccaggcaccacagtgagcattgtgttcttggcatgtgatctgggaaactgattgaataatacacttttcttgctttggtgctcaaagtggtttttttcccccaataaaattatttaattgaaaaaaaa

SEQ ID NO: 4651 - DNA, 906 bp, Homo Sapiens
  misc_feature (781)..(794): n is a, c, g, or t
tgcagtgttgcctcgcccaaagaagactacaatctccaaggaaacctggggcgtctcgcgcaaacgtccataactgaaagtagctaaggcaccccagccggaggaagtgagctctcctggggcgtggttgttcgtgatccttgcatctgttacttagggtcaaggcttgggtcttgccccgcagacccttgggacgacccggccccagcgcagctatgaacctggagcgagtgtccaatgaggagaaattgaacctgtgccggaagtactacctgggggggtttgctttcctgccttttctctggttggtcaacatcttctggttcttccgagaggccttccttgtcccagcctacacagaacagagccaaatcaaaggctatgtctggcgctcagctgtgggcttcctcttctgggtgatagtgctcacctcctggatcaccatcttccagatctaccggccccgctggggtgcccttggggactacctctccttcaccatacccctgggcaccccctgacaacttctgcacatactggggccctgcttattctcccaggacaggctccttaaagcagaggagcctggcctggggacccccttccccaacccctaaaaaccttggtttcatggtcccacggttccctagctgacatccccccaataaagggaccctaacttttcctgggaaatcggccgcggcaacatccggcaaggagcgtctgccaaggcgaacccagcatgaccgcagctacaaggtaaaccttgtgccggcgccgnnnnnnnnnnnnnnaaactctcctgccacaatctccggtgtggggcgcggccccaccatcgtgtatatgcaaccgcgcccccacacatcgtgttctctatgagacagcctccgcccccaatctcta

SEQ ID NO: 4652 - DNA, 853 bp, Homo Sapiens
  misc_feature (102)..(102): n is a, c, g, or t
tcgtgtgtctgcctcgatatacatgcgagcgagtatttaatgcggtagagatggcgtgcaattcggggggagggacgcgccgggctacatggggggtggggnctccagatcaagaacagaatgctgttagttagtggttttccacctttattttggcttcacaacttcgccagccaaggaaatgttcttggcattgcaacccagttctcacatttagatgtatgggtgaaaaggtttcacaaaacagtacttgcctttactacatgatgcattctggcctactttattctgcttcattgctgtgtaatgctggtgaccacttgctaattgatttcccattttactaaatgggctgggacccacggtctgaaaaccctgccttaggctgcaagcatttctgtgatctctgcgagctactccatataggtaaacacacgcgaggctaaactaggaaacagcttctgcttttgcagattagaagtgaagttgacatcacgccaagtacgaaaaggctaaacagctgacaaaatttccacttgagcaaccctggggagcgcaaacaggaggaatcggggcaagggtgacttgaagaaagcactggcagatcacgcactttaaggcaactctacactgcacaatgtcaaataacctagcatggggcggcactaaatggctgcaggaaagccgagtcttcttccacatccggcggctcccctcggatgcgagcgctggcccagggtgtgtttacagaggtgagggcttcccgtggacccttctcgttgggagcgcttagcctcaggagcggattcagggcacaggcagaggacgtccacaaacaccacaggaagccgcc

SEQ ID NO: 4653 - DNA, 832 bp, Homo Sapiens
gggggggcgtgctgggatctttctctctgactatacttagtttgaaatggtgcaggcttagtcttaagcctccaaaggcctggatttgagcagctttagaaatgcaggttctagggcttctcccagccttcagaagccaactaactctgcagatggggctaggactgtgggcttttagcagcccacaggtgatcctaacatatcaggccatggactcaggacctgcccggtgatgctgttgatttctcaaaggtcttccaaaactcaacagagccagaagtagccgcccgctcagcggctcaggtgccagctctgttctgattcaccaggggtccgtcagtagtcattgccacccgcggggcacctccctggccacacgcctgttcccagcaagtgctgaaactcactagaccgtctgcctgtttcgaaatggggaaagccgtgcgtgcgcgttatttatttaagtgcgcctgtgtgcgcgggtgtgggagcacactttgcaaagccacagcgtttctggttttgggtgtacagtcttgtgtgcctggcgagaagaatattttctatttttttaagccatttcatgtttctgcctgggggaaggcaagttaacccaaatatccctgaatggggggttggagcacaccccccccttgtgcaaacctttgcaattggcgcagctctagggcctcacccgactacactccatacccaacaaaagaagaccctttcccggctccgcctccgacgcctcacaagaaaccgttttcctaaaacattttgtccttttggtgagagagggggggcttcgacacacgggtaacgagcggcc

SEQ ID NO: 4654 - DNA, 458 bp, Homo Sapiens
  misc_feature (345)..(356): n is a, c, g, or t
atcacctttgaatttggaaattttgagcacccaagctcttctgtacctatttaaagtccaccaaggggactgcagctcctagaacacgagaatcaagcctcttaattttaaactgcggaatgtggcctctgcttcctccgtcctcctgcccaaggacgacgaggattgctccagggctgctgggtagtttaccgtcccttctataggcatggagttggcactgacatcacagcttcataaccccaccaccgccagcttcccctgcctcctacatccagtctgttcttgttcatagtgagaatcctgtgttcccacttcagtgacacctgaattgtttgttgttgnnnnnnnnnnnnattgtcttcaaagaggaagggccccattaaagggtgaacttgtaataaattggaatttcaaataaacctcatgtacttgtgtttataaagaagggaaaaaaa

SEQ ID NO: 4655 - DNA, 406 bp, Homo Sapiens
ttgccaggaccccttctccttgacggagaagcctccagctgagttctgtctgtccccagatggcagctcagaggccatttccattgacctgcttcagatttaagggctggtataagctgtttacatcgctgtggacctcattgtggctcattttggcacaagccgggatcccggggtgaaggcaaagctgggaatacagttctgtgagccccaatgtgggccacctggttctgaagtacttgtgccctgccgtccgcgccgtgctggaggatgggctcaaggcctctgtactggacgtctatcatcgggcagcgtaagatacatgccatggagtgtggttgaggctgccacacagctaggcccatccaccaagtcctgcatgcctctacaacaaagtaaccagccc

SEQ ID NO: 4656 - DNA, 212 bp, Homo Sapiens
  misc_feature (71)..(71): n is a, c, g, or t
gaaaaagtagtgcaaatatttagggtaggagggtgagaaagcaaagaagtcgcacaaatattgtggttttntagttgaacaactattctttggacatcttttagtccagtagacggtgttaaacttgaagacaaataacgatttgacctgtgatatttgtttttccctcttatcttctaagcccatgcatccagatcattcatcacctttaa

SEQ ID NO: 4657 - DNA, 738 bp, Homo Sapiens
  misc_feature (432)..(537): n is a, c, g, or t
attcagtgtgagctatattatcttgagaatgtatatttaagcttaatttaagactatataccttaaaattgggcctattaattttaataatttgttatgtaagttctgtaagtcataagtatgtggtttccaagtgtataatttatctgaatgtaataggcattaatatattttacattactgggaccatagtacagaaatttctaaatggtttgtaaaataacttgttatttgtgtcgttgtaaaagcagttaatacaatggaaaaactcgtaataagaagatacagtttaacatcaaaaagttaacccaaggtaattatgagtactacctggcaaaacttcacggaagctgtggtatcacttttatgatggaagaaaggggtgtgcatattgtgtaaaaggtacttgcggctgggcgtggtggctcatgnnnnnnnnnnnnnnnnnnnnnnnnnnnnnnnnnnnnnnnnnnnnnnnnnnnnnnnnnnnnnnnnnnnnnnnnnnnnnnnnnnnnnnnnnnnnnnnnnnnnnnnnnnttatccaagcttagtggtgtgagcctgtagtcccagctacttgggagactcacgctggaggatctctcgagcccaggaggcagaagatgaataaataaatggaagcaactgaatggggatgaggtctctcttgaaggagagagcaaaagagatttaaatagtaacaattataataaggctgggcgctgtggtcacgtcttt

SEQ ID NO: 4658 - DNA, 569 bp, Homo Sapiens
cagcatgaccttcaagacgtggatgtggccttcacggaggaggaatagaggctagctggtccctgcccagaggaagctgtaccgagatgtgatagtggagaacttaaggaacctgctgtcagtggggcatccacccttcaaacaagatgtatcacctatagaaagaaatgagcagctttggataatgacgacagcaacccgaagacagggaaatttaggtaaaaaccaaacagttatgagttcttatagttaactgtccatctgctttgcttcttcttagccttgttgccatcacctggtccaaattgccaactgtctttcctggattattgcaacaccctttgtactgcttgccctgctcccacccctctcctcttacattctgttctttaagtggcaaagtgagtttttgttaccttgtgtcagactatgttgttcttctgctcaaaattctctgtgacttattttacatagagtaaaatccacttaatgtggctgacagagtcttacacggtgtgcttttcacgccccactggtgtgtctcagcagagggtcttctatagtgtact

SEQ ID NO: 4659 - DNA, 357 bp, Homo Sapiens
cgcggtcgaatgccactttgaacaatatgcgtgtgtatgggaccattttcctgaccttcatgaccctggtggtgtttgtgggggtcaagtatgtgaacaaatttgcctcgctcttcctggcctgtgtgatcatctccatcctctccatctatgctgggggcataaagtctatatttgaccctcccgtgtttccggtatgcatgctgggcaacaggaccctgtcccgggaccagtttgacatctgtgccaagacagctgtagtggacaatgagacagtggccacccagctatggagtttcttctgccacagccccaaccttacgaccgcgatgaattcgaccgcaatgaggccccagg

SEQ ID NO: 4660 - DNA, 263 bp, Homo Sapiens
gaatctcgcggtcgatatacttaatgccactgcgcttgaaacggcaatattttttcttcttggtgtccaccgatagtggagtaagataacggatctctgattgtgattgtgccataaataaaaatcctccttgatttattcgttagtttttttcttcttgggctgtctcggctgcaacttcggcagtagcaggttcttcagcctttgcgctctcttgaacattctttttcatgccacgacgcttgactgcatattcgaccgcg

SEQ ID NO: 4661 - DNA, 354 bp, Homo Sapiens
ccagcttcacgaagtcgggttgcagacctcgatccgaactgagagaggcttttgggattagcatacggtcacccgctagctgccttctgtaccccccattgtaacacgtgtgtagccccggacgtaagggccgtgctgattggacgtcatccccaccttcctcacatcttacgacggcagtctctctagagtcctcagcatgacctgttagtaactaaagataagggttgcgctcgttatggcacttaagcctacacctcacggcacgagctgacgacaaccatgcagcaccttcacaccggtggttgctcactgacatgttgccacatcattcgaccacagatgaggccccag

SEQ ID NO: 4662 - DNA, 909 bp, Homo Sapiens
ttacaggatccccgctcagcattccagcagcggtaggttgatgccagaggagaggggcgccatggctttgaggctgttgggattgcggatcatcttgtctagcgtgttgacaatttggccgaacttgggccggtggttgcggtccttctgccaacagtccagcatgagttggtgcagggcgctcgggcagtccatgggcggtggcagccgatagtcctgctcaatggcattgattacatcctggttggtcatgtcccagtagggccgctccccataggacatcacctcccacatgacaatgccgtagctccacacatcactggccgaggtgaacttccggtactggatggcttccggggctgtccagcggatggggatctttccgcccagggcactggtgtaggtggggtctgaggtatcgtcctctagaaagcgtgagagcccaaagtccgacaccttgcagaccaggttgctgttgacgaggatgttgcgggcagccaggtcacggtgaacatagttcatgtctgccaggtacttcatgccagctgcgatgccccgaagcatgcccaccagctggatgactgtgaactgcccatcgttttgccggagaaaggagtccagggagccattctccatgaactcggtgatgatcatcacaggtgtgctcttggtcacgacaccctccaggtggatgacgttgggatggtcgaactggcccatgatggaggcttcgctcaggaagtcccggcgctgcttctccgtgtagcccgacttgagcgtcttgatggccacaaagatctctctcttgcctggcagcttcaggtggccactgcagaacctcgccaaactcccctgctccgatcacctgctcaattttgacacaggagatgtcaatttccttggcaaact

SEQ ID NO: 4663 - DNA, 373 bp, Homo Sapiens
cttccccagacccacgaggatactcacactgcacgcctgaggctctcctaagctccttctttcattctgccattcctccctcccttccttttttaaatgatttttattacggtgtggtcacttatttagatggacattgcttttcaaataacttaaaataacacgttatgtgccatgtggctactttagtaatattgccaagaagagcacagtttttacactagtggcatctcagtgaaattaaccaaagatgaagctttggctttgctggtgagatcagagccctcctgagcaggcagcgccactccagggttcagacagggctgcacaggcggcagagatacagggtctgagggctgagacgccatggggc

SEQ ID NO: 4664 - DNA, 442 bp, Homo Sapiens
ctgtgaggcaatggaggtaggccatagggaaaacctggccccattaggtgattctgttgcaagttagcaaaagtccatgctccatcaggtgccaggtatttcaagggaggaggggcaaggtgttcagatggcaacgagaaaggtgagttgaatatctggggtgggaagcgctgtggaaatgctgggttgctggctacttcaatgtctctgctgttatcattaaagttagaaaagtggctactgtggtctgtactggatgggggagatgggactgctggtgggcttctactctgtacttgtctatattgcaaaagtcttgattgaggtggtggcatttcagctagttcccgtgtttcactttgatcacgatgagacagttctctgattaagtcttgaaaccttgagtatgtggtctccacttcatcttcggcactgccttcaa

SEQ ID NO: 4665 - DNA, 929 bp, Homo Sapiens
  misc_feature (138)..(138): n is a, c, g, or t
  misc_feature (211)..(211): n is a, c, g, or t
caaagcccctggtcagccagagctctggaatgcactgcttgctgcttgccgagctggagatgttggagtgctaaagctgcagctagctcccagccctgcagaccctagagttctgtctctgctcagtgcccccttggntccggtggctttactctcctgcatgcagcagctgcagctggaagaggctcagtggttcgtctgctgctggaanaggttgctgaccccacttgtgcaggactctcgggcccggccaccttatactgttgcggctgacaaatcaacacgtaatgagttccgaaggttcatggagaagaatccagatgcctacgattacaacaaggctcaggtgccaggaccattgacaccagaaatggaggcacggcaggctacacggaaaagggagcagaaggcagcccggcggcaacgggaggaacagcagcagaggcagcaggagcaggaggagcgtgaacgagaagagctagcggcgatttgccgccctcagtgaccgagagaagagagctctggctgcagagcgccgactcgctgcccagttgggagcccctacctctccaatccctgactctgcaatcgtcaatactcgacgctgctggagttgtggggcatccctccaaggcctgactccctttcactacctcgacttctctttctgctccacacgttgcctccaggatcatcgccgtcaggcagggaggccctcttcctgatctcttacagctctacctggggccaactcagggacctgagagggcacattcacagcagccctaggttttttcttccccgtgaaaccagagatgatttggaagatgggggtgaaggacactcgggaactagggcaaagacagggctagaggtatgtggagctggtactgtctctggaattttaatcacaataaagtttggcaagg

SEQ ID NO: 4666 - DNA, 454 bp, Homo Sapiens
tgcatctgggggagggtgcgttaactctgccaagtccctggaggggccatgagtggccccagggggctgccaggtgcacagtgtcctctggctatgctgacgcctctgattctttgtctgagcagtgaggtgactgagttggcctaaggcctcttaaaggttgaactcaatgaattaaggctggagacatttctgaatggcctggggtgtcaacaggtatgaaccagtgtgcccatcatggccagtggaccccactcccccatctctgggtgtcaagcaccgatgggcggtgctgagagattccgcatgtaacagggctatggtataatggtttcccgcgactgccgcaacaaaccactacaaactgggtggttacaacagaaattcatccacttgcggttctggaggctggaagtctgaaatcaaggtcttgggtgatgctcaaagatcttgg

SEQ ID NO: 4667 - DNA, 544 bp, Homo Sapiens
  misc_feature (531)..(531): n is a, c, g, or t
aaccaacatgaagcacatggttgagttatttagtgaaaatgtggaactaagctgccagtgcctcagtcttcttgtataatgcctttccatggattggcatcctgccttttggaaaacatcaacagctgtttagaaatgcagctgtagtctatgattttctctccagactcattgaaaaagcttcagtcaacagaaagcctcagctacctcagcattttgttgatgcttatttagatgagatggatcaaggtaaaaatgacccatcatctactttctccaaagaaaacctaattttctcagtgggtgaactcatcattgctggaactgaaactacaaccaatgtgctacggtgggcgattcttttcatgggccctttatcctaatattcaaggacaagttcagaaagagattgatttaattatgggccctaatgggaagccttcttgggacgacaaatgcaaaatgccttatactgaggcagttttgcatgaagttttaagattccggtaatatagttccattagggatttnccatgcaacctct

SEQ ID NO: 4668 - DNA, 446 bp, Homo Sapiens
acgcttctgatgagggacgcctgcttctgggtgtgcggctgtggcggcgctgccgccctcctgcctcctgctgagtctgtttctccaatcttcctccccgcttttcttcaacagtgccatctttctttatagacatggtttgctgggtgagtcaagaaggccctcccctgtcggcgtttgatctctccagcagcaaacatcgcacatggattcttgcagagcttctcctgcggctgttccgaagaatcctggggcttccaggacacgggggctgtggtttaagcaatagttttcccagcagctgtccccgtctgctcggaagtgggctccccgaactctgccgctcttagtgaaaacttccttttcataacattctccacctccaccttctcttcaaagggcagcctgtcctcaagtcccaagtttccatgtgcttcatgttggtt

SEQ ID NO: 4669 - DNA, 1218 bp, Homo Sapiens
  misc_feature (934)..(934): n is a, c, g, or t
  misc_feature (968)..(968): n is a, c, g, or t
  misc_feature (994)..(994): n is a, c, g, or t
  misc_feature (1056)..(1057): n is a, c, g, or t
  misc_feature (1076)..(1076): n is a, c, g, or t
  misc_feature (1095)..(1095): n is a, c, g, or t
gttcgggctccgtctcaggagctgaagttgtgaggtgtagtattgagtcctgtttgagctattgtctctttttcctgaaaaatggcactgtcaaagagggagctggatgagctgaaaccatggatagagaagacagtgaagagggtcctgggtttctcagagcctacggtggtcacagcagcattgaactgtgtggggaagggcatggacaagaagaaggcagccgatcatctgaaaccttttcttgatgattctactctccgatttgtggacaaactgtttgaggctgtggaggaaggccgaagctctaggcattccaagtctagcagtgacaggagcagaaaacgagagctaaaggaggtgttggtgatgactctgagatctctaaagaatcatcaggagtaaagaagcgacgaataccccgttttgaggaggtggaagaagagccagaggtgatccctgggcctccatcagagagccctggcatgctgactaagctccagatcaaacagatgatggaggcagcaacacgacaaatcgaggagaggaaaaaacagctgagcttcattagcccccctacacctcagcaaagactccttcttcctcccaaccagaacgacctcctattggcaacactattcagccctcccaggctgccactttcattgaatgatgccattgagaaggcaaggaaagcagctgaactgcaagctcgaaatccaagccacagctggcactgaagccaggactcatcggcaaatgccaacatggtgggcctggctaatctccatgccatgggcattgctcccccgaaggtggagttaaaagaccaaacgaaacctacacctctgatcctggatgaacaagggcgcactgttagatgcaacaaggcaaggagattgagctggacaacacccgcatgccttactctganaagccaaatattcgctgctgttgaagaaaggganacaaattcaaagcaaacaacttaaanggaaaagccactcacgaagactatggaatccaaatacctttgtttgacccccgagtctccannttgccccttcccagcgccntagagacgcacattttaanattccatggacaagggcaaatttgagaagattgctcagcgattacggacaaaggctcaactggagaagctacaggcagagatttcacaagcagctcgaaaaacagcatcctttgtgcagacac

SEQ ID NO: 4670 - DNA, 408 bp, Homo Sapiens
attagccctgagatcgaggagaccaagttgcctggccgagctgtttgagaaggctcccgcgcacctgcaaggcctgattcaggtggccaagcagggaccagctctggtacctgtatgccaggtacaaacaggtcaaagttggaaattgtaatactcctaaaccaagcttctttgattttgaaggaaagcaaaaatgggaagcttggaaagcacttggtgattcaagccccagccaagcaatgcaggaatatatcgcagtagttaaaaaactagatccaggttggaatcctcagataccagagaagaaaggaaaagaagcaaatacaggttttggtgggccagttattagttctctatatcatgaagaaaccatcagggaagaagacaaaaatatatttgattactgca

SEQ ID NO: 4671 - DNA, 430 bp, Homo Sapiens
tggcattaacagtgctggagacatgtgtgaagaactgtggccaccgcttccacatccttgtggccaaccgagattcatcgacggtgttctggtcaaaattatatctcccaagaacaaccctcccaccattgtacaggacaaagtgcttgctctgatccaggcatgggctgatgcctttcgaagcagtcctgatctcaccggcgttgtgcacatatatgaggagctgaagaggaaaggggttgaatttcccatggcagacttggacgctctgtctcccatacacacaccacagcggagtgtccctgaagtggatccagctgcgaccatgcacaggtcccaatcacagcagaggacaagtgctggttcctattcctcgccgcctcctctctactatcccgcgccgcagacaccgtcgaaataaccctggtag

SEQ ID NO: 4672 - DNA, 233 bp, Homo Sapiens
tcaagttcgcctactgcggcaagtggttcgtgagcactgggaaagataaccttctcaacgcctggaggacgccttatggagccagcatattccagtctaaagaatcctcgtctgtcttgagttgtgacatttcagcggatgacaaatacattgtaacaggctctggtgacaagaaggccacagtttatgaggtcatctactaaacaagaactccagcagggctgtcaaactca

SEQ ID NO: 4673 - DNA, 690 bp, Homo Sapiens
  misc_feature (660)..(660): n is a, c, g, or t
aaatcaattcttgtgatgacttcaaatcctggttcttcttgttgatttatctttagacctggaatagcatcactaagaaaatcggccatttctgaagtggtccgttgatgtatagagggatcgctgcctctcaaactgtcaaatattgtagtttgtgactttggaaaatcctatcagagttgccgtataagggtcctttttaattttttgtattaaaccatatgctggctcatcaagaagattttcaaaagactgtgaaagactcttattctgacaattcacaagaagttgttcttttatcctgtggagattcacacaataccacatatttttcaagagattcaatcagtagtttgctatctccttgatgaaagtgtagagcagggagaacgacgtcatcctttagacagaataccaaataggaccagcccataccctctttgttttgcttgattgatttcaggtctgtcaaactgaacaggaatgaccatttgcttttcccatttctatgacttggagcatctccattggtatgtggtttccttttaaatgaaactgtattaaccatgtcccattctgcttcgtaactgttcagatgttctgatcctcgatgacctctttcttttggggcctgagtccattctacaactgaactggagncctttctagcatagagaatactactcgtgc

SEQ ID NO: 4674 - DNA, 184 bp, Homo Sapiens
ccatcacagcagtaacaacatcaccaacagcagcagcaccagcagcaacaacaacaacaacaacatgtgacaagctggccagggaagcaagtagaaacactgagactgtgggaagaagctgttaaagcaaggaagaaagaagctgctaacctgtgccaaacctccacggctgctactggtgtga

SEQ ID NO: 4675 - DNA, 422 bp, Homo Sapiens
gcacgagaatttgtggccaaagaaaatgaagtacagagtctgcatagtaagcttacagataccttggtatcaaaacaacagttggagcaaagactaatgcagttaatggaatcagagcagaaaagggtgaacaaggaagagtctctacaaatgcaggttcaggatattttggagcagaatgaggctttgaaagctcaaattcagcagttccattcccagatagcagcccagacctccgcttcagttctagcagaagaattacataaagtgattgcagaaaaggataagcagataaaacagactgaagattctttagcaagtgaacgtgatcgtttaacaagtaaagaaggaggaacttaaggatatacagaatatgaatttcttattaaagctgaagtgcagaaattacaggcctgcaaatg

SEQ ID NO: 4676 - DNA, 537 bp, Homo Sapiens
tatcaccatcacaggcagtagcaggcaatgtcattgaggacggagcctaggagaggtgcctcccctataggggaacagtgtgtgggagaaaacactgcaaacgtacagctggagttttgtacctgaactttggctcccagaaggcaggaaaggaaatgaatgaagcaagctgagtatggcggggagggcccctgtgggtacacctacggagccaccttgagctcagtagggggacagtctgagttttccagaaagaacagaaatataaagtgatgattaaatctcgggatttttaattttcgagtgttgacaactaattagaacatttttaaagcaggtcaaagcacaggcaggctaactggccccacgcacaacttgcaaggtggggcgcaccaggctcactgcacagcccatacccacagacccttctagattggactcggggcagaagcagaacgcagactcgcaggttacagtaccagtttcaaggcccctcaggtctcataaggctgggtatactgaaggttcccacgtcag

SEQ ID NO: 4677 - DNA, 132 bp, Homo Sapiens
aactaaccagaggatccccccgccgccccgagcgggaagagactggagatgaggaggatgggagcccatcggaccacccagccttctgggccctccccccatggccaatggaaaacctggcgaccctaagtc

SEQ ID NO: 4678 - DNA, 260 bp, Homo Sapiens
cccaatcacagcagaatgcagcagataagatgatgatgccaaatgataatgagggctgcaaccacgcccaccgcgatgcccacatacagggccacgttcatggagggagatctgacggccaccgtgatgttgcagaactgcgtcccctcctcattgctggaggtacagatgtagtaacccgatgtgtctgtggagatattcttcagggagacaggctgacctgaggctggctgggccaagggcagctactgatgtgatgg

SEQ ID NO: 4679 - DNA, 425 bp, Homo Sapiens
ggtgcgctgcctccgtgcattgaggaaacagctgccaccgttgaagcactgcaggttacaggttccaggccggggagcatctggggggggcgttggagagggcacaggcacgcatgtgccgttgtccagccgcttcccattgggacaggtgcagacaggcccactggggctcagcaggcagagccactcgcatttcatgcggtcacatgggttggtcacttcgggctgcttgtgctgatggtaaaggaccacgtcagaggcgtggctcaggaggcctgtcagagtgacgaacggggctgtggccgaagcttagtggatcttgaagacacagagtaaattgaagtagggtgacgatccatatgatgtaatcagctcaaagactgtagatgatataggggtgagcttaggacctcgttggctgtcag

SEQ ID NO: 4680 - DNA, 1315 bp, Homo Sapiens
tgggtcgtctagaggatcctgaagaggtggtatctccccccggagttggagcgttacccgggtccaaaatgcccaagaagaagccgacgcccatccagctgaacccggcccccgacggctctgcagttaacgggaccagctctgcggagaccaacttggaggccttgcagaaagaagctggaggagctagagcttgatgagcagcagcgaaagcgccttgaggcctttcttacccagaggcagaaggtgggagaactgaaggatgacgactttgagaagatcagtgagctgggggctggcaaatggcggtgtggtgtccaaggtctcccacaaagccttctggcctggtcatggccagaaaagctaattcatctggagatcaaacccgcaatccggaaccagatcataggggagctgcaggatctgcatgagtgcaactctccgtacatcggggggcttctatgtgggcgtactacagcgatggcgaagatcaggtatctgcatggagcacatggatggaggttctctggatcaagtcctgaagaaagctggaagcaattccctgaacacaacttcttcaggaacaacgttcagcacttgcctgtacactacacacagtgccctggacagtactcatgacggcgcagaagccacaaggatcagtgcaccagcagatgtcaagccctccaaccatcctagtcaactcccgtggggagatcaagctctgtgacttaggggtcagcgggcagctcatcgactccatggccaactccttcgtgggcacaaggtcctacatgtcgccagaaagactccaggagactcattactctgtgcagtcagacatctggagcatgggactgtctctggtagagatggcggttgggaggtatcccatccctcctccagatgccaaggagctggagctgatgtttgggtgccaggtggaaggagatgcggctgagaccccacccaggccaaggacccccgggaggccccttagctcatacggaatggacagccgacctcccatggcaatttttgagtagttggattacatagtcaacgagcctcctccaaaactgcccagtggagtgctcagtctggaatttcaagattttgtgaataaatgcttaataaaaaaccccgcagagagagcagatttgaagcaactcatggttcatgcttttaccaagagatctgatgctgaggaagtggcttctgcaggttggctctgctccaccatcgcgcttaacagcccagacaaccaacccatgctgctggcgtctacgtgtctgggaagccaccaagacgagtc

SEQ ID NO: 4681 - DNA, 827 bp, Homo Sapiens
aagcaggctggtaccggtcggtattccgggatatcgtcgaccacgcgtccgagaggaagagggagatcttcttcttttcttaactggtcaagaggaaattgatgaagcctgtaagagaataaagcgtgaagttgatgatttgggccctgaagttggtgacattaaaatcattccatgtattctacacttccacctcagcagcagcaacgcatttttgagcctccacctcccaaaaaacagaatggagcaattggaagaacggtagttgtgtcaactaacatagcagagacgtctttgacaatagatggtgtggtgttgtgattgatcctggatttgcgaaacagaaggtctacaatcctcgaatcagagttgagtcccttttggtgacagctattagtaaagcttcagctcagcaaagggctggtcgagctggacgtaccagacctggaaaatgcttcagactttacacagagaaagcttataaaacagaaatgcaggataacacctatcctgagatttgcgttctaatttaggatcagttgtgttacaattgaagaaacttggtattgatgacttggtacatttgatttctatggatccaccaggctcctggaaactctgatgagagccctggaaactttgaattacctggctgctttaaatgatgatggagatctgactgaatggggatccatgatggccagagtttcctctagatccacagtcgcaaaacgggtatcgcagttgtgactacaactgttctactgaggtcctatctattactgtatgtggtcagcacacaggtcagtcgccaggaggcaagaaac

SEQ ID NO: 4682 - DNA, 489 bp, Homo Sapiens
aagtgcctggcggtgggcatggtgaaggaagttgtccgaacagacagcctgaaggggcggcggggccggctaccttcaaaacccaagcatcccccagatgcctcccctgccaatctcctcacttccctggtccgtgcacacctggactcatggcccagcactgccaaactggactactccaagttccaggagctggtgctgccccactttgggaaggaagatgctggggatgtacagcagttctacgacctgctctccggttctctggaggtcatccgcaagtgggcggagaagatccctggctttgctgagctgtcaccggctgaccaggacctgttgctggagtcggccttcctggagctcttcatcctccgcctggcgtacaggtctaagccaggcgagggccagcccatcttctgctcaggcctggtgctacaccggctggagtgtgcccgtggcttcggggactggattgacagtatcctggcc

SEQ ID NO: 4683 - DNA, 933 bp, Homo Sapiens
ctacagaaccgggcagaggtggacaaggtgaaagcactgttgagccatgacagcggcaggtgaccacctggcctttgtgcgggctgtcgccggctgggaggaggtgctgcgttggcaggaccgcagctcccgggagaattacctggaggaaaacctgctgtacgaacccagcctgcgctttcatccacggactcatcaagcagttctcagagaacatttatgaggccttcctaggtggggaagcccctcggaactgcaccctggcctccgcccagtgcaacgagtacagtgaggaggaggagctggtgaagggcgtgctgattgccggcctctaccccaaactcatccaggtgaaggcagggcaagggtcacccggctagggcaaagttcaagcccaacagcgtcacatataggaccaaatcaggcaacatcctgctgcacaaagtcgaccattaacagggaggccacacggttacggagccgatggctgacgtatttcatggcagtcaagtccaatggcagcgtcttcgtccgggactcctctcaggtgcacccgctagctgtgctgctgctgaccgacggggacgtgcacatccgtgatgacgggcgccgggccaccatctcactgagcgacagtgacctgctgcggctggagggtgactcgcgtaccgtgcggctgctgaaggagctgcggcgggccctgggccgcatggtggagcggagcctgcgcagcgagctggctgcacttccccccagcgtacaggaggagcacgggcagctgcttgcgctactggcagagctgctgcgaggaccctgtggcagctttgatgtgcgcaagacagctgacgactgagccctgcttctgctggggctgtgtacagagtgcaaatgtttatttaaaataaagttctatttatcccttgtgaaaaaaaa

SEQ ID NO: 4684 - DNA, 175 bp, Homo Sapiens
agaggctttccacaacccgctgcctctgctcttggccgtgcaggtcagagggagactgcggctgtggagggcactagaggaacttggcccagaaagagcctcagagtcctagtggtgggggcctggaaggaacagggccccttcgcagggtcggggagcctctggagacggctat

SEQ ID NO: 4685 - DNA, 331 bp, Homo Sapiens
actttcagcagcggctctcacacatatcataccacagaccatcattcaagtcaaggtgaaggctacagtcagcacggcaagaaaccaagatgggactcaaacctctaaatgcaacactctgcatacaggagatcccaaactgaaatgagttccaaaataacggatacctttatcgtataatcatttatgctcaacaaagcctcaggataaattcgaaaacagaacaatgtatagactgtattactgctgcacttggctcctgaatgaagcaggcaggtgaaggctaacgtgctgaggaacggacaccgtgccccgctgctgaaaatgctaa

SEQ ID NO: 4686 - DNA, 401 bp, Homo Sapiens
tctgcaggtaactcatcctctagtcctctgtaagctcctagaaggaagaaattatgtcctttagactaataaaattcctccaaaccaaatacagcacctactgtgaagacacaaagatacttttagaatagtaaaaactttatccattgagaaattccttaatgaaacagtatccaagaagtcatttgccagcagatttcttagaggtgcgataaagaagaggacattgccagtcgtcacagcagctgcaatagctcctctctattgttaaacagtgggatatcttgtgcaggttttcagttgacaatcaatttttaaagattagtttcggtccccaacaatcaattatttattaacccatcaataaaaatttaaatgctctgtgaggtacaatagctatt

SEQ ID NO: 4687 - DNA, 680 bp, Homo Sapiens
  misc_feature (480)..(512): n is a, c, g, or t
agtgctgcacttatggctctgaggagaggatcaagaaaccttgtctttcgagattttacagatgaaaaagagggaccaataactaaacacatccgactaacagctgccttaatattaaaaaatattggtaaatattcagaatgtggtcgcagattgttaaagagacatgaaaataacttatcagtgctagccattagtaacatggaagcttcctccacccttgccaaatgcctttatgaacttaattttacagttcagagtaaggaacaagaaaaagactcagaaatgctgcagtgaaaaataattccacttacacagtgggggactcaaagtcagccacatttcacatactgttactgaagaaagcaccaagtcttaatggaacaaagaccatagaatgaattattttatctcctcccatgatgctgagaggaagcttcgtattctgatctctgagtgaatccctttgttctctgtttnnnnnnnnnnnnnnnnnnnnnnnnnnnnnnnnngaactgctgtgcggacagggttatcagcatactcgacaggatttttaccgactgctcatgtactcaatgatggatgctggcaggttgagtatacaggatcacctatcgttcggatatacatataaaactagtcaaatcgatacgcccagatggaataggcacactagc

SEQ ID NO: 4688 - DNA, 701 bp, Homo Sapiens
ccaggttatcttaactaacttaaaagctaacaaaataaggcacagatattaacacatttaaaataattagtgttcaaaggacattgaggtgctttataaataaagtgttattaacctagattcaaaactgtctagaaatgacataaaaggaatgaagcccttgattattacaacccaccaatttctaagatctaagatgctataaggagaaaagctaacagtcataattctatcataaaatctaactcccgaccttaaaaatgagtgactgatgaacatagtttctagacttgattaaaaagatacaggaaaccaaagaagatacagaattcatcaatgtacttgtaatacaggttacactaaattattcatggctcaatactggcagtgtaaaagtcttaaactaactttaaagctaacaaatcaaaggcacagtattaacacatttaaaataattagtgttcacaggacattgaggtgctttataaataaagtgttattaacctagattcaaaactgtctagaaatgacataaaaggaatgaagcccttgattattacaacccaccaatttctaagactaagatgctataaggagaaaagctaacagtcataattctatcataaaatctaactcccgaccttaaaaatgagtgactgatgaacatagtttctagacttgattaaaaagatacaggaaac

SEQ ID NO: 4689 - DNA, 524 bp, Homo Sapiens
tccaggatcgtcttaatagactgtgtccgctgtggtacataaattgagaaagcatgatatttgagcaagaaaaattactgaggtttgttaagatttgagaagagagatggaaaatcttcctgttcagttggagaagaagctgaggaataagtctttgtgcatatgaagagtgttttgtaggctgtgtataggtattttctgtttcttcagaatgtagtaaaaaaacagtgtgaacttaagactggtcctgcaggaccagtcttaagagcatgatggggcagactgcacataggtctggtccgaaaccaagcccctgcagagacaaccagggaagtaatctgagagagttaatggccctcgtacctcttattatttcgtttcatttttgtaacagaggcacattatgttacgcttttatcttatttgagggaccaaggaacaagcaaatacttctgtagtgcctgttctgtggtaggctctgtcttaaatgcttcacaaacattaagactgtacctggggccgag

SEQ ID NO: 4690 - DNA, 740 bp, Homo Sapiens
  misc_feature (150)..(171): n is a, c, g, or t
tctgaaaggacaagaaaacgtagaaggcagcagaacagaacaaagaactcatttagactacagagattacacagcataatctgccaatagtttaatcatggacatttttacaatcatcttgtttcttgagatagagcatatgggcctatnnnnnnnnnnnnnnnnnnnnnnttccactattccaggcatattccaaaattttcctcttttgattagaattttttttggacaagtcccatgcggagtctggcctgaagacttctggctgagtggtggatgaaaggagtattctgacacaggtattttgcatgagaacggctggtggagtgccagctttagtgcagccgagaagagagtgcagtcctgatcagctggaaccattcgtatttattcagtacagacagaacaccaaaggcctgaagccaacacaatttgtgagtaatgaacattgtcgcccccctttgcaggaagcaagcttgcatgatttccggaggcataggtaacaagttattagaaaattctttacctcccctgtactaatgtcgcctcatcgttatccatgggaccccagaccacggagatgagttggtgccgcgtcatggcgcccccgcccggggggaccaacagcaacgaagggaagcagcacagagcgggagagagacagaagaggaaaaacaacgaacgggggggagagacagggcaacacacgggagagtcgccaaggagaaaaggaggcgaaa

SEQ ID NO: 4691 - DNA, 1296 bp, Homo Sapiens
cgctgctgagtgagaaggagataaacgcaagggaagagagccttgtggaagagctgtcacctgccagcgagaagaagcccgtgccgccgtctgagggcaagtctagactgtcccccgccggtgagatgaagcccatgccgctgtctgagggcaagtctatactgctgtttggaggggctgctgctgttgccatcctggcagtggccatcggggtagccctggctctgagaaagaaataggaggcttttcagaagagaaagacagaaggatgtaaggttggagttgtattggctggaatttgaacctccagcagctgtctggacatttgtggaacactctgggataattggggacttctgctcaacatggcagtggcatgttaggcatgttagggcttgaggtggggcattcacattcatctgactgtaaatcccaagggcctccgctcatgctaaattgagaatcttaggggtaaagcaccccctccaggaccgggtttctcagccttggcactagtgctgttctgaccattctctgtgttggggctgtcctgtgtgtggtgggctccacccactagatgccagtggcaccccctcccagagatgacaaacgaaaatgtctctagacatcgccaaatgtcccctgtgaacatcccctattgagacccactgctttagcgagagagggtttacttaggaagaattgggatagaaattcccagctgagagaacttagctgtgggctcctcagctactgacttcttagctcttaatccccttagaatttcatctttcctcgatgagcaggctctgcaccactcttttttgccccccgccctcatcctggagtgtgagggtgctcgcccgtactctcagctgcctctcagggactgcactgttcctcttcacccccaggttcctgctaaggatcccacgggcgaagggcttgcctctggactcagacctgtcaagtccccgaagcttcctgcagctccaccttgtaaaaatgctgcctttgggaatcttcgaaatatgtacacagagaaaatcacatgaaggagacctggggtccccacttgtgagtgcaactgcaagtaactctggctagagagacacatgtgtcttgtctcaaggcaggaggataacctggatgaccttctgaggtctcttcagcccttttcgctagtggtcacccaccaccatggctacttgccagcaacatctctattgctggatggtccctgtctataaccttgggctagtatattttttccaatatgggaccttagtcttactc

SEQ ID NO: 4692 - DNA, 426 bp, Homo Sapiens
tcaaaaggcagtcaccagagtaaatctctagtgtactcactgaagaacagacttcttgtcccctactaaattatgtctgaaagagaacaaaccattatggcccttttatttatttctcctagccactaagagattgtatatgggcacgagtactgcttgatggaagatatctccaaaaaagagttttctgcctcagaggaaacactaacctgtcataaagcacattctaatcccaataatacaatttatggaatcattaatgttaaaaattattacatgttattcataagtaggtgatatttaggatggtagtcttattctaacatcattaaaatacattttacttttaaacagtggcatgaggtagaagaaagtcacaaaagaaagtaatcttcaacatactgacacctattcatacaattagac

SEQ ID NO: 4693 - DNA, 225 bp, Homo Sapiens
tcgtgcaaacaggtgcttattagaggtagtgacttgcttaattagtgacactcttaatttctactatggataatttcaaagtagaatcaccctatgcttagagttttggcaccaatgctgtagggcagcagaatctattctcagtaaaataacttatggtttattagatattctgtattggattttaccagcttgacttttactgctcagatgctttctttcccc

SEQ ID NO: 4694 - DNA, 726 bp, Homo Sapiens
gtcaaaaccgttgttgtgttaaaatttattttattaaattttgtgccagtattttttttcttaaaaatcgtcttaagctctaaggtggtctcagtattgcaatatcatgtaagtttgtttttatttgccggctgaggattctgtcacaatgaaagaaaactgtttatatagaccccattggaaaagcaaaacgctctcactgagatcagggatcccaaattcatgggacttatataagaaggacaattaatgctgatttgggtacaggggaattatgtgtgtgaatgtcatctacaattaaaaaaaattagcacatccctttacttacttgttatcagtggattctcggggtttggacttaatgttgagctaagaagcattaagtctttgaactgaatgtattttgcatccctggttttggacgacagtaaacgtaggagcactgttgaagtcctggaagggagatcgaaggaggaagattgacttggttctttcttagtcctatatctgtagcatagaaaacactaaaaggaaagtctgtggaatcactagtgactaaatactgggaacctattttctcaatcttcctccatgttgtgttctttgtattcttgagatgataatatattatgtatttgaattcctgaaaaatggaaaatgtttaagatatatgtatataaagtgtatgctgtattggtgcaataatggtaattaaaaatatgaaaa

SEQ ID NO: 4695 - DNA, 577 bp, Homo Sapiens
  misc_feature (471)..(529): n is a, c, g, or t
cccttttcctgcacctagtggcctttcttgggaagtagagatgtggcggctttcccaccctgcccacagcaggccctcctgcccagctgctcttgtcagccctctggcctccggaagaggttgagttctccacaacagctcccaagcatcatgggcctcgcagccgggcctgtgccacggctagtgttgtgtgatttaaaatggactcagcaggaagcatattgtctggggattgttgggacaagttttggtgactctgtgcccttgctctctaacttctgagcccacctcccagggtaggcacctgggggcatgcaggtgcccacctcccagggtaggcacctgggggcatgcaggtacccacctctttctcttgggtgaggctctggcaaggagatctctctgctcaagcacagcagaatcatggcccctctccatgaattggaacttggtacaggttaagtatccctnnnnnnnnnnnnnnnnnnnnnnnnnnnnnnnnnnnnnnnnnnnnnnnnnnnnnnnnnnntcagtctcttttctgggggaaaaaaataataaacctagcctagccagg

SEQ ID NO: 4696 - DNA, 558 bp, Homo Sapiens
ggacataacaaataaaaacattaaaagatggagcttctaaagttctagaactacccagctggaatcaggacataggctgagtctattctgcatgtgccactaacaaccaagaactaagggaagggaagttggcttgggagcagaagaaactgataatttcttcatcccctatgggggggaatatcttctcaaatgggagctggagaacttgatgcaatgatcccaaccagtccaagaacaacagctgcccctttaggagttagggctatgcccaccggacaggtaagtccctctcgaataaggacactatagcccccacccttaggaaaatggagaatttccttgcgactactgtcagccacgatgagatcaccacgagcatccacacacatgccagcaatgcagcggaaatcctcattctccgagaagaagtggctaatctggcgacccagctgcccatcagggcctacagagccaatggaaaagccaccctccaggtggtgctcattctgccgattctccagattgaggcctaagccctgggtgaagtagacgggc

SEQ ID NO: 4697 - DNA, 524 bp, Homo Sapiens
gctgctgtactttcccggggagccgtccccagactctctctttgctgtgttggatgcatcccttagctgggagcagcaggctgagagccctccacacgcagccatcccctgggctcagcacagccagcgggagccgtatccagagggtcatgagttggcctcagcagcgcatgcgtccatgttaattgtagcgggggagcacacggtgtctccttataaacaccctcgcattccactttgtcctgcaccgagtcaaaacagcctcactccctgaatgcaggctcagggccatcagccaggctgacactccaggaggcacagtgggtgtttctggtccacacccagcgtggaaatcatagtggtgcacatgtactctgcgtgggcattgcggcagcatccgtgcttggacctcaccgcctttggggcccacgtgggattcctgccacatcgtcctcttgccctgcaaagtcggtgcagcccctcattgttgacaaagaaaccaagaaccctgaaggttcagaact

SEQ ID NO: 4698 - DNA, 156 bp, Homo Sapiens
acaaaatctgagcagtgattatctgaaagtggaaatacaggtgattgctactttcttctttgaactttcctgattttttaacataaaaaacacttattcacacagtggtaccataatactattaatttttaaaatgattgtatacctttcccatat

SEQ ID NO: 4699 - DNA, 213 bp, Homo Sapiens
ggaagaacctggaaggacctgttggcaaatagactacttctgcatttaattacattttcccttaataatcgtaggctgttgagaattgacttgttttataagagaaaaccagattgacagagaagaacccccaatctagatagaggtattttaaaaataaaagtggtaattatggtacatttggggtagattaagggatattttaaaaacttt

SEQ ID NO: 4700 - DNA, 237 bp, Homo Sapiens
gccaagagcagctccgcgcttgctggatcgtggatgcagcgtaaacatcttccttcagacgaggcattaaccccatggttaatggactggtcaccagtttgtattttatttttatgaatctacctttccattgattgatttaagttcaggccacttttctgtcttttatgtggttactgttgttatttgtttttaagttaggatgctttttaacagcctttagaagccgctgctgga

SEQ ID NO: 4701 - DNA, 245 bp, Homo Sapiens
cttccaccaaacacgcatgtcctcccctcgatcttttacaaggtaataaaccacagtaattacctccctgcatcccaaactaagaggacaaattaagtcagaacttgaaaataatttaaaagagttttcccttgtttcaaataggaaaaggaaacgccaagacatagaaaaccacgcttttccgcgtaggaagaaccgatgatgagccctgatgaaagaaggaagaagacccgccgctgaaatgc

SEQ ID NO: 4702 - DNA, 499 bp, Homo Sapiens
cgcggcgagtgatggtactatgtcagcatatcactgcactgctcccacattcaacaatacagcggtgagcactttgacggatctgagatgcagaattgtgaggggcgagacataccaaacatcctggaccacgacctcattatctggtttggagacatgaactttcggatcgaggactttgggttgcactttgttcgggaatccattaaaaatcggtgctacggtggcctgtgggagaaggaccagctcagcattgccaagaaacatgacccgctgctccgggagttccaggagggccgcctactcttcccgcccacctacaagtttgataggaactccaacgactatgacaccagtcagaaaaaacgcaagcctgcatggaccgatcgcatcctgtggaggctgaagcggcagccctgtgctggccccgacactcccataccgccggcgtcacacttctccttgtctctgaggggctacagcaggcattgcactccgg

SEQ ID NO: 4703 - DNA, 543 bp, Homo Sapiens
catgagcagtgatcatcttctgaatcgtgaataaactctcgattaagcgaagattggtgacagcttctatgatcagattcctgcgtttcagcagtcggtaagtttcgtgtggtaatgtcttggcctgagctgtgcctcccagtcttcagggaactgcgactctcctttgggttttccatccggacctcctcgatcacagctatgtcaccactgttgctgtccgcacagtgggagacaaaggacacgttgggttctgagacgctgctggtatctaagaggctgtccctgctggcaaggctctggcaggctctctcttcagcagctcctgggaaggagggcggctgctttttcaatgggtgtaggtttacaactttccacccacccttggttggggtggagtgatgaggctgggtcttgggccggaggtttgcagaggctcttgtgtctttctgggaccccctgcctctccgcttgctgctgctcctctcctcctcatgtggctacaagaatattttttaataataaaaaatataccgtcccgac

SEQ ID NO: 4704 - DNA, 698 bp, Homo Sapiens
ctggtgggctggtgggctagtagctgaggccggcggtcctctgcccccggggagcaggcagatgactttggcaagggctggtgtggcgggggctggggttactccgtctgggcgtcgtaattggctccccccgccttcttcagctcgctcttgatgaaatcttcctccagctccttccgatcactgatcacaaactccttagcgaaattctgtacgacctccttcaccagggtcttgtccgtcccggttttggcgcgctgcagcccgctgacgttctcaccgatccacgtgatgagggcaaacttggacctcttgctcatggcatccccggtggtgaagcgcacgaaggcaaacaaccggacgtcatctgtgcactgctggatgaagtgctggtactccgctccctgctcgccggggacgatggtggagccgtcatatttaaaagtcacccagatgacggccgagccgtcgtcgcgcaccaggttgtacgccgcccggcaagcctctttgtcgatcttggtggccatcgccgcggagccgcagcgggacactgtccggggcggccgagcgcgccctggccggcggcggggatgggagcgcggcgggtacgcgccgagggcgcacgggctggcggcggtggcgacggctacgcggcgcctgcgagctgcgagatcccataatcccggcgcggagcagcc

SEQ ID NO: 4705 - DNA, 520 bp, Homo Sapiens
tcccgtgtctcaagctgggtcttcggcaggttacagatctccaggcgggaatagtgcctcaggaagtcactgaaagacatccagaattctccatcttcatgccgtctggtcagcctttccctctcctctgggtctatagtgttccagcttgggcagttgtcattccaccgccctgtccactccacttctccccagggatttcggatgcggatcagtttctgtaggcttccgttactttcaacctcctcggctccggtgaccgagtacgcgtgccccttcaccagcttctgaaacgtgaatggcctccgagtccccggcgctggtgatgtcgatggagcagccaaggagagagcctttttgcagagctttctggatgatcttgaacaggttgggagggggcttcttcaactcataccactcagcaatgctccggtgaagtcttcgaagccctcagtggtggcaccccctgatagtgcttcatagcatccgttgatcttgcgtatgccttctccatcaggcg

SEQ ID NO: 4706 - DNA, 880 bp, Homo Sapiens
  misc_feature (624)..(624): n is a, c, g, or t
agaacaccaaggattttgaacagcataccagcagcgtcagtgggctcagatgtccatcgtccaatttaaatgtcacgtccgagaacgttcccttgactgagacactcttttatccgattggctttccttacgtgaaaggctttcgtaatctcctggttcatgaaggcttccttgttcatgatgttttccaccatcatcctcaaatcgaacatctcgaggacctctgcgatctgagccaggcccaccaaatccttttccttttcatccagttgtcccgtataaagaaactggagcagggtccgaaaagggcctggctggactgaagcgtccatcctgaccacagtcatgggccccatccgctttgaaatggggttgacttgcatttccctgtgcatgccaatgaaccccttactccatccggtcaaagtctgtgtctcaggaactgcaccctcggcttccagccccagagcctccaccaggctcttgtttgaagacttccactggtcggcctgaggaatcctaggcgggccctcctccctttcttcctctgggtcgacactcaatatccgcccctggaaatctctgctctgcttctctttctcacaggctccttcactcccaatntggggattcttcacattccattaaaaacagatcataaaatttggaagaagaggtagcgaggtaaattcgatgtgcaaagatgtgttcctggtcctgaaggatgaacagaacatcggcacatagaggattgtccagtaaacaggcagcttcatttgtccccatggaaggacactctggaattttgatgaccggtggaggggcttttggaggtaggaagggtgcctgaagtaaaggtttctggactttctttaggtgg

SEQ ID NO: 4707 - DNA, 327 bp, Homo Sapiens
  misc_feature (30)..(30): n is a, c, g, or t
tgctgcaggtgattcctagaggacccctgnagaggtggtgtctcccagccagtgtctatggttctccaaaaggccaaagaaggccatggtcaggcattcacggagttctaactgactctctggaacagtgtggtgctgcctggggtcagggctattctgtgacccctttgttcctcatccacaacaaaattaaatgctgaacccgaaaatcagcgtttgggaaatttttatagcaattaagtattgctgcaatattcgagcatgtgatcagagtagtcgtctcatcaaatggcgtatagaacatggaggcactatcaaactgttgtg

SEQ ID NO: 4708 - DNA, 1060 bp, Homo Sapiens
ggatttaaaagatctttgagcataaccctggatccattaagctccaactgtgtccacagttgtgcacttcaaggtgtcagcccagtgcatcaccctgacagacaatcagaggaagctcttcttccggaggcattaccccgtgaacagtgtgattttctgtgccttggacccacaagacaggaagtggatcaaagatggcccttcctcaaaagtctttggatatgtggccctggaagcagggcagtgccacggataatgtgtgccacctgtttgcagagcatgaccctggagcagcctgccaagtgccattgtcaacttcgtatcaaaggtcatgattggttccccaaagaaggtctgagaactcccctccctccatggacccaccgatgcctctcgaagccctggagacagccgtaggatgaggctggggcccccaacttattaccaaactagtaaacctgacattccaggcccatgaggggaaagaggatcttccagctctgcaaaaacaagtaccaacaacatcaccgtgaattggcctttcctgaaagtgacttatctgacacatctctgtagccacatgctttttgggtagaagaagctgggcatgggtgcaccccaccccctagggtccccatgggaaagggacaagcaaggaaacagcacagaacacgaggtggtccccatgtccctggcacactagcattccgggggatgaggaatccccagcccttgaggcagaggtgccgagtgactgccatgcttcgcccgtccgcatgggcgcttctgtccagctgcacccgaggccgggggtttccctcacctcggtcttcccaagatggagatgctaacgaaactgagaagggggcgtatgtttgacgaaggtttgtgcaagtcaggcccttcgggaacacagcagggcctacaacgaggggcctttgcgatgggtctgtgaggatgggggtggttgggaagaattggaccacgttggagaccccatgccacccacaccatggtgagtgctctgtgcctcctgctcacctgtggtgagctgggcgag

SEQ ID NO: 4709 - DNA, 549 bp, Homo Sapiens
  misc_feature (287)..(287): n is a, c, g, or t
  misc_feature (390)..(390): n is a, c, g, or t
  misc_feature (514)..(514): n is a, c, g, or t
tggatctagatctctgtcccaggagctccacaatgacctctagtccctcagaaaaatgaagcccctgttgacctcctggggataccaggaatatgaccctccccaacccaggggtaagggtaactgtctactctgcctccgagtccccaaacaaaggctggggaacatcaagtctaaagttagagaatcactgcccaatcaatgacacccagccagaagaccctaaaacaggaagtcccttaaagtgtcaaagacacgtgagttggagtgaggtcagagaagctgantctggactgctcctgggtcagacgccagtgaagaggaagcgctggcatcatgagacatcatctttctccccctgcctctggctgaaagccagggcctccaganccaaggagatctgactgacctccttggcccatggcccctgaccctcagccctcttaattctacctgaggggagtaccctccctagcaggcagttggggagaacacctagagagggagggaggtnttcacaacagggtaagactccaccctgcctcgtgc

SEQ ID NO: 4710 - DNA, 320 bp, Homo Sapiens
ccatgtttgattcaaattccatgagtgacctacctttccccaggaatgggactgagagggtagtctccagcaactcagtctgcacagggctccccgttcaggctgcctttggtggttgtgcttttgtaagtttctttctctgcacttcgacttacctctgaatcagaaagcaagcccagcaggtgaatgagggatgtctgcttgcaattcgccaatctaaccagggaggctggctggccacccactgtccgctagaggggagagctagcaggtgttggtatgaactcaggaatagaaacacgaggcctttttaaatacga

SEQ ID NO: 4711 - DNA, 284 bp, Homo Sapiens
cagcacccagaagccccctcatgagaagtgaattctggcatagaggaggaagacgtggtgttggaggtgggatttgaactggggtgtatgatgcagaggacttagatgatgagggaggattaagacagaggaaacaagcacggatgtgccagggacaggacaagcctggcctgatgtgagaggaggctgctacatccccaacaagcgtggcactgagaagaaagatgtacttacagtccaagggcagcaaagttgagagaaaaggagggagacaccacctctta

SEQ ID NO: 4712 - DNA, 479 bp, Homo Sapiens
ctgcttgtcccgctttgcaaagcaaaacctctccagctaaatctcacttgggggtgacagctttcagcgaggggccatgaagacaggctggggcagaggcttctggtgggcacttttcttcctttttcctccggcctcagctcggatgtgcttggtgtgcaggccatggatcaatacggcctccagggcgctgcacattgtgttggcatctccgtcttcactagtgaccaccatgtccagggacacgtactgcttcagctcaggtacagaggggtgtgactgctctggatggttaatgcactgttttcccaggatgcctggcattgcttcagctctggcctacagaggcaggatgtagcagcatctgggaggggtaggtggaggagcttcgccaaggcatccatttcctcaggaggcaatgtgcagcattcagctcaggtccctgaagcaggcagttttgggagacaccacctcatcag

SEQ ID NO: 4713 - DNA, 285 bp, Homo Sapiens
aacctaacaccatcccagaggaagagatttttcctccctagatttcctgatgtgaaacccatccctctaaagctttccactattttagggcatgacgcttccaaatagtatttttcctcccactacttcaagatagaaagaaaaagaaagattacttttattttagtttattgaaaataattactcatatattatcagatgttattacagatcatggaaacaaaatatttatctgtgaagacaatatctttccagctgaggagggtcctcagatcacctcgctca

SEQ ID NO: 4714 - DNA, 546 bp, Homo Sapiens
tgagtgtcgctcctaggaggacccctccctcaaagctaagaaaagagagaagctgtgtacttggttgtccattttggagtagaagtttctgtccagctgatctggaaaaggggtgatgaaaggcatgggtcttggtttaagtatccaagcttttgcagtttttactaagtataatagatttctttgaataagtggtttttttttcatttgctatatacaattttctgaaaacttcaatgttgttttaatttataatactcactagtttcactagggagtggacccatggagctcctcacagtgatatcagaagaggagctcccattttcctccctgttgaagtacatataaagagaatcacatagaggtacttttgtgatatctgcttcttttactgagcattatgcatctgagatactattatgctgttatgtatagcaataattttttctctttcattccaatataatacttcatggtatgaatacgccataacaagtcattgttctcttcagtgtcatttggatctttttccaggctggggga

SEQ ID NO: 4715 - DNA, 520 bp, Homo Sapiens
  misc_feature (273)..(282): n is a, c, g, or t
ggtatattgctttgaagtaagtctcaatagtgcaatatattttagggcatctttcttcttatctctgacagtgttcttaaaattatttgaatatcataagagccttggtgtctgtcctaattcctttctcactcaccgatgctgaatacccagttgaatcaaactgtcaacctaccaaaaacgatattgtggcttatgggtattgctgtctcattcttggtatattcttgtgttaactgcccattggcctgaaaatactcattgtaagcctgnnnnnnnnnntctttcccactgttttttctgcttgttgtaagaatcaaatgaaataatgtatgtgaaagcaccttgtaaactgtaacctatcaatgtaaaatgttaaggtgtgttgttatttcattaattacttctttgtttagaatggaatttcctatgcactactgtagctaggaaatgctgaaaacaactgtgttttttaattaatcaataactgcaaaattaaagtaccttcaatggataagac

SEQ ID NO: 4716 - DNA, 263 bp, Homo Sapiens
gtaccggcatcgagtcctcctcagcgaaagataagctgctacatggcaccagtgtgcctgcagaccagctgtctccctacaggttctctgatgcttagcattggttgggcctggcagctttgaatgagtattgtggccttagactgcatgaattctctttctccctaggaatgcccttcaatcagctgggcaccctggcaggcagcaagtactataatgtggaagccatgtattgctacctgcgccggtgagtatttgccagc

SEQ ID NO: 4717 - DNA, 1746 bp, Homo Sapiens
  misc_feature (1043)..(1043): n is a, c, g, or t
  misc_feature (1436)..(1436): n is a, c, g, or t
  misc_feature (1460)..(1460): n is a, c, g, or t
  misc_feature (1560)..(1560): n is a, c, g, or t
  misc_feature (1582)..(1582): n is a, c, g, or t
  misc_feature (1585)..(1585): n is a, c, g, or t
  misc_feature (1613)..(1613): n is a, c, g, or t
gcggccgccgtcagacatccacgacagcgatggcagttccagcagcagccaccagagcctcaagagcacagccaaatgggcggcatccctggagaatctgctggaagacccagaaggcgtgaaaagatttagggaatttttaaaaaaggaattcagtgaagaaaatgttttgttttggctagcatgtgaagattttaagaaaatgcaagataagacgcagatgcaggaaaaggcaaaggagatctacatgacctttctgtccagcaaggcctcatcacaggtcaacgtggaggggcagtctcggctcaacgagaagatcctggaagaaccgcaccctctgatgttccagaaactccaggaccagatctttaatctcatgaagtacgacagctacagccgcttcttaaagtctgacttgtttttaaaacacaagcgaaccgaggaagaggaagaagatttgcctgatgctcaaactgcagctaaaagagcttccagaatttataacacatgagcccccaaaaagccgggactggcagctttaagaagcaaaggaatttcctctcaggaccgtgccgggtttatcattgctttgttatttgtaaggactgaaatgtacaaaacccttcaatgggatgtgtgttttattaactgcttcaccagtaaattttgcatgatggctaagctaacataaaaaaagaataataataacttggaaaaacgacaaaccgcgcgcgtaaacgccgggtcgcgccattgggcgcttctataccacccccaccgccgtttattttgggatccccggggacgtgcgcagaaaccccccacccgacgccgcgaggcctgcccgcgtggggtgggcccctcccccgagattattccctggtccgtagaagcggggcaccctcacccccttagtggcccgcgccgtgtcgcgcggtgggcggccgctgtctcccgcctctgcgcgccgcacccaaaagtcaattgtgctccgtgtgagcgcgcgggcatgggcccccgcgcccttcgtatatagagcaggnataggctcgcggctcatacaagagccgccgcctccagatggtgactactacggcacccggcggggtggtgcgcgctatcgctcgctgtgttgccccgcgcgctggcccgcgcaccgacttagacgtgatcgggggtgcagaacagtcacgagtgcaccagctaagttgaggtaggcctcgccgtccaggaccggagccagtagatcccggcaccggggcgcgacgccgacaagataagtcgctctcgtgcgacttctggcgatcagggaatatatgacgcacgaacgcggcggcgtgcgaaggacgtagtggggtaacactacactatggtttttggttgcggcccactctcttcgtccttggagaggtagtatcagcgtacctgatgcgcgncgagctgccgggcgcgtatcctangaacaggagcctcacgggtcttaaatgacccgcgggggaggaggatacacccactactccccccggcccgaacgtgcagagagggacctgcaacgttggncacaagttgtcccgcttgtgtngcnaggtcgtcggctgcacacacgcagtgcncgatgcgacacggtggtcgggtcgtcgcggccccggcagaggatgggacacgagaagcatgagcgcggagccacgacgacctaagtgcctatcatgtaccgcgacctctgatagcgtagggcggaggcgcgtg

SEQ ID NO: 4718 - DNA, 531 bp, Homo Sapiens
ctccctgaggtccctccctcaagctagaaaagagaatgtcatggagcattcctaaccatgggctccagcctggctttcattctgtttctcccctgaaacaacattcctttagtaatattccgaataacagcttcatcagtctgtctaccgaccactcttcaggcttcatcttatatgacctcccaaactgcactaagggttgtattagagaaaagaggataaagttcggagtcaggctgcttgagcttaaatgccagcttcacttaccagccacctgaccatgagtcagctgcttaaccattctttgccacagtttccttgtctatgaaaagggaaatggctcccacctcaaaaagttgttaacattaaattcaatcatgtattcaaagtcctgagcagaatgtctggccatgactgggacctaacagatgttagcatttattattagtatctgtcagtcttgaaatgttctcttcccttggctttcatgacattccacactcccctggttttctcttacctctctgtatt

SEQ ID NO: 4719 - DNA, 794 bp, Homo Sapiens
atgagccctttgccccagatgcctatacaaacacttcaggacaataagtcgagttatggaggtatgagtcagtataactgtgcgcctggactcttgaaggagttgctgacttctgactctcctccccataatgacattatgacaccagttgatcctggggtagcccagcccaacagccgggttctgggccagaacgtcatgatgggccctaattcggtcatgtcaacctatggcagccaggcatctcataacaaaatgatgaatcccagctcccatacccaccctggacatgctcagcagacatcggcagttaacgggcgtcccctgcccccacacggtaagcaccatgccccacacctcgggtatgaaccgcctgacccaagtgaagacacctgtacaagtgcctctgccccaccccatgcagatgagtgccctggggggctactcctccgtgagcagctgcaatggctatggcagaatgggccttctccaccaggagaagctcccaagtgacttggatggcatgttcattgagcgcttagactgtgacatggaatccatcattcggaatgacctcatggatggagatacattggattttaactttgacaatgtgttgcccaaccaaagcttcccacacagtgtcaagacaacgacacatagctgggtgtcaggctgagggttagtgagcaggttacacttaaaagtacttcagattgtctgacagcaggaactgagagaagcagtccaaagatgtctttcaccaactcccttttagttttcttggttaaaaa

SEQ ID NO: 4720 - DNA, 525 bp, Homo Sapiens
ctgagtcccgggagtgggaagaggtggcaggaaggggatcgaaggaggagaacaggggtcctggtggtctgtgcttcttcccagacacgggggtcagcacaggtcacctcgctgattcctgccaccttcacaggctgcaagcagggatgccggcatgagaaggacaaggtcggctcctgcagctgccacagcagcccctcccccctccacattgaacaacacgtcggggtcactactcaatgcagtggatggaggcccctcacatttcttggcctcagccacagaagcagcacgtgcccagaggtcagaagtgagatataaccagagatcccagacctcccggaccagatcctgcctcaaacgaaatgccagctccagctccagctcccacagctctacggaaggcctccaggaactaaagcggaggagggggccagcctcatcccactgccagctggcccacagttcctcaaacacagtgagtgaggcggacctcagcttctcttctacccccgtccggtggat

SEQ ID NO: 4721 - DNA, 454 bp, Homo Sapiens
tgcggccgctgtgcgcgccccgcctgctggaccacttcatctgtgagctgccggcgttgctcaagctggcctgcggaggcgacggagacactaccgagaaccagatgttcgccgcccgcgtggtcatcctgctgctgccgtttgccgtcatcctggcctcctacggtgccgtggcccgagctgtctgttgcatgcggttcagcggaggccggaggagggcggtgggcacgtgtgggtcccacctgacagccgtctgcctgttctacggctcggccatctacacctacctgcagcccgcgcagcgctacaaccaggcacggggcaagttcgtatcgctcttctacaccgtggtcacacctgctctcaacccgctcatctacaccctcaggaataagaaagtgaagggggcagcgaggaggctgctgcggagtctggggagaggccaggctgggca

SEQ ID NO: 4722 - DNA, 213 bp, Homo Sapiens
gcgatgctcagaggatccctcctcaagcagaaaaagacatttcagttaacatgacctagtatttaactaaaaactactccaaggcaaaacgtcaaaagatggtatcaaccatagtagaaggaaaaataaatgagtaattcagtagtttcttcttgtaacaggcatatacattttattctcctgtaatgaaaccaaaagtcaaataaagtaaag

SEQ ID NO: 4723 - DNA, 560 bp, Homo Sapiens
gcggccgcctgggcccctggatgcttgcagggaatctacacagggttgtcaggtacgacaagggtgcccagggctgaggagggtgcccatgcggcctcctacaatgcgtatgggaagccggtgaacgccctccctcagggctggccgggtgcgtctggggttgtcctagctccagctgctggaacaaaataccgagcctggggacttaagcaacagaaatgtattttctcacagcctcggagggggaggggaaggtccggtgtcccagggttgccgggctggttctgcggaggcctctcccgctgctgccttctctcaggcggcctctgcgcaggtccgtcccgtgtccctctgccctaacctcctcctgcaactaggacaccagtgggacccggccagggctcatcctcacggctgcttcccacatactcacctgtctcgtagccccttctccacacacgctcgcgttgttggtactgagagtttggattctaaccatgaactctgggggcacaacctgccagaggggtcactgtgtagcccgggggaccttgcaatgt

SEQ ID NO: 4724 - DNA, 568 bp, Homo Sapiens
taggaagagctgaggctgcctgggaggcccggggcgaccggaaaagggctctctcaagttctgaaaagagaatctgccaccagatcgaatttcgacccctgagcttgttcggacgtatggtccaaattcagattaaggtggtcacccaacccgagatgtcaggaaaggccttctgcagagaaaatgtccccccacccgccatctgcagccaggtgtgtgccacacggcagccttcccgaaacatagtatggattttaaaaatgtgtttatttttgtttctcaaccactttataacgtattttttaatttattttgtaatgtcttgttttgaagtattgctgctatccttgttatccttcccactgtttttatcactgatttattttgtgaaagttgtacactaatgttctatgtcaaaatcaaaagtatttaatgaaatactagttctatttaatgtggttatggaaccagctggaaacacaaaacaaacagtgattgtacagcaggctgggcccaggaggtcaggttcattttgttacatatgcaataaactcacgactttacattt

SEQ ID NO: 4725 - DNA, 690 bp, Homo Sapiens
cagttgccctcagtccacttcatgtgtgaccactcattcacccaacactgctttgagagttactcgaatacgtgatgctgactgcaccacatgccctccctgagaaccggaaggtcatggatatgatccgggcccaggaacagaaacaagatctccatgatctattccagcatcagctcaagtgctccaatgacagcttttctgtgattgctgactactttggcagaggtgttttcaacaaattgactctgctgaccgaccctcccacagccagactgacctccagcctggaggctgggctgcaacgcgacctactcatgcactccaggaggggcacttaagcagcctggaggaagatgtgggcaacagtggaggaccaagagaacagacacaatgggacctgggcgggcgttacacagaaggctggctgacatgcccagggctccactctcatctaatgtcacagccctcagaactaaagcggactttctttccctgccttcttatttagtcagcttgccatccctcctcttcactagcagtgtagatcattccagatcagtgggggagggcacctcagcaacctctgagtgtggacaatagctgctttcttctctatccaagagcaccaggctgtgcttgggtccttgctctcagagtctataaataaaagaatataatgattaaaaa

SEQ ID NO: 4726 - DNA, 529 bp, Homo Sapiens
acaagctggcatttcagtagttgcttttgaataatggttttggttacctgggaaggcaggcccagaacccatttccttgacttgcagttccgggctgtgttcacatgactgctgtctagctgatgcatttttcacatttgtcaactctggttagaaacaggtcctcaggagtattctctaacctgatattttctaaaaagatatgttgattcaactttgtttagcatcctactttctagattgtggggctcattttgccagggccaagctaccagaaaagtagaagtggagattacctggtatgtatctctctgggtgccccagttagagctgccacagctcaggaaaaagatgaggcataacgaccttgaatgtaattggagtaagtgacaaaataagaactaccctgggaaaccctgcattcaatgtagctgtcaattcagtatttttaagtacacctgtcagctgtttcttaccacttcgatggttgtgattaatttaaaatcaaaataaaggaattactgagttt

SEQ ID NO: 4727 - DNA, 1379 bp, Homo Sapiens
actccaagggagctcactattgggagagtgttttgtggttggcttttaacctcttgttctgattctagtggaatcccccaaagaaggtaaagggagcaagccttccccactgtctgtgaagaacaccaagaggaggctggagggcgccaagaaagccaaggcggacagccccgtgaacggcttgccaaaggggcgagagagtcggagtcggagccggagccgtgagcagagctactcgaggtccccatcccgatcagcgtctcataagaggaggaaaagtgacagcggctccacatctggtgggtccaagtcgcagagccgctcccggagcaggagtgactcaccaccgagacaggccccccgcagcgctccatacaaaggctctgagattcggggctcccggaagtccaaggactgcaagtacccccagaagccacacaagtctcggagccggagttcttcccgttctcgaagcaggtcacgggagcgggcggataatccggggaaaatacaagaagaaaagtcattactacagagatcagcgacgagagcgctcgaggtcgtatgaacgcacaggccgtcgctatgagcgggaccaccctgggcacagcaggcatcggaggtgaggcggggttgcagtgactggtggccgcaagcccttccctggggagtacctgatggctgccctttgacccccggtggctgccctttgacccccgggtgtgctctcagcgcaagtggtcctagaacaggattctttttggaaatgtctgtcgactggaccttggtggatttggaaatggaactgagggaccggtgacacgtgcttcagaccggtctggggtgcggcgcacacctgggcccgtgcagggctcagctcggcagcagctctgagggcagctcaatgaaaaagtgaatgcacacgcccttgttggcgtggcctggcatggcctggtgctatcggcagccgctctccactccccgactgatactcaattacgtgaagccaagaaagatgatttttagaacctttgcctatattaggttgtacttatgtacatattttgcagtgtttcacaggagaaagtggccttaactgccccttattctctctccacgttgtaaataaacatgtgtttaatacaagttaaagctatgtatgaaaactcagaacttgaatcccgtcagcttaaaacttgtgtagggaatcctgacttttaaaatgtgagggtatttggatctgtgttgaaagtcgtatatttttatctgtgcggtgctgagtgcaggccaccagctcctaaatagaggttccctatatgcgcgtatgacatggtgaataaacacaactctctccactcaggacatccggagcgttaaaa

SEQ ID NO: 4728 - DNA, 448 bp, Homo Sapiens
aggtgaaaatatggagtacctttgttttgtatggtaaggtttaggaatggtggatgaagggtatctctatataaataaagtgctcaacaatgtgcaatgattgtaaatttagtaagatattacagccatttcatgaatgctttaccattcaacatagtatctattacaaaacacctttcttgtatccatatacttcaggtgttgctgttaacatttactatgatatttattttaaccaaaatgttactcacattaaatgtttattctttaaaatgaatgtattatgtttttaacccacaaatgcatacttaccctgtgcctcatatttcaatagtactgtaatatggacatcttttgtgaaatacttttattttgttatgctttaaatatacatacaaaaagatttctgttattagctttgaaaattgtataatatcctaatataaac

SEQ ID NO: 4729 - DNA, 427 bp, Homo Sapiens
caaagatctttgagcatcaccacaactgtgatcaccttgacaaacctacatactcaggctgtcccagttctcaatgaccatttttgatgtctgtagaaaacctagcacgccttgtgaacttagcaacccccttagttaggggttggagggagacaagaaaaggcttatgtcctattcccacagagccaacttgtgctcagtactcaattgtaacctgtacctgaatcacccaaagatcctaccccgtctgacatgttcctgctgtaatacatctaccttcattctggtactggaatcctgcccataaacccaccctaaaaagtctccatttgtctcttgagttgccttaacctgaatgccgcaatattgtcctctcatctgtctgaccatactggcactggctgctgctaggcgatgatgggtccat

SEQ ID NO: 4730 - DNA, 472 bp, Homo Sapiens
ttcgcggatctcaaagatcttggagcatcaccttcgaataaaccctgcctgggcttttgggtcctggctgccctgatttctgctatactgcattctcaccggccccagtttattgggatcagaggtggatatctgaccaaggagaaacaagctatttcagccaatcagactctctgactcaatattttagtacctgaactgcattaatgatgcagcactggactctttgtactgacagtccagaactgtattgattcttgtctttcctgagatcattccatttccttttccttgtagaccatggggtgatatttttataatgctccttttaaagtaatttattatttaaagacacatatacagatggtaaaatctataaagaataacgagaataattatctcaaagagcagcataatggttgcctctgaaggagagggagggagatattttcagacaggggcaaatatggac

SEQ ID NO: 4731 - DNA, 577 bp, Homo Sapiens
tctgaccgagttccagagccccaaactgcacatttaatcctgtgacatctgctgaaccaggcatttccactgcagaagctgggatcttagaagctgggggtatccgccgcttagcaagtttgatgtgtttgggctgtggctggtggacagacacagagatattttcaatggtcgtgctgggaagctgcaaaagcttgttcacagtggagggactgtctccaggtgttgatcctcgaagttttgcctgggaaggaaaggactccaaaccaggaggaggaacagtgactgcctggctctggtgctgttgtcgctggctcaactggctaagaactggggatggctcaggttgagatttgaagtcaagatgactgaggactgaggactgggatgttgggggcttgaggtcccaagaagtagtagttgtagggtgacttgtactattctgctgtgtacttggggtggtggtaaactggcccaaactcggagctttcaactggtccaaaatctgggagctggtgatgtcagccataacaggtggagcaagctctccaaatcctgagccaaggacggatgacag

SEQ ID NO: 4732 - DNA, 572 bp, Homo Sapiens
tgcatgagacacaagaacatggaagactgagagggcaatttgagagggggttaaagagactgagcattgtctggctttgtaaagtcaggtgtgtatttcagatatttaagaggatcaccaaaagaatacaaacggaactataactgccaatgcagaagaaaagggtagtgatgggtattaaaactataatggaaggcagaaagggagaaaaaggaagcaaagtaaaagggatggtaaatatatagtacaaaaccagaggtagaaaatgtggtttacattcacctcttaaaacacagatgaccagattggccaagaaaaaataagatgcagctctatgctatttacaagaggaaatttaaaacctaaaggcaccaaaaagtaaaacgatgggaaaaggtgtactagagaaaaactaaccaaaagatgtacctatagaaaactcagacaaaataggccttcaggcagaagacactggggataagaggatcaccatgaaatgatgcgaggaggaactctgtgaagagaggaaagttctgaacttctatgttccagggtttaagttttaaaggctg

SEQ ID NO: 4733 - DNA, 454 bp, Homo Sapiens
gccacacgatccccctccgaattcctgcgcgcacttgaagggagtgtctggtgcaggcatgcagggaggaagaatgactctgagcttgaccattcaacttcgaaactttaacatcaatggatccagcacacactggtgtacggtctgctatgcatgcagccctgtgctaggcaaaagaagtatcagaccaggaactgacagcctcactgcaaaaggaaaaaaggcttcaaacaataagcgtttcattcaacccacgctggaccctgtgcttatttgagttgaaccatcacttgggcacaaagatgcaagcccagacacccataaagagctgtaagggctgatcacagatgtctttctaccctcgaggagctctaaagtgtgggtcaggacgagaacacacatgcatgcaacccaaggggggtacccgaggctcgcaattccgtacatcattggt

SEQ ID NO: 4734 - DNA, 391 bp, Homo Sapiens
cgatacgatcccccaaagatctttgagcatcacccacccctcaagagaaaagatgactctggggaaaaagaaatagctagtaagtgaattgttacatcccaaggttgtaaaagatcgaaggatcttaggcttctggagcactgtgtaagagaactggcaaagagtaaatatgaacggtgtgcatacaactgtccaaaaattagcatcaaagtgtaaaatcacatttaaggaaacatttagaaatggtggtaacctacattaatttgcttagtgatgtgtatgtaaatagcaataagtaactgtagggtctgtactacgatataatcaacttcttgatttaaactacgctaccaaaacatctaaggaacagtttattcccataaagcatctg

SEQ ID NO: 4735 - DNA, 799 bp, Homo Sapiens
gatttgacgccgccctctcaaatacacattcattggaaatctagacactgctgttcgatcgaccgtcccaccacagaacaagggcaagtcgccctaaggaggccaaccgcgacggccccaacggaactgatggcccggcccggacatggtggaatcagttcagcgtgacagctctgcagctgctgcaggccaaccgggctgtgtgtggcttccacctgggctacctggatggtgaggtggagctggtcagtggtgtggtggcccgcctcctggctctgtacaaccagggccacatcaagccccacattgactcagtctggcccttcgagaaggtggctgatgccatgaaacagatgcaggagaagaagaatgtgggcaaggtcctcctggttccagggccagagaaggagaactagggcaagtggctgtgagaccctagagaccagcgaagggagaagttgggaagctacgttctgttggccaccagacttgcatttcagcctctgtcataatgctctgccctccctcccccgaagttctctgtggtgatgaccgctctcccctgcccctccccgcttcctgacctctgaagaggttgggaagtgaccatttggatgtctgggccctgccaaggcgacagggagggtcagagggaggccggctgcttcctgcccccaccctttccccgggcctgctgtgctgcttttgtgccaaggttagccagtcccccctgttgtgttccatgtgctttcacctctgcctcatctttcctcccgtccctgccccgccacctccccaa

SEQ ID NO: 4736 - DNA, 312 bp, Homo Sapiens
taaccacgatcaccactcttgccagcagggccaacggggcaaggggcaccaggagcaccaggaacacaagggggtccagcggggccggtctcaccacggtcacccttggcgccaggagaaccgtctcgtcccaggggaaccttcggcaccaggagccccctcacgtccagattcaccaggggctccagccaatccaggggggcccatgggaccagcgcgatccacgttcaccactagctccagagggaccttgtttgccaggttcaccagaggggccgaagaccagggaagcctctctctctaatctgacta

SEQ ID NO: 4737 - DNA, 1111 bp, Homo Sapiens
tacctacgaggttgaggcaggagctgcaggaggctggaaagtcaggctatgggactatagcaggtatagagtagggacatcaggcttgggcaaggatacctggttttcaatcacctgtcactgttccggaagcatgtgggagcacagaagggaatcagcccagcctctcggactctccccaaactgtccctgctgagctagagcccaccctccccaaccagggctgaaccaggcaggggaagcagtcctgggtccacatcagaggatctgtgtccaggggttcaagtactggggatcagcatcagtggggatcacagcctgcagccgggagggagaaagtagcgtcttgcttgggggaatgtaggcatcctcaccggcccttggagctccccacgccccacacacggatgtgcaccagaggctggcagtggatcagactgtggtccaggggattcactaggctcatggcatccttcttcaggatcatcagcatgttctggccctcaccccaggcaccatcttggaggctggcttccggctagcgggtctgggccagctgctggatacagttattgactgcaaatactgcgtctgtccccggtgccaggtcctcttcaggtacctctacccagcccagagagcggactgcaaagcacgttagcccctggctccatgctctggatgtaggattccccaccataccaggacagagagttactccggtccagtgaactctccaggctggagaaggatctccctttggggggccgcagtccccagatcccctccgttcccgtgcctgggtcctctgcatctcctaagttcccaggttgcggcgtcttgaccacttgtggtcgctaaccgcgtggcgtacattgaccacgtagctaaagtatcctgtcagcactcagtgtgattctctccgtcacatggccatggatggcaaggcacagccttccacctccagacctgtggtcacccccacaagtcatcatcgcagttgaccagaatgatggccagcatgcaatccgtgcccagcataaccccggctgctacccgacagcctctggccggcccagcactcgtacagcccagcgcgacctcgtggaga

SEQ ID NO: 4738 - DNA, 730 bp, Homo Sapiens
ctctggactatacaccccttcctgggttggggttgacaggacagaaccgacccaggggtcccgagagcccagggcaggagattcctggggctgatctgcctcctgcggggcctggacaggaaggggcagaccacagcgcccctcctccggtcatgtgcgggcctctgaggctgtggtagtgcccggtgctcacagctaatcgtgatgcccgggtcagttcttcgctatagttggttgcctgaactgcccacaaacatgttcccaattacccaggattttccgcttttggctctagccgcccatcccttgtccgtttcgctctcgtgcagcaggtgtttggcttccaccagggggctgtcactgggttagtgggcagcacccagtggcacacctcactcccatccagggtgcccatccttgttcagatcccggaagtcccggaactgctgcctctccgtctgtacccacgccggctcctcctccccaggctcggcctgagtacagatccgcgatgtactcctccacctggacatagccatctttgtttctgtccaggtcctcacagggtttcagcaatcacgatgtcccagcatgtgagggaactcctcggggtgcagaaaggctgtcagctcctctcgagtggccatcgaatccccatcctggtcggccacccggaaacgccgctcgtcccgagccagcatctttttgtgggtctctctggtggacagaa

SEQ ID NO: 4739 - DNA, 1213 bp, Homo Sapiens
gggtccggaattcccgggatcgccgctgaggaaggctgtagtgtcggggccgaagcggacagggaattggaggagcttctggaaagtgctcttgatgatttcgataaagccaaaccctccccagcacccccttctaccaccacggcccctgatgcttcggggccccagaagagatcgccaggagacactgccaaagatgccctcttcgcttcccaagagaagtttttccaggaactattcgacagtgaactggcttcccaagccactgcggagttcgagaaggcaatgaaggagttggctgaggaagaaccccacctggtggagcagttccaaaagctctcagaggctgcagggagagtgggcagtgatatgacctcccaacaagaattcacttcttgcctaaaggaaacactaagtggattagccaaaaatgccactgaccttcagaactccagcatgtcggaagaagagctgaccaaggccatggaggggctaggcatggacgaaggggatggggaagggaacatcctccccatcatgcagagtattatgcagaacctactctccaaggatgtgctgtacccatcactgaaggagatcacagaaaagtatccagaatggttgcagagtcatcgggaatctctacctccagagcagtttgaaaaatatcaggagcagcacagcgtcatgtgcaaaatatgtgagcagtttgaggcagagacccccacagacagtgaaaccactcaaaaggctcgttttgagatggtgctggatcttatgcagcagctacaagatttaggccatcctccaaaagagctggctggagagatgcctcctggcctcaactttgacctggatgccctcaatctttcgggcccaccaggtgccagtggtgaacagtgtctgatcatgtgaaacacaacacgttttcctctctgagtcccagctatggggaacatctggagtcagcagaaccattgggacctgaggcaggagtgtcacctgcgggagaagtctgcccgctgccctctgtcatcccattcaagattgtgccataccagctgaggtttttcctctgtctctctaggaatagggtctgtttcacaggccatttctgtgaaccctactccattgtggtttctgccactatcaaagttccagctacctgcaaggtgaaggaagcatcctttgtgcagccggatcctctagacga

SEQ ID NO: 4740 - DNA, 739 bp, Homo Sapiens
cacgtccaaggtctaaaaagtggttgcggagtgtgaaccctttttttccaaagcccttttactctcttagccccaaattgggtcgtcaagaaacctaaataattctacgatgaccattcttgggaggctcacccagacccttgtactttttgaggtttcctggatctgatcgcgaatttggtccatgccctggatagtttcacggactacaccagtctatctacaatgccgcccccaagcgctgtgttgagcctgcatggtgcgaaccttccacgtgaccagaatgctttgcaagcactacccggtattggccgcagtactacggctgcgattctgtctcaagcatggaacgaccgtgctccgattctggatggcaacatcaagcgtgtactgtcacgcttgcatggaattcgttggttggtcaggtcaatcaatgatcgaaaaagagctttgggaactagccgaagcgtatgtgctgcaaccaccgacaggacgtcttgccgactacactcaagcacagatgaatttcggtgctacgggttatgcacccggttgcggccagcatgtttaatctgcccattggcaagaacggttgtgtagcctggcgtgacgggtttgactgagaccttaccaacgcccaaacccagtaaagtgttgccagagcgtgaagcggttgtgttgctgttacaaaatgatgatgacgcaattctatcaagtcgtgcaaagtgtcccttacgct

SEQ ID NO: 4741 - DNA, 583 bp, Homo Sapiens
  misc_feature (551)..(551): n is a, c, g, or t
gttagtctctcaatactttactggccatatcccccgatacccccacagcaatttcaccaacacagagcaactgccctcagccactctgatgtgatggagccaatccaggtgtcctagaaatatcctagaaatgcagagcatggggaaatcacagaaccctgggaaatgccataagaacctgggctctggaaagtgccatccacctcccctctggtcaggctggcggcactgacaaggcatccacagggcagccatgctatggcccagacctccggatatgcaggaaccggggcctcccacagaagtccctgcgcacagccacaagattaaggtacaggtcaggccggctctgaagccagctgctgacaagctccgggtgccttgggtccacttctaagaagatactaccagagtctttcaggagccggggtgccaaggccagaatgtgggtaatgatgtccatgccctcctccccaccatccagggccgcggggtcttcatagctgcggatctcaggggccagctgctccatgtcctggtggaagacgtangggaggttgctgacaatcaggtccatggggcc

SEQ ID NO: 4742 - DNA, 1225 bp, Homo Sapiens
  misc_feature (678)..(678): n is a, c, g, or t
agcggccgcactcgctgcacacgaatggtcgctcacccgtgtggatcttctggtgcctcagcaggttgctgcgttggctgaacaccttgccacatacatcgcaacggccgcccctaaccaccccgcccccagtgctggggcggccccggctccggcccctgggggagcgccagcgggtggtgatcagagcagggcccacaccccggcagggatcctcgtccgtggggtcctgttcactcctcagatcgctggggagcagaagcgcatgcgcaaagccaccttcgcgggagggtgattggatctggccagaaaggccagccatgccgaggtcccaggggacgtggaggtgagggcttacactacctggacctgcggagatgctgcctagctgcagcgcgaaccctgcatacacaaggggaccattcattcatgacagaatgcccaccgtgccgggacccacttcatccctggggacacagtgtgaactacagggacctgaaactgaccaaagaggcagacggaggcgacaaatgcaggggtagggattctatctgtacagacttccctgatgaggtgataatgagacagaacccagcacaaggaggaagactgggctatgtgaaaaagctttctaggtctgatttaggttggaaaaaatcgtttatggaagggctgtangggcaagcgtgggggcattgtctaggtggaaaatgatggtctcagcaaatgcagggaagtgggtgggtctcggaggctggaggtggagccaacagaaagagggtgcaggctcctggatagtggtctggggtttggatgtgccttgcttgtgatgtctgtggggcatctgaggaacacagacttcatgaaggctgtggggaaacgtgagcaagggctctagggcatacacatggcacacagaacccgggcctgcaagtgatcaacacaggggtgggtatctacagaggagagaagtgggtcccagccacactgtgagcactccagcgtcagacgctgggtgaaggaggaggcaccagcaactccaactgagaatcagggcctggagaaggcggaagcctggaggaggttaaatcaagaagactgagagagcagtgagggcttttagtggtgagagaaagtccataagtcgccaaagaaaagtcagataaactagaatacatcaaaggaaatcagcaaaaaccacatcagagtcaaaagacaaatggcc

SEQ ID NO: 4743 - DNA, 592 bp, Homo Sapiens
gaggcccggcagcacaaaggatgcagggacatggttacttgcatctttactctagcaaaaattactggtggctccaaaactgaacctcatgaggaggtaaagggtggcacaggcttgcctccgggtgacatccatgctcctgcttgaagtggtgcaggacttggtgacataggtcgaaacactgttccacctcctcttcgaagagtaagtctccaaacttggcgatgagagcacggagtgtcgcaaacgcagtgagtccagataggtggtactctgatcacagttcagagaattcaccagcaccctcagaacacctcccagcagggctgtcttaacaggccaagagccgaggctcgcctggataatgttttcctgcatatccagggatgattaaatgtgcttctgtagccagatggccactgatcaaggcttcttgatctaactcggccttggtataatctagcttctcattagcttgccgccaatgtgtctgctctttcttccatctcaaattttcatttaggcctggaaatcggtcgtccctggagcccggggtcgcatcaatctccccttttggccctttccaaggcag

SEQ ID NO: 4744 - DNA, 642 bp, Homo Sapiens
  misc_feature (58)..(58): n is a, c, g, or t
  misc_feature (64)..(64): n is a, c, g, or t
tcttctcggacagctaatgccacctgaagaagctgtcgctatgcactgcagtgaaccntcagcncctgatggccagctatgtacactgtgacatcatgcccactgctgatgttctcggtcgagtctatgctgtcttgtcaaagagagaagctcgggtacttcaagaagaaatgaaagaagggacagacatgttcatcatcaacgctgtgctgcctgttgctgaaagctttggttttgctgatgaaatcaggaagaggacaagtggcctggccagcccacaactagtattcagccattgggagatcattcccagtgaccccttctgggtgccaactactgaggaggaatacttgcactttggggagaaggctgactctgagaaccaagcccggaagtacatgaacgcagtacgaaagcggaaggggctttatgtggaagaaaagattgtggagcatgcagaaaagcagaggacactcagcaaaaataagtagctacctactactggtggattcttttccttatagtgaatttaaaagtatcatcaagggtttaatattgggaaaatttctttttgccacattatctctgtttattcactttcaataaagttgatccatataaatattttaaagaggatgttaa

SEQ ID NO: 4745 - DNA, 568 bp, Homo Sapiens
agcaaaggatgctgaaggggaaggatcagcaaagtacaaaggaaagctgtcagtgcaattcacagcctgataagttctcacgacctggacccacgctgtatcaaaccagaggtgaaggtcaaaatcgccgccctttacctacctttagtttggcatcattttggatgctttgccacagctctgtgactttaccagttgcagatactcgcagataccgaaccagtggctcggatgaagaacaagaaggagccggtgccattaaccagaatgtggcttcctggccataagcaggggaataatttcaatttgaaaacaagtggaatagtgctgtcttcctatgcccttataagcagtacaacatgctgaacggcggacactacttcgcaacctcatgatctgcttccttctggatcatgaaaaaatgctgatcagagcctcattaggaagtgggattgctgacctgcgcaatcaacgcagctcaacaggaattttagatctaccttttcatctgtgtgttatgtttggagtataagggaaaacagagttctgaccaaagtcagtacccaag

SEQ ID NO: 4746 - DNA, 389 bp, Homo Sapiens
ccccagcacatcgtgggcacgggcaggctcagccgctcccacctccccacagaagcccaggagtgtgtggacgtctgagcccagctttctgcgtgcctcctggcccctcactcacggcagcgggccgcctcgcccccactccccctcctaccccggcaggggcttccggggccttttcacctggagaaacattcccactcccctttggcctccctgtactctgagctgtgaatatttttaaccctgtaaatacggccagctcttgtgacacagagactattttatcaattgtcagtcccgttcctttaccataggattctccacagtggcttccgactcaggctccaatggaccaaataaaagcgttttgttttgtaaaagtaaaagcc

SEQ ID NO: 4747 - DNA, 291 bp, Homo Sapiens
tcggcctcagattccatatttgaacaccagctgattgagagaaggggaatgagaagagctggatgagtttaaataactttcattgttcagattcctgaacaggagttgggataatggccatcttttctttcctatccttccccccctcactgtgaaaaataacagtccaccccaagtcatacactggacccagtgcctgcggggacaggactgtgggtttcttggtcacacctgtgttggtgctcaatgcagtgtagacatgttttcaaataaaacaaatgattgtgtaca

SEQ ID NO: 4748 - DNA, 449 bp, Homo Sapiens
  misc_feature (174)..(174): n is a, c, g, or t
gggccgagtcgtgcacgtcagttggcagggtcactgtccacagcaccccggttagacgctcatctgggccagcaccacaaagcctgctgagcgcacggcgtgtgtcagccttgcccacacccgccagccggcgctgtctctggccttccaccgatgacccccaaaacgatgccncagggccgtgggctctccccttgtgtgtgccagctcggagacgttcctctgagccccgcaagaactctacaatgagaactgaaccaacaagggagagcaacagaaagacagattccaggctggtggatgtgtcccctgacaggggttctcctccttcccgtgtgcctcaggcattaacttttctccagaggaaagcgattctactttctccaaaagtactgccacagaagtagctcgggaggaagcaagccgggtggagatgcagccctagtgag

SEQ ID NO: 4749 - DNA, 502 bp, Homo Sapiens
atattgtttcccctgaagatatgacctactagaactactcacatatatagtccaataattactgacttaataggtatggtaaaatagctgataataagtcagactctcaagagtttctggaccttgataattgacaaattcattgttttacatcctactaaagaacatgtgtgtggggagggggtggggaactggttcacaacataatctgaaggagatcaaacatctgtaaggacaggtacccagtgatgataatatatctgaaaacacaagccatttttattctttatcccaattaacttgaggtactctaatgatgaagcactcgattgcactatgacctccttgagtgatgtgcagcttggttcctctctcactttttgtttctttttaatatgcaaatgtgagtgtgcgatcttcagtgtgtctgcataagctaacttaagatgaatttaagtacagttttctgaaatatttctattgaaataaattacttaaaatt

SEQ ID NO: 4750 - DNA, 578 bp, Homo Sapiens
gacattggcactcgaactgacttcaagctcagctactgaaagagggccgtgatgcacctggacaacagtgaccccatcactcgggaccacatgggctccgttatggcccaggtgcgccaaaagctttttcagttcctgcaggctgagccacacaactcacttggcaaagcagctcggcgtctcagcctcatgctgcatggcctcgtgacccccagcctcccttagctgctaagcctgccttgcccaggggtgggatggcactgaaggccagcagacaggcctaggctggggcagggtcacggctggcctttacctgctcaggcccccatctctggggtgtttgggggtcagggagcagggagcactggccgtggtctacagcgtgtggtagtcagaaggtttagctgggcccagggcaggtattgcgcctgcttgggttctgccatgcctggagcatgaccctgagatcgtgacaccacttgagtggaattttccatgttcctttttacctctaatttggatctttttgtttttgaaaaacattgagaaattcaattaaatgcttttggaataaaaaa

SEQ ID NO: 4751 - DNA, 631 bp, Homo Sapiens
  misc_feature (528)..(528): n is a, c, g, or t
aggtcgtcagaggatcccactcgatccgtgatccagcatcgagcgactattctccttccctgcagccaagcccaaggagcccaccatggtgcccccccgggccaggaaggagcccaaggagatcactttcctcgatgccaagaagagcctgaacctcaacatcttcctgaagcaatttaagtgctccaacgaggaggtcgctgctatgatccgggctggagataccaccaagtttgatgtggaggttctcaaacaactccttaagctccttcccgagaagcacgagattgaaaacctgcgggcattcacagaggagcgagccaagctggccagcgccgaccacttctacctcctcctgctggccattccctgctaccagctgcgaatcgagtgcatgctgctgtgtgagggcgcggccgccgtgctggacatggtgcggcccaaggcccagctggtgctggctgcctgcgaaagcctgctcaccagccgccagctgcccatcttctgccagctgatcctgagaattgngaacttcctcaactacggcagccacaccggtgacgccgacggcttcaagatcagcacattgctgaagctcacggagacccaagtccagcagaacccgcagtga

SEQ ID NO: 4752 - DNA, 802 bp, Homo Sapiens
  misc_feature (479)..(479): n is a, c, g, or t
aagaccttgtacctgctgtacgcacagctggaggaggagtggggcctggcccggcatgccatggccgtgtacgagcgtgccaccagggccgtggagcccgccccagcagtatgacatgttcaacatctacatcaagcgggcggccgagatctatggggtcacccacacccgcggcatctaccagaaggccattgaggtgctgtcggacgagcacgcgcgtgagatgtgcctgccggttttgcagacatggagtgcaagctcggggtagtattgaccgcgcccgggccatctacagcttctgctcccagatctgtgacccccggacgaccggcgcgttctggcagacgtggaaggactttgaggtccggcatggcaatgaggacaccatcaaggaaatgctgcgtatccggcgcagcgtgcaggccacgtacaacacgcaggtcaacttcatggcctcgcagatgctcaaggtctcgggncagtgccacgggcaccgtgtctgacctggcccctgggcagagtggcatggacgacatgaagctgctggaacagcgggcagagcagctggcggctgaggcggagcgtgaccagcccttgcgcgcccagagcaagatcctgttcgtgaggagtgacgcctcccgggaggagctggcagagctggcacagcaggtcaaccccgaggagatccagctgggcgaggacgaggacgaggacgagatggacctggagcccaacgaggttcggctggagcagcagagcgtgccagccgcagtgtttgggagcctgaaggaagactgacccg

SEQ ID NO: 4753 - DNA, 599 bp, Homo Sapiens
actcgatccgctgatccagcacagcatccaggggctcgctcttctgaatcagctgctcccccaacacaatgagctgatcaatcttgttggtatttaatgtaatttcctgttggaagccattcagttggcgcatcttgtcatcggcgtcactctctgagaagtgctccacgttggtcagctgcaggtccatctctgtgagccacaccagaatgctctccctggtgccctcaaattcttccctctggctggtgaaatgcctgagtctccgcaggacggctgtgacccgccttctgaaggttgtcccagcgctggttgccctcgtggaccatctgcttcagcctgctggccgtgtctgtgcggttctcccgggccagccgccggtactgcttgttgatgagctccagctgagtgagccgctcatgaatctgccgctgaaaggcctcaaacctcttcagttcctctttggcactcgtgtacaacacctctgaggaattggggcaggctgccgtcctctcagctgacttgagccagtcctcaaagcgagaatagtcgtctaaaaacttctgccacaggcgccacgtctcctcgattctgatggg

SEQ ID NO: 4754 - DNA, 709 bp, Homo Sapiens
gcgggaagctggagtcagtcacctggaaggggagttactgaggcaagagcaaacggaagtgaccgcagcgctggctagggcagagcagtcaattgcagagctgtcgagttctgaaaacaccctgaggacagaagtagctgatcttcgggctgcagctgtcaagctcagtgccttaaatgaggctttggcgttagataaagttgggctgaaccagcagcttctcctagttagaggaggagaaccagtctgtgtgcagcagaatggaggccgcagagcaggcgagaaatgctttgcaggtcgacctggcggaggcagagaagaggagggaagccctgtgggaaaagaacactcacctggaggctcagctgcagaaagctgaggaggctggggctgagctgcaggcagatctcagggacatccaagaagagaaggaagaaattcaaaagaaactaagtgagtcacgtcaccagcaggaggcagccacgactcagctggagcagctacatcaggaggcaaagcgacaggaagaagtgcttgccagggcagtccaggagaaggaggccctagtacgagagaaagcggctcctagaggtgcggctgcaggccgtggagcgtgaccggcaggacctcgctgaacaactacaggggctcagctcagccaaggagctactggagagcagtctgtttgaagcccaacaacaaaattctg

SEQ ID NO: 4755 - DNA, 437 bp, Homo Sapiens
ttggcgttcagaggatcccactcgatccgctgatccagcagatggtcgcgaaaatttggtaagagtgtaaaaagtatctgtaagcccgtatctgcgacattcctcatagtatgtttgaaagcccaaatgatggaatccaaaacaagtttaaactgtgtaggtggaatagcaaggaatgctgggaaacaatgagaattgacagcctgaagtagtaagaaaaagttcgttctatgttcaggatattcttcaaagtccttatttatcatattcaatgtgcattcaaaaacagcatcaaatatttgaggtatttcagctgttatatgtccccctaacttgttgacaattatggccatagtactaagcacttctggttctctagcagctgggacatttctctgataatcaatgagaactgcatccaacaggggtaccgagct

SEQ ID NO: 4756 - DNA, 302 bp, Homo Sapiens
tttgtggtgttcacaggatctcactcgatccgctgatccagcactctagttatacagtttcaacgcaatacagagttgagccctgcattttcacatcagacttacataaccacctagacgcgctttatgcccaataaatccggataacgctcgtgacatacgtattaccgcggctgctggcacgtatttagccgtcacttcctctgttggtaccgtcatttctttcttcccaactgaaagcactttacattccgaaaaacttcatcgtgcacacagaattgctggatcagcggatcgagtgg

SEQ ID NO: 4757 - DNA, 509 bp, Homo Sapiens
ttcacaggatcttactcgatcgctgatccagcaagttttaactatggccaaatccaccaatcttaaacttggtgcacccttcccgctctgaagaacagtgagccagccggccagggtgcgggtatctcctacctacccgggggcccctcactgtatgttgactattgacaaatatttattgtgtgctggctgtgaataggacttgtatattgagcacttaggtgtcatgaaccatgctggatgttttgaccatattatcccctttaattctcacgacccaactctgtggggcacttttacagctgggaaactgagggttcaaggggttaggtatgggacttgcccaaggtcataaaggtatgtggtagccagagtccctgttcggcacagacctgttctttgctgtcctggccagtgttccaggccttgcggacatagctgtggctgaagcagggctgtttctgccctcaggcagattacatcctggcagaggggagagctgggcaaca

SEQ ID NO: 4758 - DNA, 599 bp, Homo Sapiens
gccatcaaccctaaatttattatggaaacagaattctagatttggacctggtggttagagatgaagatgggaatattttggatccagaattaactagcacgattagtctcttcagagctcatgaaatagcttctaaacaagtggaggaaaggttacaagaggaaaaatctcaaaagcagaacatagatattaacagacaagccaagtttgctgcaaccccttctctggccttgtttgtgaacctcaaaaatgtggtttgtaaaataggagaagatgctgaagtcctcatgtctctatatgaccctgtggagtccaaattcatcagtgagaactacctggttcgctggtccagttcaggattacctaaagacatagacagattacataatttgcgagccgtgtttactgacctcggaagcaaagacctgaaaagggagaaaatcagttttgtctgtcagattgttcgcgtgggtcgcatggagctgagggacaacaacaccaggaaactgacctcggggttgcggcgaccttttggagtggctgtgatggatgtaacagacataataaatttagggtgatggaaatcctctgaacgccaa

SEQ ID NO: 4759 - DNA, 576 bp, Homo Sapiens
  misc_feature (412)..(423): n is a, c, g, or t
aaaagacggatggcaggatccaaggggctagctggatttgtttgttttcttgtctgtgtgattttcaaacaggttatttttacgatctgtttccaaatccctttcatgtctttccacttctctgggtcccggggtgcatttgttactcatcgggcccagggacattgcagagtggcctagagcactctcaccccaagcggccttttccaaatgcccaaggatgccttagcatgtgactcctgaagggaaggcaaaggcagaggaatttggctgcttctacggccatgagactgatccctggccactgaaaagctttcctgacaataaaaatgttttgaggctttaaaaagaaaatcatagtttgaccagtgcagtttctaagcatgtagccagttaaggaaagaaagaaagnnnnnnnnnnnnggcctggatactgcttttgctgtctctgttatgagatggaagacttacatgtttgtgataaaaggggaccatgagaatgaattggcttggcttactttccccctgaaatcctctctcctgcagactgtcttgaagacccgtgaccgggctacg

SEQ ID NO: 4760 - DNA, 496 bp, Homo Sapiens
ttttgagtttttcaaattgctaatttaatgtataaaaagcagctaaacactggtactttataaaaatgaaacagcattttgaaacaaatgttacagatctataaatattcattatatagaataaaccctagttacttgcatgcaccacctcaaatcatatttctttacactgacctattatatacacaaagtatacagtggttaatgatcttctcttctgtttgtttgtttgtttgtttgttaggaaatttcctcaataagccagaaaaccttaggtattattttcacaaaagttaactcaggagaaattgtaaggaagtccttgacccatggagaaggtcactgtttgtttgtttgttagatacgtgtgtctgtcataaaacaaaatgacaccagtaattacttggtaatttaaaaacaagttcataaaaagaaaatacctgcaggtaatttttatggtcagttatattctataacctgaacactgaaaactacc

SEQ ID NO: 4761 - DNA, 346 bp, Homo Sapiens
ctttctgctttgttttgtaggacttgttctaacatggaaaacaagtccagaagactctcctctgactgttacctttgccccaagccaccccaaacttttatgctcatgttttattaaagcaggtgctccctggaatctctgggacatttttgaggcatttgaagcagaatatagagtggtctcatctccttccttaatcttcctggtggttgggatgttccacttgtatcatagatttttttattacagatatgctccactgtttttaaatgtgaacttgtgcgcaaatgtgcagattcaatgttcttgttacagattgaataaatttttattttgaagaaaaaaa

SEQ ID NO: 4762 - DNA, 322 bp, Homo Sapiens
gtcaggaaatataaacttgaaagtatgtagtcagctcttgtaatactcatatttatgattgtcctatatgaaaaacaacttcagttaaaactataatgtgtgattctgtataacaaggtgatgtctgtttcccagggctcagacctaatccagttataataaaatcaattaaatgaaatattctatagaatcgatctatgcccttgttaatctccatccatataggagtcacgttctttaagacagatggtggtagttatttttgtggcatggttagatttgactggttttgcagaagattacagttatgtactgcataatg

SEQ ID NO: 4763 - DNA, 496 bp, Homo Sapiens
ccaatctgatggttccttgaatttttatggaatgaaaagggagcctgacatgccaggtgctctgggttgagggattgttggagtcagatctccctgcaggaaagcccggggcagggggagcagcctcacccctcacaggaaccacagatacacccacaaggtgagctgcaggatggatgctgcccacctccaccctccacatcctctgtaaatgttgctcctttctacaactccaaccagatatgtagatgtggcgaactacgtaaaatacggatcattcatcacatcaaaacccactgcaggacaccctggtcaacaaagaacccaatcacatccccatcaactacatagtttccaaattttccatctccagaaaaataacaataacaatatacatgaaaatcgatgtaatttatctcatacataatttcatgttgataacgtgaaaatgatagtattttgctctactgaaataaataaaatatatatatatctg

SEQ ID NO: 4764 - DNA, 380 bp, Homo Sapiens
gctgtgctcagaggatccccatcaaccctaaatttattatgattacagccactattagatttcaaaagggttcatcagaaatctctgaggtatatgatggggaaagaatattttgactaccactttaacaggtctgctatttaataatattagtttctttttaattgatgtttcatggacatccagaatactagctataaaatcatatatgctgcataatgcaagcaaaacaaaagcacctgtaaatattacagaagactatacatgtatgtatatcattgccataaaatacctatatacatatacgtatatacacacataattgttttcacaaccatgatagtattacttacaaaagcataataaatttagggttgatg

SEQ ID NO: 4765 - DNA, 148 bp, Homo Sapiens
gtcagaggactccatcaccctaaattattatgaatggaattacataatatgtgactcctttggattttaagttgaggggattcataaaaggtcagaagtgaaacattcataggaagtagttgattgacccaggtgtagtggctcgcag

SEQ ID NO: 4766 - DNA, 585 bp, Homo Sapiens
tggagtgttcagaggatccccatcaccctaaattattatgatagttcatttattttggcatgctatatgataccagctgcactaacatgctacagtttacttaatcttctgtagtttgttctttgggttttcaatttgagttactgtgaattgtgttgctgtaaacattttttgtacatgtgcaagtttctcctggtgtatacctagaagtagaatgagtatttcatctaatatgtaaatgtgcaacttttgaaggaaatatccaaacgttttctgaagtagctgttcaaatttgcatttccactagcaatgtgtaggagttgttacaaagccacatattataacacgtggcattgctaggcttttaaatttttgtcagctaattggttccaaaatgctacttcatttttgtcttggctcatgtctccctgatcactaatcatgttgaaatgcccttcatgtgcttagtggccatatgtatttcctctgtgaaattcttgtttatgttattttccaatggggttaattatgctttttttacaaaaaatttattgatacataataaatttagggttgatggggtac

SEQ ID NO: 4767 - DNA, 574 bp, Homo Sapiens
gctcggtaccccatcaaccctaaatttattatgggctaaagatttgaatacacacttcactaaagaagatatatgagtgaccattaaacacttgaaaagttttcaacattagttgtcacagaagcagaaatgaaaatcacaatgagttaccatttcagacccactagaaaggctaaaatacaaaagacaacaccaactgttggcagggctgtggagtcagtggaagttgtaggtagtacgggtggaaatgaaaatggtagaaacgctgtggaaaactatgtggaagtttcttataaagttaagcatatacttaccctgtgatccatcaatccccctaatcgttcattcataatcaatccttagcactcacatgttttccctgcccccatattttctctgctctttattttactattctcaggtttcttctattctctcattttctatcttcaatggattctttcaaactaaccataaaagactcatttcttccacattcattctaggtggtatatatgtgatgccaaaattataatcatcataataaatttagggtgatgagatcctgtgaaca

SEQ ID NO: 4768 - DNA, 376 bp, Homo Sapiens
cgttcacaggatctccatcaaccctaaatttattatggccaatatggcagtaggtttcgggggtggatcagagaaaaggaaagacggatagccacatagttgaacaacatatagcacagcaaaaaaacagactagagaaagggataactgggatgggaaaggagcccaaatgggttctaatactgataataaagtactctagttgctttccttccttactagaggctatgggcttcaaaatagcattgctgcctaaaacttcaaatatttaaaggccaaatagctaattcctcttcatagccttaaacctgtaacctctctttctgaaaatgtggcatataagcacctatgtcataataaatttaggatgatggta

SEQ ID NO: 4769 - DNA, 436 bp, Homo Sapiens
  misc_feature (290)..(338): n is a, c, g, or t
catcaaccctaaatttattatgtgtttggtctggacttctatgtccacaaatttctaggattcatttgcaaaatggtaagttaattttattctctcaaacatgagcaaagcatcaaggaaaaggatcttaaaaggtagtgtgacattttattctataaaattcccaacagcagaatctgaatgtctgtacacaatcctgtataccacctaactttaaaaacttttaaatgatataggtatttgtcaccagatggcatgggctataaaggcaggtaccttgtcttatttannnnnnnnnnnnnnnnnnnnnnnnnnnnnnnnnnnnnnnnnnnnnnnnngtatcacatattcaccatatgagtaattataatttaaggtggctttagaatttgagctaattatttcctttcgaacttattctttcagtctttcttgt

SEQ ID NO: 4770 - DNA, 653 bp, Homo Sapiens
tgaggacaaagcaagaaggcacctgtcttgaaccaggaaaaagaccccctacagggacccaatcacctgacaccttgatcatggacttctggcctccagaactgtgagaaataatgtttgttgtttaagccaccctatctaggatattttgttgcaagtagctcaatagagactatagatgttatgcttgttagtagtactctaaggcaggcagaaccccaaattatgagttgctgctgaattgataccaggttctgtagcagttgaagaactagttatcaaaaagtgagaaggtaactgagagtactattatctacgcatctctaaaaaacatatataataaattgttaagtccatgttttttctggattcattataaagctttaactttgcaacagaataacattaaatactccctataaaatttgtgaaattctcctctccatgtaaactcagacaattcaagccatggcagatttgttattattttaaaataacttagggtgcgttcatcttcacagcatatgtggacaacagtgttccataaaatgcagtacttgaaaaagaaacacatattcttggaaatactctatcacactgtgccagcaatgccatctatcatatgcatccataataaatttagggttgatggc

SEQ ID NO: 4771 - DNA, 165 bp, Homo Sapiens
cagaatgatctgccaccctgggatgatgcaaattcccaggcctcccagacctactgaatcagctgctctgggaatggcacccaggagtctgcatctccagcacatgaatacatgagaaccactgctcacaaatgtaaaaagttagggagatcctgtgaacacgca

SEQ ID NO: 4772 - DNA, 578 bp, Homo Sapiens
ttgctgtcccagagtatccccatcaaccctaaatttcttatggataccctaacaattaataagaaaaatatggaaattttaggagaagaaaatgcttcttgaaaacatatgaatcagcataaatcagagaggaaatctgaatagttaacaagaatgcattataataagaaaaataaacagttaaaacatccgtatatcattttatgtccatattgttggcaaaattagaatgatgaatagtaacacgtattggtaaagatactgagaaaaagaatgcttatatatcgccattgggagccttaactaatgaaacaattccagaagacaatttgttaatatctactttgcttaaatatctatatacctgacaacccagttattttactcttggtatatatattgcaaataattctcataagacataagtgaatatgaataaggacatttatttgggttactggctagctgaatataagctgggttcctcttactaagagaatacaccattaaaagttggtggatgcagtctagggaaaacggtgaagcactgaagcaacataataaatttagggtcgatg

SEQ ID NO: 4773 - DNA, 877 bp, Homo Sapiens
agccatcctctccactcccacggctggggacaatggccacttactacctgtgcactttgccactcgggacacctggatggtttctcttaggactttgcccacctccttctcatggcacttgctgtggaaaatgcctggctggcctcgtggggcctgtctcacttttccaggagacatgacccactaacgtggcaactttaacccaaaggcccctcagacatgttacagcaaatctggagccacagacaggttccctccattggcagcccattgtgtttgaaattccatgtcgggtttacttggaatgaaagatacttgaattattgtgcgcctgtgagcgcccagcttctgtttcatagtcttaacaggtggccattgtcgtgaaacgagtgatgcctgaagatctcagtgatgtttgaaccttctgtgtaactttttattaagtctttgtatctctcgactgattaataaagaagagaaacacgtatctgtcttagttccttttactccagtattcctgaagttttgctgagaacattgtgagttgttggtgttttgcccagaacatccacgtcttacagagcatgaccttggtgctaaccagatctgaagtaaggaggagcccactggtggccgtggggtgtctccttcctgcatggagctggaggatgaaggcaggctagcacagcatttagaggcactacctcttgatactgggcagatctggattttagccctactaccgacctttgtatgcctttgggcaaatgacctgccttagtcttgagctgcactgcctgtgaatggacacttatgtgcacttcaaagtagctggaggactaagctatgtagggcttttgcggaatcctctaagtca

SEQ ID NO: 4774 - DNA, 468 bp, Homo Sapiens
gcagaattccagccaaggagcctgtaattgacaacactggctcagcccagtggctgcttcacatggtttctctacttctaatgacatcaatttctctcatgccagtagtgccttcctttggcgagcaactatgcaataaggacatccgcttccttcggcgcttgatatcagccaggggattaacctgtgcagaggtgacttgttagtcatcagttactgcctcaccaaagtgaggtcaagttcacagcaggtttttgcaaagctacgtttttattgtcagcataggaagcattttcttacacatgcaatggatggttcactttagaggcacatctgaccactatgagagtttgtgggaggcatcagtgcacttgggttacagacaactgaataaagtacaaatacatcattagaaaagcagagggtgtgtgctccggtgacgttgcaataaagcaattctttggcata

SEQ ID NO: 4775 - DNA, 570 bp, Homo Sapiens
  misc_feature (353)..(370): n is a, c, g, or t
ttcagcacattgagtgaatgtgcatatgatagaatgttttaagtatcagcaaagcattcatggatgcctgcttttcattctcagaaggctaaacctgttttgggtatgatgctacttcagaacatattgtcaggcacaagatttcttctaataagtggtttatttaaagtcaatttcggtggactgtggaattgaaaaacaccaaaggagtcttcttgtctggagactggatagttccagttttaaatacctgtgcccataagtatcccatttcatgaatgtgtgttggcatggggaagaaatttccctgctcttcgagtggagcgaaagcaattggttaagctgtagcagcnnnnnnnnnnnnnnnnnnaaagtaataataaaacttgaactgaaaaaagataaaacttgaactagaatactactcttgtatgcttagaatgtttatagtgttaaatgtttatgtggggttgtcaacatttttattatttatagttgaattatgttttgttaaatccatattgtttattatttttatattttgaaaatttttaaaataaaagtcttact

SEQ ID NO: 4776 - DNA, 669 bp, Homo Sapiens
gtaaggtgctctcgaggattcgtgtcatcccccttcgtggggggaaaaataaacaaacgttaaaacctcaagtcctcagtaggaaggtagattacattaggtgaaattataggtaatctatgtatgtgctaactggggttggaaagaaccttacagagcatattacctgataaactggagtgggttagggagaacaaactaataggattatggtgtctcctagttggtacctgggagcaattgacatgcccccttcagaaccttaactgttagtagcagtggctgtaacaacacaaaccagtgaccagagataacagcttttaggccaagctggcctgacggtatggctgcaggaagtgactgagcagtagcggtactcagccagaccaagacggagagggaagagtccacagctttctggaagctaaggcattctggtggtagaaaagtgtgccccaagccttcatggacgagttataggtcttaagattagtctcctcttgtttggattccatacttgctaaataacctgataataacctggttttccatgtaactgcctctaggaagaaaatgtactgttcatgctgacacagatatttcagtctgcatggtaaaagttctaaatcttactacaaaataataaactggctggtttataatgtgaaa

SEQ ID NO: 4777 - DNA, 564 bp, Homo Sapiens
gatggtatatgtgcataataacttggaaagctagatatttattttcgcaatgctacaattaaaacattttgaggacttttaaaattacctttagagccaccatgcctggcctagatattttttattctttccaaaatttaattctccctgaagttaaaaattttcattactgagaatgtacatagagatgtgtcacaaccctttagtaattccaaaaggtgtttcaaaaattttatacaatgataatcactgttgaaacaggtgtatattctcctcagatcatgactgaccaagatgatattccaagaagtaaactactggcctttatagagtaggatgtaggccattttcattactgataacatacttttaaaagaaatgtttacagatttaaataagttaaaacatctaaatgcttttaaaagagcacctggcacattgcaagttattcattattaattagtagatgaatcatatatctggagtgcacccttgctctatatgaaagcttccctaactatagatatataggtgatagactgacaataaagatttgaggaaaga

SEQ ID NO: 4778 - DNA, 867 bp, Homo Sapiens
gtgagtgttgccaagtatcctgaggagacatttatgaggggacaaacacattgtgttcagataatggaaatacagtgaaaggttcatgcgttcctgttcatacatttcatttgacttatgtcttacagtttggaaataattttgatagtctaattttacaattaggagagatggagagagattatctctattttacagatgagaaaactgagccccagagagggacagtaacttgctaagatcacatagcaagtggaaaaagcacaataagaacccaggctttcagactcaaatcctgtgttctcttttcatccccctttagtttcatctttcctactgccaagggtagggaagctgtcagggacagaaggttggaatgggaccccaggacaagactgagcagagatttgaatgtggggctgaatgtaggggagctcagaaggctcctgggtggccccgagtgttagggagatcatccgagttagggagatcattccagtgcagaggcaccatcttccccatctacctgggcaaggcaaggaggcccaaggggaggttggggcaacaatagtctggtcctggactatgaaatcacaacccgatacagggaaggaagacccagaagaccaggtgggaaagaaaagggctggctccgaattaataagagcctacaggagcctatgtgttctgctggggatcacagaatgttctacatcttagaatgtgattcatcaaaagccattacaataaaaatgttgggtacttaaacatggcttagctttatttcactgatttggagtatagcacccctagtcataataagcatattctaacaggcttcaaaataaagaaagaatcactaaggtt

SEQ ID NO: 4779 - DNA, 1512 bp, Homo Sapiens
ctcttccacaaaacatgcagttaaatatctgaggatattcagggacttggatttggtggcaggagatcaacataaaccaagacaaggaagaagtcaaagaaatgaatcaagtagattctctgggatataagaggcagccgaagagttcacaagtgtgaagcctggaagccggcgggtgccgctgtgtaggaaagaagctaaagcacttccagagcctgtccggagctcagaggttcggaagacttatcgaccatggagcgcgcgtcctgcttgttgctgctgctgctgccgctggtgcacgtctctgcgaccacgccagaaccttgtgagctggacgatgaagatttccgctgcgtctgcaacttctccgaacctcagcccgactggtccgaagccttccagtgtgtgtctgcagtagaggtggagatccatgccggcggtctcaacctagagccgtttctaaagcgcgtcgatgcggacgccgacccgcggcagtatgctgacacggtcaaggctctaccgcgtgcggcggctcacagtgggagccgaacaggtacctgctcagctactggtaggcgccctgcgtgtgctagcgtactcccgcctcaaggaactgacgctcgaggacctaaagataaccggcaccatgcctccgctgcctctggaagccacaggacttgcactttccagcttgcgcctacgcaacgtgtcgtgggcgacagggcgttcttggctcgccgagctgcagcagtggctcaagccaggcctcaaggtactgagcattgcccaagcacactcgcctgccttttcctgcgaacaggttcgcgccttcccggcccttaccagcctagacctgtctgacaatcctggactgggcgaacgcggactgatggcggctctctgtccccacaagttcccggccatccagaatctagcgctgcgcaacacaggaatggagacgcccacaggcgtgtgcgccgcactggcggcggcaggtgtgcagccccacagcctagacctcagccacaactcgctgcgcgccaccgtaaaccctagcgctccgagatgcatgtggtccagcgccctgaactccctcaatctgtcgttcgctgggctggaacaggtgcctaaaggactgccagccaagctcagagtgctcgatctcagctgcaacagactgaacagggcgccgcagcctgacgagctgcccgaggtggataacctgacactggacgggaatcccttcctggtccctggaactgccctcccccacgagggctcaatgaactccggcgtggtcccagcctgtgcacgttcgaccctgtcggtgggggtgtcgggaaccctggtgctgctccaaggggcccggggctttgcctaagatccaagacagaataatgaatggactcaaactgccttggcttcaggggagtcccgtcaggacgttgaggacttttcgaccaattcaaccctttgccccacctttattaaaatcttaaacaacaaaaaaaa

SEQ ID NO: 4780 - DNA, 676 bp, Homo Sapiens
  misc_feature (23)..(23): n is a, c, g, or t
cggcatcggaggctactgcaggnacccatttggcggggccacagccccccaatggcgtaatgccgtcgttaagtgtgtgaggtcccaccggctgtggagcgccatgcagttcgtgtactgcacccctgtgggaaccaacaagttcacagctgagcagtgtttcggcgatggcttgaactgggctggttgctccatcattgtcctgctgggccagcagcgtcgctttgacctgttcgacttctgttaccacctgctaaaagtgcagaggcaggacgggaaggatgaaatcattaagaatgtgcccctgaagaagatggccgaccggatcaggaagtatcagatcttgaacaatgaggtttttgccatcctgaacaaatacatgaagtccgtggagacagacagttccactgtggagcatgtgcgctgcttccagccacccatccaccagtccttggccaccacttgctaagcagaagatcctgcagacccttatctggaggaggaagagaagcaggagagagaaagccacagccagcctgccataggatccaactggacaacgtgtgggatggacctggaaacaagcacctccccaaacacatcaccactccctagggcggggcctgtgcatgctctcccatgacatctccatgctggtttctccatagcataaatg

SEQ ID NO: 4781 - DNA, 578 bp, Homo Sapiens
  misc_feature (44)..(216): n is a, c, g, or t
aatcatggacatatcggtcacagacgtccacagaggacagctannnnnnnnnnnnnnnnnnnnnnnnnnnnnnnnnnnnnnnnnnnnnnnnnnnnnnnnnnnnnnnnnnnnnnnnnnnnnnnnnnnnnnnnnnnnnnnnnnnnnnnnnnnnnnnnnnnnnnnnnnnnnnnnnnnnnnnnnnnnnnnnnnnnnnnnnnnnnnnnnnnnnnnnnnnnntgtgatagatgtgtagaatgctacagtcactttgggaagcagtttagcagtttcttttttcttccttttttatggtaaaatttaccattttagatctgggttttcttcccttcattctcttcatatggtatatcacactgatcttcatgtgcggaaccaatcttgcatttcagaaatagattccacatagtcattgtgtataatcctttaacatgctgctgagtatggattgctagtgtaacattcaggatttgtgcatccagtattcacaggggctctcgggctgcaatttactagtagagtctctgtctggcttaatcaggataatgctgcgctcatggcataggtacggaagtacttcc

SEQ ID NO: 4782 - DNA, 365 bp, Homo Sapiens
catcaaccctaaatttattaagtatttcatctttgaaaatgtcttcacaccaatagaaattgccaaatgctggtattaatccacaagcatgagtttaactgaacatatttggttagaaggcatttatagaattctgttaaatttgtatcttgatatttgccttctagcatgtcagtatattgtagattaatactataggaatgaaagttatatgaaagcgccttgctaacttaagtaggcaaatagattttgagataaagaaatttcctttgcactgcgtatccagtatgaaaaatgctgctggaagagcagtttgagcctggacaacttacccataataaatttagggtgatggagatcctcga

SEQ ID NO: 4783 - DNA, 503 bp, Homo Sapiens
tcagatggatccccatcaaccctaaatttattatgtaaacaaactacaacttgaccaggcagtatattcttgtaagaagaaaggagtcttctccaatcatagcagccagccttcagccaggggcagactgcagactgaccagatgtgtccaaattagacaaaggttgagctgtaaccaatcagcctatatccaatgccacttcctttttctgtttataaacgctgcttgcccactgttgctgggtggaggtctctgaaacctctctaatgtagatctctcatttaatggggagggtttggcctttaatcaccatcatccctgaacaaagactgaccaattggactcaaatgctattgaactatctttattgcatggactttgagttatttgattttgactagttgtttgttgaaactcctgataaggagtgtacttcagtttcttggcattgtccactcatagccatcataataaatttagggttgatggggtaccgagctcg

SEQ ID NO: 4784 - DNA, 551 bp, Homo Sapiens
tcagtgtatcccgatcaaccctaaatctattatgtgcagtatttttctacttccttagcaattaaatggcattggcaaacagtgggtaacacacgatggcagtggattaagcagaaattgagcagggaagtgggattatggtatgttcttcctataaaaatttatataaaataaaaatcacatcaaggtacctacattgcctattgctagataagtggagtagaaagacaatatgcagtggagagaatcagtaaaactaagagttggtccttcaaaaagacgtgaccaaaaatatactagagataaagtggatcaggaaaaggagataatacacataagcaattttaggaaagagaaaagagacttaggtatagataaagcagacatttaaaaaataataggatattatagacaacttgatgccagtaaatttgaacatacaggtgaagcaggtacagtactagaaaaaagacatgttgctaaagctgtctcaagaaaacgtgaaaaacggagaaaatctcataataaatttagggtagaatggggtaccg

SEQ ID NO: 4785 - DNA, 684 bp, Homo Sapiens
ccctgaaaccttagacagatcgaatcgagctcgtacccatcaccctaatgtatagcaaattttaaataccctatctagagtcatgaggcagtcttatcgtggttttcctgaattaataaacatcatctatcttcccttctatgcaggatgttttagtaagcttgcaaatattattaaagattgcttttctttttgaagactgagatattaaaatcagcccaaccctgttgcactgtaatctcgaatatcacatcaggttttaataaacctcctttttgcagcacacatgtgcttgagacttcatggaaaccaagtcagaagagagaagggattactttagatgactttaaaatatgcattgtttgaaatggcctctggtgaccagctttcatgaatggctggctttacttgtggggcccatcatccggtttaattatatcagctcctttgtgtgacaagtgctgttcttgcatatgctgagaaatgaaagtttaaaacaaagtagagtaatgagtgagaaaataaattctggaagtggaacacccctgggtgtttgtacggaagaattctaaggactggtccacctataaacatctattctatagagatactccacagtgacagtaagtgtaaatttgccttaaatgtccctggacctagatcataataaatttagggttgatg

SEQ ID NO: 4786 - DNA, 191 bp, Homo Sapiens
gtatgcaccctgaaatatattatgccaagaaatcatggaactaaactgccctcacatcacagtctatgtctctattacctatggatggtcaatgactaatgctttgagggcattttacctgagaggagataccacagctacttctgtcttggagaaaccagccccttttcccatttatatgaaccacaaaa

SEQ ID NO: 4787 - DNA, 452 bp, Homo Sapiens
  misc_feature (44)..(324): n is a, c, g, or t
cgagctcggtaccccatcaaccctaaatttattatgattattannnnnnnnnnnnnnnnnnnnnnnnnnnnnnnnnnnnnnnnnnnnnnnnnnnnnnnnnnnnnnnnnnnnnnnnnnnnnnnnnnnnnnnnnnnnnnnnnnnnnnnnnnnnnnnnnnnnnnnnnnnnnnnnnnnnnnnnnnnnnnnnnnnnnnnnnnnnnnnnnnnnnnnnnnnnnnnnnnnnnnnnnnnnnnnnnnnnnnnnnnnnnnnnnnnnnnnnnnnnnnnnnnnnnnnnnnnnnnnnnnnnnnnnnnnnnnnnnnnnnnnnnnnnnnnnnnnnnnnnntactattgtttttcagtgtttgtcatttgagtgtaagtaaaaccttttttccccttgacattttagagatggaagcactttatttaatttatgaggtagctcacccacacataataaattagggtgaa

SEQ ID NO: 4788 - DNA, 143 bp, Homo Sapiens
ccggccatcaccctaaatttattatgtgaaggtcagagtataagagggcaaagtcattagtaagagtttagcttgagcttttaatcaataaatcagatacgaaaatgacccaaagacctagtgagaaagattacatggaatta

SEQ ID NO: 4789 - DNA, 401 bp, Homo Sapiens
gaggactccatcaccctaaattattatgaaattgataacattcagatttcttctttactgtatattaatgtgattattcatgcatactcttcctctctgtcagtctcttgggtataaggctgttgctattttctaaatagttaaataggtttgagtgtaagttagctaattcttaaaatgtaccttaaccaagccatcatatttgtcttctcaaatatttgtacatgcagattttacatatttagtttttgactttttgcagatttgagataaggctaatacttatacataagcacttcagattgaaagcatgatcgtatttagcttttaaaagagattaccttatttgatgctacttacataataaatttagggttgatggggatcctctgagacagcct

SEQ ID NO: 4790 - DNA, 406 bp, Homo Sapiens
agttgttgctgttcagaggatccccatcaccctaaatttattatgatagtgaagtaagttgtaagcacaacggaaaattccgacaggaaaggatgtgtggggtggatgtgtgatcaactgaagaggtttcctaggaaggtagaaatcaaatgagatcttgagtaaaggtaacagaaaggaatactgttgcaataaggagtaaagatgtggtgtttaataatcctgtttaatctcaatgcatagtttatggagagactagtgtacctggaacagtggctgtatgttgatattgttgcaaatgatattgcataggaaagaaatgatctttgggtttagtttcaggtaaaacaaaaacaaaagaagtaaccttagccaatcattgatttggtgaagacttcagagaagc

SEQ ID NO: 4791 - DNA, 421 bp, Homo Sapiens
gaaaacagaattctccaactaaaaatattttaatggcagactgattacagtggtgtgggccagaaacaagggacagtgaaacacccagagacttgtatcagcaggaagccattgccattctgagccttgaagggcaaggagggaaacagtgttaccagagcccagtaagaactgctgtcatgaaggaggggccaccttgtaagagacatcattactaccagaactgtggtgccaaattgctggtgtctctctttggagaaaccaaccagatacatctgctggagaacccaggtgggcacagagaagggtggagagagaatctgggaagagaaatggagaataagcagcacagtgttattcatttctgtaaattcctatgtagaaggctcagtgttagaaataaagttattctactagttgc

SEQ ID NO: 4792 - DNA, 551 bp, Homo Sapiens
acgatggcgcagtgtaacgatgcactttggaagggagttggtgtgctatttttgaagcagatgtggtgatactgagattgtctgttcagtttccccatttgtttgtgcttcaaatgatccttcctactttgcttctctccacccatgacctttttcactgtggccatcaggactttccctgacagctgtgtactcttaggctaagagatgtgactacagcctgcccctgactgtgttgtcccagggctgatgctgtacaggtacaggctggagattttcacataggttagattctcattcacgggactagttagctttaagcaccctagaggactagggtaatctgacttctcacttcctaagttcccttctatatcctcaaggtagaaatgtctatgttttctactccaattcataaatctattcataagtctttggtacaagtttacatgataaaaagaaatgtgatttgtcttcccttctttgcacttttgaaataaagtatttatctcctgtctacagtttaataaatagcatctagtacacattca

SEQ ID NO: 4793 - DNA, 436 bp, Homo Sapiens
actagccttctgagcatttaaacccagccgtcattctctccccactccacgctccccactcctctgccacgttatgttacggcacaaaattaatttctgcccctgtgattgggccacggttgccaaggtaacagtggagctggagctaacttccttctttcatcctttccaatttttctattccagaagacagtcagaataatgcattctgtactacatcctgccttttgaaacctaaatgagttttcgttgatgaaatgttgccttctctgattcattcacaaaactgtggtggttctgaccacctgtgacgaggggggtcataatacttccagtgatccttttaatttagcaaaatatttgtcggtggagggaagtagataagaatgtattagtgtattttaaagtaataatgattaaagaataactaaatgac

SEQ ID NO: 4794 - DNA, 564 bp, Homo Sapiens
  misc_feature (43)..(43): n is a, c, g, or t
cactattgggaatttgccctccgggccaaggattcgcaacganggtggttctgaggcgggacacctactctcatactgggatgaggaatgcgccctaaatcactgaggcggtcagagaacaaactaggtttagagtcatcaagcttctgtctgtgccttctgggttcccgaggtccatctactgtaactttaattgctctgtgataggtagctacttggggaggatttgtgaagacggttatggtcaaggtgaaactcttgcctcgtccactccggcccacaaatctcagatcgttgaaccttgctacttggtttttcataacagcagaggcattccggagctcagcagaataattttcatcgttacccgccatgacagtaaccacagtcccatctggtacctctccgagggctaccaccttgaaggccacgggcagggtcttgttgcagcgccagtgcgagggcagcaccgagcacaggaagttggggctgtcggtgcggacgagttcggccgggtggtcggcgatgatctccaccatggtgcggttgtcgtggggcggccgc

SEQ ID NO: 4795 - DNA, 601 bp, Homo Sapiens
  misc_feature (341)..(454): n is a, c, g, or t
actaccctccctgtggagctgttcggtgtccgtcgagctagccacaccctgacaccatgttcaagggtaccggaagagaagggtgtctgcccccaacctcccctgtgggcgtcactggccagatgtcatgagggaagcaggccttgtgagtggacactgaccatgagtccctggggggagtgatcccccaggcatcgtgtgccatgttgcacttctgcccaggcagcagggtgggtgggtaccatgggtgcccacccctccaccacatggggccccaaagcactgcaggccaagcagggcaaccccacacccttgacataaaagcatcttgaagcttttannnnnnnnnnnnnnnnnnnnnnnnnnnnnnnnnnnnnnnnnnnnnnnnnnnnnnnnnnnnnnnnnnnnnnnnnnnnnnnnnnnnnnnnnnnnnnnnnnnnnnnnnnnnnnnnnnccctgggggggcccccccgcccctcaaaaaagttttcaaaacctttcgtttgggggcggcggcccccgaggggaaagggaacaggggccaatagtgggttccccaagaaaaccggggccaagaaaaagggggttggaatttcccccc

SEQ ID NO: 4796 - DNA, 318 bp, Homo Sapiens
cccaccaaacaagtatgcaaacagaaaccagttcaaagggggatggagtaaaagatgaggcagtagaaatgcctttgaatggttttctgtagctaattctctttaaattttgtcctgctttttttctttatgcagtgctaggtgttttaagttttctagtagtattgcttttgagttacagtataacctgagttactcctctgctctaacattgttgcagaagaactagtttattgttagccaggttgcttgaaaggttgagagtggagtggtttggcatttctgttttaaataaacatttaagctcttaatcagtaa

SEQ ID NO: 4797 - DNA, 897 bp, Homo Sapiens
gactctacaggatctttcgctgcgccgtcttgtcaattctgttactagaggactggcttatcttcacacagaattaccacgaggagatcattataaacctgcaatttcccatcgagatttaaacagcagaaatgtcctagtgaaaaatgatggaacctgtgttattagtgactttggactgtccatgaggctgactggaaatagactggtgcgcccaggggaggaagataatgcagccataagcgaggttggcactatcagatatatggcaccagaagtgctagaaggagctgtgaacttgagggactgtgaatcagctttgaaacaagtagacatgtatgctcttggactaatctattgggagatatttatgagatgtacagacctcttcccaggggaatccgtaccagagtaccagatggcttttcagacagaggttggaaaccatcccacttttgaggatatgcaggttctcgtgtctagggaaaaacagagacccaagttcccagaagcctggaaagaaaatagcctggcagtgaggtcactcaaggagacaatcgaagactgttgggaccaggatgcagaggctcggcttactgcacagtgtgctgaggaaaggatggctgaacttatgatgatttggggaaagaaacaaatctgtgagcccaacagtcaatccaatgtctactgctatgcagaatgaacgcaacctgtcacataataggcgtgtgccaaaaattggtccttatccagattattcttcctcctcatacattgaagactctatccatcatactgacagcatcgtgaagaatatttcctctgagcattctatgtgcagcacacctttgactataggggaaaaaaaccgaaattcaattaactatgaaagacgga

SEQ ID NO: 4798 - DNA, 950 bp, Homo Sapiens
  misc_feature (129)..(273): n is a, c, g, or t
  misc_feature (641)..(649): n is a, c, g, or t
aagtcgtagcatgagcagaacttactggaaaatacttaacaactgcttgagagtttaagagaaggaagggaacaaaaagtttaaacagattttattacaacaaaatacagtataaaaccccaatccagnnnnnnnnnnnnnnnnnnnnnnnnnnnnnnnnnnnnnnnnnnnnnnnnnnnnnnnnnnnnnnnnnnnnnnnnnnnnnnnnnnnnnnnnnnnnnnnnnnnnnnnnnnnnnnnnnnnnnnnnnnnnnnnnnnnnnnnnnnnnnnnnngccccccctcaacaacaaaaaaagtttcccatacactggcctgccccaaaacccactaacaattttagcaaaacagtccaggccaaagaggaagcatttcatgttcaataagaaacccagccattccgcatggctggttcctgagtggctctggtgatactctccagccacctgctgacattgagaatctcagacctcgggactgctgttgcggtaccgtgtgtctgacacctgccagcagccctttgctatctgcgcgcaggatgggggtgactgcccagacattcccgctagataggctctgatttccggggcagcctttcagatgcggcagacatacgacacctgtactttagagttttaagggnnnnnnnnntcagaagtgctggttagatagtaaaaacttaggataacttagaaaggctagttttagcttcctttgtggctccctggtgcaaaacaattagcagttatgcaatggacctgattctagtttattctaattaagaagtgaggccgggtttgacttcgttcctgaatacaatcttgagtaactgggaaagtctgagtgaaaggatggcctcattctctttctaatcttgctggtttcaaggttagaaaatggcattatttgatctgaaatgtttgagaagacacgaataaagttacttgggcag

SEQ ID NO: 4799 - DNA, 974 bp, Homo Sapiens
aaaaggttccgcttccggactcgggggtcggaacaagccgagagctaaagaggccggctgaagccgagccgggcgcagaaggagaaaagtctgcccaccggctaccgtatccaggacgtttcgaaccccccccggaaggttgagggtgctcagcttcttgacaccccccccacccactgtcccgtaccaggtggacagagtctgactccatcgttgttatgcgctagggaccaaatggcagtgctgggttcacccactcctccccgtgtgtcatcgcacagaagttgagggaaacgggagaatctgtgctgagaagactcagacccaggagcccctttcacaggcccctagttgggaagactggatgagagtggagcctccgtttcttttccctcttctatccttgttacttgaacaatctcagtctctaactggtgggtggggacatgaagaggtgtgggtccaggttaggcaggagagagaacttctttggtctcggagtttggggtctcaagaattcaagtagccccatctctctctcgggcaagcccaaagctcaggtcccatacgctacccttagatcctatccccagggctagggtgaaccatgccaaaggaaggggccagcttctctgtgtgtgtgtgtagcctgtctcctagtctgcctatgtctttctctgctatatgtttctgtcctgctgtctgtcaaaagtctcacagagagagggcctcagggagctgctgaggggtgctgagcctggctcagggagctgggacccctcccctccaacacacatactcacagtgctttcctccttgtccctcctacactaggagcaagaggagggggctccaatgacactccggggttttaagacccaaggcacattcaatgcaaggggagcaaggatgggacaactccatcttctgctgcccatgtgaaaaataataaaaatcaagagccattggctgcc

SEQ ID NO: 4800 - DNA, 645 bp, Homo Sapiens
tcttaggtaacagaaaaattcagatacaatttactgttaccattgggtgcacactttacttgctttattctatttattcctcaccatagccctgtgagatcagtatggttttttccagttagactttgccacagctaatgagtggcagcactagcatttgagtccaggtctatctgattcccagtcgcagccacttagccccagactgtgccgctttccgcatagctgtcctgccatggatattatcttggcctcctgggagtgatcttgcagaattgcataggagctagtccatttcgccccaagcaatttgtgttaaagaatgagatcgtgtaacatttattgctaggcaaaaactgtatctaggcaagagagggccttctgaggattctctgtctccttgagatagaacatgtggcaacttattttggcaaagtacaagctggtgcattattaacttgatgtgagtcaggatacatgctgtatgagtttttatttatgtgctgtcttgaaaccagaacatcaaaaaagtgaattaactgaagtaacttattatatctgttattcttgatttcagggaagtttaattagcattgacagcacctgtacagagatgggcaattttgacaatgctaatgtcactgg

SEQ ID NO: 4801 - DNA, 443 bp, Homo Sapiens
tctgtgggccagaacattggcattaccctccgttggctcctccactgcggtttgccggctcagctcctcctcccagcgaagcagcaccaccgtgaggctggtccggggcgacccaccctccacttggcagcgcagggtgaagttctggcccaccggctgccaaggaggcaggggtgccagctccacacgctccgggagccctgagagaggaggggaggatggcacttagcgggtcctgcaaacccacccactcaccccagggactggggaggagacagggtggtcctgccgagaactgtgagctttgagttaataaacttagagggcttagagctgggccagtcgaagcgtttgctattatcattagcgcagtgattatcatttcctgtgttgtcagataccttgcaaggcgctaaacaaaactttctgttctcaaagatggc

SEQ ID NO: 4802 - DNA, 686 bp, Homo Sapiens
  misc_feature (135)..(165): n is a, c, g, or t
  misc_feature (673)..(673): n is a, c, g, or t
cgcggctcttcaaactagaagataagcttttgagaatgggggttgtttagtcttcacattcagcaaattactgcagagtatataatgctcctgcttgtacctggtaagcactggttgaactggaaatgaaggttnnnnnnnnnnnnnnnnnnnnnnnnnnnnnnncatttgcacatgatggtgatggctaaacgtctgaggagatccatcaaggccaggatttggagtttgactgttgttttattaactagggtttgatgtcatctctaaagtctttgagcagttgctgcccttcttaaaggatgaaactttttcttaggctgcctgacccattttattgaaataaatgttcttaatatctgttttttcctcaaggtatctgatgagagggcagctaactttgaaaaccattcaggaaagcttggtgctacggccgagaaggcggctgcggttggtactgctaataaatcaacagtggaaggcattcaggcctcagtgaagacggcccgagaactcacaccccaggtttgggttttgctcattcctcatacagtgttcagtaaagaaagtaattacagaacagttctatacatctttgaatcttaccgtaagaggccagcgggtacgagtcgaatcgtatctggctagtgttcggaatgtaacccacaaaagngggggcgggacca

SEQ ID NO: 4803 - DNA, 656 bp, Homo Sapiens
tctccgcgggcctggatacgtagttctcccggtagaattccttctccagccgcgcaatctgctctcgggtgaaggcggtgcggtaacgacgcatctggtcactggcgctgcacgccagggtgccttgcgagccgcccccaccactgccgccgttgctcttgggggtctcgctccctccgttcggactgccgaccagcgcctcggagccggaccctgcacagcgagtccagagcacaggcgtgtacagacacagacacacaaacgccattgaagtggggctgtaggcctaaggtgggagggtgatttgggaagggacaccctgtcagccacctcagtaactgtttctgctagggtactgcggcctctggggaacccaagaagggaaaataagggcctgcccttgattgggtaggtagaggtctttggggaggccttcccttcctctaaggcatcctgggtacaggggttcccagccgcccttcccacctgccctggagcataggtgagatttctgcctcccgttggcagggcgtgcacttctgacaggcacatgagttgagatgcacctttgtgctagagggttgtaaactctgggtcaagtgcattgtagtatgctgggcattcagagagtttccttgctcttaagtgtgacgggc

SEQ ID NO: 4804 - DNA, 138 bp, Homo Sapiens
gaatgagatcttatcatttgcaataacatgggcagaattggagacttattatgttaagtgaaataatccaggtacagaaagacaaatatcctgttctcacttctttgtgtgacctaaatatcataataatttagggta

SEQ ID NO: 4805 - DNA, 476 bp, Homo Sapiens
tcagaggatcccctaaatttattatggaaatcttgaaacatacacagaagaaaatatgataatagattctttttttcacatcatccagctgcattaactctcaatgttttggcaatctctcgttttcttcctctgtacagtagcacacttttttattttggctggaggatttaaaagcaaatcctcatcctcatgtctttcgtgtctaagtaattctagctgcatctctgactgataaggacttttattttcagtataaatatccaataaagtcagcaattccttaataatcacctaatacctggtccattttgatggaaggaagcattcttgataatactacttaagagttttaggaactagtcaaatattgttcataataaatttagggtcaattaactggtatggttaccccactcttagtagataataaaaaggtaacttcttggttttgaattgcagtaaggggtaagcgc

SEQ ID NO: 4806 - DNA, 860 bp, Homo Sapiens
  misc_feature (122)..(142): n is a, c, g, or t
  misc_feature (676)..(763): n is a, c, g, or t
tgcggcttactagtatttatccatggctaaaatgcccaagcattagccaaacaactaaaaaattaagagatgggaactgagagatccagaattcaaatcatacattcctgtgtgcttcttgnnnnnnnnnnnnnnnnnnnnnggcttatgattggaaagcagaaaaacatccaggcaaatctggcatatgtccagatccactctctaactgaagggatgccaaatccatggtgaagaaagcccctctctgtggtctgactgcacagaaactgaaagacataaaatgacagcgtaggggtgggttttcattcggccacaaggaaatcccaggagggtaaagacggctcctgcttatttacttaaaattgcattatgttgtaataaccaaagtgtcggttttctgtttaagatatagaaaagactagaacaggaacaagtcaccccaattcccaccacacaggtcaccagagctgagaattgggtcatagacccttctaaatttttcatacacaaaaacacattttgtgtcatgatttgtggaccttatttggggtaaacagcagttgtggctgagttcgggggttcaaattcctgctcctccacttattaggtatgtgacctactagctagattccagtttcctcatctaaaaattacattattaaaagatttatcnnnnnnnnnnnnnnnnnnnnnnnnnnnnnnnnnnnnnnnnnnnnnnnnnnnnnnnnnnnnnnnnnnnnnnnnnnnnnnnnnnnnnnnntacaaaaattagctgggcatggtggcgagcacctgtagtcccagctactcgggagctgagcaggggaatggcatgaacccgggaggcgaagcttgca

SEQ ID NO: 4807 - DNA, 486 bp, Homo Sapiens
aaagatcttggagcatcacctcaaaatataaagaaactggggtgtggtagccaccgcagggacctccagtgcacatgtagctaaacatacacaagtgagaccatgcttcggagattagaggcttcttccttcactgtcatgagcataacatggtcacttatgcatagtccttagatcgtaatcagaaccccaagaaatgttggctgactgaataatctttcattggttcaactgaaggcagtgtcatagtggccagccatgcagcctgtcacttgaagaaaagtgcttgaggaagaatgaacatttcgacattacttctggctgatctacaattttaactctatttgtacagccagataactgagtacatgatttacaggaataaatgagagtcacctgtggctgtacgttagtgtaagtccacatactttttacgtaggtcgtaataataatgaatggggtgatgctcaaagatcttgggggtac

SEQ ID NO: 4808 - DNA, 207 bp, Homo Sapiens
atatagggcataccatttcttcctgacatttgtcagtgatgttgcctagaatcttcttacacacgctgagtacagaagatatttcaaattgttttcagtgaaaacaagtccttccataatagtaacaactccacagatttcctctctaaatttttatgcctgcttgagcaaccataaattgtcataataaatttagggtgatcggtc

SEQ ID NO: 4809 - DNA, 468 bp, Homo Sapiens
ggctgtaaaccccggcttagtatcttccttggacttttgcgttcatgttacatttctaagctctgttttcctgaacatacctctagttcattgctgcatggtgcccctccatcacactttatccatttcctcagggatggatatacccaggttgcccccaactctcaggaccataaacaatgccccaaggaactgtttcctttgagaactgctctgggtcacaggctcaggcagactcttctccaggactagcctcacaacggtgcacaagggaggagagccctttccctattcatgagcatgacttctaatccatcctaggcagcagctccctctttatgaaaatagggtcgttggaaaaaagtgaaacccacagggaaggatggagactaaaaccacccctactcctcctacacatttctaaaggaagatccagagctccataataaatttaggtagatgggccga

SEQ ID NO: 4810 - DNA, 534 bp, Homo Sapiens
acctagaggtatcccccgcttgccgtcttggatggcatgcagtactttgccaccactgaaagcagccccacagagcaggatggccgacagctctggttagaggtgaagaatatcgaggagcaccggcagcgtagtctggactctgtgcaggagctgatggagagtgggcaggcagtgggcggcatggttaccacaaccacagattggaaccagccagctgaggcacagcaagcccagcaagtccagcggatcatttcgcgttgcaactgccgaatgtactatattagttacagccatgacattgatcctgaactagcaactcagattaagccacctgaagttcttgagaaccaggaaaaggaagatctcctaaagaagcaggaaggggctgtggataccttcatccttatccaccatgagctggaaatttccaccaacccagctcagtatgccatgatcctggacattgtcaacaacctgctgctccatgtagaacctaagcggaaggaacgtagtgagaagacggcaagcggg

SEQ ID NO: 4811 - DNA, 541 bp, Homo Sapiens
  misc_feature (476)..(476): n is a, c, g, or t
ggaccatcatcctaaattattatgatatggaaacggtaaactaaaacgttcatatccactccccaagattacatcaagagtggcaggcatgggacaccagagtttccggaatggctcctcagggctccagctgcaacaaactcgctgtgccaatgtgcatgcagttcctgattctaatcaaataagtatcataaccgagttcacccgaaatagagtatactgcacagaaacttaataatgggtgagaaagacacattcgtgacattagcaattattaccatacgtggtcaaatccatttttattttctgttttctcatttagtgagtcctctgggatctacacacaggtaccaattttttgcctattcctggcaccgcgcactgcttaatcatcctccccacactgactttgttgaccatgctcgattgtcaataccaatagttctccaggggtggctcaggtacccacaggggtncctgagatcctttaagggtctgcgagatcaaacaattttcataataatttaggatgatggtaccg

SEQ ID NO: 4812 - DNA, 469 bp, Homo Sapiens
  misc_feature (303)..(383): n is a, c, g, or t
aagttatgccagcacgaaacggtagccacatcagcgagtgtactttcaatcacagtcataccagcgttgctcaagcacacacacagtcagcctgtcccgctaacctcacagacccccaccatctacacacaggctcacaaacacacccacactctttcacacctactttccaacagccacacgcagcgtcccacacacagctctcctagtacacactcattctcacagtcacctttacccctccgcactcttttcagctgaaacatatgtgcatgtacagatagacacgtaaaacagacacannnnnnnnnnnnnnnnnnnnnnnnnnnnnnnnnnnnnnnnnnnnnnnnnnnnnnnnnnnnnnnnnnnnnnnnnnnnnnnnnaatatgtgtacacacacacgcagaaatgcttaaacacatacagatacacgcacagagaattgctcacacacacaaatatgtgtaca

SEQ ID NO: 4813 - DNA, 448 bp, Homo Sapiens
cgggccatcatccctaaattattatgctacaaagatgtggaatacacattcttttaaaagtcatgggacatgttttaaaaaatgaccacctaccttccagataactgaagacagtggagagttggtagtacagtaacctcttcaaatctcctccccaatggatatgaaattaatttaccactaataaatttctattcaaaaatatacactcaacatcacttgaagacagagaatgacatgactgcaaaataactgtaagttctgcagtccttcatactcctgcccctttcctgtcatgctgcagtgctttgtggtatacacacagaaactgggaatcacttagggaggaagaagagggacactggcaagggaacttaaggaacagttggagagaccactgtataggtcagatatacctcaaatctgaaaataccgaaaaagaaactgg

SEQ ID NO: 4814 - DNA, 468 bp, Homo Sapiens
taaagatttaaatcttagacctcaacctgcaaatctactacaagaaaacattggggaaactctccaggacattggactaggcaaagattttttgagtaatacccaacaagcagaggcaacaaaagcaaaaacagacaaatgtgatttcatcaagtttaaaaagcttctgcgcaacaaaggacacagtcaacaaagtgaagagacaacccacaggatgggagaaaatatatgaaaactacccatctgacaagcgattaataaccggaatatataaagaactcaaacaactctacaggaaaaaaaatttaataatctgattttaaaatggacaaaataataatcatttctcaaaagaagacataccaatggcaaacaggtataggaaaagctgctcaacatcattcattatcagaaaaataccatcatacatgggaactgagaaagttcataataatttaggttatggtc

SEQ ID NO: 4815 - DNA, 438 bp, Homo Sapiens
gggccatcatccctaaattattatggaaaatctaagggtcttaaccacatttcaggaatttaattaatatcatgttgtgtttaggaatgctggtttattcactagggtataaatgcaatttattttacagagcctgaagtctttatatgtttctatacccctggataaatctcaactattttagttgttgattttttttgatgttgcctttaaaaaatcaaaactatatttattactttatcaaaccaataggccatcaagctgtcacatgaaagactaaaagactgacttaatcacagcatcttcagatcaacaacaaatgctttccctgctacagaggctactgatttcaggacatgggaatcagaataggggtcttgcgtaggactctacctgcctgagggaattaatacatgtcaaacatgttcagtgtgttct

SEQ ID NO: 4816 - DNA, 339 bp, Homo Sapiens
cccggggaggacattgggaggaagatggcctgagtgtgcactttggctctgctacctgctcctgaagccccgctaaaaataattcatccaagattcctttgtagttaaagggtccagttctgactggagcctctagagagctgggcttgtatgttcttttggccttttgttcctacctaaatgaagaaaccatgcctggaggggccgtgaacacagaaccctcaagacaaggatgacagagctggaggacacatctagctgccattgcaacctcactgggctccccagactctgtgtgtgagaaattaaaccccctgcttgcttgagtcccgtttgtta

SEQ ID NO: 4817 - DNA, 419 bp, Homo Sapiens
aggcctggactgggtgccctgtgcacgccaccccacttccgccctacccatgggacgttggccttggctggctagttgggcaccgtgtgcctgccctccaagggcctcctctacgcaaatgaggcctcatctgtgctctcgctgggcacgtggcttcatgtcagtaagcaagatgcttcttaataacccaccttctgccccactctattccttatcctgctgcccctgtaggggtcaagggccctccgtctacaccctcttcttctcctccatcctttattcagagtcatctcgcccttccccatgggtgggggaacctgtgtttgtttgtgtgcacatgtaaattttaaatattttaagcagaaagtccttacctcctgtaacacatcaataaagtacaatcattgtgaaccctttca

SEQ ID NO: 4818 - DNA, 588 bp, Homo Sapiens
gcggccgcaggcggtcgtagtcctcctggcccgccgtgtcccacagcgccagctccacctgcttgccgtccacctcaatgtcggccacatagttctcgaagacggtgggcacgtacacctcggggaactcgtccttactgaacacgatcagcaggcacgtcttgccacacgcgccgtcgcccaccaccaccagcttcttgcggatggccgccatgagcgggccgggcccgggcagcaggagggggcccgcgaacgcctcgctgccctcccgctcgccgctcactgctcacctcgggctgcgcgcaggtggcgagagggtcgctagctgcacccgggccccgcggtggcgcgttctctcgctgcgcttcggctgccgcggcgggggcggtgggggcgcgggggcatagggcgcaccgtgcgtctcgccgcgctgctcccgggcggtggtcgctctgctcaccccaggccggggatcggcggctttgtgcgtaacgcgggctcgggcagcagactcgggcggtggactcggcctagctctctcccgggtctctccgggcctcgctgagcatacaagacacagctccaacc

SEQ ID NO: 4819 - DNA, 554 bp, Homo Sapiens
gcggccgccactcgagcgtgcggcccatgtcctggctggcttccagcatgcagaaggacagtgacccctgggcttggcccagtcggaggaggatgctctgggggtcattcagctcagcagcagaggtgatggggcccctctcagctgcccactcaaggatctgggtcttggggaaggatggcagctctgtggtgttgacccccgggggctcttggaaggtgaccaggctggaattgtaggccaagtgcagtgggattcccagggcctggagatgcaggaagacactgctgtttacactgaggaccagaagcacctctcggggccaggtgccattttgcttggatgcctggagagtcagctccagctgtgacgggcccgttgggaactccaggaagaggacatggacttcaaggatggcattgggggcctgagccacgcagcccttcgagacctggctagtggtatatgtcacctcgcccctctcggggcccacaggctgaaggtcacaatggactgtttctgcaagacttgtggcgctgaggctgcagctggcc

SEQ ID NO: 4820 - DNA, 618 bp, Homo Sapiens
  misc_feature (35)..(35): n is a, c, g, or t
  misc_feature (112)..(112): n is a, c, g, or t
  misc_feature (128)..(147): n is a, c, g, or t
gctctgacattctgattcgaatgacactgttcagnaatcggaatcctgtcgattagactggacagcttgtggcaagtgaatttgcctgtaacaagccagattttttaaaatntatattgtaaatatgnnnnnnnnnnnnnnnnnnnnatatatatatatatgtacagttatctaagttaatttaaagttgtttgtgcctttttatttttgtttttaatgctttgatatttcaatgttagcctcaatttctgaacaccataggtagaatgtaaagcttgtctgatcgttcaaagcatgaaatggatacttatatggaaattctgctcagatagaatgacagtccgtcaaaacagattgtttgcaaaggggaggcatcagtgtccttggcaggctgatttctaggtaggaaatgtggtagcctcacttttaatgaacaaatggcctttattaaaaactgagtgactctatatagctgatcagttttttcacctggaagcatttgtttctactttgatatgactgtttttcggacagtttatttgttgagagtgtgaccaaaagttacatgtttgcacctttctagttgaaaataaagtgtatattttttctataaaaaaa

SEQ ID NO: 4821 - DNA, 394 bp, Homo Sapiens
ggtatacaactgtaagtagctgattcttccaagtatccccacccccatttaaaaaaagggaaaggttgctttacaacaacttatgtttttgtgaatttaggaatttcaaagaactgctcaataatcacatataatactgtcctggcagcatgagagtcagcgaaagaattaatccctgatcgctccactgtatgtaatgaattcgctattttcttatgcatttagaatgatggtgctagatatatgccattcttagaactaagagagtaggcactcttttcctgtagggattgtcttatggaccccaggtgagaaagactgcaccaaaaatgtcacaaaggtacagaaccgctgctttagaaaattatgtataacgcctctgaacaagtaaaca

SEQ ID NO: 4822 - DNA, 430 bp, Homo Sapiens
  misc_feature (45)..(258): n is a, c, g, or t
  misc_feature (298)..(308): n is a, c, g, or t
acacagtgagacctcgtctcgtagtgaaaattccagccgagttannnnnnnnnnnnnnnnnnnnnnnnnnnnnnnnnnnnnnnnnnnnnnnnnnnnnnnnnnnnnnnnnnnnnnnnnnnnnnnnnnnnnnnnnnnnnnnnnnnnnnnnnnnnnnnnnnnnnnnnnnnnnnnnnnnnnnnnnnnnnnnnnnnnnnnnnnnnnnnnnnnnnnnnnnnnnnnnnnnnnnnnnnnnnnnnnnnnnnnnnnnnnnnnnnnnnngaaaaaggcattctttagagttgctgtcagactggatttnnnnnnnnnnntccaactatatgttttcttccagagaaccctttagaaagtaaaagaatggagaaagatattgcatgcaaatagtaaccataagagacactgcgtggctatactatatcatacaagtcagctt

SEQ ID NO: 4823 - DNA, 930 bp, Homo Sapiens
ggaaggcgaacctgaggatgatgtctatttaaaacgctgatacccgagacagatatatgaggtggagaaagctgttcacttacttaagaaatttcaaattcttgactttactagtccaaagcaaagtgtttatcttgatttgacactggatatggcactgggaaagaagaaaaacgtggagccatttaccagtgttcttagtttgccatacccatttgcttccgaaatcaataaagttgctgtattttacagggaatgcatcagaggtcaaaatagcggaagaaaatggagctgcatttgcaggaggcactagtctgatacagaagatttgggatgatgaaattgttgcagacttttacgtagctgttccagaaataatgcctgaacttaatcgattaaggaagaaactgaataaaaaatatccaaagctttctcgaaattccattggccgtgacatccccaaaatgcttgaattatttaaaaatggacatgaaattaaggtagatgaagaaagggagaactttctccagaccaaaatagcaacattggatatgtcaagtgaccagatagctgccaatctgcaagcagttattaatgaagtttgtaggcacagaccgctgaatttgggtccctttgtggtacgtgctttccttcgtagttcaacaagtgaaggtttattactgaagattgatccattgttgcctaaagaagtaaaaaatgaagaaagtgaaaaagaagatgcctaaatgtggtgaattgtgaaattactttcagtggtttaagaagcaatggagaaaatgataatacagcataatttttacatttgatgtcttgttattgatcatacttgaaagtgaactttaacattgaaaaatcgtacagtcatttcaagaataagaaaataaaattttctctttgtctgaaaaaaaa

SEQ ID NO: 4824 - DNA, 333 bp, Homo Sapiens
cagaaattgtcaataatgggcccaaagagaatagctgcaggtgacagagctcagaatccaactcaggcagttcatctcagaacctgctttcttcacccctgtgtggatctctaaattagaaacagtaaccaggacagggaagggattctgtcagtagatataagtcaagggcaagggtcattttggaagtgggaagcagaggtgagtataattggggtggatgttagaggaagaagctatgggaggtctattattgtcagacctgaatgaagaagagcccatcagcaactctctagttaattcaaaaagacttttagggaagacggcaagcgg

SEQ ID NO: 4825 - DNA, 528 bp, Homo Sapiens
gcggccgcccttctccgcttactgttcccggctccccgcaggccgggtgctcgcagccgggctggctatgcctcgcctggcagcccagagcgccgctccctgggaacagcacacaaaggcagcctcccctggcctctagcccttaggcttctgtagctcagttctttccccacacccctcccccaagaaattctgggggccgttccaccgagtaggagatccttggccctctaggcaagtaggtcagcgccccaagactggagctggtctctttcaacgccttgggagactgggtgaaaggcgagcttggttacgcttaaaatgatcgcctacaagcggttctcttggctcaaaacgcctctttcagggctcttatgctagaaaggaaaggaataaggaggagataaaatgacgccgaggccctgaactgttcatggcatccgcggctcagccaagctgttgttttaaaagagcaataaaaatgaattatgactaaacgccttctaacttaatgctttcggacgggga

SEQ ID NO: 4826 - DNA, 289 bp, Homo Sapiens
  misc_feature (79)..(172): n is a, c, g, or t
atttaagattggaattaattgctccttgaatgtttggtagactcatctgtaataccatttgagcctagaatattctggnnnnnnnnnnnnnnnnnnnnnnnnnnnnnnnnnnnnnnnnnnnnnnnnnnnnnnnnnnnnnnnnnnnnnnnnnnnnnnnnnnnnnnnnnnnnnngtaaaatttaaagctgtaatttcaatgtcttgaagagttatagatctaattagattttccatttctcctggagtcaatttggtacaaacagtcaataaagactacaagaccaaaaaa

SEQ ID NO: 4827 - DNA, 305 bp, Homo Sapiens
agaccatcacctaaatttattatgaggtggtctaatctgtagggtactcactgcctataaactaagagcagcacgatgcttctctactgaatgatgtcatctgcagtcactgggaacacacggaggtagaccaaatgccctatatggtaagtggccacacgtatcgggtaggaaggattgcctctgcccaaattctaatataaatgagaaataaattcatttacaagagaatattatgcactgaaatgcataatttttcaataataattatgctagatagtcagatgtttatatcttttctttcc

SEQ ID NO: 4828 - DNA, 514 bp, Homo Sapiens
cgccgtcttacattaatgagcaggttgccacaaaaggtaactggggctcaatctcactgggcccttcagttattccagctgaggggtggtgaagctgtggtatttatccaccaactccctttcttcatggctgttttaaaatgcactcaagattttcattagatatggcaagacggcctatgtcattcttattctttaaaaatatatccatttggtttctgcttgaaggatagcctgagtcaaggatatgggtgcatgcatttttttagaagatgattccaggaagcaaggtaagagggtgagaagtgagatagggaagggaagaaagtcaatagatggtacattaatgagcaggttgccacaaaaggtaactggggctcaatctcactgggcccttcagttattccagctgaggggtggtgaagctgtggtatttatccaccaactccctttcttcatggctgttttaaaatgcactcaagattttcattagatatggcaagacggccagcgg

SEQ ID NO: 4829 - DNA, 352 bp, Homo Sapiens
ggtccatgcagcgacgcttccatcaaagattagttcgacattctgggctgagatactgaataagcaacacctggcctcatccgaaccctgcagatggattttccacccaagatgtttcagatttcaacgagagtcccgttctcctggataacgacgtttctggggaagtgagcacccacagaggtcatcttgtaatggaacccagggcaacccctttgaccatgctccgtacacgactatgaacagtcccaacggcagccggctcccttcagtttccccaccgtttgtcaacccggagcctcttttcctttccaaggagactgagttctacatggatggaagcgtcgcgcat

SEQ ID NO: 4830 - DNA, 511 bp, Homo Sapiens
cgctggcgctggtgaaggatcattacgaccctgctacatttctgacaagttgtgactgtcattctgattcccatatacttgaagccaatatcttaatcaaatatgttaagacgttaatggatctttatttaaaaagtgtttctggaataagtttctttacgccaagttaattccttgatcaactttctaaacaatgcagtaacattttcccaaatgttttccattcattttaccgtgatattattctcttgtgtatgtttcataccttttttcctgttttatctcatacgtaaagattcgattcatcaacgtactttatgtacgtatcaaattttactcactttgctacgatgagttttcttttgtggtcattatttctcaagagtccagctttcccacgtcgttattttgcagatttaaattttgtctagaatactggttttctctagctcttggttcttcctagttcttaaatcaggaagacggcaagcgggggtaccgagatcgaatc

SEQ ID NO: 4831 - DNA, 692 bp, Homo Sapiens
  misc_feature (169)..(343): n is a, c, g, or t
  misc_feature (506)..(618): n is a, c, g, or t
atgcgcgacgcttccatcaaatttatacacctcgataagtggtagagccagaatttggacccctgtctgtttcaaaacctttgtcccagaacaccagtggtcttcaattccagataaaattgcttgcagagaccacacctatggaatcaggatctccaggaatcagggnnnnnnnnnnnnnnnnnnnnnnnnnnnnnnnnnnnnnnnnnnnnnnnnnnnnnnnnnnnnnnnnnnnnnnnnnnnnnnnnnnnnnnnnnnnnnnnnnnnnnnnnnnnnnnnnnnnnnnnnnnnnnnnnnnnnnnnnnnnnnnnnnnnnnnnnnnnnnnnnnnnnnnnnnnnnnnngctgtttcaaaattttaacattggtgctgtaacatacgcactgtttattgattagttgtgatctggtgagaaaaattgtagagtctctaaaaaacttaactttaggagcataagtgcagtcaaaactaaatccctattgactagcacagcgttaaaaaaaatnnnnnnnnnnnnnnnnnnnnnnnnnnnnnnnnnnnnnnnnnnnnnnnnnnnnnnnnnnnnnnnnnnnnnnnnnnnnnnnnnnnnnnnnnnnnnnnnnnnnnnnnnnnnnnnnnttagtggagtatggtggcgggtgcctgtaatccctgctacttgggagactgacatggagaattgcttgggccct

SEQ ID NO: 4832 - DNA, 705 bp, Homo Sapiens
actctagcaggatctccccttggcgtcttatgatcatgaggagatgatgatgaggaatactctgtaaggtctagtgccctggaactagagctctgtcaagtcacctatgtctctgagatctccttgctctaaagttcttattaagtgagtagtgaataaccttaaggttcacactgccgatgagtggattttctgtcacttgcagccaaaagcatttctactgttaaactcactaaggttcagtagcactgttgtacctcttccctggccccttcatcatgcagactccttgttccagagcaacaaaatcttctgtctccatttttttgctcatttctctcaccatgaatgagttagacattttccaatattttatttgaaggtcatcattgatcactttgaaagtgtgcaacgacaaatagaataactaaatgaatgggttgctattgcaaaaattgcccagtacatcaacataacagaaacattctcaataaatcatcatagaagggaagtactaagaatttcgcaatagtgcctagtgcaatagtgtagtgagatagtgtaaagttccccactcaaagtttcctttgcagaatgtgcattaataagcaaggaccagaattagattaaaaataatgatctcattaaacatttataggccagcagtaaatttttgcaacaaatgcatttggaaccatcttacta

SEQ ID NO: 4833 - DNA, 367 bp, Homo Sapiens
ccgcttgccgtcttgtagctggcccaatatatccaactaattcaaaatgggaaattgtacattttacttaaacaggatttggtagatgggtcttctagatatgttgtcatgaagaaaaatcaggaaaatgtccaagggtgggagcctgtggcttatggcttcacttacccatcacagatagctatgttacactgcaagaacagagttcatggcttttcctgaggtggctggaaaccttaatctcctgaagttaagtcaaaacttaaatgtcaattcacccagctctcttgcctgcaggctgatccagggacttagagcttgttacccagttacaacttcttctagagaagaacttttaagacgcaag

SEQ ID NO: 4834 - DNA, 201 bp, Homo Sapiens
tagacgacccatgagcgacgcttccatcaagtctacacatcattcattcatcacgcttccttccttaaaggagacagtgtactattgaaccaacaggatatcttttttattatttgcatgagttaatcctacaaacaaaattaaatacctcttttataaaacatcttttccagtgttctaattgatggaagcgtcgcgcat

SEQ ID NO: 4835 - DNA, 604 bp, Homo Sapiens
aacgtccacatggcaatatttccacccctcacatctagatggaaaattcttacattttctcaacaatatttacttactgttttctttggccagatgaagtactgtgtatttttaaactttccaggaagacagtttattaagataatacagtgtaggataatcaaactgtttatttttgacttttgatttaatcttcctttctgtaatctactaaagaaaacattagaatcatgcatttccctttcttggattgcgagaatcagttcaattagcagtggcgggtttttttcctgtttatttctactacaaatgtaacccctcttggctctcattcttcccttggggtaatttttgttttaatgtgtaatgcctgctcttcaaattaacatcaaattttattctgaagtacccacagttgaattatcagtggaaaatgcacccgcaaattctcaagatttgaagggtgagaagagactccaggatcacctggccaagctgcacatttatgcagctgaggatggttttgcttggagaggagccacacagcacatgagtggcacactctccttttccctttgaacttctcatagaaccttgatcaagc

SEQ ID NO: 4836 - DNA, 283 bp, Homo Sapiens
gtgtgtgatctttttctcttgtttgttttggtcttttgaggacaattccctagtttttaaaaccactatcagacgggagtagttgcactgactcatccccagacagacatggaacatgtgagagaaagatagaataaaaatgtgctgggtgtaatcagtgtgagaggctcaagtgcagtgaaggggagagtgacacggctctcgtgatgaagtcagaggtaagcgggacattcacctcgctctagtatcctaaaagacgccagcgggggatccttagagtcag

SEQ ID NO: 4837 - DNA, 632 bp, Homo Sapiens
ggtgctctgacgatcccatgcgcgacgcttccactcacgccagcagacgaacactccctccatgaaagttaaaacaatgataagcgctttagcaccttcctcagcctacttgaagctgcagacttgaaagagctcctgacacaacctggagactggacattatttgtgccaaccaatgatgcttttaagggaatgactagtgaagaaaaagaaattctgatacgggacaaaaatgctcttcaaaacatcattctttatcatctgacaccaggagttttcattggaaaaggatttgaacctggtgttactaacattttaaagaccacccaaggaagctaaatctttctgaaagaagcaaatgatacacttctggtgaatgaattgaaatcaaaagaatctgacatcatgaccacaaatggtgtaattcatgttgtagataaactcctctatccagcagacacacctgttggaaatgatcaactgctggaaatacttaataaattaatcaaatacatccaaattaagtttgttcgtggtagcaccttccaagaaatccccgtgactgtctataagccatttattatatatacaccttcatcatgatgaagctcgcgctgggtcctgctggtcag

SEQ ID NO: 4838 - DNA, 290 bp, Homo Sapiens
gagctcggtacccatgcgcgacgcttccatcaagtattccaggttagctgcagacttctctcgctcttgattcctttccaatcttcttatttcacttttgagaagcttaatttgctccataaggactgcattggttgcctctatttcccgaagcaggccgtttaagtgatctgcactttttgtggtggaacggagcttctgaaccaattcttctttggtaaattcagcatgccataatggaggctccttttctggtgttttaaatgtgtagttgatggaagctcgcgcat

SEQ ID NO: 4839 - DNA, 469 bp, Homo Sapiens
tcgttctacgaggatcccatgcgcgacgcttccatcaactcggactttgggagcgagtccgggggttgcggggactcgagtccggggcctagcgccagtcaggggccgcgagccggcggcggcgcggcggagcaggaggaactgcactacatccccatccgcgtcctgggccgcggcgccttcggggaagccacgctgtaccgccgcaccgaggatgactcactggttgtgtggaaggaagtcgatttgacccggctgtctgagaaggaacgtcgtgatgccttgaatgagattgttattctggcactgctgcagcacgacaacattattgcctactacaatcacttcatggacataccacgctgctgattgagctggaatattgtaatggagggaacctgtatgacaaaatccttcgtcagaaggacaagtagttagatggaagcgtcgcgcatgggtaccgagctcg

SEQ ID NO: 4840 - DNA, 477 bp, Homo Sapiens
actgggacaattgcaagggtcataggagaggtgggtatgataggtggtcatatgaggtggtgagtatgagaggtgggtgcctcacaaactcggggtatggtcctgacctgcatggcagatgagcagagcacttgggaacgagcataggaagtgccatcttcccgggcatctctgctcagtgttaaggtctagccacagacactgtgggacctgcctcttcctatggaatgggggcctgcatgggttgtgtcctggggcaggagtgagggatggctgggaagaatctccaggtctgtggcccttgtgttgagtgattattttgtgacactctcattcctggaccacctgccaggtttatctgttatacctgtggcattcttattatgtcagacaagttattatagttcattcaactctaacaaatgaacaaaagaacaataaataggaggccattaaaggtcttttgtggcagaaaaa

SEQ ID NO: 4841 - DNA, 1047 bp, Homo Sapiens
  misc_feature (270)..(321): n is a, c, g, or t
  misc_feature (369)..(377): n is a, c, g, or t
ggggcacgcaggttttccttgttgccggggtttgtagttcttctcgatcgtgtcagtttgtaaggcgagggcggaagttggattcctggcctgagaatattaggcgtagttttccagtttttggcaaagcggaaatacttaaggcccctgggttgactgggttctttgttttatctaccggcttctgctttacgacaggtcacaaacatgtcagacaaaagtgaattaaaggctgagttggaacgtaagaagcagcgactggcccaaatnnnnnnnnnnnnnnnnnnnnnnnnnnnnnnnnnnnnnnnnnnnnnnnnnnnnccagaagaaggaagctgttgctcctgtgcaagaagaatcagatcttgnnnnnnnnnggagagaagctgaagcattgcttcaaagcatggggctaactccagaatcccccattgtccctcctcctatgtctccatcctccaaatctgtgagcactccaagtgaagctggaagccaagactctggagatggcgccgtgggatctagacgaggacctattaaacttggaatggctaaaatcacgcaagtcgactttcctcctcgagaaattgtcacgtatacaaaggaaactcagactccagttatggctcaacccaaagaagatgaagaggaagatgatgatgtagtggctcctaaaacacctattgaacctgaagaagagaaaactttaaagaaagatgaggaaaatgatagtaaagctccccctcatgagctgactgaagaagaaaagcaacaaatcttgcactctgaaggaaatttttaagttgtctttgaccattctacaagaaatcgtagaaagagctctttctgagcagattaacatcttcttggactatagtgggaggacgatttgcaagaccaccgaaagagagaatcgagcaggtgctaaattggcattaaatcgacacatttttgaacgaacgttggtcaaagcactcgggggaaaaggtaggatgggcctctcaggattccggagttccccggggttccataacaccatgaaatgcc

SEQ ID NO: 4842 - DNA, 812 bp, Homo Sapiens
  misc_feature (202)..(202): n is a, c, g, or t
  misc_feature (262)..(293): n is a, c, g, or t
cccgggcttaaaatttttggggatataaattgggtagagaagaacggggaatttttccaattaatttttggggccagggcttggttctttgaacctccctcccccttccaggggattccgccccgttctgggcctccccaaaagtggctaggattacaaggcgtaagccacccatgccctggccagatgatgtatttaaatnatcataccaaacttctgtgtatttatataaagagagactgttaaaagacttcataatatnnnnnnnnnnnnnnnnnnnnnnnnnnnnnnnnctttacgcttaccattgctgcatattgttgcagtataaaacacacacttatctgggatcatgagaatacggcaagaatgtcctgcgtaaactgtaactttgacagcatttaaaaaataaaaatcaaattaagtgcctttgaggccacttcttcccagttgccagttttcttaacccggtactaaaatactgccacacacagctgcatgtctgaggatcatatttaaatatttaaaatgcatctacagtctgtcttagttttctttatatttgggaaaaattttgaatcttaagtgtgaaaatgtaatcacaaatgtctttaccaggaataaaaacacatctagggtagccagcaaatttaaagcaaataaaatattttgtagtcacagactaatactgaggtctgtaaaaagagttgaatgaataatagacagacatcaaggatatattagttccaacaccatccattattgtttctataaccaataatactttaaaaacatttgttaatcaaaatagg

SEQ ID NO: 4843 - DNA, 1496 bp, Homo Sapiens
gggtatcaatataagtgatgaggattttcttttgctggagcttttgcactggtttaaggaagaattttttcactgggtgaataacgttttgtgcagcaaatgtggtggacagactaggtctagagatagatcattactgcccagtgatgatgagctgaagtggggtgcaaaggaagtggaagatcattactgtgatgcctgccagttcagcaatcgattcccaagatataataaccctgagaaacttttggaaacaagatgtggacggtgtggcgagtgggccaattgttttacactgtgctgccgagctgtagggtttgaagctcgctatgtttgggattacacagaccatgtctggacagaagtctattctccttctcagcagcggtggctgcactgtgatgcatgtgaagatgtctgtgacaagccactcctttatgaaataggatggggcaagaagctttcctatgtcatagcattttcaaaagatgaggtagttgatgtcacttggcgatattcctgcaaacatgaagaggtgattgccagaagaactaaggttaaagaagcattacttcgagacactattaatgggcttaataagcagaggcaactgtttttgtcagaaaacagaagggaaagaacttctccagaggataactgttggagcttgttgaattttatatctcccaaaacccctaaacctggagaacttgggggaagaatatctgggtcagtggcttggagagtagcccgaggtgaaatgggtctacagagaaaagaaaccttgtttattccctgtgaaaatgagaagatttctaaacagctccacctttgttacaatattgtgaaagatcgttatgttcgagtttcaaataacaatcaaaccatttctggatgggagaatggcgtgtggaaaatggaatctatattcagaaaagttgaaacagactggcacatggtatatttggccagaaaggaaggatcatcttttgcttatatttcctggaagtttgagtgtgggtcagttggcctaaaagtagatagcatttctattagaacaagtagtcaaacttttcagactggaacagtagaatggaaattgcgatctgatacagcacaagtagaactgacaggcgataacagtcttcactcctatgctgatttttctggtgccactgaagttattttggaagcagaattaagcagaggagatggtgatgtcgcttggcaacacacccagctgtttagacaaagcttaaatgaccatgaagaaaattgtttggagataattataaaattcagtgacctttgagaacctgaacattatagaaaagctggcaataatcaaggacttactgaagtagtctgttggttcagtgcatgcttagttggcagttaccaccctgtgctagcatatttcttttgctagctatccatcatgtaaccctcatgaaaattatctttatacgtggactataataaaatattgaattaaa

SEQ ID NO: 4844 - DNA, 487 bp, Homo Sapiens
gaaatgagttatggaataggaacagttatgtgatgattctgaaactttaacttagagcttcattactttaagaatggaaaacaacctctgagtttgatttcccaaagtttcataaagcccctaagctcatgattttcatcaactctttgcccacatagtcatttacctccacagccgtttgttgtcatagaaggggtggtggtgtttggatttgatttttttcaacttgcagtgagaaataggataggtgacaaaaccttacttgttttcttaagacaattcagtgcttgagcatctctgtcagaaatggaatgaaatactgttagccaattagaattattttatgtattgttattgtgttttgctgatttttatatgaaaatataattattcattcttgatctctggaagcaatcattattatgaggatcattttactttggaaacactttcataataaagataagtattaagagtgcaaaaaaaa

SEQ ID NO: 4845 - DNA, 789 bp, Homo Sapiens
  misc_feature (672)..(672): n is a, c, g, or t
aaaaattttagatttgcgggaggaagaatttggcccccgggggaattccattgtctcccacggaaaggagggggaataatgtttcccacccaatttttcccggggaaataacaattttcccaggcccggtttcagggtcattagggggagggaagaggtggttcccagttcttcccgggctcagggcaaggctgggctgggcttccccatgttcctgttctgaatgatgttcagagccagggaaggagagaaaggtactgaactggtaggagagcaaggctaggaaccgccgtcggaaatctatccagaaggccgcaagccagccttccactggtcagcctcatcctaatcatgtgagcgtcttcagcatagatgcacgagtgctctccggtcaggtcattcggggtctgtctcagataaacaggaacaaatccagctcgtttccagaacttgaggagcctgggggtcaagccataggaaacacccaggtaatccaggcggtacgcaggcctctcattcaatttgaggagtaaaggaggcaggtccttccggggagtgatgacctcttccaacaagctgacagcctcgctgcttacggtgtgaatttcctgtggtgtctcaaggaccttttcctccagacaaggaaacctgccttcatagtacagtctgcangcagctgcagagcacggctgccatagcccatcccttgataatctgggtgaacagcaatgcgaacgacccttccaccagacagaccaccaaagtctggatcttggaactgttctgaca

SEQ ID NO: 4846 - DNA, 413 bp, Homo Sapiens
aatcccagctcctccccttagtgaccccaagtctgtttccctcagctgcataaggaggcgatatagtttgaatatttgtccccagccaaatctcatgttgaactgtaaatccccagtgctggaggtggggcctgctacgaggggtttggatcatggggacgggtatttcatggcttggtgctgttttcttgatggtgaattattgcaagatacggtcatttaaaattgtgtggcacctccccctgcccccttcttgctcctgctttcaccatgtgacatgcctgatcccccttcaccttttgccatggtcataagcttcctgaggcctccctggaagctgagcagatgccagcaccatgcttcctgtacatcctgcagaaccataagccaattaaacctttttaataataaca

SEQ ID NO: 4847 - DNA, 727 bp, Homo Sapiens
  misc_feature (391)..(399): n is a, c, g, or t
  misc_feature (403)..(403): n is a, c, g, or t
  misc_feature (448)..(448): n is a, c, g, or t
  misc_feature (518)..(518): n is a, c, g, or t
cccatgcaaacctgagtgagcacaggatttgcttctaggcccattatttttattaaaactgaaaaaatttaaactgaattttttgaccttggaaaatatttttcttactttaccaaggtgaagtttccttaattagactaattattttatccccatcccagggtataaacaggaattgttttgatagtggtggagttattcactgcaacaaagcaacaatgttgtccatgattcaaaatctaagcagtttcgattttgcctgtgaatatggtgtctgtcattcagggcatagctcactgtaggctagcctctgcttacttaagtctcttctctgacatactcaatggaagaatatttagatttatttaaagttcttaatgccaacagtttnnnnnnnnnttanaacatttgaatgaactgtaaagtacagccataccttggacatgcnaatataaatctatggagcattctcaagacagtttgtcatggctctgttgattgcaactccctggatagcnttggaatttgatttaggttatattctggctaatatggatactggggtccttatatattgaaaaagccccaaatgcgaaaaggaggtcatggccttctctcaaatctacccaaaggaaataagccccgcatttgggggggcctttaaaaaaattttttgcttaaagggaaaagccctccagttcctggaaagggttggaatatgaaagaa

SEQ ID NO: 4848 - DNA, 1011 bp, Homo Sapiens
  misc_feature (279)..(288): n is a, c, g, or t
  misc_feature (656)..(656): n is a, c, g, or t
ggcaactagagagacaaatcgcctaggaagactgatcaatcacagcaaatgtgggaactgccaaaccaaactgcacgacatcgacggcgtacctcacctcatcctcatcgcctcccgagacatcgcggctggggaggagctcctgtatgactatggggaccgcagcaaggcttccattgaagcccacccgtggctgaagcattaaccggtgggccccgtgccctccccgccccactttcccttcttcaaaggacaaagtgccctcaaagggaattgaannnnnnnnnnacacacttaatcttagcggattacttcagatgtttttaaaaagtatattaagatgccttttcactgtagtatttaaatatctgttacaggtttccaaggtggacttgaacagatggccttatattaccaaaacttttatattctagttgtttttgtactttttttgcatacaagccgaacgtttgtgcttcccgtgcatgcagtcaaagactcagcacaggttttagaggaaatagtcaaacatgaactaggaagccaggtgagtctcctttctccagtggaagagccgggaccttccccctgcacccccgacatccagggacggggtggtgaggaaagacgctgcctcccaatggcctgggacgggnatgttttccaagctcttgttcccctaacgtctcaacaggcgctcactgaagtgtatgaatattttttaaaaaggtttttgcagtaagctagtcttcccctctgctttctcgaaagcttactgagccctgggccccaagcacgggccgggcatagatttcctcttccacaagctgccgcttttctgggcaccttgaagcatcagggcgtgaaatcaaactagatgtgggcagggagagtgttgcttacctgccctgctggggcagggtttcctgaaactgggttaattctttatagaaatgtgaacactgaatttattttaaaaaataataataaaaattttaaaaaattaacaat

SEQ ID NO: 4849 - DNA, 579 bp, Homo Sapiens
ggaattacatcgagaccctcagagtgcagatcatgcaaaattgtcgcatccgacgggtttacttctcagacagactctactcagaagatgagctgccggcagagttcaaactgtatctcccagttcagaacaaggcaaagcaataactggaattgtgactcgagggatagacccctggatgtgactcttctttttaaaaggaaactatgtggaggacgatgcaaaaacatatttatcttagtttgctctgctgtagttctgttatttatacttggtgttgcttgtcatggacaccggtgaacatgccgtaactctgtgactgcattgtaagtgcagtgggggtaagcagtcctgtgagtggcgcatgaacgctggagcttattccgccgcctgccccagtgtggggggagatacctttaccatgaacttacagaattaaagatggcccataaggaattccagaccaatatttcttcctgcggtttattctatgttttatatattatctaaatatatgtatatgctgtgtcatactcataatctggaaatgaataaagtgatatattcctggtttgtaaa

SEQ ID NO: 4850 - DNA, 427 bp, Homo Sapiens
ccagtcgactaatatattttatttaaaaatttacttttgaagcctataaatggataaattccaaaatacagaatatttaacaatatttaatattttttactcaacagtctgcctttgtgtttttctttccataaacaaatacactggattaaagcaataatactcttatcttcaagttcaatgcctgagtttcttgcatactatttccatttaaagttcagtaattacttaacttcacattattctgtcacaaatgataaatgtgctacctatgtagtaaaaatcataaaactattataagccaagtcaagagaattcataaagttaatatgaaataataactatactgatacacatgtgcgatgggccctaccagaaatatgccaaaataacaagttttatttaaagaatgaggtctttgggcaga

SEQ ID NO: 4851 - DNA, 566 bp, Homo Sapiens
gcggccgcgcgcggcagtcgcacgcccaggggttagcgttgagccgcaggaactcgagcgagggcaggtcggcgagcgcctcgccgggcagcgaggccaggctgttgttgaacaggtagaggatggtgaggcggctgaggccgcggaaggccgcgcggtgcacgccctgcagccggttcccgtgcagcagcagccggtccaggctgcccaggccgcgaaacacgtgctctgtgagcagccgcaggcggttcccgtggaggaagaggtggctcaggttggccaggtccgcgaacaagtcatcctgtaggtggagcaggatgttctcctggaggtagaggtactgcaagctgaccaggcctcggaagatgttaccgggcaggctgctgagctggcagcgatacaaatgcagcgaactgcagacgctccaggccctggaagatgtcgggctccagcgagcgcaggtgccggttgtcaccgaggtccagctcctccagggcttgcaagtggcggaaagtgcccgggtagatggtggagaggttgttggagaagagccacagggtgagcag

SEQ ID NO: 4852 - DNA, 1476 bp, Homo Sapiens
  misc_feature (1236)..(1251): n is a, c, g, or t
acgatggttggcaagctggtccataagttccatgtaggggttggtagcttggtccaggaaacccttgtagaagttggcagcccagctgaagagatccctagaggaggtcatccagccataccaggagttctctgtggaggttggcaggctggcccaggagacttctgcgatcaatctgttatctcagggcatccctgagattgataaaccatcccaagagttccctgaggagattgatctgcaggcccaggaggtccctgaggagataaattagaagtcctgggtggtccctgaagtgattgatcagctgcctggagagggtattcctcaagcccagcatccatctggtgatccaaaccctcagagccagtctctagcccatgaccagcactcaccccttccaccagcaacatgtgattaattttctcattagtggtatcacactataccagccatttgagccagcaaccttttctgttggctaactcactggccagctctcaccagcggtgtctggggaagtagttctctttgtatgaagcatacctgtgccagagctgtggttgaggaggagccagttttaggttcgaagaagccattggctcctcacttagccattagacttgaataggatttccttggggtgggttggtctgtcattacccagccttctctgagcatcctaggaaatcacagattgttaaaggaaatgccgcttcactgctgaagacaccatctggcgacagcaaatgcaaaagaggggactctagggtcttcacttttctggggaaatgttcacgacttctcaaggtacgcttagaccatatgtgcattcaggggactcttgtctttgccagcactcctcaggtgagcccgggatggctatctgaaatgtctggaaaatagagtcccttccccaaacatctgacatggccactaaatctttagacttgccttatagatccttccatatcatccccaagtgccccttctgcctcagtcctgttcctctgggcaatagctctagggaaaagaaggtattagactgctgtgcaaaattcagagcaactacttaaaatgctctagaggattcttagccagtcctgtgaaagtgggcctcctctgtggtggggctgtttggcttaggagatgctgtagtagtagagataatcaggttctattttaagcaatcagcagagatcaatattgtacagatacaagcaaaggtttaataannnnnnnnnnnnnnnnttatttctgtagttgtgccagggacagactggccaaagaccaaacactgcagggtccccaagaaatttgtccttatatcattgtgtctgagggccagatatgattatgaagctttttccaaagatccagggatgggaatgggagtgggtaggaggggtaatgcggtcattggagtcgggggctggaacattatgagtgctcaataaatataaactaatgagaaaa

SEQ ID NO: 4853 - DNA, 474 bp, Homo Sapiens
agccaattcttctgctgtaggagaatccaattgtacctgatgtttttggtatttgtcttccttaccaagtgaactccatggcccctaagcaccagatgaatgttgttaagtaagctgtcattaaaaatacataatatatatttatttaaagagaaaaaatatgtgtatatcatggaaaaagacaaggatattttaataaaacattacttatttcatttcacttatcttgcatatcttaaaattaagcttcagctgctccttgatattaacatttgtacagagttgaagttgttttttcaagttcttttctttttcatgactattaaatgtaaaaatatttgtaaaatgaaatgccatatttgacttggcttctggtcttgatgtatttgataagaatgattcattcaatgtttaaagttgtataactgattaattttctgatatggcttcctaataaaatatgaataaggaaaa

SEQ ID NO: 4854 - DNA, 565 bp, Homo Sapiens
gttgaccttgagaatttataatattctgagaaaactggaagcatgcataaagcccctctgctgtgcactgaagtatgggtgccttgaggaaaagcagttacacagttgagttgcaagctgaattggctgtgttcaaggcatgccctttagaattgaaagaactagcagattacggtatttagacttgaatatttggctgatattttctggaaattaatggaatgagcctctcacctcaagggaaacaactgatagtgttgccagtgataaagctttcaagcaaaaattggaatttccgaaaatctgtactccaccatgagctttattgttggggatattaacaaatgtgatttgtataatgaaatgcatttcatttggaagaattcaatgaaccatttttccagtgaccagtacgtgatgttacaaaatcatgcatggctcaaagagttgattcaaaacgtgtaagccacggctggagctcttattgccacaggactggagtagctcttatcgcccaggctggagtagctcttatgcccaggctggagtagctctgaatgccccg

SEQ ID NO: 4855 - DNA, 520 bp, Homo Sapiens
acggcggtagctcccctggaccgaacaaaaatcatctcccaacgtgtcttcaaaaagattgtctgccaaggaggccttccgggtcctctactacacctacctcaacgagggatttctcagcttgtggcgcgggaactcggccaccatggtgcgcgtggtgccctacgccgccatccagttcagcgcacacgaggagtacaagcgcatcctgggcagctactatggcttccgtggagaagccctgcccccttggcctcgcctcttcgccggcgcactggctggaacgacagccgcttcactgacctaccccctggacctggtcagagcgcggatggccgtaaccccgaaggaaatgtacagcaacatctttcatgtcttcatccgcatctcgagagaagaggggctgaagactctctaccatggatttatgcccaccgtgctgggggtcattccctacgctggcctgagcttcttcacctatgagacgctcaagagcttgcacagagagtacagcggccgc

SEQ ID NO: 4856 - DNA, 178 bp, Homo Sapiens
tgctgcttgatgtaagactgtacaactcagtgatgtcaccttacctcctgagctgcgtcctcctgagtgacagtgagtatttgtgtgcagatttcacctcttgagatttaacatcagtggaaatgccaagacagcaaacaggacaaagagcactttggttcattctaagaactgaatc

SEQ ID NO: 4857 - DNA, 614 bp, Homo Sapiens
cggtccggaattcccgggatggcaagcaaaagattgtccccttctgcatatgggtaaaactgagacgtccccgtgagcccgaggctggaagtggtgtctgccttcaagggttaatccctctttgttccaagcagaagcattctggcatcccagtgaagagctcaggccctcaggaagtgtctgctgaatggaatggcccagcattagcccagtattggaaaagacaccagcccaggggccctgactcgtcacacttccctttcctaagcctctgagggtggagattcccctaggagcgcttggccagctgggaaggcagcgcccagctgcacttgttgttgatacagcataagtgaatcatgggcatttccctgagagcagtgggagaggccctctgagttggaagttgagctccacctcctttccaagtgagcactcagtgttgaatcacagttacaacccactggggctggtgggagatgcgttgtatgggactggaagcaagaggttcattcaaagagaaactcatgggatttgtaaccagatgaatcatgatttctaagacttctgatcaaaaatactgtgaaataaagaatgttaatcaactttgaaaa

SEQ ID NO: 4858 - DNA, 479 bp, Homo Sapiens
atccccgttgcggctgagtacatgtactgtttgcgaggagtatttttttcttgtgacattccagtcacgacagaggtcatttcagaacagtgagcagtgcaggccctaaccagctcaccctcagagcagcagcaccatcactcgaattttctacaacggaaatgttctatatcttcatcttagcttgactgagaaactgaatgtttaattctcacacttcactaacatgtattaatagtgatgccttcatctgtacgtttgaattttcacattttctccagattaaagtgagaaacaggtcagatgctatccatgagaaataggaaagaatggtgcagtaaagagactcacatttagtgttctctagcccaggaaacataagatgttcttaatcctcccacaattttacatcagatctttattttttgcttacagtgaggttatttgaaagttagtgttctgtactcagtctccaattt

SEQ ID NO: 4859 - DNA, 301 bp, Homo Sapiens
tttgcgtgtggagtatttggaggacagaaacacttttcgacatagtgtgttggtgccctatgagccgcctgagtttggctctgactgtaccaccatccactacaactacatgtgtaacagttcctgcatgggcggcatgaaccggaggcccatcctcaccatcatcacactggaagactccagtggtaatctactgggacggaacagctttgaggtgcgtgtttgtgcctgtcctgggagagaccggcgcacagaggaagagaatctccgcaagaaaggggagcctcaccacgagctgccc

SEQ ID NO: 4860 - DNA, 197 bp, Homo Sapiens
tgaggatccccatgcgcgacgcttccatcaagaaactccctatcaaaggatccatttcacccctaatcaccacactaaggaaatcccgagttcctggggcacatcttcctaacgatcggggtgggatcatcctgtacagcagagaggacgtcactgacacctccccaagagctgagtttgatggaagcgtcgcgcat

SEQ ID NO: 4861 - DNA, 396 bp, Homo Sapiens
acgtacaaagacagcttcctcttattcatttactgaccagtactgtattctaggtgtaaggacgcactagtttatttcaccagtcccttattagtggacatttgggttatttctagtcttttttgctagtccaaacaatgctatgatgagtcactatgcacaacacatttgtgctgggcaccatcctcagcataaattgcagaagtagagctgctgaggcgaaggggtgcttttgcacacactgccaagtggcccttctgctgagtggtatcactctacactccaacagcacatgtgagggccagttcccacgggagccagggtctttaatcctcacgtcacagatgggggaaacgaagcctctgagtgagaaaagtccaggactgccaactccag

SEQ ID NO: 4862 - DNA, 837 bp, Homo Sapiens
tagagaatccccatgcgcgacgcttccatcaaggccaccgagcagcccggcaaagcgcagccctcggcccactccccaggcaagaagacgcccgcgccccagccccaggcgcctcctccgcagcccacacagcctctgcagcccaaggctcaggccgggggccaagagccgacccaagaagagagagggcgtccacctccccaccaccaaggagctggccaagcggcagcgcctgccgtccgtggagaaccggcccaagatcgccgccttcctgccagcccggcagctctggaagtggttcggcaagcccaccagcggcgtggcatgaagggcaaggcccgcaagctcttctacaaggccatcgtgcgcggcaaggagatgatccgtatcggggactgtgccgtgttcctctctgccggccgccccaacctgccctacatcggccgcatccagagcatgtgggagtcgtggggcaacaacatggtggtccgcgtcaagtggttccaccaccccgaggagaccagcccgggcaagcagttccaccagggccagcactgggaccagaagtccagccgcagcctcccggcggccctgcgggtctccagccagaggaaggacttcatggagcgcgcgctataccagtcctcgcatgtggacgaaaatgacgtgcagacggtgtcgcacaagtgcctggtggtgggcctggagcagtatgagcagatgctgaagaccaagaagtaccaggacagcgagggcctgtactacctcgcgggcacctacgagcccaccacgggcatgatcttctccacggacggcgtgcccgtgctctgctgagcc

SEQ ID NO: 4863 - DNA, 592 bp, Homo Sapiens
tacctagaggacccccgcttcgccgcttggaaatttataggtgtttctatctgtggattggttagaaatattccagaaaattggaatataaaatgtgtgggaaatgaattagaaatatgctcacattcttgacaatcattataagcatttaagttctggaagaggaaggagaccatttcttttgcttggtatactcagtagtgtagcttaaccctatctctacatgtggtaccatgtttattgtttgtaaagctcagccagagagttgaatatggcatggatgtagcttactcctccttatttaatgaacatatattgagcacctattttgtatcaggccttatgatagagttatcaagaatgagtcccaatctctggcttcagcagtttggctgaatgaagggatcagttaagtagacaggcaactagttaggtgtatgcccacaggattataaataacagtacacaagagaggcctgagcccatttggacggtgatgtggagtttggggcctcagaaaagtgacttctgagcaaatatttgaatgacaagtaggagtggacttgaaagacgggcagcgggggtaccgagc

SEQ ID NO: 4864 - DNA, 543 bp, Homo Sapiens
  misc_feature (145)..(318): n is a, c, g, or t
atgcgcgacgcttccatcaatggggtgaaggaccttgaaggggatggcttggcagatgtggctgtgggggctgagagccagatgatcgtgctaaggtgagatgggtctcccaggtcacacctgatgaccccagctcttatcctgnnnnnnnnnnnnnnnnnnnnnnnnnnnnnnnnnnnnnnnnnnnnnnnnnnnnnnnnnnnnnnnnnnnnnnnnnnnnnnnnnnnnnnnnnnnnnnnnnnnnnnnnnnnnnnnnnnnnnnnnnnnnnnnnnnnnnnnnnnnnnnnnnnnnnnnnnnnnnnnnnnnnnnnnnnnnnnccttcaggtcaagaaagcccccagcccagtccttggctcctactgcccccacgactgcatggccctgcccagggaaggagatgagcgggtcagctacccaccgacccaccccccagagccaactgcactccctgcagcccattgctccagcccagcacgcaacctgctgaggtcagcactgatgccgctggaggacagctccatgctgatggaacgtcgcgcatg

SEQ ID NO: 4865 - DNA, 634 bp, Homo Sapiens
aggacccccgctcgctgcttagagagatctttcgtgacattttccttagtataaattgaatctgagacacttaaatgaccagctgtgggaaatgaggcttctttgaatgccaagtggctgagaacaggtgagaataaagctagcttgacttaattgtctgtaaatatgtacttcttctaagtggtctagcacagtggctgtaaccttaatcagaacttcaatggaaagtcatacggaaatgtttcctccttgatttttctcactttgtagaatgggaatattcatctccaaagtaaagctgagttgctaaaatgagatttaacaagaatatctggaaacatcctggaactgggataagaatagatgaaagtccaatgtttttatgtagtttgtatttctgagtatgggatatgaagcccatattatagacctagctactaataccagcctccacctgggtcccaactccctcaacctgctttagattagatactggccaggtgatgaaatctccatttttaagatcgcatcctggatttcatcattgggtaatatcacatgtaaaggcagctgctgaaacatttgttaagcatagtttccatcttaagtattatttttttcattaaaatttggg

SEQ ID NO: 4866 - DNA, 212 bp, Homo Sapiens
gtctagacgatcccttacgcgacgcttccatcaagaggtggattggggaatctaatgaagacctgatttttttcataacattaaaagctaagagagctctttgcatctgagcttctaataataagaacatattaaatgcctcagggatcagagcacagattcatcctgcctggaactctctgtttgatggaagcgtcgcgacgggatcctca

SEQ ID NO: 4867 - DNA, 653 bp, Homo Sapiens
  misc_feature (160)..(160): n is a, c, g, or t
ctttagttgcttctgcagttcatctagcctgagaattggaaagaatgttataacagtttactctaaaaatattttaaaaagtcttagtttatatctaaaagcagcacaaagaaaacccttattaagtaccctggtatataacaaattttgttatactatncggtcaaattatgtctcccaaatacatcacgacgtacaattttcatgaaaacagatatatttcaggtgctaggcttttacccagttaccagtgtggcattagaatagtgttccactgcataaaagacttgaggatttccataaagctagaacttcaagaatgatctgtccaaaccactcacagaatgggaaaggaaaaatggcaaagaataaacatcactaatttgattatcctctctactctttaaagttcactgggttctagatgcccaacaacctgataaggttaactaggctttctagcagcagtagttgtcactgtcatcatcatcacaacacctaacacttaccgagcacttaatatgtgacaggcactgcactaagggctttatatattaacgtcttttaacccttacaacaactccatgtagtaggttataacgcattttataggataagaaaaccacattaaatgttcaaccagtaactactat

SEQ ID NO: 4868 - DNA, 610 bp, Homo Sapiens
cttgacaaataagtgatatcactgtcatttccagacctgtgctcccattgcatgctccatagcacacgttataaagaaaatttcagagcagaccatcacattttttgatgctcctaaactataactagagctgaatttgccaaaatacgatctataaaacactaatcctgcacaatgtgcaaataatgctgtgttcttcatcttcttggagatatacaatacatatctgaaaagtcctatagtaaataaaatcgtttagtttggaatcctttcttcttggaatttacataggtaatcatgacaaaaagtcagagagtttagcggggtttgctggtaaaaatgggatatttttggtaaatgtccagattgatttctttctttagctaaaataccattataatgtttttggagtacacaaaaaaaatatgtgaaaatatatccacctcagcacagttgcccaaattgtggaaacaatataataattagccattccaaggttcagatttaacacactgaaaaccagtcattttccataatatttttttggtctagaatcaaaagtgaatagtttaaacattcctttggttacaagcgccagcgggaatcctcg

SEQ ID NO: 4869 - DNA, 442 bp, Homo Sapiens
gggcgatctagaggatcccagcgcgagcttccatcaatacaaggagtgttttatcacaaacttcatcagtggccgaaaactcattcatgtcaactgctcaaacctccctcagatggggataacaaactttgaggacatgaaggcaatttctcggcatacgcaggagctcctggaaattgaagagccattattcaaacgctccatcagccttccctatagggatattatcggcttatatttagagcaaaaaggtcatactgggatagaatctgattccttgactttatctgaatttgtcaaagcagcaggattacaggattatgctccagaaataactgcccctgaagagaatgaggaattaccttgcactgaaccataggggaaatccacttcacagagcttgaaagatcaaactaaattacttgatggaagcgtcgcgcat

SEQ ID NO: 4870 - DNA, 474 bp, Homo Sapiens
atgcgcgacgcttccatcaaaaccaggcagggccaggaccaggaactccttaccccgaagggcagcccccatcagctgtccgatccattcatacttggcaaagtctcggcaggaggggttgggtacatacatgtcccgagcctcaccagtgccattgccctggttggctgtgcgtacaaagaagggcaggggcacgggggtatccgctgagctagggcacagctcttctgacatatctgccaggctgtcccggaaaccacccccttggtcaatgatgccttctgcaataaatttacactcccaccactggtcatagcgcatgggccacctgtagtccaggggcttttcatatttgtcagagggcttgaggccttcatatacctgggtgaagactgcattcttgcaggcagggtctcgagaggggcaggcacggtgttccatggcaagacggcggttgatggaagcgtcgcgcat

SEQ ID NO: 4871 - DNA, 314 bp, Homo Sapiens
tctctagaggaccccatgcgcgacgcttccatcaaacacacagagcacacctgctacagccagggtttgctcctccactgtcacaaaaggacgatctaggggtgcaaacccaagcacgactaggttccctgcattcaggaagtccactgactcagctgcacacttcagcagtccacaaactcaaacaaaggataatgacataacaactcatacaaccagtaaagtgttaacagtgttgaccacattagctgacaaagtttggcagcagaaagaaatgcaccccactgagatgttgatgaagctcgcgctggccc

SEQ ID NO: 4872 - DNA, 244 bp, Homo Sapiens
ctttagagctaggagttgaatcttgctgtcattatgttattccaaacattaaggctgtgcttagcaatagtcttaagcattgtcatatacacctgggaagtcaacatacacttgttgaaccgatgtcagtgtcttaaaggcagtggggaataagatacactggagaagttctcttcgggagaggaataagaatggtcaaatacgcacttgatggagcgtcgcgctaaggatccgtagagcaccc

SEQ ID NO: 4873 - DNA, 1683 bp, Homo Sapiens
  misc_feature (337)..(386): n is a, c, g, or t
  misc_feature (1069)..(1160): n is a, c, g, or t
  misc_feature (1305)..(1366): n is a, c, g, or t
  misc_feature (1442)..(1453): n is a, c, g, or t
ggaatatatcagttgctttctcgaccataccagtagcgtgtgtccccaggaatgttctcacggtagacttcttgtccttggtagtagcttcgctgaatttacaggggtataataattttgtgacgctcgagaattttccaagattttaaaagctccgcactccaaaacaacagggcccaaaaatcccaacgtcgagaaaagttaacactgcccgttatattgggtcccgtaaaggggacccaaattcaaggtgaaaacgggacagaagggaattttacctcccaagggttcagactccctccaactctaatgagaatgaaagatggagcctgaagtnnnnnnnnnnnnnnnnnnnnnnnnnnnnnnnnnnnnnnnnnnnnnnnnnnatgaaaagcaaaaactggaggatggaagcctcagtaggccacagccagagatagagccagaagcagcagtgcaggaaatgaggcctcccacagatctcacacattttaaagaaacccaaacccatgaaaacatgtctcaacttagcgaggaagaacagaataaagattatcaagactgtagcaaaaccacttcattgtgcgcaggaccctcagcatcaaagaatgaatatgagaaaagcagaggtgaattgaagaaaaagaaaacacctggtccaggcaaacttccaccaacactttcttccaaatatcctgaagatgacccagactactgtgtgtgggtcccacctgaaggtcaaagtggagatggcagaacccatcttaatgacaagtatggctattgattgcttcagaatcccaaaagaaaaccttgtggaccatgtgacatggaatatttgggataatgtatcaaattgaatggccagagaagtttagatgattatttgtaagatctggtgactggcttttcgttctgtgttcttggcttcctaaatttatctgcccatatgattctcatgcatttgatatttatgtttaaaagtgtttatatatgtatgtaaaaagggaaccatatgttttgagaatttgtaaagtgagagacatgatcctattaaaataagaaggcnnnnnnnnnnnnnnnnnnnnnnnnnnnnnnnnnnnnnnnnnnnnnnnnnnnnnnnnnnnnnnnnnnnnnnnnnnnnnnnnnnnnnnnnnnnnttccttgtccggccgcctccggcccctcaaaaactttttaaaaccatttctttgggcgcgcgggccccagaaaggaaaagggaactgtggccaataccgtgttccccaaaggaaaacccgtggccatgacataggggctgggaannnnnnnnnnnnnnnnnnnnnnnnnnnnnnnnnnnnnnnnnnnnnnnnnnnnnnnnnnnnnnagggagtctctgagggcctttacctgggatctttcaaacgggaagtcccaaagcgagccccaaaattcaaattaannnnnnnnnnnntggccacttctttcgaaaaaaccggggtggaaattcccttaaagccctccctcccccaaatgtggaaacccccttccccaaacgggggtttgataggaaccccttgaaatcccccagggcgggatttcagcaccccttggtccccccctttggcgtttataaatattttcccccctcggggggaaaaacccggggcggccagaaaaaaaggttgcgccctaatttgtggg

SEQ ID NO: 4874 - DNA, 852 bp, Homo Sapiens
ggtggaagcagcacaaccagtgcaccttcatttggttttggcacaaataccagtgggaatagtatttttggaagtaaaccagcacctgggactcttggaactgggcttggtgcaggatttggaacagctcttggtgctggacaggcatctttgtttgggaacaaccaacctaagattggagggcctcttggtacaggagcctttggggcccctggatttaatactacgacagccactttgggctttggagccccccaggccccagtagctttgacagatccaaatgcttctgctgcccagcaggctgttctccagcagcacatcaatagtctaacatactcaccttttggagactctcctctcttccggaatccgatgtcagaccctaagaagaaggaagagagattgaaaccaacaaatccagcagcccagaaggctcttactacacctactcattataaactgacaccccgccctgccactagagtccggccaaaggctttacaaacaacaggcacagccaagtcacatctctttgatgggctggatgacgatgaaccatccctagccaatggagcattcatgcccaagaagagcattaagaagttggttttgaagaaccttaataatagcaatctcttttctcctgttaatcgtgattcagaaaaatctagcttcaccatctgaatatccagaaaaatgggagagagatttagtttcctaagccaacctgttgatgagaatcaccagcacggatggagatgaagattcccttgtttcacatttttatacaaaccctaatgcaacctattcctcaaaccccagaaagtgctggatcacagatcgataggt

SEQ ID NO: 4875 - DNA, 1146 bp, Homo Sapiens
ggactgatctttttctaaatcagaaagtgattaaagtatgcacaaccaaaggcaggtttttctttttcatttattcagcaactatttattaagcatcaactctgtgccaggcacgttactagctgctacatactgtctgaacatgacatacggttaagtaactttacaattattatcaaatacttcaatgtagatatttcttcagttgaaatagcattaactaggataatgctttcatgttattttattgtcttgtgatagaaattcaacttgtaccatctaaaactaggttgctataaaaataggaggatgaagtcaataaagtttatgccagtttaaaaactggaaggaaaaggtaagagctctccattataaaatagttgcattcggttaatttttacacattagtgcattgcgtatatcaactggccctcaatgaagcatttaagtgcttggaattttactaaactgacttttttgcaactttgggagatttttgaggggagtgttgaaaattgccaaacactcacctcttactcaaaacttcaaataaaatacacattttcaagagggagcaccttttatatttgataagttttcattataaaccttataataccagtcacaaagaggttgtctgtctatggtttagcaaacatttgcttttctttttggaagtgtgattgcaattgcagaacagaaagtgagaaaacactgccagcggtgattgctactttgaggtagttttttacaactaccattttcccctccatgaaaatatgtgaaatttattttatctttgggaaaagttgagaagatagtaaaagaattaggaatttaaaattacagggaaaaatatgtaagtgaaaagcaataaatattttgttcactttgctatcaagatgttcactatcagatatttattatatggcagcaatttatatttttaatcattgcccattaatagacgcagtaaaatatttttgaatcagacatttggggtttgtatgtgcattaaaattgtcttttgtactgtaagttactgttaatttgaatattttattgaactgtctccctgtgcctttataatataaagttgtttctacaacttttaatgatcttaataaagaatactttaagaatcaa

SEQ ID NO: 4876 - DNA, 905 bp, Homo Sapiens
  misc_feature (560)..(560): n is a, c, g, or t
  misc_feature (567)..(567): n is a, c, g, or t
ggcttagaagagctgaaccagttcaggcaacatgtgacaactttgagggaaacaaaggcttctaggcgtgaggagtttgtcagtataaagagacagatcatactgtgtatggaagaattagaccacaccccagacacaagctttgaaagagatgtggtgtgtgaagacgaagatgccttttgtttgtctttggagaatattgcaacactacaaaagttgctacggcagctggaaatgcagaaatcacaaaatgaagcagtgtgtgaggggctgcgtactcaaatccgagagctctgggacaggttgcaaatacctgaagaagaaagagaagctgtggccaccattatgtctgggtcaaaggccaaggtccggaaagcgctgcaattagaagtggatcggttggaagaactgaaaatgcaaaacatgaagaaagtgattgaggcaattcgagtggagctggttcagtactgggaccagtgcttttatagccaggagcagagacaagcttttgcccctttctgtgctgaggactacacagaaagtctgctccagctccacgnatgctgnagattgtgcggttaaaaaactactatgaagttcacaaggaactcctttgaaggtgtccagaaagtgggaagaaaacctggaagcttttttcttagagtttgagagaaaagcttcagatccaaatcgatttacaaacccgaggaggaaaatcttctaaaagaaagaaaaacaacgagccaagctccagaaaatgctgccccaggctggaagaagagttgaaggcaccgaattgcatttgtggggaacaggaacattcaaaggcattttatgggtgaattgggcaaaaatttcatggaagtatgtgggcccaaccatggggagatgccttccattgggag

SEQ ID NO: 4877 - DNA, 884 bp, Homo Sapiens
  misc_feature (573)..(589): n is a, c, g, or t
aataaagcctgcaagttactaaattgtagtttcataaattctgtagtaaagtatcatcttggcagtgtgccaaaggtgaaaatgatgctttctctaacagagaaattcttagtgactccagtcgtagaaaaacgtctttacaacctgaataagattgaagaattgtgaacataccatggcctattggatgaatcatttgccgtaggctaaatcagactgtagggtttgtgatggatttatgaagtatgtgggtatagaaatcatgaatctagcatttgttttcagagattcaagcatagtcttaagggtagatcagaaatgacaaatgaattcaaaacctagcaggtgcattgtaaatgtgtgcccagttatgttttggaaatggcagttccttggggtcatgtttctactggcaaaatttgcaatagtgttctattgtatgtaattttaaaatttataagattatccacgttggccaagtaaactgtactgccaatagaattctggaattgtgagaaattgtatcattgaagttcagtaggatgtgtggcttaaaaatttatcaggaccacnnnnnnnnnnnnnnnnntatttggtactgaggttcattgccagggcaggaggtatttccagaaaatactcatgcctgtgttctgttccttgctttcccaaatactgcatgtgactttcctaagcggcagctgaaagactcgagcccgtgctgtctcctttggttattatgacatgaaagtgtatcaagaactcagcatttctttgcatccatggacttggtttggagacataaggaatattctgaccctttttaaaaaaggattttctcatgtttttatttaacataaataaaagaataacattttatcttt

SEQ ID NO: 4878 - DNA, 1158 bp, Homo Sapiens
  misc_feature (271)..(271): n is a, c, g, or t
  misc_feature (273)..(274): n is a, c, g, or t
  misc_feature (507)..(593): n is a, c, g, or t
tcttcgaggaaacttccccattctggagatttggtttcagaaaagcgcttgcgggttaccccgcccggggggtttttttaattgggggagaattcccaggccactatgtccatggcccgggattttccctaggggaagcaggtattggcccaatgttccagtttaccttaacggggcccggcgcggccaaacgaaatggttctagaaaggttttttcgagggcccgaggcgggccggacaaggtttaatggggggggttggtcgtgtgatntnngtatgttaatttaaaacttttatttgtaaaaaaatttaaatatgtatttgaacagatttgtttaaccattattctccttggcaatgttttataaaaagcacaaggtttctctttctccactttccatgtgggtattacaaaatgtttcaggaaatattagatgtaatataaagcaaaatgatgaatggttatttttaacattccaagtcctttacatattattttacagtgcnnnnnnnnnnnnnnnnnnnnnnnnnnnnnnnnnnnnnnnnnnnnnnnnnnnnnnnnnnnnnnnnnnnnnnnnnnnnnnnnnnnnnnntatttgcaaagaataaatgtatattaatgaatactaatatatttgcatgaaaatacagacttcatttaacttaatttgttcattatatcttaattaaaagaaatctggaaatataaaagaatgggggtattgaagttgcattctgagctatgatagagataagcatctaagaatttaaattttttaattcatttattttagaaatatgaagacaacagtgatccaacatatactatgaaaatggtttttactctgtcacaaacaattgtgtaaataggaaatgtaatattctcataacagatggttcaatcatcatgtattccaatttacaggggcaaaatgtgcagggaagccaggatttatgtaaatctagagttcaaagatacagatttttaatctgtaattaggaactaataagggcagcacaatgttgttcttaattccctggagaaagaaaacagactttattacatttagaaaacttatttgtataaaattgatcttttagaaagagaactagttgagaagctaatcagtgtctttagatcattaaaagcacaatgca

SEQ ID NO: 4879 - DNA, 705 bp, Homo Sapiens
gacagttgtctggtgagattaatcaaaacaaaaagagaaagagaaaagtacaaataatatgaatgaaaaagaggtataactgtaggttcagcagtgattaaaaataataccaacattataccaacagatttgaaaacaagcaaaatagacaaatttctggaaaaaatattagcaaagctgaaaaattagaaagtcagaataggccagatagtcattaaggaagctgaagcagcatttaatcttcctcctacaaagaaaacacaagaaacaggtagttttacaggtaagtttctcccaactgtcaagaaacagattattccaatttcaaacaaactctcctggaagataaaaaagagaatactccccatcatccaccaaggtttgaataactttaattccaagatcagacttgggcctttaacatacattcatagtaattacagatacttagagatcagtggcaaaacagaaagaccaagaggtggtatagcagggcttggggatcaagaaagatctgccttcaacatctcagttgcacctcaggtttccttacctgtacaattataatactggacttacagagttttcctaagggttaaaatgcataacgtctggcccagcaagtgagctgtaagtcatagccattatcattaccatcatcagtgtcgtcatcatcatttaaaatcacccaaagacaccccccac

SEQ ID NO: 4880 - DNA, 844 bp, Homo Sapiens
  misc_feature (509)..(509): n is a, c, g, or t
ggggcttaaaaaagcacagggagatcgcgggcagctttgcagtcgctgccttctcgcgcctgaccatgcacccctgcatcttcctgctgggccacaggcgagcgctttatttctggagctgagggctaaaacttttttgacttttcttctcctcaacatctgaatcatgccatgtgcccagaggagctggcttgcaaacctttccgtggtggctcagctccttaactttggggcgctttgctatgggagacagcctcagccaggcccggttcgcttcccggacaggaggcaagagcattttatcaagggcctgccagaataccacgtggtggtgtccagtccgagtagatgccagtgggccattttctgtcatatggcttgcacttatcccatcacgagcagcaggaggaagagagatttggatggctcagaggactgggtgtactacagaatttctcacgaggagaaggacctgttttttaacttgacggtcaatcaaggatttcttntcaatagctacatcatggagaagagatatgggaacctctcccatgttaagatgatggcttcctctgcccccctctgccatctcagtggcacggctctacagcatggcccccaaagttgggaccgcagccctcagcggcctgccatgggactgactgggattttttccaacctaccccagggaagacttttttcattggaaccccctgaaagaaaacatccccctgggcttgaggggaaggttaaccaccccgccaacattccgttttcaagggaggggaacaaaaagctccccgcaaaaccccaagcggaagcccccccctggtggggaaattaa

SEQ ID NO: 4881 - DNA, 504 bp, Homo Sapiens
ctgttgacgtggaatgctgtgtctgctttagcacgcacgctccgaatgactcctggtgctaggccatgctggctgctgtcactgagcgggactcaggccaagaggcgtgacctcgggccagcctgtctgttgtgcagacgcctcctctgcagaacgcatcagtttctattctgcagttgcagagccagccccgcgtgagaacgtgcataatgagtgcacaccatcatgtcaaggtgcatacttagtgagcgccatcctgctgaacgtgtatttcagtgtttcacttactggacggataacaagaaaaaaatcctaacacaggcaggcaccagaaataaatgtctcagcactttacagatgactaaaaatgttaattttatgacttagccaaatatgttctaggttgcatatatcccccatgtgaaagtgatttcttcccaagcttctcaaactgttagctgctgtctgacttcatcaataaagtatttttattttaaaatgcaa

SEQ ID NO: 4882 - DNA, 498 bp, Homo Sapiens
tcggaactattatttttatactatatattgtagtccaataatatagaactgttgggttctgttacttctgacactcaggaagatactattggtgtaataattttatctttgttagagatgaaagtagcccactttatgttaaagatcttactactgttggagcttataagtaaggatctacattttttatgaagatgggttttaaaacttttgtttttatgggaatgcatatctcttttcagggttggagaaattagcacttgccttgaaaagaatattctttccttaagttatatcatcagaaaattagctctggttagagaggttagtttcagagtgctccaaaaaatatgttaattattttattttgtttaataaagaacattctcaaaacgtaaataggtatctagagaagtgagtactcaacatttggtatattgttttgagtaatggatgtttgttttttgtgtaatttgtgaataaatagtttttttctgc

SEQ ID NO: 4883 - DNA, 1245 bp, Homo Sapiens
  misc_feature (494)..(494): n is a, c, g, or t
  misc_feature (505)..(513): n is a, c, g, or t
  misc_feature (526)..(526): n is a, c, g, or t
  misc_feature (529)..(530): n is a, c, g, or t
  misc_feature (532)..(532): n is a, c, g, or t
  misc_feature (534)..(534): n is a, c, g, or t
  misc_feature (537)..(555): n is a, c, g, or t
  misc_feature (647)..(659): n is a, c, g, or t
  misc_feature (729)..(743): n is a, c, g, or t
  misc_feature (794)..(802): n is a, c, g, or t
  misc_feature (853)..(865): n is a, c, g, or t
  misc_feature (1228)..(1228): n is a, c, g, or t
gggttaccgtttacattgtatagaaaaagatacatcttaagcacagattggttattaggaattagtttggggaagaggtttttttgtggattctttcatactgcaaagaaaaaccatttgccttttggggaattgagctaacttctaatctagtcttaagactagaatgctaaaaacaaaaacatgaaggaaattaaaaccccttattattaaattgatttgtaaaaacattgttactggaaatttattggacttgaggccttcctccagaaaataaggacttgattgtcaggcctatattaggttctgaaccttaatgccatgtatttgtacttactaaaaattgtttcaatgaaaagtacattagcagtatgaacttctggtccagttggaagtttttccatttgaaaaatgtgatgtttgcatggaactgtttgaaacttttttattttctagtccccctcccccacactggatagaattttaagccctanaaaattttttnnnnnnnnnttttgaagggccnccnncncnccnnnnnnnnnnnnnnnnnnnactataatcaacacacccggccggcgttgttcctttcttcctctttccctacccaggccagcggggtcgccgccgccccccctgttcgggcnnnnnnnnnnnnnaacctcttatcccccccccccactcctttttatagccccgccccccctccccccggggggtgcgccattnnnnnnnnnnnnnnngccccttccctatattccctttttcatgcgcacccacaagcccccaccgtnnnnnnnnnctgcggccccgtagagacaaagtcacgaagaagaagatttgtttttttttnnnnnnnnnnnnngcaacaaaaaaccccaccactcttatcctcgcggggaggggggaggccatctgcctctctttttttatgacccggtgcgaggcaacgaaaaaaccaccaggccgcacccagaccggctctttatttttgtttttcttccgccgcgggggagcccacctaccgctacacaaaacggagaacagctctgcgtccgagctacttcgcctatggcacccaccagcaaaattgagaagagaagagaaatattcatgcttatatccgcagctctaggtatagctcaaagcccaaaccgatagcagttgcacgctccccggtagtcgaaccctgttaagggcgcctccgatcgctgactcatgcctactntaataatcttgcccaca

SEQ ID NO: 4884 - DNA, 587 bp, Homo Sapiens
ttcagatccactctgcctgtcttagccattctccctttcccaggaggcctacatgcctgggactgcagccacaggccctccttccctccagcttctagttgggctcaggcagtggggaacttggcagcagactgaatggaggaaggtgaagtgggaatgcttgctccgtggctcctcccttgcagggtcaccagaactgtacgtgccccttgaccagcgatggcccccacacatgagtcttcctggtgcaggaactgctgcttccattcatccttccaggcctcagggtggaaacagtgcacacacctcaaaaaatggttcctttttaaaccctcctcaaattatcctctggttcctgctggatcctgatcctctggattcagactggtccaaaccctatcctaggagcaatggagggtcatggaaggatgctgagtaggaaatggcgcggccagctttgtgttttagacagctcgctgtggctgtgcatgagggatcaacaggggagagcgagagggagatagggcagcgatgcaaacgtgagctgggatcctcgggacacacagtggtggtaccatggtcacaca

SEQ ID NO: 4885 - DNA, 868 bp, Homo Sapiens
tgcaacggctctcctttgcccgactcttctacctgcagccgaagtacgcagtgcttgatgaagccaccagtgccctgacagaggaagtggagagcgagctctatcgcatcggccagcagctggggatgacgttcatcagtgtgggacatcggcagagccttgagaagtttcattccttggttctgaaactctgtggaggaggaagatgggagctgatgagaatcaaagtggaatgaagctctggcttttggaaggagagccacactgtggcgggtcggcggccctcaggagagaccaggaggactgacagcgaagatcgagctcaggttcgccacatagatcccgtgcaggagccacatgggtcctgtgcaggacccctagcagtggtgggctgagcccaggtctaggtttctgtgggggacactgaatctcccagtgttcagtctcccaggactctgctgcctcagccagagcctccatatgcttgaagtgctgatgacctacaaatgatttcagatcatgtttgctaaagagaaatctggaagtgtgagatctgtaagaaatgaaagaaatgactcttggagtcaagagatctggaaatcttttaatcagttaaattgtgcagcaatagatttttaactttaactgaccatttaagttttttaataagttttttacaaagaaaagttaaacattaaacacagaaaattaccaggccttttccttgttcctctcgtcaaaaaacaaatcgaaacttcactccataactaatacaaacaaaaatccgcatactataagctatataaaaacacaaaaccaaacccaaaaccagatcaatcgctctgtaccgcgacacaaataacccacg

SEQ ID NO: 4886 - DNA, 276 bp, Homo Sapiens
  misc_feature (106)..(203): n is a, c, g, or t
  misc_feature (207)..(207): n is a, c, g, or t
ggcaattcagtcttttaatgtgctcagggaagtaagtgttacccttgcctcctttcttctctcacaccctacatcgagtctaatggcttatccattttataacttnnnnnnnnnnnnnnnnnnnnnnnnnnnnnnnnnnnnnnnnnnnnnnnnnnnnnnnnnnnnnnnnnnnnnnnnnnnnnnnnnnnnnnnnnnnnnnnnnnagcnaggcatgatgcgtatgaacctgtggttccagctgcttggagcatgagccaggaggatcacttgagcaca

SEQ ID NO: 4887 - DNA, 387 bp, Homo Sapiens
ggggacgcggcgtggccgagggggccttgacggcgttggcggggcctgggcacaggggcagccgcagggaggcagggatggcaaggcgtgaagccaccctggaaggaactggaccaaggtcttcagaggtgcgacagggtctggaatctgaccttactctagcaggagtttttgtagactctccctgatagtttagtttttgataaagcatgctggtaaaaccactaccctcagagagagccaaaaatacagaagaggcggagagcgcccctccaaccaggctgttactcccctggactccgtgacatctgtggaattttttagctctttaaaatctgtaatttgttgtctattttttcattctaaataaaacttcagtttgcacct

SEQ ID NO: 4888 - DNA, 345 bp, Homo Sapiens
tcccccgcttgctgtctttctccatttgtagaatgtgaaattctttaaaatgcatcctatataaggaatactatagctgtgcactggtgtttgttctcttctttaaactcgggaccgtatatatctgctcaaaattgcccaagtattacatatgctgcactccatcaagtgtcaggccacattctatcagcacagcgtgactgcctatcagtgacaatataagtgagctctatttggatccctcttaccctaccctttatatttatgacagcattatcataaaactccaatattcttcaataacttacatgtttgttgtaggataaaattattaccctcaatgaa

SEQ ID NO: 4889 - DNA, 736 bp, Homo Sapiens
tgtcagcaattaggcagatcaaggtttagtttaacttccactgttaaaataaagcttacatagttttcttcctttgaaagactgtgctgtcctttaacataggtttttaaagactaggatattgaatgtgaaacatccgttttcattgttcacttctaaaccaaaaattatgtgttgccaaaaccaaacccaggttcatgaatatggtgtctattatagtgaaacatgtactttgagcttattgtttttattctgtattaaatattttcagggttttaaacactaatcacaaactgaatgacttgacttcaaaagcaacaaccttaaaggccgtcatttcattagtattcctcattctgcatcctggcttgaaaaacagctctgttgaatcacagtatcagtattttcacacgtaagcacattcgggccatttccgtggtttctcatgagctgtgttcacagacctcagcagggcatcgcatggaccgcaggagggcagattcggaccactaggcctgaaatgacatttcactaaaagtctccaaaacatttctaagactactaaggccttttatgtaatttctttaaatgtgtatttcttaagaattcaaatttgtaataaaactatttgtataaaaattaagcttttattaatttgttgctagtattgccacagacgcattaaaagaaacttactgcacaagctgctaataaatttgtaagctttgcatacctt

SEQ ID NO: 4890 - DNA, 623 bp, Homo Sapiens
ttggcgtcttgaggacagctacacatgagaagcagatgtgttctgtcaatttctcaacctttaacaaaattcagccaaaacaatggacagaatacagttattcccctcatcagtttatctgcagagaatataaatactgttaactattaagactttgaaatcacaaaggaagggagaaaggggagagaaacctcacagcctgggtttgttccgacttcacagccagggccagccttggagtgtggcctgtgctgagaactggagaagggggacagaaaacacgattcctgcaaaagtgtcagcgtggaaccagctcagccacagaaagcagcattcaaactgggctccaggatgaaatgaaaaagtctgggatgatgcataactcgagatgtcagaaaataaggaacgaaaaggcaaatgatgggggaaagcaccctaggaagggactgatgagtgctttaaatttgtgccagaagaacctagtaacacgcaaccctgcttgtaaaatgccctgagagcacagagtttgtatgccaaaagtctctcatgtgagaataaagcttatttgtgcactagaactgactatttgtgttggactgaaatggactggaagaaagaaagga

SEQ ID NO: 4891 - DNA, 378 bp, Homo Sapiens
ggtgatctagccgatcgcttacgcgagcttcatcaaaaacgtttatgaataatgccagagagaaggtttggaaataaaactcttcctcctccactccccaccccaatgttttgggaccccagaagaggatgagatagagggatttgaaaggagaccctgtgacttccatatggccaacttgggcactggaaattctcccagcaagataaacaatttctctccctcttcacacttcgtgtccaagttgcctgaaatctctctttagctttttagtgtatctgaggttttattctacaggtgtacctcattttattgtgtttgcacatagtgcctttttatttaaagttggtcgtcagccttgatggaagcgtcgcgcat

SEQ ID NO: 4892 - DNA, 492 bp, Homo Sapiens
actctagacggatcccccgcttggcgtcttaacagagcttgcgtattagtagtaaagaaacatgaaatttcaattagatagatgacaaatagataaaatttagatgagatagatataaatatcatgatgaaaataaatagggagatgggctagagtttgtggtgggttactttagattgagtggccacagactatttttgagtctgaattacaagatttggacagacaatattctcagcagggaatgacaatgacaaagcctgaagataagaactagctagttttagaaaacaggagaaaagtcagtgaagcaaagtaagcacagtgaaaaatggtatgacatgactttggggtgttggtagaaactaaatctcacaaagcctcataggacaacataagagattaattttattctatattctgtgttttatcaatcgtatactgctgggaagcaaatcagtccaaaacttagtagcttaaaaaggaatatag

SEQ ID NO: 4893 - DNA, 517 bp, Homo Sapiens
cggtacccatgcgcgacgcttccatcaaggggaggaaaaaataaacattttttaaatacgccagagcattctactcttctgaatactttcttatgaatagtttctcagaagaaactataatcagaacttaacctgctagtgttttgtcagagcctaactcacctgagggaaggaaaatacctaggtccagccaaatctaactttccatgggggagaaagaaaatatccaactccagcctactctagccatcctgtgccacccaagaaagggtaaaaatacggagaagcactgataaagtttgtagtacagagacacaggctcactaaaagactgagacataattataggactacaaaccattgaaaatcatttcccctcccctcacaccttgccatcatatcactaagggcttatttacagcagttacttttacccagtattctattatctcgctatcgagaaaattacaagcatactagaaggcaaaaaacacagattgatggaagcgtcgcgcat

SEQ ID NO: 4894 - DNA, 640 bp, Homo Sapiens
cccgcttgcggcttaggtcacggctgtgtaccccatacagtgtagatgttcagatgcttgaatccagcaaggaatgaatccgtgttttcagtttttggtaagtggaagtaattttagaattgtaatgaaaccatgttaagccacagtaaacagtgttaagacatgtgaccatatacatccaggtgtacagaaactgccccacccaactgcttcttggtgcacgtccttctcatagcctgtgtattttgaggaaataatctatttctttatactttttagaggcctttctggctaagagaataattgcttgccgcataatttcaccagtaacacgcctcttgacagctagtttccctgaaattcatttagcaatttctcaccacctcatgacaaacatgaaatcttaggttaacactaccttctttgtcccatcttctcaatgagattatcttcccttcagggcgcattcctgagagccttgtctgtaatatttccttaattatctataatcatcttaaatgattgtgtatattgattttgcacagagcgaagtacctacacattatttcagaagcacaaactgtctgactctcctgaggtctccagctggcgttcggatgtgggcaccggggtgcatgac

SEQ ID NO: 4895 - DNA, 284 bp, Homo Sapiens
gggtcgatctagccgatccctttacgcgacgctcccatcaatgtcactaatgggcacactaaaatactgccacacgttgtgaaagtagcagggacagagaatgtcaagcagtctacttccaggaaagcagtcatgtgaaactatggtgggaagaggtccccatgtctatgcaactctcctctaaccctgagggagtggcagggcacacctctaaaaaactgtgattcttcccctgggacacatcagagtctcttgatggaagcgtcgcgctgggatcctcaacc

SEQ ID NO: 4896 - DNA, 594 bp, Homo Sapiens
tcttagttctgagctccagagtctggaaatggttgtttcatacattttgtccagtttcctagttgttgatggtggctggacaagtccagctccagtgactccaatgcgaccagggctgtctgttattattttttaaaataatggattaaccagaggcgatctttcaaaccaactgtgagatgtcaaccctcatctctaagccacgtacacaaaaatcaaacactcggataatccctgggagagagaggtctgacccaggtcacgcttcgatgacacagagcgactctccctagacatactccttgtcatcgtcacctcctgtccttagcatcctctgacgaaggttccatttctgtctccggcacacgctgtaaccacagggaactgctttggaaacaacattgaaaacgtcccctgcaaaaacggtgtggtgagacagggagtacagaacagaaaacaaactgtttttcatgtttctcttctttgttttctagaaacagaacatttcctctgggaggaacgagtcagggctggggagggaagggggaggcagggaccacgtaggaaggctcctgctcagccccaagacgcaag

SEQ ID NO: 4897 - DNA, 226 bp, Homo Sapiens
gaggtgatctagacgatccgatgcgcgagcttccatcaagaagagctttttaactagagattttaaaacaaatagactttaatttatagagaagttttacatttacagaaaacatgagcacatagtacagagttcttatatcccttctctacctttcagtttccctattattaatatcttgcattagaatggtacttctgttgcagttgatggaagcgtcgcgcat

SEQ ID NO: 4898 - DNA, 532 bp, Homo Sapiens
tgtctagaggatcccatgcgcgagcttcatcaagtcaatggaatactttgatatgaagagaggcgtgtttatgtgtcagaaacggtacccgatgggagaggtttaaaatgggggccctgaccacagtttgattgccaatagtctcacagcagggtccgggctcaactccagttttaataattgcatattgccctgagctccattcagttggctctcttgttctctccagccaccttcattaaatgtccagggctatggaatttactagcgagggaaggttgctgctttttcatgcttcccctacttctgagggataggctggctataaggggaagaggggatgacctggactaagagcacgcctattgtaatgcactgtggcatcaatgctccctctattcttctggctggcagaatttcctataccctgtgggagttttttcaatacaggaaggggtgtgtggcttcctgatagttcatgtgcagattttggtgtagctggatggaagcgtcgcgcatggggatcctctag

SEQ ID NO: 4899 - DNA, 380 bp, Homo Sapiens
catcccatgcgcgacgcttccatcaatagtcattcagagtcctatatatccagcaacgcagggcagcatgggcagcatcaacgatccatcaaatctcttctgcattggctccaaatctcttttcggaggggccggctgtcagatgatccctccaaagcgtccatctgacagcactcccgccgactacatctggaacatcaattcgagagctcgcctgaaggtttcaattacataaaaggcaatgggcacattaggacccgagagtctggagcttcacaagcgctgctcacaccccctctcctgtacacaaagcctctagaattgggtaggcagtcattggcaaagggactcatttggatggaagcgtcgcgcatggggct

SEQ ID NO: 4900 - DNA, 619 bp, Homo Sapiens
tagaggacccccgcttcgggcttagaagtcagctggattttcatagctgtttctgccttcagtctatggagttaagatgtctcattggaagtataagaagacaatacagcctcacacaggtatatggttggaaaagggagaatagttattaaaaagcctttaaaaataattgttgatatgctcctttgatacactactaggtttcttatttcccccccctttttcgtaggacacatgctcaaagagatactaggtaacttagaggctagttgcaatgtggaatctgaaaccatatccaagaatttatttctactttgttacattaaaatccattggtctgtcagtgtcttgcatctggaatggatctcttacctgtgtaagatttttaacatcatacactgcttatttggaaaataatggtacagtgagttatgcagatcttccaatgtagacacattttcttatatagtatcaaacaataataattcattaatattacctctaaactcattaagcgtcttagatttccaggaagctgtcaggcttacagtggcagatgaaatctttctaaaatcctgattttactactgaaagcttcacttataagcaccaatctaca

SEQ ID NO: 4901 - DNA, 650 bp, Homo Sapiens
tacagaggatccccatacgcgacgcttccatcaacatgctgtcgtggtgcccagctgtctatgctgaggggcacccacaggcctgtacaaagtcacgcttagtcctctggtctccctcctgcgttcattggtagaccaaagtctagagggggctgaagcaccagtcggggaggggagtgctggctactctgcatatgtgcacacctggctgggtcatgacagcacccgcgcttggctacaactttgcactgaagtgggtgccgggagcggggagaggccagggagtgcgagtaggcacttccaagcctgcagggaccgggggtgcttcctggacccccgagagtgcagggatgcctgggtccagagccgtggctgggtggccgcagctgcacctgggagcatggggctcctgcccagccgacttggtagggggcagggctcccgcccattcctggcctgtgttagctccatggagtgcagcagccctggccacacctcccccattgcagctggtgtccccacagtggctgctccagatgggccaccacgtcctcactaattctaacatgtacatagaaatgcaaaagtactataatggagaaagtaattacgaacaaagttgatggaagcgtcgcgcatggggatcctct

SEQ ID NO: 4902 - DNA, 587 bp, Homo Sapiens
aacgtcgaaaatacatacataaaggtggcacatataaaagaaacgcaaagacaccacggaataagtttattcgtcacaagtcaatagaacattcatatggtttaccagcgccaaagacataagggcgacattcaaccgactgaggcaaagaaggtaaatatagacggaaattattcattaaaggtgaattatcaacgtcaccgacttgagacattcgggaattagagccagcaaaatcaccagtagcaccattaccattagcaaggccggaaacgtcaccaatgaaaccatcgatagcagcaccgtaatcagtagcgacagaatcacagtttgcctttagcgtcagactgtagcgcgtttttcatcggcatctacggtcatagcccccttattagcgttagacatttaaacataatcaaaatcaccggaaccggagccgacaacggaaccgacaccctcagagacggcaccctcagaaccgacaacctcagaaccgccacccacagagccgacaccctcaagagccgccaccagaaccaccaacagagccgtcgccagcaattgacaggacgttgaggcacgtcaga

SEQ ID NO: 4903 - DNA, 227 bp, Homo Sapiens
gctcggtaccatgcgcgacgcttccatcaataagaaatataatgacacagcagaggactccttcgaaatggaagaggttcaaagtacggagggagaagctcctcatgttccagccacttaccagctaggtcttacgaagtcgaaaagagatcatctgttacgtactgcaagtcagcattccgatagcagtggttttgctgaagattctacagactgcctatccctta

SEQ ID NO: 4904 - DNA, 1193 bp, Homo Sapiens
aggcactactcaggtcgaaactaccgagcaggcagcgtccagggccgcgccaggagttgcttccggccgtgttggtggtctgaattgagaagccgcgactaagggaagatggagacaatactggagcagcagcggcgctatcatgaggagaaggaacggctcatggacgtcatggctaaagagatgctcaccaagaagtccacgctccgggaccagatcaattctgatcaccgcactcgggccatgcaagataggtatatggaggtcagtgggaacctgagggatttgtatgatgataaggatggattacgaaaggaggagctcaatgccatttcaggacccaatgagtttgctgaattctataatagactcaagcaaataaaggaattccaccggaagcacccaaatgagatctgtgtgccaatgtcagtggaatttgaggaactcctgaaggctcgagagaatccaagtgaagaggcacaaaacttggtggagttcacagatgaagagggatatggtcgttatctcgatctccatgactgttacctcaagtacattaacctgaaggcatctgagaagctggattatatcacatacctgtccatctttgaccaattatttgacattcctaaagaaaggaagaatgcagagtataagagatacctagagatgctgcttgagtaccttcaggattacacagatagagtgaagcctctccaagatcagaatgaactttttgggaagattcaggctgagtttgagaagaaatgggagaatgggacctttcctggatggccgaaagagacaagcagtgccctgacccatgctggagcccatcttgacctctctgcattctcctcctgggaggagttggcttctctgggtttggacagattgaaatctgctctcttagctttaggcttgaaatgtggcgggaccctagaagagcgagcccagagactattcagtaccaaaggaaagtccctggagtcacttgatacctctttgtttgccaaaaatcccaagtcaaagggcaccaagcgagacactgaaaggaacaaagacattgcttttctagaagcccagatctatgaatatgtagagattctcggggaacagcgacatctcactcatgaaaatgtacagcgcaagcaagccaggacaggagaagagcgggatgagatgtcggaagg

SEQ ID NO: 4905 - DNA, 817 bp, Homo Sapiens
gggggccgggaaaacttcctcaaacccccttggacacaggcataccctttcccccggtcttctctacatcctcagcaggagtgaagagcaaggccagcctacccaactttcttgaccacatcattgcctcagtggtagaaaataagaaaacctcagatgcttcaaagcgggcctgcaacttgactgatacccagaaggaagtgaaggagatggtgatggggttaaatgtgctagatccccatacttctcactcctggctttgtgatgggaggcttctgtgtctccatgaccccagcaacaaaaacaattggaagatcttccgggagtgttggaagcaaggtcagccagtgctggtttcgggggtacataaaaagctcaagtctgagctctggaagccagaagcctttagccaggaatttggagaccaggatgtagacttggtgaactgcaggaactgtgctacaatttccgatgtgaaagttcgggatttctgggatggtttcgagatcatatgcaaacgactacggtcagaagatgggcagccaatggtgctcaaactcaaggactggcctccctggggaagattttcgagacatgatgccaaccaggtttgaagatctgatggagaaccttcctctgccagaatataccaaacgagatggcaggctcaatctggcctctaggctacctaactacttttgtaaggcctgatctgggccccaagatgtacaacgccctatgggtttgataccgccgaaagaataaaagaggtgggtacaacaaatccttccactttaaaatgtggtccggaaggccg

SEQ ID NO: 4906 - DNA, 1290 bp, Homo Sapiens
  misc_feature (738)..(775): n is a, c, g, or t
  misc_feature (875)..(883): n is a, c, g, or t
  misc_feature (1019)..(1030): n is a, c, g, or t
ccgtggagactcccagagggaagcccccactcaacacccgctcccaggctccgcttctccgatgggtccttacactcagctttctggtggcgacagttgctgtagggctttatgccatgtgaatgcaggcatgctggctcccagggccatgaactttgtccggtggaaggccttctttctagagagggaattctcttggctggcttccttaccgtgggcactgaaggctttcagggcctccagccctctcactgtgtccctctctctggaaaggaggaaggagcctatggcatcttccccaacgaaaagcacatccaggcaatggcctaaacttcagagggggcgaagggatcagccctgcccttcagcatcctcagttcctgcagcagagcctggaagacaccctaatgtggcagctgtctcaaacctccaaaagccctgagtttcaagtatccttgttgacacggccatgaccactttccccgtgggccatggcaatttttacacaaacctgaaaagatgttgtgtcttgtgtttttgtcttatttttgttggagccactctgttcctggctcagcctcaaatgcagtatttttgttgtgttctgttgtttttatagcagggttggggtggtttttgagccatgcgtgggtggggagggaggtgtttaacggcactgtggccttggtctaacttttgtgtgaaataataaacaacattgttctgatggtggcttgnnnnnnnnnnnnnnnnnnnnnnnnnnnnnnnnnnnnnngagagggggggggcgcgcccaaaaatatttcccccggggggcgccccattttagcggcttcccccgagttttttttgttcccagagggggccccctatannnnnnnnncgcggttttatatataagacgagaggccggggcgcgcgcggttttaaaacgcggtggcgtggccgcgggggacagcacctggctgtccgctgggggctcctttgtggtgagaggggggccccttcaactcttcgtnnnnnnnnnnnncgacactatagtgtgggaccaaactctcccctactaggaggtattttagagagcgctctaaggggaggaagaatatatatactacctttctccactgcgtgtgttacttcgggtggggtgttaacacccaatacggccgggcattttatctcgtgcgcgggggtttggaaagaagttgtggcgctatcgaccgggagatatgtggtttgctggacataattttctttccccgggcagcgttctgttctctctaaagattt

SEQ ID NO: 4907 - DNA, 864 bp, Homo Sapiens
ggggggaaggacgcgccacctacttcctgaatcccctgcaaaccccagaggagctcggcctgcgctgcgccacgatgtccggggagtcagccaggagcttggggaagggaagcgcgcccccggggccggtcccggagggctcgatccgcatctacagcatgaggttctgcccgtttgctgagaggacgcgtctagtcctgaaggccaagggaatcaggcatgaagtcatcaatatcaacctgaaaaataagcctgagtggttctttaagaaaaatccctttggtctggtgccagttctggaaaacagtcagggtcagctgatctacgagtctgccatcacctgtgagtacctggatgaagcatacccagggaagaagctgttgccggatgacccctatgagaaagcttgccagaagatgatcttagagttgttttctaaggtgccatccttggtaggaagctttattagaagccaaaataaagaagactatgctggcctaaaagaagaatttcgtaaagaatttaccaagctagaggaggttctgactaataagaagacgaccttctttggtggcaattctatctctatgattgattacctcatctggccctggtttgaacggctggaagcaatgaagttaaatgagtgtgtagaccacactccaaaactgaaactgtggatggcagccatgaaggaagatcccacagtctcagccctgcttactagtgagaaagactggcaaggtttcctagagctctacttacagaacagccctgaggcctgtgactatgggctctgaagggggcaggagtcagcaataaagctatgtctgatattttccttcactatatgaaaaaacacac

SEQ ID NO: 4908 - DNA, 806 bp, Homo Sapiens
  misc_feature (192)..(339): n is a, c, g, or t
  misc_feature (657)..(657): n is a, c, g, or t
  misc_feature (660)..(691): n is a, c, g, or t
  misc_feature (695)..(697): n is a, c, g, or t
  misc_feature (704)..(704): n is a, c, g, or t
  misc_feature (708)..(708): n is a, c, g, or t
  misc_feature (713)..(714): n is a, c, g, or t
  misc_feature (717)..(720): n is a, c, g, or t
ggcttgagattgaacttgacagctcgaccctaggtacccgccacgaatccagcccagcccgcggggcaccgggtttctccagacctcgcagggaacatttgcggatgggctggaagaggaggctcggacatcccagttccgcacccgcactcgaccaacgcgtggtagcggaacccctgtcgtagcgaggcnnnnnnnnnnnnnnnnnnnnnnnnnnnnnnnnnnnnnnnnnnnnnnnnnnnnnnnnnnnnnnnnnnnnnnnnnnnnnnnnnnnnnnnnnnnnnnnnnnnnnnnnnnnnnnnnnnnnnnnnnnnnnnnnnnnnnnnnnnnnnnnnnnnnaacaacgttcccaaaactctaaacttacaaatgttgtctcccgtccatcccataaacttaggcgacaaacctggcgcagggtgacctgagacaaaggcttcccggcccctgtctccaagtcgtccatccctggggcgtaggcacgttttagtgagccctgtccggcgaaacccgaaactgcggccaccttggcagcggtgggccccaaaaggaaatattcaaatattctgaaactcgtgcatgatttaggactgacatttttacgtttaattttcttgcagttttattcttgctagtaaaggtaattcgttagaaaanaannnnnnnnnnnnnnnnnnnnnnnnnnnnnnnntttnnnaaaaaanaaanaaaannaannnnaaaaatgtcgggccgcctcggccccccaaaacctttttaaaaccatccgtttggcccggcgggccccccttagtaaagggaactta

SEQ ID NO: 4909 - DNA, 1020 bp, Homo Sapiens
gggagaggcgtgcgggcttcggaggcgtgcgggcttcgggtgccatggggactcctcccggcctgcagaccgactgcgaggcgctgctcagccgcttccaggagacggacagtgtacgcttcgaggacttcacggagctctggagaaacatgaagttcgggactatcttctgtggcagaatgagaaatttagaaaagaacatgtttacaaaagaagctttagctttggcttggcgatattttttacctccatacaccttccagatcagagttggtgctttgtatctgctatatggattatataatacccaactgtgtcaaccaaaacaaaagatcagagttgccctgaaggattgggatgaagttttaaaatttcagcaagatttagtaaatgcacagcattttgatgcagcttatatttttaggaagctacgactagacagagcatttcactttacagcaatgcccaaattgctgtcatataggatgaagaaaaaaattcaccgagctgaagttacagaagaatttaaggacccaagtgatcgtgtgatgaaacttatcacttctgatgtattagaggaaatgctgaatgttcatgatcattatcagaacatgaaacatgtaatttcagttgataagtccaagccagataaagccctcagcttgataaaggatgatttttttgacaatattaagaacatagttttggagcatcagcagtggcacaaagacagaaagaatccatccttaaagtcaaaaactaatgatggagaagaaaaaatggaaggaaatacacaagaaacggagagatgtgaaagggcagaatcattagcgaaaataaaatcaaaggccttttcagttgtcatacaggcatccaaatcaagaaggcatcatcaagtcaaactcgactcttcggactctgattctgcatctggtcaaggcaagtcaaagcaactaggaaaaaagagaagaaagaaagagtgaaaccagcaggaaggaagatgtctctctagaataatac

SEQ ID NO: 4910 - DNA, 1225 bp, Homo Sapiens
aacaaaatatattttagatttctcccctaaagttagttagagaaaaaggtctattcttcagcagatcactgtggcccctcttggagctgggtgttttcaaattttcttgaaaagtgagttgtgtcacagaatgtggatagtgagatttgcttctgggcctgtggttggacgcccacagcttcctttggaggggcaagaagttggcctctcggttgacattccagagaaatggccagacttgcccctacccttttgcccctggtgtagctgcctcacatgaggttattgcaagagttccccttgcaataccctttgtgccctcaagaattaaaagcctctatgatccagagttgctatgcaccaaattttgatgccttctaaataccttgatgcctgtagcactagaaatgcttccctatttaaaataaacattaaattataaaatagagctttgtatactatgtaagcagttttatatcagctttgtaaaagctttggtgttaagagtcaatattttttggctttgtagataaagacttaaatttttgtgcaacatagtggtgttaaagcacacatccattggactatgcaaatcaatttctactagcagccactgagcaactgggcacgtgctagtacgcaccccctcctactctaactgtgctagctcttgggttgaggaatggaatgggtagccttctgcttactggagatgcacagagaaacatggctgaaaacagctttaaaaagaacatgtctttgggttcatgtgtggtgctgctgcccgggtgtaaactatccccacccagggccagccattatcaccagacctcttctgggcctggctgtgaagccctgtttttggtattcagaatggatctttaaggctcagatgggctcaaattgaaaccttgtgttttataaaatggatgtttagtaaaggaactggttctcagttatgtttacagcacttggaattgtgtgttcttgtacattttgtattttaaaaccttttatgggagtgcagtgctccttacacaaatacaaagggaagaagagccagcagttaaggctcctcagttttagtgctgaaataataaacagtgacaggtcaacagtatccttaatctgtctgagtgttcctccgcctggggttggtgtggagcccctcactttggggcaaagttaagggtcctgtgtctttgaaaaagtccatttggtcaat

SEQ ID NO: 4911 - DNA, 444 bp, Homo Sapiens
caggatcttagcgttagtaggccttagtactgtttttgaattaatgaggcatgattctaaatgccaaactttgcacaaaaagttgttgctattggattccaaactgctatgccctctataccagtggctgacaaggcatatagggatatatgccatcctgagaggagtaaagtgtttagattctgaacctgagaaaagagaactttctcttaagaagttggaaacttcattttaccttcgtgaccctggtagaccacttggtctcactggttggtacaattatgagggtagtactgggtgctttttatacaactttccatcccccacacagttggagaataatttgtagaccatggcagttaaaatgctttttactctggtgtataatagaataatgaacacatttttatatatgttaaagcctactaagcttgggtaccgagc

SEQ ID NO: 4912 - DNA, 463 bp, Homo Sapiens
gcgaaccgcagcgctggtggccatgctcttggagcactacggcctggcgggccagccctcgccgctgccgcgccccgcgccccccaggaggccgcaccctgcgccagggcccggagacagcaacatcttctggggcctgcagatatccgacattcacctgagcaggtttcgagatccaggcagagcggtagacttagagaaattctgttctgaaactattgacatcattcaaccagctctcgtcctagcaacaggagacctgacagatgccaaaacaaaggaacagttgggatccaggcagcatgaggtagaatggcaaacctaccagggtattctgaagaagacaagagtcatggaaaaaaccaagtggctggatatcaaaggaaatcatgatgcattcaatattccaagtctggacagcatcaagaattattacaggaaatattctgctgtacgtagagat

SEQ ID NO: 4913 - DNA, 181 bp, Homo Sapiens
attgcaaaagttttttcagaaaactttttaaatgtaattaataaaccacctgaatctgtcattctagtcctataaattataatcaaggtatcttgatggttatatgtggtattgtttacactgttaatatccacatgtaaggccattacacaaataaataaccaatgttaaaattcaaaat

SEQ ID NO: 4914 - DNA, 1155 bp, Homo Sapiens
  misc_feature (1030)..(1039): n is a, c, g, or t
gtgccagacaaacatatgatatcatggtgtaaaaaacacacacatacacaaatatttgtaacatattgtgaccaaatgggcctcaaagattcagattgaaacaaacaaaaagcttttgatggaaaatatgtgggtggatagtatatttctatgggtgggtctaatttggtaacggtttgattgtgcctggttttatcacctgttcagatgagaagatttttgtcttttgtagcactgataaccaggagaagccattaaaagccactggttattttatttttcatcaggcaattttcgaggtttttatttgttcggtattgtttttttacactgtggtacatataagcaactttaataggtgataaatgtacagtagttagatttcacctgcatatacatttttccattttatgctctatgatctgaacaaaagctttttgaattgtataagatttatgtctactgtaaacattgcttaatttttttgctcttgatttaaaaaaaagttttgttgaaagcgctattgaatattgcaatctatatagtgtattggatggcttcttttgtcaccctgatctcctatgttaccaatgtgtatcgtctccttctccctaaagtgtacttaatctttgctttctttgcacaatgtctttggttgcaagtcataagcctgaggcaaataaaattccagtaatttcgaagaatgtggtgttggtgctttcctaataaagaaataatttagcttgacccccgagcggcgaggcggcgcggacgagcccggcgaacacgctccgcgcgcccctaaaatgagaccctgcgaggcccgataacacccccccttcttccaagtcccggctgaacgcacgaaagagcggcgtgggggcccgccctccccccctagaaaaacttttcaaaaacccttttttttgggcgcggggcgccccgtgagggagcggaccggggggtaaaacgttctttccccacagaaaaacccggggctaagaaaaaaggcgttgggaactcccccacnnnnnnnnnnccccccgggggccacccaccgcgccttttcaaccacaactccgaggggggggcgtcccagggtcccaccagggcgatattatacaccgggcgggcccccacgcgagcccctcaaag

SEQ ID NO: 4915 - DNA, 878 bp, Homo Sapiens
gggccgcttccgcccagccgctccagggagccacgccactggccgccagcccggacggaccagcagctcccgggagaaccagcaccccaatctcctcgggggcgccggcgagccccccaaaccagacaagttatacggggacacatccggcagcagccgccgcaatgttgaagatctcgcgctccggccgctttaaggagaagaggaaagtgcgcgccacgcgctcccggaggcgggcaggtcctcggaggaggcaggctttcctggtgacccccacgaggacaagcagtagccccaatagcctgcgcgctccaggactgcctacccagcactacctctaaacccccagttccaaacccgagacttcaggcccgcccccttacgcgttgtctcattccaccaaatgtcagaatatttacacaatgccttcatgattttatttttctggaaattgaagtgtcaattgggttctcaatatttcatgactccaaggatgcattgtaaatatttatttgtggtaagagaagatacctgccgcggaggagggtggcataattagttttttcttctaaaaagcttattctggggccctggccccctggctcctgtcacagctcagcttgaactctgtagcctctcaaatgaagaaggtggctgttatttaggactctgtggaaagcaaatcacagtgctgtttttaatgcctgagaaatgcactttaggggtagacttataccttaagtgaaggagtgggggaggaagaagcattcttaagtagaagcattttaaaataaggcaggattgcttttaatgttaaactacaaaactgtacagcctattttagtgtggactattaaaacccttgcactgtaaaataa

SEQ ID NO: 4916 - DNA, 197 bp, Homo Sapiens
gaggtcctttcttgatggacatcctccccaggtctgctcttgacaaggaatagcaggcatgttccaacctatccccacctcccaagacactgagaattggcacaatgtcatcattctgttagatctggaaataaaccgaagaaaaaagagtatgtcaccacagagatgcaggtaatcagaagaaagccgcaagcggt

SEQ ID NO: 4917 - DNA, 426 bp, Homo Sapiens
cccagcagagactgttaatggccccttaccctgggtgaagcacttacccttggaacagaactctaaaaagtatgcaaaatcttccttgtacagggtggtgagccgcctgccagtggaggacagcacccctcagcaccacccaccctcattcagagcacaccgtgagcccccgtcggccattctgtggtgttttaatattgcgatggtttatgggacgttttaagtgttgttcttgtgtttgttttcctttgactttctgagtttttcacatgcattaacttgcggtatttttctgttaaaatgttaaccgtccttcccctagcaaatttaaaaacagaaagaaaatgttgtaccagttaccattccgggttcgagcatcacaagcttttgagcgcatggaaccccataaactaacaaattacataa

SEQ ID NO: 4918 - DNA, 599 bp, Homo Sapiens
  misc_feature (20)..(20): n is a, c, g, or t
  misc_feature (287)..(287): n is a, c, g, or t
cgtcttcaacaaaacaatancaaacaaaacaaaatccacatgctcatggtttgccttctcttagggagccaaatactacctaagttttgtcagctggcaggctctgctaatagaatgtcacttaaaacaccactttgaatctaaggggcaaggcaatgcataattctgaactattactaaattagttattcctcaagcagcaatttgcctatttttgctcttacctaatttttaggaggaatgatagacaaaccattaacgcattgggtttctcatcctagatcccngtcagttttcctcaaacacagtagtctcctctgttagaccctggtgtgctgctgggaattactgggactcactggccagctgctgtctcttctctgcggacctctttgcttttagggagcaggaaactaattcctctaagtgttatacacttggagaccctttagcatgaacaacggtgaagaaacagaagctctcgttgctttcctgcatcagacaaaaggctgtggccacttaaataccacatttttacttcctttttagttcagttgagggagcgggtgaaccctgcagcagataaagctgaccttgta

SEQ ID NO: 4919 - DNA, 327 bp, Homo Sapiens
tggcgatgtcgcgtgccatgtggtgtttatctcaagtggcttggaagaaatcacagggagtaaggacttctggagatagtggagatgtgagcgccactctccccaaaacgttggttgcatgccatcaccattcctcatcaggtaaattaagggtactgagtacacatgatcatttgataacacaaaattggcagctgggcatggtgcctcatggctgaggcaggaagatcacgtgagcacagcagttcaagataagcctggcaacaaagggagaccccatctctaccaaaaattaaaaattaccacacatgcacgcggggtcctcta

SEQ ID NO: 4920 - DNA, 505 bp, Homo Sapiens
tccaggatgctggctggtggaacaacctgctggcccgaaacaaggctgccaggtgtggatacctgagaaggactacttggtatcaaatacttttgagatggctacagtcagctagctggacagcccatgctgactggggacatacacttgcatctttgttgaaagcagaagaagacagaccctttccccaccttccttacctcctcttcccccattaaggcagctcatccaagcttgtatttaactgaataaatgagtagacattgtggacctcacaagattatttaattcttaagatgtgtagaccttgatggtaggtgtgacatgttagtttttcttacttgcatttatttaagacactgttacagagatactgttgtcaccttctggggcacggtctttggggagaggggagtgcatttagacttatgtggaactgtacaaattgtgatgtggctacatagaaagccatgtgctaagaataaactccatttaaaaaacatta

SEQ ID NO: 4921 - DNA, 505 bp, Homo Sapiens
gccgacctagaggacccccgctgcggctcacatcactttcttctccatatatgtgtctgactccctctaccttcctcttctaaggatacatgtgactgcacttagggcccacttggataatccagaatcatctccctatctcaagaatcctttaatcatatttgtaaaattaattaattttgatcatatctgcaaaaattctttttctaagtagggtaacagtttaagttccaatgattaaaatctgatatctttaggggtcattattcaaactactacaaataatatattttatttgacccaatatatccaagatgttatttcagtttgtaatcaacattctataataacttttctaaatctaggtgccttttgatgcttacaacaaatctcaattagaatcagtcacatctcaagatagagagcaacaaaataattgtgggggacttcaatactgaaagcactagttagatcatcaagacggcaagcgggggtaccgagctcg

SEQ ID NO: 4922 - DNA, 460 bp, Homo Sapiens
gatgtgaacaattaacgttctgagaagaaatactaactgtggtattttcaaacttaaatttctgtagtaaaatcagtaccaaagtctaatcagatcaaggaaaaacaggcaatgcatataaacatacttttgaatgttgtgtggcctataaagcaataatgcaatttatatggaatgtcatgggatatgagaaatggaaatgcaaaaataactaatcctttagtaaaaatgtcaacatgttaaagggggaatgttaactaatgtaggttattgctatttgtgatttgtttatgggttcttggctttgacagcttcaaagaatggacagtgataagttaaaagaaattttgtatattgtcaaggaaagggtcttaaatccgagtcaagtcccttccttggggtaaaaaatgtattcttaaagcattctgatgttaaaaagaaaacttaagttatctaacca

SEQ ID NO: 4923 - DNA, 601 bp, Homo Sapiens
tgcgtcttagtaactttaagagtctgagtgaaataactcagtgagttaggaaagtggtgataatgtaggtcccatcggcattcctgacccccttttgcctttttgttctatttactgggtatccataggaccttaaaaccaagagcaaacaattgaatgagatgaatttgttttaatctgcatgactagattacagccacaaacccaataaatacgcagaaggtggctgtgggcagatgcagggcatggagggccatcgggctggcaagggctctgtggtcaaagggaacatgctgaccttggcgatggcagaagagcaaagtgaccagggacgtgtatggagccatgtgagagctgatttcttcacttgcccaatggaggtgataacaaggattcctgtttcataaagatgatcgtgaaaacaaaatgtgatagtgcacgagaaagtgtaaggaaaagatatgaagatgtcatctgcaagaagcccttggagcagaggtccttgcttatctaccaattaaatgaatatagggtatgattgccatttcaactctaatgtgtgagcactaagggatcctcttgctggtgatcattttcaaag

SEQ ID NO: 4924 - DNA, 332 bp, Homo Sapiens
taaactcagtaagcaaggaggagaatggagagaaatgaaactggggagaaaaggagtttggcatttactctgcatgagatgtggaactgatcctggggttcctccccctcttagttatccagttcttggtactcaaacatccattcccctttaaggagataatggctgtctctaaagaaacttttctggaccatctgaagcagagaaatgagctggctcacatattgtaaatcacattctggctcttgtgtcaaaaaggacaaggctggaaggcagggaggtcgacaaggaggcaatttacactaacccaggcaagttaagacggcaagcgg

SEQ ID NO: 4925 - DNA, 679 bp, Homo Sapiens
  misc_feature (604)..(619): n is a, c, g, or t
cgcttgcgtcttcagcaagcattctgcccagagtttttttggccatttcactctatgctgtctcctgtcccaggctgtgggcagcctgttccttcccctccacaggtgagagatctgtcaccacatattttaaccctcaccaggcaccttgcattatccccagaaaaatgagggctacacaggaactgggtgcctcacacctgcctttgaaaggttatagtgttgctgaggcaaaaggatctgcctgagaaactataaaagaatcaaaaagtttatctctcaaataccaaattgtgtagactgcagtaaagtgaaactcttcaacctattctggtttctctggggagtttctagtactaaagtcattcagaataattttaacttaatttatattccttccctgcttttatccactcacctccactcccctaactggaaccctcacctgcccttatattttagactagactgtgaacccatcatgaattccagtgggagtcatgctttgaaagcccattttaataaataccaggaacagttattctacctaattccctagcttatatagagtaatttcagcctgccagtcattctgagccttgannnnnnnnnnnnnnnnatcttttagtaggtaggagaattttacaataaattctgcaattgtaggaactctgggtga

SEQ ID NO: 4926 - DNA, 606 bp, Homo Sapiens
aagaataggtctctggtaactgttaggaaggtaaagcggctactaggagcaagcagagagaagactcagtgccagactctgaccctaaacatctacagatgccccttttaacagccagaacttcgtgtgttcgccttatggctcccactagttcacccacctaggcgctggcatggatcaggcatttggtaagtcattctatctcctcaaacctctatgaacatggaatttgtctttaagttgtagcgccagttaaaagaattttgtctttaaatgagtaaaattttggctctaaaatcctatagatttaaaatagaaattgaggagtctatattttaattaagtttctcagaactttattttaggcactaattttctttctcccttgccactataatttattatagatacaatatttaagaagcagagtatggaagcagaattcttgattttgaatcctaagtccaccattaattgtgtcactttgagcaagttatactctttgtgcctcagtttcctcttatgtaaagtggggataaaaacaatcataacccacagggttggcatgaagattaaatgaaacacatatataaaatcaccacaacg

SEQ ID NO: 4927 - DNA, 670 bp, Homo Sapiens
ctcctagaggatcccccgctcgcggcttagctttggatacacaggaaagcaaccctgaggaatttccattaaacaaacaaaggttgcatctttttttgatctttgcttgtctggtaaaagcctgcttttgttatcaagccttcccagcggaaacctaggggagagagacaacagccaggagccaagcccaggttccagtaggaaggcccaggggcctcacttgaaatagccacatctaacctttgtaaaggctgctttctgcccatggctgcagaggccatttcctttgcttctaatttttccaggagaggaagaagcggggagagaccaacaatgacctgtttctggcagatgtgttttcctaccagggaagctccatgaggctgccaaactgtacaagaggagtgggcacgagaaccttgcacatgaaatgtgttggaagaaaagctgagtgttgggagagaagctgaggcagggcttgcatgtttgctagacttgctgctccttgcttctagcattcccatgttctcaagtagccatatgtttctcattcacttgatacaccgtttcctttcaacccccaaatcctcaccacctgtttgttgcagcctccacacttgtgatagccccctggtccattttgtctctcaaactgtctttctcattcctt

SEQ ID NO: 4928 - DNA, 843 bp, Homo Sapiens
  misc_feature (518)..(518): n is a, c, g, or t
gaccagtgcgttctggagctgctgttccaacagacagggcctagctttcatttgacacacagactacagccagaagcccatggagcagggatgtcacgtcttgaaaagcctattagatgttttacaaatttaattttgcagattattttagtctgtcatccagaaaatgtgtcagcatgcatagtgctaagaaagcaagccaatttggaaacttaggttagtgacaaaattggccagagagtgggggtgatgatgaccaagaattacaagtagaatggcagctggaatttaaggagggacaagaatcaatggataagcgtgggtggaggaagatccaaacagaaaagtgcaaagttattccccatcttccaagggttgaattctggaggaagaagacacattcctagttccccgtgaacttcctttgacttattgtccccactaaaacaaaacaaaaaacttttaatgccttccacattaattagattttcttgcagttttttatggcatttttttanaagatgccctaagtgttgaagaagagtttgcaaatgcaacaaaatatttaattaccggttgttaaaactggtttagcacaatttatattttccctctcttgcctttcttatttgcaataaaaggtattgagccattttttaaatgacatttttgataaattatgtttgtactagttgatgaaggagttttttttaacctgtttatataattttgcagcagaagccaaattttttgtatattaaagcaccaaattcatgtacagcatgcatcacggatcaatagactgtacttattttccaataaaattttcaaactttgtactgt

SEQ ID NO: 4929 - DNA, 988 bp, Homo Sapiens
aacctgcgactttacagggagacagctgtataggacttcatgggtaaagccacttgcttcatttaatgcctcacgtagattgattgatgttttataataatcatttcagaattttactctgcatcacaatgtatttcctcgttaatgtatgtaaatatttggcaatttaagacattgtgtaaaaagcaatctgtaaaaacatctccaggctttgatttttgtaccatggaaattgtatttaaccatacagggttttggtatgtttatattgtttaccttagtgatgtatttgtttaagtggctaacatccaaacgactgtttgaaggcatcagagtaatcttcagtgtggaatgttaaataacgcttttatactgtattttgtactatgatgtaactccccttccttatggctaggctactgtaacacttgcctgtaatcagtgaagggctgtgcaccttgtactatttcacaatgggttctgctggacagataatgggccagtgttattgaggtgatcaagatctgttccacagggctaatgccaccatctcccctcaaaattttgtagaggttctaaaaagaaagtggtatgttgtgtgatgatcagcactaagtcctgcattcctgttaaagccacttgggtcataagaagggagtaaaaaatgaagtctgactagaattctattgcagaggccaagtacatttagtatggcattgagttgtgatatagttttactttgatgtgcattttgaatttcagctacacctagatagacgtaaaatgataattaaaatgctgtaaccaacttatctaataaaattggcaaccagccactattttgttgactatgagaaagttaaaagtttatgttaatttttagggtctgatagaatatttcatgtgtattacagtggtattcatatgctatgtctctaaactttattttcaaaagcttaaggcccaaatacaaacttctctggaataa

SEQ ID NO: 4930 - DNA, 895 bp, Homo Sapiens
ctaaattgttgcctttaataatttcattaattcttgtcaacaatttttatgggcctgcttattaaaaataaaagatctaagtggaaacgttgattagacaaaggtacctcccctctgagaacacctaacattacaatatgaaaacggtggcttcaagaactctgagttcttttaattacctgtatcagatgagtaaaaagacactccggacgataatgaatgctttcttaacacaacagaaccacctacacacatgaacaggactgttcagggagcctggctttggtgtgaactggggctggctcccaggtggagcctgctcttagaacacaccagaaggctggaaggctctagtggggccgcttgcacacgcaacagtacagttttacttttttcctggacagtgcagactagtgccatcagctctagccttgcaggagggcacagtcattcttcagacttgcactcctggctctggtgctgcatcctggaaaggacgcgctcgtagaacagcaggtaggcgctaggaggacaggacctcctgcaggctggccttgcggacagtgtcatcggagacccacagccactgattgctagttgagagagggttcctggcagaaggtggaggaccgtcggtaagtgacaaagtgtccagagtgcatgtctccatggtggacgacaactgccatcagccggaagaggtatgttagagagagctgtagatcgcggaacaactggtgagagggtacagggcatacggcgctggacagcgttgcgcaataaatgataggagagccaggcgccattcatttaaaatctgtgtattgggggccccttgctgaattcagaactgatgtgggggctcccgtgcccattctgcagcaccagtgtagcc

SEQ ID NO: 4931 - DNA, 1110 bp, Homo Sapiens
  misc_feature (411)..(411): n is a, c, g, or t
  misc_feature (537)..(537): n is a, c, g, or t
  misc_feature (602)..(602): n is a, c, g, or t
ggggcttttgtacttcctgtggacatgtagtaatgtctatattggctcataaaactaacctgaaaaacataaatgctttggaaatgtttcagttgctttagaaacattagtgcctgcctggatccccttagttttgaaatatttgccattgttgtttaaatacctatcactgtggtagagcttgcattgatcttttccacaagtattaaactgccaaaatgtgaatatgcaaagcctttctgaatctataataatggtacttctactggggagagtgtaatattttggactgctgttttccattaatgaggagagcaacaggcccctgattatacagttccaaagtaataagatgttaattgtaattcagccagaaagtacatgtctcccattgggaggatttggtgttanataccaaactgctagccctagtattatggagatgaacatgatgatgtaacttgtaatagcagaatagttaatgaatgaaactagttcttataatttatctttatttaaaagcttagcctgccttanaactagagatcaactttctcagctgcaaaagcttctagtctttcaagaagttcatactttatganattgcacagtaagcatttatttttcagaccatttttgaacatcactcctaaattaataaagtattcctctgttgctttagtatttattacaataaaaagggtttgaaatatagctgttctttaagcaaaaaacacccagctaggaccattactgccagagaaaaaaatcgtattgaatggccatttccctacttataagatgtctcaatctgaatttattgggccacactaaagaatgcagtatatttagttctccattcgcatgatgtttgtgtgctatagatgatattttaaattgaaaagtttgttttaaattattttcacagtgaagactgttttcagctctttttatattgcacatagtctttaaggtaattcacgggcatatgttttgaagactgtttaaggacggaatatctccctccaacttttgaaatacaaaaccagtgttttttacttgtcccctgttttaaagtctattaaaattgtcatttgacttttttctgtt

SEQ ID NO: 4932 - DNA, 465 bp, Homo Sapiens
gtgcaattcagacttaagcatcgagtttttaccatcttccactttaagctaagttatgatacctattccattcacaattggtgttctttttaaggtttgcaaatttcagccaattttgtagctaagattgttctgatcagctcaaaaagatttggcttagtgttttcattgcaaattataattgctgtagagccacacacaacttttgaacttttaattataagtgttatggctaaagttatttactgaaaatttcagtaaaatgtgtgaatgtttctttatgtattaacctcatagcagtaaatgacttgctgttgtttaatttttctaaggcatcttaatagacttctgttgaaaacttcagtgttaacatttttatagtttgtactaaatttaaccgtgatataaaaatgaattttatgcatagatcagaattttaaattaaaggttttttctttaaaaaaa

SEQ ID NO: 4933 - DNA, 701 bp, Homo Sapiens
  misc_feature (579)..(626): n is a, c, g, or t
aactagtaaaaatgggtagcttcctgcaaatatttctctctctctcccatccccgggaacattattttcagtatcttgcatctggggggcctccagcctctgaattagctcaggaccctgagtgaactttttaaatccttaggatttttctttttctcccacttcccttggtgccttccagctggacacaaactcattcctaaaatatgtggatggaagctatggtaaccatggagacagggcaggtggcaaggagaggcagagacagtgtgagagaccaatagacagataggaagagagaagatataaggaatgtttcagacagagatcgtcaagcaagatggaaaaaataagacgtctaagcaagactgagattaaagagatgcaatgtgagagagtgtattacaaggttcgctctttctccctgcccctgtcctatctccctgcccacaataatacggggtggaagcacctggaatgtcccttgccttatctaaaagtgctcccatatccaccttcctcatacttatctaagaagtctacataagggaactgaaggtccagtttctcctggcgaannnnnnnnnnnnnnnnnnnnnnnnnnnnnnnnnnnnnnnnnnnnnnnncttaaattccaggctgggaccctggattccccttccccatttaacttacggggaacaaaacgccccccataaaac

SEQ ID NO: 4934 - DNA, 814 bp, Homo Sapiens
  misc_feature (51)..(121): n is a, c, g, or t
ggggtggctcactgtctgtaatgtattacctgaggcagaagaccacctgannnnnnnnnnnnnnnnnnnnnnnnnnnnnnnnnnnnnnnnnnnnnnnnnnnnnnnnnnnnnnnnnnnnnnntgagccaccgcaccctacctcattttctgtaacaaagctaagcttgaacactgttgatgttcttgagggaagcatattgggctttaggctgtaggtcaagtttatacatcttaattatggtggaattcctatgtagagtctaaaaagccaggtacttggtgctacagtcagtctccctgcagagggttaaggcgcagactacctgcagtgaggaggtactgcttgtagcatatagagcctctccctagctttggttatggaggctttgaggttttgcaaacctgaccaatttaagccataagatctggtcaaagggatacccttcccactaaggacttggtttctcaggaaattatatgtacagtgcttgctggcagttagatgtcaggacagtctaagctgagaaaaccccttctctgcccaccttaacagacctctagggttcttaacccagcaatcaagtttgcctatcctagaggtggcggatttgatcatttggtgtgttgggcaatttttgttttactgtctggttccttctgcgtgaattaccaccaccaccacttgtgcatctcagtcttgtgtgttgtctggttacgtattccctgggtgataccattcaatgtcttaatgtacttgtggctcagacctgagtgcaaggtggaaataaacatcaaacatcttttcattaaaaaa

SEQ ID NO: 4935 - DNA, 823 bp, Homo Sapiens
gggtgtcccttcctgttttaattcctaaagatcctgacttttatctgaggaagtctaggtagttttccttttggatctggccattggtgcgtgtttcattcagatcacctctggaatctctgtggttgtgaaggcaattccttatgagactcttgcctcctgtggcttacgtgatgaattgttaatatggcagtaattaattagtatctacttaaatttagtggtcagaaatgtatttgaagtgccttaaagatgatcatggttcagaatatcttcagagaaagcaaaatctttaatattgcagggagcctagcaatacaagtacacatttctgtggcttgatttcttgaatatgctgagacccaatttggactacatttggcagaaatgatggagtaaacagcaaggctttaaatttaaattaatagttacaaggtaggttggctcttaggtgaatttagccatgtcaactaatagcttttatatggtatgtaacaaatctgaattatgttatgctgtgaattattcagtgcattataagaaatcttagttaatcatgcttatgggcttcattagtcaatgtgattggccttttattttctttccataacttatctgctattattagtttcttattccttattaataatccgttagctcattatcattagcttactaacttgaaagttagattaatatcaaaataagaatagcagcactatgaagaagttaataaaatgccatttcatgttagagctagaataaaagtaattgagcagtcatttgccaatgcttcattataacatttatgtgctttagattt

SEQ ID NO: 4936 - DNA, 629 bp, Homo Sapiens
  misc_feature (140)..(140): n is a, c, g, or t
  misc_feature (165)..(165): n is a, c, g, or t
actgccctgttccatatataggtgccccagatgcggatgttcgtggtcgatcctttcatgacctggttaagaagttacataaagttgtttcaggccccgtgcaagcgctgcgggaagtttttgcagaacggccttccccngacatggagggatttcggaaccctngaagccttccatgacacctgccggcagtagcccccacgctggccccagcctcagaccccacccagcaccttcccagacacgcaggaagcccacagaaggctcagctggttcctcactgcccagatgtgtacagctgctcctccctttcataaagcagcgccatgtgtgcagaggccactcttgaagagcagactccctctgtggctgatgggactaattattcccactagccagcggactgaaggcaaagaagacctttctagaacctggtagaaggaagctgtgcagcatgctcctcgtccatgtgtgtcggcagtgctggtgtctgtcgtctccgcgagctgttactggaatgagcccttgtgttcatgggtatcgtcatgcggggttcttgtgttttgtggggcttgggttttggtaacttatttttataagcaataaaccttttgtatcctgaaaaaaaa

SEQ ID NO: 4937 - DNA, 451 bp, Homo Sapiens
gaacaccacaagttccagcaaatgtttcttgggaggaagaagcctgatccatcaccatctgcttgactatgtagcttggattctcctttgtacctatccctttcgatttggctttaccttcatctatcttgatcctttcctggccaaatatcctcttgggcccaaatgaacattgtaccatagtcttctggaaagcaaacatgcttcctgctatgtaattgctaacattcatattagatgatgtgctgtagcttgatcttccttagcctactgccactgaggcagtaggttttaggtggtatcgtagtgccttttgattaatttaagtatttaattttcatcttccttctttggatctatttggcctctcaaatgaactgagattcctgttaaaaaagattgatgttattgtctcttgtagaggaaactaataaagtgtgtgtacctgtga

SEQ ID NO: 4938 - DNA, 800 bp, Homo Sapiens
  misc_feature (716)..(716): n is a, c, g, or t
gggtaataatgaggctccagttgttcattcattgtccaatggtgaagtaacaaaaatggttctgaatcaagatgatcatgatgataatgataatgaagatgatgttaacactgcagaaaaagtgcctatagacgacatggtaaaaatgtgtgatgggcttattaaaggactagagcagcatgcattcataacagagcaagaaatcatgtcagtttataaaatcaaagagagacttctaagacaaaaagcatcattaatgaggcagatgactctgaaagaaacatttaaaaaagccatccagaggaatgcttcttcctctctacaggacccacttcttggtccctcaactgcttctgatgcttcttctcacctaaaaataaaataaaatacagtgtacagtaaccttttagtcaaaacagcatcatacttggaaactgaaagcctactgttatttgttattgttgcttaacagctgatacaggtattctggtgacactactgtgctggcttacttaacctgaatacactatttttttcgttgtattactggtatgtcattttttttactgttaagtacttatgtgtgaataagtgtaaaaaaatgattgcttatcggtaacatataaattcagaatcaggaatgatggtgatgccaaacaatcacagatcgtccacatgggtggcggagatgttaacaccttttgctttctgatggntcagtgtatcccacactttgtttcatgccaaaaattatttaaaatattggtatggaaattaccctttcaggcctatgtggtatc

SEQ ID NO: 4939 - DNA, 314 bp, Homo Sapiens
cggggcaggggaccttacctgtaagacttttaaagattttcctccctcctgtttcaggtgggtcacattctgatgaatgtttcccttgtacagatcccagcttatggccttgacccagccgtcctcacagatgccgggtgaccctctagctctctctgcatctcccaccccccgacaccctgggaccctcgaccccacccttctttcctaccagcccagagccttgtggcttgtacagttttgaaactcccgttctattttatgatggttgataatagtcagtaacctaataaaggaacgtttgttaaaatatc

SEQ ID NO: 4940 - DNA, 854 bp, Homo Sapiens
cggtccaatcggtcattccaagaatacagtgtagatcagcggcctgattcagagatcagctggatcgtgacctgacaggtgctccatagcttccagcaggagcacttgcccgtactgtgtcagagtagctatgtcacatcggagccctcggcccacaaagaggacagtggcagcgtaccctccacgaggcccagccagggcactcccatctcgctgaagaggaagtcagcgggcagcatgtgcatcacccaattcatgaagaagcgcaggcacgacggccagattggtgctgaagacatggacggcttccaggcagacacggaggaggaaggaagaggaggagggcgactgtatgatcgtggatgtcccggatgctgcggaggtccaagccccgtgtggagccgcttccggagctgggggtggtgtgggggtggacaccggcaaggccaccctgaccgcgagcccactgggtgcatcctgagagcaggggtgacgtatgtagaatgcttagggtgtcctccccacagagcagatacttgaaccgactcaattcctgtgtaaagagcactttgtcctgcttcacggacctccccaaagtgtgcagagttctatataggatgctggattagttcctttgatatttgtaaaaattcccccaagagccgcatatgaatctgccctttaataaagcattattgagattgctggcctattggggaagcctgcgggcacaggagcaggcgtggaatccaatacttgtaaatgaattgaagcgtcaggaccacccgcctggccacgtgcgcgggcccctggacctaacgaggcagtgtataaacttattctctagccctgaa

SEQ ID NO: 4941 - DNA, 624 bp, Homo Sapiens
aggacaatgtacacaggtcagtaagaagcatccagagcaggtgatgaatagatgaccttactaaaatgagaaagaaccaagtcagtgatgaaatcattaatttctctggattaaggatcatggattttattttgtgctttctcttgttgattcttctcaaatcgttgtgtttagtaattgctagggagagtagtttaaaacttagattttttgatgcagatgtcagaattataccatctttgcatatgtccacattggaaaatttttgtaaggagcatttgttggatacctctgtgcagtctgtgtccagtctagaccactaggtgggtggagtgacttccagtttttgaagggaagtcacttctggtttttctccccttgttttttatggtaaatgccaaagtaattataatctttgactagactaaaatccaataaagcttgaaaggagggggaaatctaaaataaacctgcttagagggaaacagtagcttctttaaccttgttggaattttaagaccggccagatctctgccactcatgaaatttacagtatagtggggaaggaccagaaaatagttaaaaaatccagataatgagattaaagaaaataaggcggccgct

SEQ ID NO: 4942 - DNA, 1001 bp, Homo Sapiens
ttgaaaaaggaaactgtattttatttactcattcatattttagatccagaaccaaagaaaagcaataaagttggtgaaagactcatacaacccacaatgttgcccccataaaaaatattccaaattaatttctggccacaaattctatttttacagcatgtaattgaaaccagattacctttggtttttctaagccaccccctccacccctagagagggggctaaaaagaatgtagtataagtgaatcttgaaagatatccttggattctgctgtctcaaatacagtttgctgcaaaaagtctttgccaactaaactatcattaccttccccgatgctaaggttgaaaatcagcatcttgattataagcctaactttcaagtttctaactcagctgcaaaatattttcccaactaaacctgtggtgttccaaaaatatatactatacagcaatttctaaagttataaatgtcttggcgcatttggcatacttgcttaattccaaaatcattaaaaagacacatttagtgaaaaagtatctcacaaccagccatatctgggataatgaggaaaagaggaaaattatcataattaaattctaaaagttgccagcagtagctaaaaaaataatattcttaatggaaaatgttgggtatgacttcgtagcttcaaatggcctaattcacttacgtgtataataactgcaaagacgcccgtccacacaccactccggaattaattaaagaaatgtagcacagagaagtctgggggtgttgactttaccagccaggttttcattgaagttccccagcacttagttgtccctgatattagtgtcacttataatatgtaggagtatgaaacttgcaacacacccagctcggagctggaagtggaggagggcgagcagaggccgcctgggcagggctcccagagcgccattacccgccgcggccacaccatgcgctttatgttgtaaaagctcggggtttcgaatattcc

SEQ ID NO: 4943 - DNA, 690 bp, Homo Sapiens
tcacattcaccatattcgaaaaagtttcataagtatatcaaccattggggtcatcacatcataatttcctgtccctaatttctgaattacatgtgaaggaatagggcactgacgactctcacgaccatagtgcttctcagaggaataccgacggattattaatctcactgtatgaggctgccttccatcttggcatactcggtttaaaagactagcaagtagttcttcaatcttatttttagcttcaacttcagatgaacatttgttaaatgaatcttcttcactaaaggactgaggtggtcctgagagtatcacaggggagttatcctctccaaaactgagcttttggatacgctgagcaactggaattcctaattctttttctaaaattttgggtgaaaaggtttggagatcacgcacactatttgatacccagtgcttcaagacatttggcagttttatagccaataccaggtatttcctttatgtgattcaaactatgaataagatgttgacaactttcaggtaataagactgtttgttgatttggtttaaagacaccagaaactaattttgccaacagtttattagaagccactccagcacagccagtgagccccaactgattatacatggcttcccgcatctctgctgcaatctgagatccaacaagtagtctgattggcaaga

SEQ ID NO: 4944 - DNA, 665 bp, Homo Sapiens
cctgtcttaactactctgccagctctcgtcgaacaaagaccaatccgctctacatgatttgctcctcatgtcttcttataattctaatgtgtctacatccttggataccatataataggaaaattcttttaaacaactaaaacagacataatcacaattccaacttaatgtaatccaatacaacttcatacaaatagcagttaaatcacacgtagtaaaatttcgtacaacatttttttaaagtttcaaattcaaatgttccaaatgtttaattattttgtcttaaggtacatttgcaaagaattctaactgctgctattacctttgtccttgctgaaggaaaacattaggagaatgagctgtttttaagctaaacgtgtctccacttgatgaatggcgtgaaggagcttttccacccaagagtgatgtttctgcttcttttatttccattgcccttttgtataattcagcagctttttcaaaatctcctccttcatagctaagcacagctaaatttttcagtgtttctccaactcgaggatgcatccgacccaggctatcttcataaatctttaatgctctttcatataatgggcaaagcttcaacgtgttttttcatttgggtataaagaacaggtaagtcaccaaggagtaagtacactagg

SEQ ID NO: 4945 - DNA, 617 bp, Homo Sapiens
  misc_feature (85)..(85): n is a, c, g, or t
actttccaagtgtaaaaacaatgtgctgctgcttcacttccgccctccggttatcaagcaaaatgtctcttgtggcccatcttantggaagagagttccgggaaacatagcctcaccaaggtgacacattacaaagccaccctaccatgaatccgctcccaagggtctcactgctcacctgaggataactcaatataactatgttgctgaaaatgcaaagctgaagaccatggatttcatggtgattccagcaagtacagagattctatgaagcccacccagaaaaaacttgctggtcctggctatttttgtgtcatttattcaagtattgagaacctggcctgtggtaggcactgtacttaatactaggatacagaaatgcaaaagatacggcccatgcaattttattaaatgcatcaatatgtattacaaatggtgaatggatttccaactttatcatggaatttaatgctgaatatatagaattcagaaaattgttgggaggacagcccttttgtgaaccttgtttggggcacagtaggaattggaaataatttagtttctatctctaagctgttctattttaaaattatttttaaatttttattgtcccactt

SEQ ID NO: 4946 - DNA, 544 bp, Homo Sapiens
cccagggtccagttcctaattgttgggggattggcgcaaaatgattacaatgaagcgccgagcaatgactgctccagagaatggccagcccctctgtgatctggaaatctctaacttagatggttttggtcccaaacatattagtctctacccttcctgctatccactgctgcttttggactttgtccttcatattaacagatataaggctcatagcactgcagagcaaaaaaacataacaaaccatttttatccatcctctgtggaccagagctgaacacactcataatggtaactctggagtgaagtcctgtgtaatgacttcaaaaaaaagaacaaagaaaacaattaactcttcctactcagtagtgcaaataaaacattttcttttcaaatataaaaataatccaagaagactatccatgattaaaggctactctctatgattaaccaggtccaactagttcagaagagtctttaaggaagtgattgtcaaaaaacactcagacaaatccacaagaagtgggcaacatgagcaaagaat

SEQ ID NO: 4947 - DNA, 1002 bp, Homo Sapiens
  misc_feature (14)..(14): n is a, c, g, or t
  misc_feature (798)..(888): n is a, c, g, or t
gagggtagcccgcntgtggccgtggggcatggaggtgcccaagctggccatgcagtcattgggcccaagcctgcagctggccctgcgcaatgccatttgctcgaagcttgagcccctgccctccccgttgaaggtagtccgcggcctcctgcccccgctgcgcattcatgaactcctgtccctgcgtcctcggccccggcccctcggacaagagccacccccaggcctcatggctcttgaggtcccagagcccctgggtgaagacaagaagaaggggaagccagagaaattgaaacggtgcattcgcacagcggcagggagcagctgggaggaccccagcctgctggagtgggatgcagatgacttccggatcttctgtggggatctgggcaatgaggtgaacgatgacatcttggcacgcgccttcagccgcttcccatccttccttaaggccaaggtgatccgtgacaagcgcacaggcaagaccaagggctacggcttcgtcagcttcaaggaccccagcgactacgtgcgcgccatgcgtgagatgaatgggaagtatgtgggctcgcgccccatcaagcttcgcaagagcatgtggaaggaccggaatctggacgtggtccgcaagaagcagaaggaaaagaagaagctgggcctgagatagggtctgtggccaggcacccgctcccacctggccgggcgctggctcctccctcagttctctttggaaaacccccagctgtccacccatcccctgccccaaaaccagtttcaataaatttacgttcatttccnnnnnnnnnnnnnnnnnnnnnnnnnnnnnnnnnnnnnnnnnnnnnnnnnnnnnnnnnnnnnnnnnnnnnnnnnnnnnnnnnnnnnnnnnnnctttctacaccattccctttgggcccgcgggcccaacccggcaaggccaaaatggggccattaccctgtctaccaagcgaaacccctgcgaaatgccctttggggtggggcact

SEQ ID NO: 4948 - DNA, 287 bp, Homo Sapiens
cggacgcattcaggaggatttttaaaaaatagctgcagattaatctggaaaatgtgctaatttaataatagttacaaatttataaatttaaatccatttgaaattgttgcattatgctgggtagtatatacaaaatggttatcatcttaaaccaacttttcagagaatcgtgatggactctgcctttaggcttgaattcttcaaagtctattttaatgaaatttatctaaattgcagcagtctatttgattcagctcatagacatgtaaaaattatgaatgcgtccc

SEQ ID NO: 4949 - DNA, 980 bp, Homo Sapiens
  misc_feature (728)..(728): n is a, c, g, or t
cgcttgcagcttaaaaattgaagccacaaacagctcttacttaaggtgattatatttattgatacttacatattaggagttaaaacaaatttaaaacatacgagtactgtacacgcaagcatgcatcccctagagtctagagtgaggctgtcactactagcatctggaatgctccgttgtatattcaggaggggacagtgaaaaagacaaataataatgtctttgtattatgaaaagttttgatctcatagatctcctgaaagtctcaggtatcccccgggggtccctgggccacactgtaaggaactgctgcctactttttcccatggaatgtgaatcaaaacctgttgaattttagctgtaacttaagcctagtttatatttgtaaaaagaaaatgtacagaagattgtttacataatgatatacaactttaaatattttcagcatttaccttatatgatgggcatgaatctagaaacatgaataattatcagactagaaccttctaatttaaatatctaggcttcagcctgccattgttatagttcaatcgacatgtgtctagctgattaaaatgtctactgaaagatttattaagttttatcgcccactctggccttgtataaatctaaagaggtctctaacgaaaaaaagtcaaattaacatgtttatgtctataaatgccacaagtaagttaaattacataactttgttagcactctgaatnaaatgcctcataacttttgtaagttagccattgagtcctcaggaaaatgtatttcttttccttacagagtttctgctatggtgctggaaaatcagttcatgtgctgagacatataggcggtcctgagagcgaacctccccaggcacttcggccacgggatagaagacggcaggaggaaattgattatagacctgatggtggagcaggtgatgccgatttccattataggggccaaatgggccccactgagca

SEQ ID NO: 4950 - DNA, 433 bp, Homo Sapiens
cggctgctctgtatctctgctatgaggctgagaagatctcaagtgatttagcaattagctcatctgcaaagatgaagtaatcctctatttgtgcactacaaagcactagagactgtaggagaaagaaagctttctctgtaatgcagcttgtatgaccagcctgcagtcgatcttgaaaatgtggatacaccagaattgctttgcaaatgtgttaagtgcattcttttggtggctcgatgttaccctcatattttcagcactaattttagggatacagttgatatattagttggatggcatagagatcatactcagaaaccttcgctcacgcagcaggtatctgggtggttgcaagagttaggagccattttgggtagctgatctcgcattttctacgactctacttggtcagtttctagaagacggcaagcgg

SEQ ID NO: 4951 - DNA, 475 bp, Homo Sapiens
ggcttggatatggtgtgagggtactccatttagagaattcagtgattttattcaagcagtagaacggagaggagttggtgccatggaaatagttgctatggatatgaagcttagaggaatgtacattgctcgacaactgagctttactggagtgaccttcaaaattgaggaagttcttctttctcagagctacgttaaaatgtataacaaagctgtcaagctgtgggtcatcgccagagagcggtttcagcaagctgcagatctgattgatgctgagcaacgaatgaagaagtccatgtggggtcagttctggtctgctcaccagaggttcttcaaatacttatgcatagcatccaaagttaaaagggttgtgcaactagctcgagaggaaatcaagaatggaaaatgtgttgtaattggtctgcagtctacaggagaagctagaacattagaagctttggaagacggcaagcgg

SEQ ID NO: 4952 - DNA, 596 bp, Homo Sapiens
ggggtgggtggaaacgcgctggctgactggggtcggcgtttagttcagcgcagcgactcggggacctggagctgacgcctagacacttgtattagctttaatagaagagaaatggaggagccatagaatattaaggatgaattcaggaaggcctgagaccatggaaaacttgcctgctctctacactattttccaaggagaggttgctatggtgacagactatggggcctttatcaaaatcccaggctgtcggaagcaaggtctggtccatcgaactcatatgtcatcctgtcgggtggataagccctctgagatagtagatgttggagataaagtgtgggtgaagcttattggccgagagatgaaaaatgatagaataaaagtatccctctccatgaaggttgtcaatcaagggactgggaaagaccttgatcccaacaatgttatcattgagcaagaagagaggcggaggcgatccttccaggattacactgggcagaagatcaccccttgaggctgtcttgaacactacctgcaagaagtgtggctgtaaaggaaaaccatccgccatccaaaacccaacaaatatgtcggac

SEQ ID NO: 4953 - DNA, 898 bp, Homo Sapiens
  misc_feature (361)..(369): n is a, c, g, or t
  misc_feature (411)..(426): n is a, c, g, or t
  misc_feature (571)..(737): n is a, c, g, or t
gggagtgtgcttgagaaacaaactgcacccactgaactccgcagctagcatccaaatcagcccttgagatttgaggccttggagactcaggagttttgagagcaaaatgacaacacccagaaattcagtaaatgagactttcccggcagagccaatgaaaggccctattgctatgcaatctggtccaaaaccactcttcaggaggatgtcttcactggtgggccccacgcaaagcttcttcatgagggaatctaagactttgggggctgtccagattatgaatgggatcttccacattgccctggggggccttacgcatatcccaccagggatctacgcccccctttgcgcgatcgcgcgnnnnnnnnnttacggcgaggtcccaactatatctccatttcccgctctctnnnnnnnnnnnnnnnnttttctcccaatcaccccaactccggtcctggtcatacccccaccccccggcctactcactctactttatcctctcctcgtgccctatactcctccgcgcacaccggtatctttccaccccaccctaatcttcgtttccccatannnnnnnnnnnnnnnnnnnnnnnnnnnnnnnnnnnnnnnnnnnnnnnnnnnnnnnnnnnnnnnnnnnnnnnnnnnnnnnnnnnnnnnnnnnnnnnnnnnnnnnnnnnnnnnnnnnnnnnnnnnnnnnnnnnnnnnnnnnnnnnnnnnnnnnnnnnnnnnnnnnnnnntctctcggccggcgctcccactaaccttaccccacccgcgacccgttaggcggccgtggactggccgcccgcgcagcgtagagctctgtcgccactcccccgctccctcgccccgtctgatcaccgtctccccctttcttcccgcccgcatccgcctctcg

SEQ ID NO: 4954 - DNA, 1246 bp, Homo Sapiens
acaggttatctggcgcgcgctttggaagtaggcgcgaagtagaaagtaggggcgggggccatataacggagggagccggagtatgctgaaaaaaggcaacctgacaagtagtagtaggcggaacagattagtatgggggggcaatagatagggtaacttgagaggggtttaggacgggggcgcttaatagggtgggtaagtatcggccgagtagagtatgcgcgggtagataagcatattgatagggggagctaacatggggaccatgaaggggcaagagtggcgagaagtacgaaggcagcgggaagggtcctgctagataaagatgggtgtgggggtggtgctggtttgcattaggacaataatataggggtaattgaggtgtgtgctgattcaggattgctgggggttaacgccgacaaggaaattatgtgatagggggatcatctggcccccagcgtaggcgcgggcgggcatagtggtatagtggacacattttagggtttgtgacaagaaaatgtatggtaaggaagaagtgtcgtagatgggggggtgtcaggacgagtacgtagtgccgagggggaagcatggaatcgcttgttgtttggggttgtgattgttttatgcgctttttggtgtaatagtttgctttttgaaaagtcatcacaatcagtttaattaagtgcacagaatagcaatcaatcagtcatgtcaataaaaataaaacaattatttttacatcaagtgtgctttatttcctccacaggtattctgttaaataaagcaccatttatatactgccaggccacagctaaagaggattctttacagaatcaaatttcttgtggttgttccgtatacaagtaaacttaattttgataataagaaccacagcgatcggaggcaatctgcctctataaggtacaaaactggcacagaggacaccatatcatacacagtaaaaatgctgtaagtttaaattacattgtacagggctaggcaaccctgttcttcccagacagccatattaaatggaaagccactaaagtgaactcttaattacataaaacatatccattatctgatggccctttaggaagtatactgaagatgcaagtttttttcatctggagttctgcctgaccaagaattaagcctataaatctatctggccattcaagcagagagcactggacaaactgaagcacaaaaacaaataagcaaaacttatacaaacagcatgggg

SEQ ID NO: 4955 - DNA, 967 bp, Homo Sapiens
ccagtgttgcgctccagcagtggttaaagtgccaggacaggacagagacggatcctatcctgtgaagggctgcctgctctccctccttccagggtccttcaagggatcttggcaggcggatgggaggttggtgcaggaagcactaaaggtcctagcagccattcataagtccatctatgtctccagccccacatggtatcagccgcttccctcatcctcataggcgatggcaatccctcgtcttccactcacagcttctgtcactggcgtctgacccaggcggggctccagcccttgccagctccgggaactaaggaatgaggctgcaggactgctctcagccagctccagctggggccgtggggtcagagccaagcttccatgatcatttgatgacttccaggcaggtgggggtcggagatctccagtaatgagtgacacgtctggggtttcccacagctctgactcaggtggtgggagagccacgtggaagggagagccaggcaataagtccgcataatgtgtgaggtggggagccaggcctggaggtggccaggcagggttgcaggcagcttccagctcacatggtgccagtataggctggaagaagctaccagaaagctggggggctagagcacccagaggacaggctaatagcacaaagacatccacctcagagaagtcggcaagcttggcaggggtgggccggccccagggccaacacatagcttacgcttgcccagcagcctgagtcaggttccgcaagtgggccagtgcctcacggtgttgggctacaccccagtgtgcttgcgcagcctaccgcggctatctggcctcccaacagaaatcggctgggcctagcgctcagccgggcccatccaggtcttccagatcgacacgtgcgaagttgctgggccccagaaccatcaagggaaaggaacacgaaacccagaagccctcgcacctg

SEQ ID NO: 4956 - DNA, 777 bp, Homo Sapiens
ggaccgtgtgtcacaacaggctagggcacttcacgatgtcactacttgtttttctgatgttccaaaaacaacgtaacttggttttcatgtgtttttccgtggtatatgtgagattgatgctacgggtcttacggactcacacccgttcccactctctgcaatatggatcaggcagtgtttctgataggatgtgaaatggactctcctcgggtgggtccagcaggggccctgcccaccagaacacagtccgtgctgtgctgcgctaaggagctggccctcaactctccttggtgcagggttcccacaaccgagttctagttccctgaggtctttaaaaacaaaaacagaatgttgtacgtgaagattctaggaggggagggaccagcaaatctgagagaaccgtcctggggcctcccttcgaggagccctctgatgtgaggagggacttgagttgagtgacgctgtggtgtgaggtgttctgagctcactgaccggaaggtccaggtgaatctcgtcataagtgatctcaggctctcacaggatccggagggaaatgtgttagagggtctggaaaattcagtgcttttgagttacttgtttttattaaaaatttcctcacaaaagagagtcctcaagttgtggctgttcttgggaaaggggtcaccgtgtctgacaaagtgtaactttaaaaagcacgttgattttttacaaatgtaagtgtgcttgggaattccttaaattttgtgcaataaactattttttggtaaagattttcat

SEQ ID NO: 4957 - DNA, 2163 bp, Homo Sapiens
  misc_feature (2062)..(2072): n is a, c, g, or t
  misc_feature (2091)..(2105): n is a, c, g, or t
cgctctagaggatccttgcaggagagagaactgggacaggactatgagcatgtcacgatgttacaagaacgattccgggagtttgcccgagacaccgggaacattgggcaggagcgcgtggacacggtcaatcacctggcagatgagctcatcaactctggacattcagatgccgccaccatcgctgaatggaaggatggcctcaatgaagcctgggccgacctcctggagctcattgacacaagaacacagattcttgccgcttcctatgaactgcacaagttttaccacgatgccaaggagatctttgggcgtatacaggacaaacacaagaaactccctgaggagcttgggagagatcagaacacagtggagaccttacagagaatgcacactacatttgagcatgacatccaggctctgggcacacaggtgaggcagctgcaggaggatgcagcccgcctccaggcggcctatgcgggtgacaaggccgacgatatccagaagcgcgagaacgaggtcctggaagcctggaagtccctcctggacgcctgtgagagccgcagggtgcggctggtggacacaggggacaagttccgcttcttcagcatggtgcgcgacctcatgctctggatggaggatgtcatccggcagatcgaggcccaggagaagccaagggatgtatcatctgttgaactcttaatgaataatcatcaaggcatcaaagctgaaattgatgcacgtaatgacagtttcacaacctgcattgaacttgggaaatccctgttggcgagaaaacactatgcatctgaggagatcaaggaaaaattactgcagttgacggaaaagaggaaagaaatgatcgacaagtgggaagaccgatgggaatggttaagactgattctggaggtccatcagttctcaagagacgccagtgtggccgaggcctggctgcttggacaggagccgtacctatccagccgagagataggccagagcgtggacgaggtggagaagctcatcaagcgccacgaggcatttgaaaagtctgcagcaacctgggatgagaggttctctgccctggaaaggctgactacattggagttactggaagtgcgcagacagcaagaggaagaggagaggaagaggcggccgccttctcccgagccgagcacgaaggtttcagaggaagccgagtcccagcagcagtgggatacttcaaaaggagaacaagtttcccaaaacggtttgccagctgaacagggatctccacggatggcagaaacggtggacacaagcgaaatggtcaacggcgctacagaacaaaggacgagctctaaagagtccagccccatcccctccccgacctctgatcgtaaagccaagactgccctcccagcccagagtgccgccaccttaccagccagaacccaggagacaccttcggcccagatggaaggcttcctcaatcggaaacacgagtgggaggcccacaataagaaagcctcaagcaggtcctggcacaatgtttattgtgtcataaataaccaagaaatgggtttctacaaagatgcaaagactgctgcttctggaattccctaccacagcgaggtccctgtgagtttgaaagaagctgtctgcgaagtggcccttgattacaaaaagaagaaacacgtattcaagctaagactaaatgatggcaatgagtacctcttccaagccaaagacgatgaggaaatgaacacatggatccaggctatctcttccgccatctcctctgataaacacgaggtgtctgccagcacccagagcacgccagcatccagccgcgcgcagaccctccccaccagcgtcgtcactatcaccagcgagtcgagtcccggcaagcgggaaaaggacaaagagaaagacaaagagaagcggttcagcctttttggcaaaaagaaatgaactcctttccttcacctcctgcccttctcttaccttttcagtgaaattccagcatgcaagctcagaaccaacacattactctctgtgcctaatgttcctcaatgtggttgannnnnnnnnnnaaatttatagagcatttcnnnnnnnnnnnnnnnaaacacacctaaacactttatctccaagttacaaaagttcgaggcgcaaaggggaggc

SEQ ID NO: 4958 - DNA, 1421 bp, Homo Sapiens
  misc_feature (971)..(1060): n is a, c, g, or t
tcatagctgactctagaggataaaccttatgctatgacccacctgctctcacatacccagaatgcagaagacaagaacacccctgccttgacccgcctgttcctcgcaagcctggctgctgcagggagtggcacagatgcccaggtggccctagcgaatgaagtaaaagcagcccttggacgggcactggctatggctgagagtacagagaaacatgccaggcttcaggcagagatgtgtatcatcagtactatcatggagtcctgcccctccacctccagcttctacagcagtgccacagcgaagacccagcacaatggcatgaacaacatcattcggcttttcctgaagaagggactggttaatgacctggccagagtacctcacagcttagacctgtccagtcccaacatggccaacacagtcaatgctgctctgaagcctttggaaacactttcccggattgtgaaccagcccagtagcctttttggcagcaagagtgcttctagcaagaacaagtctgagcaggatgcccaaggagcctctcaagattccagtagcaaccagcaggacccaggcgagcctggggaagcagaagtgcaggaggaggatcatgatgtcactcagacagaggtggcagatggggatatcatggatggggaggctgaaaccgactcagtggtgattgctgggcagcctgaggtgctcagttcacaagagatgcaggttgagaatgagctggaggacctgatagatgagttgcttgagagggatggcggatctgggaacagtacaattatagtgagcagaagtggagaggatgaatcacaagaggacgtgctgatggatgaagctccttccaacctcagccaagcttccaccttgcaggccaaccgagaagattccatgaatatcctggaccctgaggatgaggaggagcacactcaggaagaggacagcagtggcagtannnnnnnnnnnnnnnnnnnnnnnnnnnnnnnnnnnnnnnnnnnnnnnnnnnnnnnnnnnnnnnnnnnnnnnnnnnnnnnnnnnnnnnnnnatgaagacgatgacgacgatggctctgagatggaattggatgaggactatcctgatatgaacgcttctcccttggtccgatttgagagctctgaccgggaggatgatctcatcattgagtttgacaacatgttctccagtgctacagacatccccccatccccaggaaatatccctaccacccatccactgatggtgcgccatgcagaccacagttctctgacactgggcagtggctcctcaacaactcgtctcacccagggcatcgggcgcagtcagaggaccctaagacagctgacggccaatactggccacaccattcatgttcagggccctcagcatcgcccccccgaccccgaaca

SEQ ID NO: 4959 - DNA, 652 bp, Homo Sapiens
tctctcgcaggcgccacaccagctccagccaggctgtgatctgatcgcctctgtcctgggctgtgtcaagaatcaggtgcccagtgggtcgggatggcagtgccaggagtcctggatgggcaccctgctcccatcatcccggagatccggcttcatctccatctgggggcggggcctgtgactgccagctccagagccctatggagagctccctgggacaacagggcaggactggcaggggagagtcctggggccatcccagagggatcctgatgctcacagacctgtcccacacctgctgaggtggagcaggcgtgggtggtggccttcaagtttagggaggtggtatggggctcttcccaaggggctggagctcccctacatccaccctgggtcctccaggtgtctgagttcagagctgtatccacaagcctgagttagtccccttgtagtgccctgtgcatgcagggccctctgtggggtgggagacagactgggagggaccaggatgccacagaggctgcaagtccttgtgtggagacagctggccaggctgaaccagggagggttccaggggttccaggaggtgaagacacaggggcgccagaatggccttccccaagagggcctgtccaccttcaccaaggtgtac

SEQ ID NO: 4960 - DNA, 224 bp, Homo Sapiens
aacactgatataagcggcctccatataatattgtccagtggatgaacaaggtcttgacttactcagtgagagtggtgttggaggggatgggctcacggggaaattggggtgttcagcataacaaaatcgataggctgaaaagaaacagtatttgcgtccagatcaatgtaccatgtgatgcaaggccaggaaaggaagggcaagggtggagggcagaagtaatg

SEQ ID NO: 4961 - DNA, 403 bp, Homo Sapiens
cctctgtgtagggcatggccaatttcggataactgctttgtttaccacacaggtgctttgcttgtagaatggcccacacctaaaacgcagccaaaacaggaaaattgggactttgtgtttttattttgtcttcatatagcgttttcttgtgatttttgtgttctgagttgtaaatacttctaaatttcaggtttatcttttaaaatagctgtatagatttctattagaaaatagagttcaacctgctttgaggctttcttgttttgcttaagccgtattaaaatacagtttcgtggtattaatatttttctacttttcatgcaagctgagcatgtaaacagctcgtttgtttgctctcctaagatcttgattcctttttctttgggaagtctgttagcgctgt

SEQ ID NO: 4962 - DNA, 314 bp, Homo Sapiens
tggcctggggcacgaggacagcggccaagagctccggtgagcctgcagcccagtaggtactgctagacatggcttcaccgcagtaagtgcttttattattaaaatcactggcgtagtatgttttcaaactactcaaacgcgccaccccacactccagcactttgtgtctgtgctgcaaatgtcacaagattgacagcttctgctgtgggtgacaggagttacaggttctaagccagggacagcaggaccagatctgctatctcagaaagaatggtagtgtggttgctcacgcaggtaatctcaggacatgaaaa

SEQ ID NO: 4963 - DNA, 479 bp, Homo Sapiens
ccctcaaagtcacttagtgccaatcagcacaaaatcttaagaaaactctactactatgaaaggtaaactagcccgtatataccaaatgggcagatatcccaattcattctgtttgctgttatttggttacagaattccaggcaattatatattatggagagtaaatttaaatgcctgatataattgctaactcaacaaaaacattccttcctttcctgaaagactgctccttcacctgtggaaaagagaaagagataaattcaaatatcaagttttgagaatcagagaggaaccactaaaataatgcttcagacccacaaggttgaaatcaaatgctgttggcgccacccaaaagtaccaaagaagccacatacaaatgtgaaacatacacagaacccacttgtggtcagtacagcgattactactaaaaggagaaaaacctagaaaagatttttaaaattttaaacaaatttaactct

SEQ ID NO: 4964 - DNA, 784 bp, Homo Sapiens
atttctggacctcataaaacatcagaacattcacactggagagaaaccctatgaatgtaacgaatgtggaaaagccttctctcagcgaacatcacttattgtacatgtgaggattcattcaggtgataaaccttacgaatgcaatgtttgtggaaaagccttctctcagagctcatctctcactgtgcatgtgagaagccatacaggggagaagccctagggttgtaatgaatgtgggaaagctttctctcagttctcaaaccttgctctgcatttgagaatacacacaggtaagaagccttatcagtgcagtgaatgtgggaaagctttcagccagaagtcacaccacattagacaccagaaaattcatactcactaaaaaccccatgaaagccttgaaagtgggaaagctttcattagaaatttgcacctcatcatgccccagaagtaatccttctgaagcaaagcaccacgaatgaggttaactttaacaagtactaaaaacttaagggacaccagaaaatttgtactgaagagaaagacatgcatatgattaaaaccctgtgtccaacagagaaacctgcagcagagataatggtgaaagtttaggcacattttcactaaaagtgggaacagaaaatggaggcctgttttttattgctaccaccatagatctggagatcttcgccagtaacaagaaaaattaagttgtaaatattggaaaggaacagacaaaaatagatgacatggtcatctacaactaatattaagactcctgtggtat

SEQ ID NO: 4965 - DNA, 581 bp, Homo Sapiens
cctactgcgctgggatatggctttgtctcctttttcaacaaatgggatgctgaaaacgccattcaacagatgggtggccagtggcttggtggaagacaaatcagaactaactgggcaacccgaaagcctcccgctccaaagagtacatatgagtgtaggtgtattggagaagaaaaggaaatgtggaattttggagaaaaatacgctagattttaaatgttagagctgttcccggagacttattgcagaaatagatgagaagcaaatcaagactactattcaaaaatcaaataccaaacagctatcatatgatgaggttgtaaatcagtctagtccaagcaactgtactgtatactgtggaggtgttacttctgggctaacagaacaactaatgcgtcagactttttcaccatttggacaaataatggaaattcgagtctttccagataaaggatattcatttgttcggttcaattcccatggaagtgcagcacatgcaattgtttctgttaatggtactaccattgaaggtcatgttgtgaaatgctattggggcaaagaaactcttgatatgataaatc

SEQ ID NO: 4966 - DNA, 291 bp, Homo Sapiens
ctttataagacattattgacctccctggggctaaagattgcacccatgtgagtaatacactgctaaagaataattcattttttaagatctatagaggttctccactaggcacaattcattgctgaagttggatcatgcaacagttttacaagagaagtaggaaaacatacgtatactgaatatagtggcattatcaccatgaagacttttcagcatgtaagattaagacaggacagtgctttaaaacaattgcatggatttgggtttgcctattcaaatgaaaggggattt

SEQ ID NO: 4967 - DNA, 918 bp, Homo Sapiens
gtaccaaccctgaagtgccaaatgcccatttatagaaaatcagcttcaagacacttcaagatacacagtttctaatctgagcatgcagacacatgcagcccgctttaaaacattctttaactggccctctagtgttctagttaatcctgagcagcttgcaagtgcgggtttttattatgtgggtaacagtgatgatgtcaaatgcttttgctgtgatggtggactcaggtgttgggaatctggagatgatccatgggttcaacatgccaagtggtttccaaggtgtgagtacttgataagaattaaaggacaggagttcatccgtcaagttcaagccagttaccctcatctacttgaacagctgctatccacatcagacagcccaggagatgaaaatgcagagtcatcaattatccattttgaacctggagaagaccattcagaagatgcaatcatgatgaatactcctgtgattaatgctgccgtggaaatgggctttagtagaagcctggtaaaacagacagttcagagaaaaatcctagcaactggagagaattatagactagtcaatgatcttgtgttagacttactcaatgcagaagatgaaataagggaagaggagagagaaagagcaactgaggaaaaagaatcaaatgatttattattaatccggaagaatagaatggcactttttcaacatttgacttgtgtaattccaatcctggatagtctactaactgccggaattattaatgaacaagaacatgatgttattaaacagaagacacagacgtctttacaagcaagagaactgattgatacgattttagtaaaaggaaatattgcagccactgtattcagaaactctctgcaagaagctgaagctgtgttatatgagcatgatttggtaacttcagg

SEQ ID NO: 4968 - DNA, 814 bp, Homo Sapiens
ggattgcagcagtagtcttaaaaaggcttttgtttatttctttggtttgttaactagtgtcatctatttagagaaacatttttgtttttaattgctcaaagctgtcgccgctagtcttatgagctatctactaaaactatggagaaactttgtatgtgcacacaaaagtattcaagagacagtattgctaacatctcatcttaatgtcttttgttattgagaagttttaggtgcttcaaaacaatataaatggataatagttgttatttggggaattgtaatgatgttggtgctgcttccttctaagagctcagacaagtaaagtatgaaacattcttatttcagttagatggggaacattttgctagcccattagaagcacacagaattatccttgtcctcctaatattgactttcaggaataaagttcagtgtgctgatcattcacaatacagtggatagcttgatatcttctgttttcccattgcagttgatttgagaagatgaaggtttaaatattgttgaaagttgcagttttttaaaatgtgttcctttttcttctgtggatatttaagggcaatcgtgtcgctaatagaatatgtagtagagggggtggggaggtaaattcctctgacttgccaaagaaaaagaagggaacccccgtgggatatgctaacatttttacctgtgccaaggggaagtactgtgggaaaaatggtttcccttcctggggaaaagccccaaccgaaatacgggccagcattcaacttccacgggtttgaggccttgaattccgggttgaaaaaataacctt

SEQ ID NO: 4969 - DNA, 829 bp, Homo Sapiens
tttcgagaaggttgggggcacgaaaattgctggtatggggatccccggacgggaggaggaagggacccccaaagcctaaaggagaagagttggtgggggtggaattggtggggggggcaagacccattcaggggaagggccgaaggaggacgattaaagtagggcagcacactggggggcttatccacaggagcagatgagggtacaaggttctcagagggtgtggcccgtccatcagcagaatcactagattctcgggaatgggcccgtggaggtattcgtttccgagcctgtgcctcaaactgtgacaggttctgccgggtggccggcctcacgtccactttttctccattaagaactttccctggtaggagttccaacaatttgtggacagagttttcagaggctaccaccacctcagcatacccaggagaagctgcccacataaacggcagctcgtctattacgcaggccactgtaggtatacagaattgcaggggtcttgttgttgggcttgggagatggctcctggcgaacaggaggaggtggttcagtgctgctgcttctgtcatctgagggctgtgaggtggctgtcagcacatcatcatacaggtcaatctgatctgtattgttgaactctgggtcctggttgaactcctcgtcagcatatatatcaatcaagtccactccttctgacatggccccggaaggaagatcgcgagtccggaggatggacaaagtaaggaagatgccacgggaatatggcggcggcggcggcgagtccgcactaggcccgaagcgcgcgaaccgctctccgccccaggtcccg

SEQ ID NO: 4970 - DNA, 1732 bp, Homo Sapiens
  misc_feature (996)..(1006): n is a, c, g, or t
tggcgttctagaggagtcccccgggatattcgggcacgacatacggaaataacgtgacaggcaatgacatgattcgagaagctaatagcattattattacaccaggctatggtctctgtgcagccaaagctcaataccccagtgctgatttggtaaagatgctcactgagcaaggcaaaaaagtcaggtttggaattcacccagttgcaggccgaatgcctggtcagcttaatgtgctgctggctgaggctggtgtgccatatgacattgtgttggaaatggatgagatcaaccatgattttccagatactgatttggtccttgtaattggagctaatgacactgttaattcagcagctcaagaagatcccaactctattattgcaggcatgccagtccttgaggtctggaaatcaaagcaggtgattgttatgaagaggtctttgggtgttggctatgctgcagtggacaatccaatcttctacaaacctaacacggccatgcttctaggtgatgccaagaaaacatgtgacgcgctccaggcgaaagttagagaatcctatcagaagtaaatattaaggatcaagctgttagctaataatgccacctctgcagttttgggaacaggcaaataaagtatcagtatacatggtgatgtacatctgtagcaaagctcttggagaaaatgaagactgaagaaagcaaagcaaaaactgtatagagagatttttcaaaagcagtaatccctcaattttaaaaaaggattgaaaattctaaatgtctttctgtgcatattttttgtgttaggaatcaaaagtattttataaaaggagaaagacagcctcattttagatgtagtcctgttggattttttatgcctcctcagtaaccagaaatgttttaaaaaactaagtgtttaggatttcaagacaacattatacatggctctgaaatatctgacacaatgtaaacattgcaggcacctgcattttatgnnnnnnnnnnncaacaaatgtgactaatttgaaacttttatgaacttctgagctgtccccttgcaattcaaccgcagtttgaattaatcatatcaaatcagttttaattttttaaattgtacttcagagtctatatttcaagggcacattttctcactactattttaatacattaaaggactaaataatctttcagagatgctggaaacaaatcatttgctttatatgtttcattagaataccaatgaaacatacaacttgaaaattagtaatagtatttttgaagatcccatttctaattggagatctctttaatttcgatcaacttataatgtgtagtactatattaagtgcacttgagtggaattcaacatttgactaataaaatgagttcatcatgttggcaagtgatgtggcaattatctctggtgacaaaagagtaaaatcaaatatttctgccggttacaaatatcaaggaagacctgctactatgaaatagatgacattaatctgtcttcactgtttataatacggatggattttttttcaaatcagtgtgtgttttgaggtcttatgtaattgatgacattttgagagaaatggtggcttttttttagcctacctctttgttcattttaagcacccagtaaagatcatgtccttttcaaaagaaagtgtaagatttttcttttgtggacttttgctatcgtgcccttaaagctcttaaaaaatagggg

SEQ ID NO: 4971 - DNA, 735 bp, Homo Sapiens
gggagaatttagaggaagaaataccggagttgcagggtataggtaaatttctcaaggttataggttggggttcttagaactttttgtggtgtgtgttggcctagagcgactcagaagcgttagtgacttcacctaaaaaagctaacctctctgctgagcgcgaccggtatgcggcgcaggatgagcctcagggcttctgttaagagtctgtctgagaaagccggtctgcgctgttcctcggtggcgaccttaattatgagatgagctaatgctttactgacttaaccatggcgcagcgggcagtgtggctcataagccacgaaccgggaactccactttgtggcaccgtgagattctccagacggtatccaactgttgaaaaacgagccagagtcttcaatggagcaagttatgtgcctgttcctgaagatggtccctttcttaaagcactgctctttgaacttagattattggatgatgataaagacttcgttgagagtcgtgatagctgttcacgcatcaataaaacatccatttatggactcctgataggaggtgaagaactctggccagttgttgcttttctgaagaatgacatgatatatgcttgtgttccactagtttgaacaaactctgtccccctcctccgccactaaattagtgtcagtggaattttcacaaagctttttgaatttcttttttggggataccgggaattttcctttattcagggcc

SEQ ID NO: 4972 - DNA, 987 bp, Homo Sapiens
gggacttgaatgggaaggccaactggtgagggaagtggggtattatctactcaaatgttctaagctaatacaaaagaattacctggcaagcatccccctctgcccttcttgagattctgaatgaacttagaatcagatcaatggtgagacccagttatgtaactttcctttgaagttctaaaggataattgaaaataaagtagtctggcatgtttaacagtaaggagtgacactaaaatttgaatataacagtatgttgcaactatttataatagacctatttatgttttgagaactaagtaaaatgctatgaaaaattcacataaagcacgtaagcaccaaatgaaaatcatttcgtgctttcaaattaatgatactaggcttgtaggatgtcttagaatcatgtttaacaagaagttaaaatatttgcattttgaaatttttatgcagtttggctaaggaggaacttggaaaataacatccatcagcttctacactgcactttttgtatgtggactttgtaaaagttaatgtccgtttaacagttgcttgtttatttgtgtaaaactagctagtaaatattgatgatgttcaggcccactgacttgcacagcccttggagcactattcacacagaacacaattcagagtttgttaagacattaacacactttgatatctattccaaaaatacttttgttaccacaggttcattgctgtcatttagacaaaattaatgtactgtgatattttcccactcttaagatgatgttgcccagcctagtactgtcagaaattcagttctgatgtctgtgtgtgcaagatattaatgtggtccctgtaagaaataccagagttggtcatgatttactaaggagatgtaatattttctttgacctgttaggaatataacttgtgtcttgatttgttgcacatcatattttttgcaacattaatgaatttaaataaattaattggaacgttaaa

SEQ ID NO: 4973 - DNA, 412 bp, Homo Sapiens
  misc_feature (117)..(117): n is a, c, g, or t
atgacacttctgtgcagccataaatgctctgtccgcagacttcatctggataaaggcatctcctgatgggcggccctggtgattcaaaaccatgtgaaccccatgagtacgaatatnctgtggcgaactcccccaggaaatccaggatgtcctcaattgtggctgacatagggaagacctcgaaggcgtatacagtctctaacatttgtagggggcacaaattgctgaggtagtattggaataatgggaggggttggaagtggaatgagaggggccgaggagaatcgattcagcacctgctgaacttcagctgctgtgctcctgaagagttcaatgtatcttttacccaacaagtctttatgcttcctcaacgcattctgtgcatattcctcacaggcaaagaaggacaaaa

SEQ ID NO: 4974 - DNA, 279 bp, Homo Sapiens
cattatacagagatagtatttgctatggcgcattgaaacaaaaggcaagaattttgtgtaagtatgtttatcgtgttaattgagcttgaggcaggtttataaatgaggtatgtattggctgtttatattaacatggtacctttttcctttcagaaaagttggatattcatttacagataactgaatggttcttgagtttaaccttgaaaacacagttaatgaagttgctcaggggaattgcacaggcatcatagtcagaatgtctgtaggagtcagctg

SEQ ID NO: 4975 - DNA, 814 bp, Homo Sapiens
tcaggatccccccttaatatttctgagcacacacaaaggagacaatgctctctgatggtttgaactcactcacctaccaggtgctggatgtacagagatacccattgtatacccaaatcacagtggacatcgggacaccgagctagcgttttggtacacggataagagacctgaaattagccagggacctctgctgtgtgtctctgccaatctgctgggctggtccctctcatttttaccagtctgagtgacaggtccccttcgctcatcattcagatggctttccagatgaccaggacgagtgggatattttgcccccaacttggctcggcatgtgaattcttagctctgcaaggtgtttatgcctttgcgggtttcttgatgtgttcgcagtgtcacccaagagtcagaactgtacacatcccaaaatttggtggccgtggaacacattcccggtgatagaattgctaaattgttgtgaaataggttagaatttttctttaaattatggttttcttattcgtgaaaattcggagagtgctgctaaaattggattggtgtgatctttttggtagttgtaatttaacagaaaaacacaaaatttcaaccattcttaatgttacgtcctccccccacccccttctttcagtggtatgcaaccactgcaatcactgtgcatatgtcttttcttagcaaaaggattttaaaacttgagccctggaccttttgtcctatgtgtgtggattccagggcaactctagcatcagagcaaaagccttgggtttctcgcattcagtgcctatctccgagaata

SEQ ID NO: 4976 - DNA, 624 bp, Homo Sapiens
cttatgatatttctggagagcattcggacgaattccttcaaacgtatggcagcctcatacccctcagcactgatgaggtagtagagaagctggaggacattttccagcaggagttttccaccccttccaggaagggcctggtgttgcagctgatccagtcttaccagcggatgccaggcaatgccatggtgaggggcttccgagtggcttataagacggcacgtgctagaccatgagatgacttgtgggaccttgctatggacagaactggctcaatgaccaggtgatgaacatgtatggagacctggtcatggacacagtcccctgaaaaggtgcatttcttcaatagtttcttctatgataaactccgtaccaagggttatgatggggtgaaaaggtggaccaaaaacgtggacatcttcaataaggagctactgctaatccccatccacctggaggtgcattggtccctcatctctgttgatgtgaggcgacgcaccatcacctattttgactcgcagcgtaacctaaaccgccgctgccctaagcatattgccaagtatcctacaggcagaggcggtaaagaaagaccgactggatttcagcagggctgaaaggtactta

SEQ ID NO: 4977 - DNA, 728 bp, Homo Sapiens
ggaagaatgatctgattgaccgtgttggtctgtactgattcaatttgatgtggtgaaaagcaggttgataaatcattttatgtcaagggcagctttgctcatatttcccatgatttcatgtactgcattatttgagaagctgctcaacttgcaaaatcagttttcctctcaataaaattatagctctaatgtttgcatataagggaagtagttatcatgttagtaatacctctaatagtataaaccccaccccaaaattagccagtaatcctgtaggaaggtactgtatgatcaaatgtttaatcatataaatagaatgtaaatgtctcactgagcactgttttctagtgtatcaaaatgctcttatttcatcattcacttcactgtgctgttgttatgatgtgcttaacagggaacgtgattagtgaaaggaagataaacgtggatgttactccaaaacttcgtttaatgaatgcttaaagaattcaaattttatctgcctctcttgtaatttggatctcttcttaatgtacatagtgctaacatgaagacctttttctgcactatatgcaaacagggtaactaactaaaacaaagccactttcaatcttcaatccttgaaggtatatctaggtttatgacagtaattgtgtttacattttatggtgcctagtattgacaaaatgttatttccctacattaaacatgactccatagaccttttcaaa

SEQ ID NO: 4978 - DNA, 558 bp, Homo Sapiens
gggttattattgttttaaaggagagcatcctaagttaataggaaccaaaaaataatgatgggcagaagggggggaatagccacaggggacaaaccttaaggcattataagtgaccttatttctgcttttctgagctaagaatggtgctgatggtaaagtttgagacttttgccacacacaaatttgtgaaaattaaacgagatgtggaaggagaacctcagtgattttattccctagtgaggcctctgagggcctccacactgcctggcagaacataccactgaactagtatgtgctagaggagggcacaaacatccgctccttccctaggcctgctggctctggttttctatgcagatgattcattggattgggggtgagtgttttgtttttctgggggcagtgtgagctttgagggttggaatattgggaggcattccttagtttcctcaactagcctggaaagttaggagtctagggtaattaccccccaatgagtctagcctactattcactgctttgtgtgcatttttttctccctctttaaaaaacccttta

SEQ ID NO: 4979 - DNA, 868 bp, Homo Sapiens
  misc_feature (190)..(206): n is a, c, g, or t
  misc_feature (653)..(653): n is a, c, g, or t
gggaggctttgcaagttaactgctggggttataggatcaataccatacttgctagacaaagctacccagatttgtcttatattataatttttgagttaaccgtagtatacctattatgattatagtaaacagactagtgggtagtaatgctaaattaccatcacagttatgtgccatctccccaccccannnnnnnnnnnnnnnnngatcagcaaagaaatacaggagaccagtctcgagtggtgctgtacttgttatgagtggggcagcagcacagtgtgtggcatttacatggtacccaggctccacagagtaccaagatgttgccctctgggaccacacttagctcagagaatatggggtccttacttgtattctgttatcagctgattttgaaacatataataatgattttcttgttcccttctttaactagctgcctttagattttgataatcacagtcttaaaatactaggaaagaagtggatgggaattgtaggcatagatttcatatcaagggcatttcaagacagaatttttatttcctgtaataggcttgctggagcaaaggaaatgtgctgctaaaaatcaacttatgccattttaaaattagataaaatatggagtgcccatcctgctaagtgagtacagnaccaaaagaaaatttagtttggaaaaatacttgtttttccaaattccggtgttttattacaatcaaagaagaggaaagcaaggtattttttcacctcagattttaatatattctagatttgtttctgttttatagatttaattcaatacctccacatagatgtttttatattacatgaatttaataataaactaaacttttttttgtctcccgtt

SEQ ID NO: 4980 - DNA, 995 bp, Homo Sapiens
  misc_feature (827)..(827): n is a, c, g, or t
gatgacatggacttccttacaaggcaaaagaaattgcaagctgaagccaaaatggcccttgccatggccaaaccaatggccaaaatgcaagtagaagtggagaaacagaacaggaaaaagtctcccgtcgctgatcttctgccacacatgcctcatataagtgaatgcttgatgaaaagaagtttaaaacccgccgacctgagagacatgactattgggcagctacaagtgataggtcaatgatctccattcccagatagaaagcttgaatgaagagttggtccagctgcttctcatccgagatgagctgccacacagagcaggatgccatgctgggggacattgaagaacttgaccagacaatgctgaaagtcaccaagaagcacatggcagagaaaatgcctgcaaagtgaaaagaagccattcaaccagagaacaagctagaatttaatttgccttctgtggttgtaaaaatgctgttgctaaaggtggcgcagaaacaaatatcagtgttagtcattgataatgtctgaagcttaatgtccagtgattggcctttgcttcttaatttattttaattttttacttgtgccacttaatatcaggcattttaataaaatattgttacaaaaaatgtacagtactgacaccaccacaaatcatggttaataaaagagagtagttttaactttatttttatttgtttagagattttaagttggaacagtattttcccattgactacttttcattcttcactgtagttttaaagaagaactgtaaatgacggtgctatacaagtcaaaaaatacatggctgcctcgtantgaagttgtagctctccggaaatatggatatttttactcagattttccacatttttgtgaatggtggactaccctgaaattccctttttagatggggctattaacatttccggtggaattccgaagggttccttgaaaagttttaatgtataaataatgaaaaattaa

SEQ ID NO: 4981 - DNA, 476 bp, Homo Sapiens
ggatgaaacaaaaaaaggtgacgaataatatggcttttgtttctgtttctgaagcctgatttcatttatgccaggttttgaaaaacagatctttttcttaagtgaaagcacctttaatttgctctaacggtacatcctgtaaagacagaattctgcatagccttttaggtgtttttacagtatgtgaaaaatacaagactcattctagagttaaattaccaatcttggttgatattatctgcttccatttttattaatttggaaattaatatgttgctagtaaatattggtttttacagtacccagtttgaaaatgtaagttatcaaaacttaatgtagtgaatttgtgtaaccatgttgtattgttgagaatgtatttttatttaaattttattttcttatcaagagtattataaaaattaacttttgtaactgtcgcttggaaataactcaaataaattacaagaagcctgtca

SEQ ID NO: 4982 - DNA, 904 bp, Homo Sapiens
tagatatataaagtactgtagtttacaggtaggccttgaaatatcttttttaggatctgttaggaataagattgatattgtattgtgtgtaacctgcacaatgtggaaagctgatatacctgtgcaaaatctttgcctctgtgctgtcagtgtgatgtgctttctgcatggttatatactactagtgattttatcaaaacttctaaaatttaaattacgtggtaaaagatctgtaaaaggctgcataaatgttagttggcacataaagacaattgtagaagttgaaaaatgattgctatatttcaatgtttattcccactcaacatactgccttctaagcttccctttttttgttcaaagcatgatcttaaagatatgtttaagttaatggatgtaatgcagggttcctacactgtattttggcgcatgttggtggccctctgtgccctagatatatgcacacagggtgcaagttaaaagctacagagtgaaagttggtttggatcctcttcatttcatttgtttagcttttctgttatttttctctacttacatgtattcctgtgaataaatccttgttaagttaaccctttacttttccttccatgtgtattttcttatatactgtgaatgtgaaaacctaactggtacacttgatcttgtgttcatatgaaagtgcaagtctttattaatttggattgcctgaacagtgtatcccatgatgatgaaggaaaatggagagatttttctttttaactctgctggtcagagatgaagccacgcctttccatttttcaatgctgcatatttaatctgcaacaaaaatgttaagccataacagcctttttatattttagtttgtcacctttgcattgcagaataaatactgaataaccatttttat

SEQ ID NO: 4983 - DNA, 866 bp, Homo Sapiens
  misc_feature (498)..(521): n is a, c, g, or t
  misc_feature (523)..(533): n is a, c, g, or t
  misc_feature (536)..(562): n is a, c, g, or t
gggtagaacgaattatcctgacaagggacaagacggtggtcttgggggacctgctcattgatgacaaggacacagttcgaggccaggaggagaccccaagctgggagcacatcttgttcacctgctgccacaatcggcacctggtcctgcccccgacaaggagacggctgctctcctggagtgacaactggagggagatcttagatagcaagcgcggagctgcgcagcgggaatgagcggggatgccgcgggcagcagctggagctaaaggaagggcaggcccacaggggccaccgcagagccgagtcggggcggcatcgtgctggtgcctctggccccgtggagtggagcaggcagataccgttaagcgctgtgctaccgggccccaggcccagccacccggtacctcccgagaggctgtccctggaccctggctggcatggaaatacagtgggaaaaccagtcgggacctttaataaaagaccttggctttctaannnnnnnnnnnnnnnnnnnnnnnnannnnnnnnnnnttnnnnnnnnnnnnnnnnnnnnnnnnnnnaacatgttcggccgccctcggcccctcgaaaaacctttcctaaaaccattccgtttgggcccgcgggggccccagtagggtaaggggaacatgggcccatacctggttcccaaagggaaatcccggagccatggacttaagggcttggaattccccacccaaataaaaaaaccgcccggggggggaaacccaagccggttctggaaacaaatcccaaatatggaaatttcctgggggtcctttaactggggattttactccaccgggagagtcccaaaccgagagccctcaataatccaattta

SEQ ID NO: 4984 - DNA, 441 bp, Homo Sapiens
atcccccttatatttctggcagtggaaaatgacactagctacgatgaactgaaaagagatgcaaagttatgtctatcattaatgtctcaggggttgctctgaccctcatcaagtgccttcggtacttcaggtgctaaaacaaacagcaagaagcagttcttggcatgcacgatacacagtactgacctacctccagaccatggtattttataacctctttattttcctaaacaatgaaaatgcagtgaaagatatcaggtggctggttatcaagtcttttggaggacgaacaactggaggtccgagaaatggctgctactaccttaagcggtctgctacagtgtaactttcttaccatggacagtcctatgcagattcattttgagcaactttgcaaaacaaaactacctaagaaaagaaagcgagaccctggttctgtag

SEQ ID NO: 4985 - DNA, 366 bp, Homo Sapiens
ggagagccaccacagatggcacctgagggtgtggaatttttgaagaaaagagcctgaagtgaggactagtcatctttctatgcataatagcatggtgacacaagaagatcggtgagaacaagcagttggtcatcagtgaattgctgtttatgttcctgccagttgtcatggtgagtccttcggaaattggataaggttttttttacagtcatctcaataggctgaggatcatttagatgtgcactgagattcatgaggagctggggcatccaggtgggaacatcgtaaggactagaaagaacacatgcaccaagtcctagcaccccagcatggcgtttgaccaactctgcagaaggaatggtatct

SEQ ID NO: 4986 - DNA, 1223 bp, Homo Sapiens
ggacaactacgaagatggcggttgcgcgcttggcagctgtggcggcctgggtaccttgtcggagctggggctgggcagccgtccccttcggtccccaccgtggcctcagcgtgctgcttgcacggatacctcagcgggcgccacggtggctcccagcttgtagacaaaagacgtcactctcattccttaatcgaccagaccttccaaacctggcttataagaagctaaaaggcaaaagtccaggaattatcttcatccctggctatctttcttatatgaatggtacaaaagcgttggcgattgaggagttttgcaaatctctaggtcacgcctgcataaggtttgattactcaggagttggaagttcagatggtaactcagaggaaagcacactggggaaatggagaaaagatgttctttctataattgatgacttagctgatgggccacagattcttgttggatctagccttggagggtggcttatgcttcatgctgcaattgcacgaccagagaaggtcgtggctcttattggtgtagctacagctgcagataccttagtgacaaagtttaatcagcttcctgttgagctaaaaaaggaagtagagatgaaaggtgtgtggagcatgccatcaaaatactctgaagaaggagtttataacgttcagtacagtttcattaaagaagctgaacatcactgctggttacatagcccaattcctgtgaactgccccataagattgctccatggcatgaaggatgacattgtaccttggcatacatcaatgcaggttgccgatcgagtactcagcacagatgtggatgtcatcctccgaaaacacagtgatcaccgaatgagggaaaaagcagacattcaacttcttgtttacactattgatgacttaattgataagctctcaactatagttaactagtatcacatgttaagttggtatgtaaactaatgtatccagaagattggaagagggataagaaatgaaagatcctgatactttaggtttttccctttcctctattgtgtaaatataagatgagtatcatctaatgatgtatatgcataagtaatgcacattgtgaagaaggaccagctgctgtagagaacaatattctacctgtccttctgtccttgcatctgcatagccattaaagctatctccattggtgcaacttccagagaagtttacctatcttatgcttatgta

SEQ ID NO: 4987 - DNA, 1032 bp, Homo Sapiens
gactgagccctgaattgcaatccgtggcagagagcaagggggacgaggcagatgacgagagaagcgaactcatcagtgaagggcggctgtggaaaccgacagcgagagcgagtttcccgtgttccccacagccttgacttcagagaggcttttccgaggaaaactgcgagaagtgactaagagcagccggagaaaatctgaaggaagtgaattaagttgcaccgagggaagtttaacatcaagtttagatagccggagacagctcttcagttcccataaactcatcgaatgtgatactctttccaggaaaaaatcagctagattcaagtcagatagtggaagtctaggagatgccaagaatgagaaagaagcaccttcgttaactaaagtgtttgatgttatgaaaaaaggaaagtcaactgggagtgtactgacaaccaccagaggcgaatccgaaaaacaggaacccacatggaaaacgaaaatagcagatcggttaaaactgagacgcagagcccctgcggatccgatgtttggagtagggaatcacaaagtgaatgccgagactgctaaaaggaaaagcatccggcgcagacatacactaggagggcacagagatgctaccgaaatcagcgtttagaattcttggaaaggtgcatgagcagagcggggagagagaatctgaactttcagctgtaaaccggttaagaccaaaatgctcaggccaggacctttccatctcagactggctggccgagggaaagccataaagcaccatgtacctctgaccgttagcagaggagaaatcggagatccccagacagagaacccaagcacacgagaaatagccacgaacgacacacctttgtctcttcattgcaacacaggcagttcttccaagcaccttggcttcaacagacaggccccttctttccataccaccaacagtcacctgaccaaattaacggagaaagcttccagaacgtgagcaaaatgctagttctgagcgaagccaactcataatgttgaacc

SEQ ID NO: 4988 - DNA, 469 bp, Homo Sapiens
ccttgaaatttcctggtaataaacaaatgtagtgtatacacacatctgtacaagaaatcttgaacaagggggattttacatggggtatcatgcacaagattaaaaacaagaccaaaaggtggaaattttaaaagaggaaaatataaaggctccaaggtttaactgctctgggtagaagagatcacatctgttgactgaggatcacagaaaggcccaaaacgtccataaatatccttggctcgtactgcaaagtagtatttgctaccagatacaaactgggtgagagtacatgccatgggccagggaagtgccttgacttccccaatctttttccattgtgagggcacagtggcactgggttcctcatggtacgcatagagatggtagctatcaacagtggcacagcttcgatccacctccaggacactccatgacagtactatgccatttcgactctgaacgcgtgcta

SEQ ID NO: 4989 - DNA, 688 bp, Homo Sapiens
  misc_feature (197)..(220): n is a, c, g, or t
atatttctaggaacatatacataaaacagagacagaagtggaaacatacaaagaactccatctggaggtcttgtgagatgactgggacattcggcaactgtgaatggctctgcacccaagtggaacttagtaagtttctcttgtggataaatataaaaacttaaagagtccccagaaggtcttaagagctaagaaannnnnnnnnnnnnnnnnnnnnnnncccaaaattatctaatatctaacgcctcccaacttgcatctcagtcaactacacattggccaaactgagctctacagtgcaattgagcaaagttacttgtgcaacagcaaagttaaatgtaaacataaacagcaatgggtttttcaagagcctcagtgttaactatcgtatgtggtccaaataatgcacttctggatacagacagttaacgagaagagccaagaagcttttcccatcttgaaggcaatggccaggatgccttataaattgggtggcttgcaatatttgatcctggtattcaacatactgcttacttgatgccatggattcaagagcattcagagcctgctgagctttgggggtcagatgtaattcagagccaggcctcaaacggatctgatcttccataggaacctgaactgaaaggaaggcagcatgcttcgggcaacactcggacctgttagacaa

SEQ ID NO: 4990 - DNA, 557 bp, Homo Sapiens
  misc_feature (52)..(52): n is a, c, g, or t
  misc_feature (69)..(151): n is a, c, g, or t
  misc_feature (179)..(194): n is a, c, g, or t
  misc_feature (269)..(320): n is a, c, g, or t
gtttgtcacctgctgaagaaatttggctctgccccaaagtttgtcctcctgncagggcatggtggcatnnnnnnnnnnnnnnnnnnnnnnnnnnnnnnnnnnnnnnnnnnnnnnnnnnnnnnnnnnnnnnnnnnnnnnnnnnnnnnnnnnntggtcttttatattttttgtctctaccnnnnnnnnnnnnnnnnttaaccagacttggtggcgcataactaaagtatagctactcaggaggctgaggcaggaggattgcttgagtccannnnnnnnnnnnnnnnnnnnnnnnnnnnnnnnnnnnnnnnnnnnnnnnnnnntgacagcaggagactgtccctagcaaaaaaaatttttttgaggaaatattctaatatttgaaaaactattacccagtttagcaaagaagttgctcaaaacatgtttcatgtttgtatattggaacttacacctggagagccactgagtctctaaccccgaagctcatggactactccatgatctatgaagtttgccagatagaaaagtagagaaatggctaggtgcagtgctcatgc

SEQ ID NO: 4991 - DNA, 430 bp, Homo Sapiens
ggctgccccaggcccgcacaggcaaccccttcccatccaaagccattggtggagcttctctggaatcatttgccaaaagcccaaggcagaatccaagggtccaggaccatttccatggagctcatgtttttcttttctgtaggaacttttttttaaccagcacccaccataattccgaaggccacgtttcatctttcctggatcactacagtgaagtattacagttgtacagttcccagtctggccttggcttgctcggataaaactttgtatgtattttgtatggcatagattctatattgtaatgatgtcctatgcaaaaagaaaaattaacgaaattgtaaattttattgttttaacgtgtatgcatgtttagtgacgtttacattttgaaataaaatttatgactccttcttttcaaaaaaaacac

SEQ ID NO: 4992 - DNA, 1153 bp, Homo Sapiens
ggaatcttattaatagaatgaatagaattctcagtgatgaaaaacattttttgtgctttttacttgttgaatcataagattatcaactgaaaatctttggacctatatccattcagtgtctacttaaatacaatttacctctattttatcatgagcccctcccccagtttcctcccacgaatgttctgcctccccttgccccagcatgtctctctgtgactaaagaattcttccaatccactaataacatttcttatttctgcacatctaggatgacagtacgagccatagtgaccaccaagaccccatctcattagctgtggaaatggcagcagtcaaccacactatcttggcattggcccgacaaggagccaacgaaatcaagacagaggccctggatgatgactgatcagggaggttaaacatgacaagttaacttagtttagacgtagcaccttagcagactttcctcgggccttaacatgtgttcttacagtataacttgcagtttcttgtatgtcaggtagctgttagggtcttgttctgggaaaatggcatggcgccctcagcctttgcatatactctctcagtattaactcccagtaaataataaccaaccaaccaaccaaacttccctctcccagcccccgaggctagaaaatcttgctgctccgtcttagcattccaagaaagtgcttccaggtatttagatagccctcagttctcaaatattagactacgtgtaaaatcttgggtacctttagattcttgtaacactagtctgtactcccttttccttccccaagactgataggatgcaagctgaggtcgtggcacaggaatgacagacaccatttggggagtatccacagagtcaaaggaacactagaatccccacctcagcgtgaggataattgatttccagctgcaataagccgtgcctcattatagccacactgtggctagattatacttctttgggtgctgtgctaagaatgtcaatggaaaaagccgatctcagattttggttggaagttaacatgcctgacacagacatcctttcctctcacaagctgtgtgacttagtagataaaatactgccttctgcctttgggaccatgattaaaaacaaagacaaaaaccaaaagtcatt

SEQ ID NO: 4993 - DNA, 424 bp, Homo Sapiens
  misc_feature (174)..(223): n is a, c, g, or t
tggcacaattataaaatgtttttatttcaattacataataacacgttttcctcaaattttattgaggttttggtctttttgcattcaattctatcttgtaacagtaatatgaatccacataatttcataaaatgtcaacaacattcataaggtacattcctttgtgattttatnnnnnnnnnnnnnnnnnnnnnnnnnnnnnnnnnnnnnnnnnnnnnnnnnntatagaaaacagatattttcttcaggcagatcaaaacaagaatttcccagtaagaatatactgggacataacaaatgaaaatatttataccaaaataccaaaagtgattcagctctttaaaatatcctactatagtctaattagtagcttgtacaagaacaagtaaccattttttactgctcttttgaatgatgattagaa

SEQ ID NO: 4994 - DNA, 774 bp, Homo Sapiens
gggagagcttcaaaacagcccggcggcctcgcctcgcacccccagccagtccgtcgatccagctgccagcgcagccgccagcgccggcacatcccgctctgggctttaaacgtgacccctcgcctcgactcgccctgccctgtgaaaatgttggtgcttcttgctttcatcatcgccttccacatcacctctgcagcattgctgttcattgccaccgtcgacaatgcctggtgggtaggagatgagttttttgcagatgtctggagaatatgtaccaacaacacgaattgcacagtcatcaatgacagctttcaagagtactccacgctgcaggcggtccaggccaccatgatcctctccaccattctctgctgcatcgccttcttcatcttcgtgctccagctcttccgcctgaagcagggagagaggtttgtcctaacctccatcatccagctaatgtcatgtctgtgtgtcatgattgcggcctccatttatacagacaggcgtgaagacattcacgacaaaaacgcgaaattctatcccgtgaccagagaaggcagctacggctactcctacatcctggcgtgggtggccttcgcctgcaccttcatcagcggcatgatgtacctgatactgaggaagcgcaaatagagttccggagctgggttgcttctgctgcagtacagaatccacattcagataaccattttgtatataatcattattttttgaggtttttctagcaaacgtattgtttcctttaaaagccaaaaa

SEQ ID NO: 4995 - DNA, 974 bp, Homo Sapiens
  misc_feature (137)..(140): n is a, c, g, or t
  misc_feature (145)..(164): n is a, c, g, or t
aattcccaagcccttgttcatggccagggtttttcttagggaaccaggtaaggcccagttccctttaccttctggggcccgcggcgccaaaagaaatggtttagaaagtttttcaggggcggaggcggccgacaggnnnnttttnnnnnnnnnnnnnnnnnnnntccaggatgttctgtgatgtttataattagaaaagttgctcggaacaggatagaaccttgggaaggctgatggggaagcagtccagactaggctggactttgaaagagggcccacaggaaggaaaggaaaggtggggcaggggggcggcggtgttctaagtcccaaggcaggttgctaggaggggtgctgactcaggctggagtgtaatctggaaacatcatctttgcccagtccctgtagggctggggcccactgggcaggtgtccccagggctgtgagacatctttatgaagttctccaggtggctgttacaggcagtgggcattctctggctgtcactgggtcttctgcaggtcctcaggcccaaaggaggagggcagcagctcctggaccgtcatgacaatatacgtaccatccggcttggtcatgtacacgggccagttggtgccaaactctctcatgacttgcctgcaggccccacatggagagataaaatcatcttgcatgtcactggcgatagcaattgccctgaaatccttgtacccttctgagacggccttctggatagcggtccgttcagcacagatgcccagcgggtagcaggcattttctatgttgcaccctttgaagattctcccctcctgggtgagcagggcagcccccacaggaaagtgactgtaggggcagtaggctgactgcttggcctcctgggagcaaaccagcagctgctggacacactcaggcttcagggtgcaggcaggacgcttctgggccatgttggtaccccgggcaggcagcagagcagcccc

SEQ ID NO: 4996 - DNA, 257 bp, Homo Sapiens
cccgtatattctggtcacggtcatgcaaaatgtgtgctttacagcctcttatgcattctttcactcgttttatttcctgtcacaaccattccaattcaagagttcagggtttcttcttagacaagtgcagatgtctgctaactagtattcttaactcctggttggtcttcccagagtcctgccagattcatttttgtaaaaagaaaaactctcacaatgtctctcccctgctcagaaatacacaatggctccccatc

SEQ ID NO: 4997 - DNA, 342 bp, Homo Sapiens
ttagaatcaacatcaggcatagaaatattgggggctttgaaatgcatatcaggcatcttgaacttagggcctttcaatttgccctctggtccctcaatgtcaatgtctggcccactgacatccacatgtggccctttaaggtccccttccaatgtgggaacatctacatccacctctccttttgccttggggctcttcaagtgtagatcgaggtctggcatagagattgtgggagctttaaagtgcatatctggcatctggaacttagaagttttccacttgccatttgggccttccacagctacttctggcatgccagaaatatcaaaggggggatcctct

SEQ ID NO: 4998 - DNA, 464 bp, Homo Sapiens
ccttgaaatttctgggagtgtaatcaactttgccattcatagtgtggcagtaataggtctttgtcagaaagtacttttttatatttattgtctctgttgtatgttgtgtatttctatcttgtaagccaaatatctaaaatttgagtcaagcaagtatagatattttaatacagttgaaaatattaaactggtccagtatgcctagcattctgcctaggtatggttgtggtacacaagagtatgatatggtccttgtggttaaagaaatcatagtttagtggggggaggaaggggaagattatgcgtatggcctactagtctttttcccatatatattatatttttatatcattgtggttaggatgtatatttaattttgtatcttttccttaacattaatcataagtatctttccttgttgtataatcttcattattatttttatgtccacataaatccaccat

SEQ ID NO: 4999 - DNA, 490 bp, Homo Sapiens
tatctagtgttgtcttttaaactaaactccccattcctcactgcccaatctcgtgacctcttggcaaactggtttttctttgctgcctctaacatgagagaggtttatgaaaagtaaagactagcgctaaattttgccaaatccagaattttaaaatatatcgtcattctcctttggcctcagccacatgtgactgagtgcccccctcaaacaatccccttccttggtttgtgtgactccatccaattcctagttcctgggctaattctgcaaccactggagtcagagggcagaaaacacatctggttttgctcccactgtatctctaacatggcttggcacacagtaggtgcaccatacataaatatgtcaacaaatgaacttctccctctctccacttctgtctccaatggacatctccccaaatcttactttgagactctaaattatctttttgttttcggagtctgtaaattcacaaatggtttca

SEQ ID NO: 5000 - DNA, 413 bp, Homo Sapiens
gatctagcggatccccctgatatttctggagaacatgaaagatgttaagatgtaaaaagggatgatcttctatccccttaaaaacaaaaagacaaaggatccaatggccattgttaaaccaataattagaagtaatttttttaaagccacaaggcactgcatgaatcctgatattagaaattctttccactgagtatctatagaaggaagatcaagtatctgtttcctcttctcccttccaactcctgtcaccttttggcccctttccttttctacctctctctcttcctgtttccttctatctcccattccaatcccaactctttgcactaaccaatttcctttttacctctcattttactgcaactgcttaaagctgccaaaaagtttatattcacggaaagaaatacaag

SEQ ID NO: 5001 - DNA, 499 bp, Homo Sapiens
taccctatttctggatgaggagttaatccataactgaagaggaactttggattgagggaacatgatgaataaacattaggagagatggaatttccattaataactgcaagagatgcaagattgttacaggtttcaaaagaataaaaatatatctatgaatacaaaaaacataaagtacaatttaaaatccattaattttgctggaatactgaagtgacttgagacacttcatcttctctgaacaaagcactaaaaataaattgcacaggaagtaacaaagaaaattacttttcactgagacgttcatgaacagaaggatgtgaacttagccttgagaagcccctctatttgttggggtgtctcaataaccttgcaatgactttatgttgaggaaaggaggtttctgacagcctcaatgttttaattcctccgcacaccctatgagccaggaaggacaatggtcaagttacaagtaatataacaaacatttataatcacc

SEQ ID NO: 5002 - DNA, 792 bp, Homo Sapiens
gggagagacgctgacaaaggagcggaggagcagtcgcagctgctttccgaggaagccggtgttgccgagattgccaaaatgctttggagtttttaactgaatctaagaaaagtccaaaatagatttgagactgtaaaaacagaatactgcagcaagggggattcagtgccaatgcatcaacaaaagaagacaaccagagttagtggaaggaaatcttcctgttttcgtgttccccacggagctcatattttatgcagatgatcagtcaacacataagcaagtgttgacactgtacaatccctatgagtttgccttaaagttcaaagttttgtgtactactccaaataagtatgttgtcgttgatgctgcaggtgcagtaaagcctcagtgttgtgtggatattgtgattcgtcatccagatgtttcgatcctgtcactatggtgtaatagacaaattccgtctccaagtttccgagcaaagccaaaggaaggctttgggaagaaacagaggttgttgctactcttctcccatcagcaaaagaacaacaaaaggaagaagaggacacacacacgattacaggaacatttaactgaaagtttattttttgagcagtcgtttcaaccaggtcttatcacaatggccatacttagaacatgagcaaggatttcaattgacttctgaagtaaatctgtcttgaaaatatgaatgtggactgccttttatctctatttcactccattaaacatgcaacaaactattgaatgatttcaaataattgcaaatgtataata

SEQ ID NO: 5003 - DNA, 686 bp, Homo Sapiens
  misc_feature (462)..(552): n is a, c, g, or t
ggaagtaaactcttctctccccatggtttcagagcagtttttacctgcaagcaccatctctgtatgtgctcttactagattatacagttcttgagagggattgcatcttggtgcttttgtatttccacctcacccccagcacatagcccagtctcttgcacaaattaagtacttaatgtgtgttgagctaaattgaataaaggattattagcattagcatattttgtgccttggttgtataagctggttgtttgttttgttacctttgcaaatatttatgattatcacccccccacatactaaattgtttttaaaagttttgcctttccttcagatactaccccaggcaatttgctgtagataatgtgattgcttccaatgacataattatcccaaactctctgccccggatatactttgccaaacgaaatttgaattctctgaataaattggtcatgtctnnnnnnnnnnnnnnnnnnnnnnnnnnnnnnnnnnnnnnnnnnnnnnnnnnnnnnnnnnnnnnnnnnnnnnnnnnnnnnnnnnnnnnnnnnncccttgggggcccccccggcccccaaaaactttttaaaaactttctttgggggccggggccccttggggaagggaactgggccataggggttcccaaagaaacccgggccaagaaaaggggtgggatccccccc

SEQ ID NO: 5004 - DNA, 786 bp, Homo Sapiens
ggcacagtttgaacttttagtatgttctcattgccaaaaaaggcttatgggctgttgtactggacaatatgccatgtttctgcatcataacatttcatcttcccatacttacttctcctgtaatacatcactagatttttgagtcacactgatacgtcattgtcttacaagtgctttctgttcatatcggggatgagaaacctaacactgttccttgattagaaccgtactacactttctaatatgaccttgtattatagtgattaagcttgtatttgagcaaaaaaacttactaaaacctagggaactctacattaggccagatcaggtgtattttgtatcttagtaatggatcatatcgtaaaaatagagataagttgggaagatatattgattatgctgttctgttgagggaaaggtcatgtatttagaaatttaaacttttggttattgtgttcacatcatagtattcaagcatcatttatagtttggttttgagaacttttctggtattacgtttatggcaaatgtataaaagaaacaagttttggttatatttttatatttgtaaagtaagtttggttaaagtgatcactgttctttttttattttattgtcatttcaataaaaaatatttgatagacacccccccttgcaatttattcaaagaactggtggaaattcattaaaccatttcgccccccttgaaaacccctccaaaaacggtattgatgcacctttaatcccccggcgaaattccacccccctggaaacttttggcgataa

SEQ ID NO: 5005 - DNA, 1302 bp, Homo Sapiens
  misc_feature (21)..(21): n is a, c, g, or t
  misc_feature (26)..(26): n is a, c, g, or t
  misc_feature (114)..(114): n is a, c, g, or t
  misc_feature (634)..(681): n is a, c, g, or t
  misc_feature (713)..(752): n is a, c, g, or t
acagactatgcccgctggcgngaggntcaggccccgtaccgtgtgcaatgggcgcccaactatgaaccctacgtggtggtgccacgagactgtccccgctatgatcctcgcttntgtgggcttcggctggaacaaagtggcccacattgtggagctggatgcccaggaatatgagctcctggtgctgcccgaggccttcaccatccatctgccccacgctccaagcctggacatctcccgcttccgctccagccccacctatcgtgactgcctccaggccctcaaggacgaattccaccaggacttgtcccgccaccatggggctgctgccctcaaatacctcccagccctgcagcagccccagagccctgcccgaggctgaggctgggccggcgctgcccctcatcttagcattgggcagacaccagggcaacctgccctccgccatccctgctatttaaattatttaaggtctctgggaagggctggggcagagcatctgtggggtggggtcttccccttgctgctattgtatggctggggactggtctctctctgccccagccagtttggggctggttcccccatcttgaattgtttatccctttttcataattaaagttttaaaacatcnnnnnnnnnnnnnnnnnnnnnnnnnnnnnnnnnnnnnnnnnnnnnnnncaagagagggggcgcgcgcccatcaaaaagannnnnnnnnnnnnnnnnnnnnnnnnnnnnnnnnnnnnnnngatttcgtggagcaaacgggggcgcccccactaagggcgaggcgcactacattacatacacccgcgacgcgcctgcgcgccgccgcgcttgtattagaaacacaccggtgtagcgacaacgggcgcgagcaaaaacaagcggctaccacacgcggggcacaactctctttggagaagccagagaacacccctctctctctttcctaggcggggaggcgaaacaccacaaattggtggggagccaccaaatcaccaccctctatcaccaggaatcgaggactatatgacgcagcaccctctcaacgcggaagagataaacaactagatatatcgttctttcacgcgccggagtatatccaccgggggtgtcatcccaaaacccagcggctgggcgaacaaatatggcacgctgccctggagcgagccgaagaaaacaaaaatactgtgcaccgctatcgacagagagctaaatttgacgcagtgcatgtaacacaaacaacaacttttttctccacccccggggacactaccacccgtgtacgcaagccaa

SEQ ID NO: 5006 - DNA, 836 bp, Homo Sapiens
  misc_feature (656)..(702): n is a, c, g, or t
tgtattcaatatgcttatgttttatttatgtaggtggcatttaaaatacatgatgtgtttagggttacattgtccacagaaagcatcaaataccactcctctccccgccaaaaccaaataaacaaagccaactctttggcaacagttgtgttaaataaaatcccaggtcacacttgtttctggctcccaagcctgggtcactgctacatggattgcgccaaaaaattcccagcttcaacactgctagattaaaattgctggcatttttaaatcacagcaaagcttttcacaatgccctcaagtccaagaggacaaaggagaaagcaacatgaacggcagatcctcatgtgaaagggaaggaaagtcactgggagggagcatgcagggaagaagtcaaggcagccctggaattctactccgtgctcaataaaaacaaaacgtgaagaagcaatacatcatgcaaacgaaataatgaccggaagtgggcgcatctagttagaatgaagtgactttcgtaaggagtcaatgttcgcgaactgaaacatgagttcaacctccttgtgccgtctctgggtgttttgcacgtgtgtaaataccggcccgttttccccagcatggccctaacccatggacactagggagagtgccactgagcnnnnnnnnnnnnnnnnnnnnnnnnnnnnnnnnnnnnnnnnnnnnnnntggaatctagcaaaacctacaccatatttgaagttgaatttgcactacctgcaaaggatgaaaattaaaagagtaaacagaaggaatgatttacatctgatgtgattcacgacagccttctattcgtgtgccag

SEQ ID NO: 5007 - DNA, 474 bp, Homo Sapiens
  misc_feature (349)..(349): n is a, c, g, or t
agtttgggttagattataatcatctgaagcacaggataaccgagaagcaaaattccattctggtacaaacacccaatttctagaaaagagaaaggaaaagaagaaatacgacgtgagcttttttgatcagaagactccatgaaatgagagcggtggtaatatgaatccacgtgatttttcaagtcttcctgttgtacagtcatcaaaatgaccaggtttgtgctgcaaaggagccagcaccatgtggctactgctttgattgttctcagatgaatgtttatacaaaataatatcttatcttcatttagtttataaacatacacagtgctgtccctttcaaattaagganaaaaaccacacacacaaatactgcaaagtagcaaaatacaaaggaaaacaaagctacttttggttttggcaacattaaaaaagaaagaaatataaaaagcaatgtggcattggtccctattcatt

SEQ ID NO: 5008 - DNA, 806 bp, Homo Sapiens
  misc_feature (622)..(639): n is a, c, g, or t
  misc_feature (641)..(731): n is a, c, g, or t
gagggtaaaggacgagtgttgtcgaggtgaaccaattctggggggaaagaatcccagcggagtgtttgggagaaaaaccgcggggggggaaaaacaaagggccgggtgttagtcccgtttttggccttcccagtttcaaagccgtgagaggtccacccccccgaccgcccttttaaaaaagggaagggccagtgtgtttaccaggaagggagttgcctttcccagggggaattgccccaggaggggggaggccttggccccctggattaggggccttcccttcttccaggaggggggggccattcccccagggcaggaagggaggacttgggcctgggggagattcggttaccctcccagcggccccaagaagaggtgtgggaaaaaccatgagggtgcccccaggacaatgggttgccagcgagtaaaggggaaagaaaccctgaggtaccatgattcttttctcttacttcctcaaatggtactgatctctccccaagtacaggctcaacagaaaaatacagtggtttgaggaccccaagaagtcagcacacaggccagtgggccagctccaggctgggtctagtctctcccaccttgggaaacccagcgctaaaacaannnnnnnnnnnnnnnnnngnnnnnnnnnnnnnnnnnnnnnnnnnnnnnnnnnnnnnnnnnnnnnnnnnnnnnnnnnnnnnnnnnnnnnnnnnnnnnnnnnnnnnnnnnnngataacagggcatagagccacctatgcccaaccactttgttgacttttttatgaccaaaattaaactattcctat

SEQ ID NO: 5009 - DNA, 1252 bp, Homo Sapiens
  misc_feature (738)..(809): n is a, c, g, or t
ggccccccagaggtagtacagttgaggctattccatcgcgcgtatgatataagtagagcgggggggtggcatgtatctagtgggagaagatagtgatagatgatggcatgccgggcgcttttttgtgcgctacatcgcgcgggagagtctttaattttgtgcatccggcgcgccgaggaaagacacagtagtgggggtgagtgacctagagggcggagtgcagcgcaggtttataacattagagatcggcacctggcgggatgatgggaggtcgtgccaataggcgagggggtcggagggagcgcggtttatataattgtgtgtggcagcgcgcaggcaacatagggtcgtgagtgagtagaggaagaaaggggcggcggcgggagctggccactgcatatattgattatagagggtgcggacctgggagtgttcgtcccggcgtctcgcgttataatatttcgacggtaaaatagggcgcttcgtggtggtgtagacgggtagaggggtgtggtagtatgagacgacgtgttccgtatgtggcacacaggcggaccgtgtttcgtttgtattggttgggggtaacaaagaccgtggggatttagtaaaagggggtgttcttaccgaaaacaacgcgttctcctcattgctcggtcagcgcactgggggggcgcgcgcggccgagccgagtggtgttgttaaggctgattaaatgggagggagcgggcggacagacannnnnnnnnnnnnnnnnnnnnnnnnnnnnnnnnnnnnnnnnnnnnnnnnnnnnnnnnnnnnnnnnnnnnnnncagttcaatacagcacacctttattgagcacctaaggatctatgctgccacaggagggcagagtcgacaaaacagtgggcaggcctcccctgcagctctctgtgtctgtgatgatggagctgggttggggaaatcctgctgtgacatttgccctgacgcagttccgcacagcatggtggcttccaagctatgctcttgatgggcacccgtaagaagcttctacatgcattagagatggagcctctcctatctttgcaagcctttgtggttcttccctttaaatctgccatccacggacctcaacaggagaataatttggtcttcagtttgctctgttttagacaaatacttcacatgactgatgtaaactgttgcatagtttcgcaaaggctttctcattcattcctgaaattctccatcagtcacaaacacaaattgttcag

SEQ ID NO: 5010 - DNA, 891 bp, Homo Sapiens
ggggggaaagcggaatctacaccttcccggccagcggtagcaactgcagaactgcaggagactatctttctagacaaggcagttgaggaggagggagcgcttgagggggactggcctggcgtgcactccgcacctcggggacattattgcgcgtggaacggctgcttttggaagactattgcccagaagaaaagatgtttggttttcacaagccaaagatgtaccgaagtatagagggctgctgtatttgcagagctaagtcctccagttctcgattcactgacagtaaacgctatgaaaaggacttccagagctgttttggattgcatgagactcgttcaggagacatctgcaatgcctgtgtcctgcttgtgaaaagatggaagaagttgccagcaggatcaaaaaaaaactggaatcatgtggtagatgcaagggctggacccagtctaaagactacattgaaaccaaagaaagtgaaaactctatctgggaacaggataaaaagcaaccagatcagtaaactgcagaaggaatttaaacgtcataattctgatgctcacagtaccacctcaagtgcctccccagctcaatctccttgttacagtaaccagtcagatgacggctcagatacagagatggcttctggttctaacagaacaccagttttttcctttttagatctcacttactggaaaagacagaagatatgttgtgggatcatctataaaggccgttttggggaagtcctcattgacacacatctcttcaagccttgctgcagcaataagaaagcagctgctgagaagccagaggagcaggggccagagcctctgcccatctccactcaggagtggtgactgaggtttttctgtcgggggggagaccact

SEQ ID NO: 5011 - DNA, 1899 bp, Homo Sapiens
  misc_feature (761)..(780): n is a, c, g, or t
  misc_feature (917)..(992): n is a, c, g, or t
  misc_feature (1000)..(1036): n is a, c, g, or t
  misc_feature (1498)..(1498): n is a, c, g, or t
  misc_feature (1697)..(1697): n is a, c, g, or t
cccgtgcgccggagatcacggtccccgggccgccgccgccacaggagccgctccagctccaactcctcccgataaacaggccactgaagctctcgcccctgtaacttataccccacccagctcagttttgtcacttttctagccaaaggaagaccagtaggaaagcaaacccttgactctggcaggatttgcaggcagcaggcagcacccctctgccagccgggccccggctgcagaagtgctgttggtttggatgctgtgtgcctgtcaagattccctccggttttctggctagaaagctcatccgtttccggtttctaagagtcagttcagtggcagagccaccaggaaaaagtgaggctcttgggggtggtttgaccctgcttacctgggagcacacttttcccttccccgatgacctgggatggtggccaggccgtgcccttgctgttgctgggcagtgtccttttggaaagggagctgccccaggctttagtgcagctgccaaccctgttaggcctggcctctcgaggcctcttctgacctcaagggtcacaccccctcaaagatcctctcacccatggtagttgctgctcgtggttctgtctgtccgtgcaccgatgcacacaccgcaccccaccactgtactctgaaattggcgagtgagtggagagccagctctgcggagtcatcacgcagccatggttgtgcctgccgttcatggtggtctttcaggttatcttggcaacatgtacattgcnnnnnnnnnnnnnnnnnnnngctttcattgtacagtcagtactataaaatttctcttttgagttttatacctttgtagcattttagatgacattgtgtttgtactttgttgtgtagagtggaagaattgtgttgaataaacccaagatcggaatgcnnnnnnnnnnnnnnnnnnnnnnnnnnnnnnnnnnnnnnnnnnnnnnnnnnnnnnnnnnnnnnnnnnnnnnnnnnnncctaaacnnnnnnnnnnnnnnnnnnnnnnnnnnnnnnnnnnnnncctacaacccccgatttacccaggtggcgctacatcccgcccccttctgtgttgggcggccccccctccatttataaaaaaacttttctaacacactcttccttggccgcgcgacgccgaccccccttttttctacacgacaccgaggtgtcactctacttgtcatccctcaagagaaaaccccctccgtgccaatcaccagaacccgtgcgctccgtgtctacacccccccgctataaaacaaacccccccacccatctcggacgcacatacaaacacacgacgatgtcgctctaataaacataattacacccgccccacgctcagtcatgccccacgtctcggtgggcgctcgctatcgccctcgctcttgagtcgatatcttaactccataacccgcacgcctcgatgtctcgttccgccgccccagcgaacgtggtctctcgtgctatacaattaatntgatagtgcgccccccggctgtattcccgccgtcagcaagttatatattaagataccgcactatatcgtaagcacgcgcgcgtgatgacgatatattctctctacatgcatagatatacacaccacgcccccaccgcgatgttaacgacaccgcgagataatactattccccccacactgcgtctctgttctgtttctnagcacacctctcacctctcctcttatctctgtggcggtcgagaacattgcactcaccccactatttatctctattctttctctattactgaccaacatatcctctgtgcgcaccctcgcgcggaaacaacaacatcgtgtacacaccacaagaagtaagcacatgattgctagcctgggacaccgcgccctcataatatata

SEQ ID NO: 5012 - DNA, 360 bp, Homo Sapiens
ggaacgaagacactccttctgtccccacctgctccgaagacaaaccaacctccgtttcttttataaacagtcggctttttcttaataagccctcactgtacagaacagcccgttgatggtttatttggggtccccctctccccccagcccttttttctgttggtttagcacaaatacttccctcctccggcacctccaaacctaccccacagtcagtgtacttgttttatatatatttaatcttattcaatggaaaccatgcttttgtcgttttatactttgctaggtagactttattacccccccactatgccctctatctttttaaaaaaggatacaacaaaagaaactgggttccag

SEQ ID NO: 5013 - DNA, 810 bp, Homo Sapiens
  misc_feature (747)..(747): n is a, c, g, or t
gggaggggagagagcagttaaggcacacagagcaccagctccctcctgcctgaagatgttccaccaaatttgggcagctctgctctacttctatggtattatccttaactccatctaccagtgccctgagcacagtcaactgacaactctgggcgtggatgggaaggagttcccagaggtccacttgggccagtggtactttatcgcaggggcagctcccaccaaggaggagttggcaacttttgaccctgtggacaacattgtcttcaatatggctgctggctctgccccgatgcagctccaccttcgtgctaccatccgcatgaaagatgggctctgtgtgccccggaaatggatctaccacctgactgaagggagcacagatctcagaactgaaggccgccctgacatgaagactgagctcttttccagctcatgcccaggtggaatcatgctgaatgagacaggccagggttaccagcgctttctcctctacaatcgctcaccacatcctcccgaaaagtgtgtggaggaattcaagtccctgacttcctgcctggactccaaagccttcttattgactcctaggaatcaagaggcctgtgagctgtccaataactgacctgtaacttcatctaagtccccagatgggtacaatgggagctgagttgttgggaggaaaaacttggaaaactccagctccagctcccactcaaaataataaaggataatttttcatccctccgnagcacggcaacccccgcaaaaataccctgttcggcgcgccctcgggccctcggaaaagatttc

SEQ ID NO: 5014 - DNA, 221 bp, Homo Sapiens
gggttctgtgaactgaaggtttatatttctctatctactgcactttttgcagtttcctcatttataggatttttaaaatattctagattgcaaatatttttcaaatgtcttgtaaatatcttctgtcacttgcttgccttttaacttggtttatagtgttgaatatatagaaatttaaaatggtaatgtcattaaatttattcttttttattttgtaggag

SEQ ID NO: 5015 - DNA, 849 bp, Homo Sapiens
  misc_feature (794)..(794): n is a, c, g, or t
ggggcccctgagctctgtcatggcgacgtccagtgctccagccggtgtgaggacacgatatgctggggtttttgtccgcacgccaaacgggtttggaggaccctcttcgccttcggagagcagagtcaacacggagagttttgggactggaattaaataaagacagagatgttgaaagaatccacggcggtggaattaacacccttgacattgaacctgttgaagggagatacatgttatcaggtggttcagatggtgtgattgtactttatgaccttgagaactccagcagacaatcttattacacatgtaaagcagtgtgttccattggcagagatcatcctgatgttcacagatacagtgtggagactgtacagtggtatcctcatgacactggcatgttcacatcaagctcatttgataaaactctgaaagtatgggatacaaatacattacaaactgcagatgtatttaattttgaggaaacagtttacagtcatcatatgtctccagtctccaccaagcactgtttggtagcagggtttttggtactagaggacccaaagtacaactttgtgacttgaagtctggatcctgttctcacattctacagggtattttttattttatttcaaacggcaactactttgagtaaacgattcaataaaaagaaacgttactaacagtgtattctttgtaagtgacatgactaatgtactttgtgctagttgttgagactcagcagggaaataaagatccctctgtgcattattcttataaaactgaaccattgnaaaacacctttatatggaccatggatccttggggaagactcaaccaatatgaaaa

SEQ ID NO: 5016 - DNA, 395 bp, Homo Sapiens
  misc_feature (166)..(166): n is a, c, g, or t
  misc_feature (174)..(174): n is a, c, g, or t
  misc_feature (178)..(178): n is a, c, g, or t
  misc_feature (192)..(192): n is a, c, g, or t
  misc_feature (196)..(196): n is a, c, g, or t
  misc_feature (198)..(199): n is a, c, g, or t
  misc_feature (204)..(204): n is a, c, g, or t
  misc_feature (224)..(230): n is a, c, g, or t
acctccttcccaaaggacaataatagtgtaaattgaccaaaggcatgtccaggaatcacttactgtaagaatattgaggcaagctgcgccagcagttcctggggatgcgctcggtgaatggcacccaaaacccctgcatttctctctttgtgatagtttaaacccntgcacctnaaantgtttatttttttnaaantnnttttntaacaaattaatttttaaannnnnnnccagctctgcttctgaaaaacttgtttcagtcaaactcccccctcccctatttagaccacggtataaaaacaaaaccaaccccttcctcggggccaagagaattttcagcattacctgcctctcggtcgccagataataaaggactccttaatttgtctcaaaaa

SEQ ID NO: 5017 - DNA, 466 bp, Homo Sapiens
cagacttccttctcatccaggaaattccaaaatgtctttacatacatattcttatattgtgtaataaaagattctgaagtccattactggctagaataataactagaaattgcttaatattactatacattgcatttgaacttaatctccacagtaacaattaggtagtattacttggatttcatggatgaagaaaaccaagatacaaaaagttcacacagccagtaagcagatgagcctgacttcatagtcatacatagcctgaattgagtcccagcaggagcacatgggcatggacatctaccagatttgggaactggcgtacaagcaagaaataggagacggaatcaggagttaggattccatgcttaggaccatcccagatggatggctgcctccctctgggagctgcactcttctgaggttgcaggcatccagggccagggtgcttctgtgaggtgtgcca

SEQ ID NO: 5018 - DNA, 812 bp, Homo Sapiens
  misc_feature (694)..(702): n is a, c, g, or t
ggggcagtctagagaactaggactgctcagccttatcctggagtggagcatttagcccaggtcttaattctccaagaggaggaatacatagtatggtaaggcaaggaactgggtggaatgtcaggttgcctgcccaagtgggagaggtagggtttttctagcttgtgtgacagaagtagcaaaatctggtcctcccccctcccagtgtagctgtggctcagagtttttctcttttggttgtcacttactcccttgtgattgaattttttctcctgcatccatggcaggatccccagccagtatagagacttggttggcatcttctgctgcagggactaaaagtatttgactggggcacatgtggctgttgtcattctttctgcatcccactgttcccctccaatttatgttattttctaccctgtttttcagttccatctctgctctgtcctatagctttataaaaccagagtgtgtggggctgaggtcaggagtataagtacctgccttaggcactattccttatataacaaaaatattaaatatttttttcctcagtaaaaggatgaaaattggtttcagttgtcttactctattccagtctttgcccactttcacacaaatgacaaggccaataatgtttttgtttggttttttaatcattaaggagttttttgtaccaaaaggtgacggnnnnnnnnnccttcactttttaaaaccccacggttgttgggggaagggattgccaacccaatttacccacaaaagcatgcctttttggtaacacttaattttccccctggctttaagaa

SEQ ID NO: 5019 - DNA, 532 bp, Homo Sapiens
ggggcgtgcgcagatcagggatcgcgattgcgaatcctccgctgaggtgatttggatatccctagaacgttgagggcacgagtcgggtcctgagaccaggtcctcagccagcagagccacgttccttatgagcaccgtgggtttatttcattttcctacaccactgacccgaatatgcccggcgccatggggactccggctttgggagaagctgacgttgttatccccaggaatagctgtcactccggtccagatggcaggcaagaaggactaccctgcactgctttccttggatgagaatgaactcgaagagcagtttgtgaaaggacacggtccagggggccaggcaaccaacaaaaccagcaactgcgtggtgctgaagcacatcccctcaggcatcgttgtaaagtgccatcagacaagatcagttgatcagaacagaaagctagctcggaaaatcctacaagagaaagtagatgttttctacaatggtgaaaacagtcctgttcacaaagaaaaacgagaagcggct

SEQ ID NO: 5020 - DNA, 446 bp, Homo Sapiens
ccagttagctttgctaccagttatcaggctgagggtaaaaagctgcgattggtggctgggtccagaacactgacaggggcacagtgcacggacaattgcaaggtcccatcctccaaggtgcgtcatatgcaggaatggcttgaaacaagaggaagtcctaaatcacacatcgacaaagcaaacttcaacaatgaaaaagtcatcttgaagttggattactcagacttccaaattgtaaaataatggcctgaatttaagttttctaagataaactcagtggtttggtttttattattaatagagatagaactattgtgtgttaatgttagcattagtcaataagttattttaatgtcagatttttgaatgttattatatattacctgtatgatggaaggattaccactgtacacaaatctaatcaataaaaacgttagaaccctcaa

SEQ ID NO: 5021 - DNA, 807 bp, Homo Sapiens
  misc_feature (105)..(105): n is a, c, g, or t
gctccctcctttttggacttcgggagccaattaggatattttcagtggtttcgattcctttttccccatgttctttaaagttcggtagttttcgggagttctganccagggatactaaactctccctaaaatcactagtcccatgatctctgccaacattatgaagctcatcaaagaaagtcaacgtctgtttgagtttggcctgaacaatttttgctcttctaattctgcaagaagggcctgcttagtacataatccagtctggtacttctcctgtaactgttcaatttctttctggagatgctgaaaatcttcctcactataaggtgtctccttacatttatcttcaggaagcaagatgtttgagggaatacgtaaaatcagctgcaaaaacagttgctccattttgctaaaaaggttatcaaaatgtcctttcatgaagcaaagaaacttctctgtgcatttgcgaatctgcactgggctaatgtcacagtctgggatgccatccagcttcttcagaataacctgttcaacggcctgcatcacttcaaataggtagtcttgaaatgcaatgtagatccgaagcatgcacgtttgtggcgtgaagccaaagaactgggcctcgtaggtcattggatccacagacatcttggcttattttgctatgttgttttcagtcgtgaaaaaccggagcgaccatgagggtgacgatttgaagcacacacaggcttcccgccacctcctttaaaccgccgctggcttgccagggacagacggcgcggttggctccccaaaattccgactccc

SEQ ID NO: 5022 - DNA, 482 bp, Homo Sapiens
cccggaagcgacccgttgccatggcgactatgtacacagccaggcagccccgcgtggggagtgcaggtggtttcggttgcggcagtcgcgtcccgggagcgtcgctgcctggtgaacgctagaatgggtactaggaaaaaagttcatgcatttgtccgtgtcaaacccaccgatgactttgctcatgaaatgatcagatacggagatgacaaaagaagcattgatattcacttaaaaaaagacattcggagaggagttgtcaataaccaacagacagactggtcgtttaagttggatggagttcttcacgatgcctcccaggacttggtttatgagacagttgcaaaggatgtggtttctcaggccctcgatggctataatggtaacttaattaattaaatgttgtcttatgtaagaacctgaggagtaagagatgcaaatattttatggtgaataaaataaaagctcacttactatcaaaa

SEQ ID NO: 5023 - DNA, 405 bp, Homo Sapiens
ggatgagtattgtaccgaatctaaatcacaattgggtatataatcattgagcgatattcatttttccaatcagtatgggatttatatctatttatacatgtttttaatcattttgatcaatgtttatagatttcaaggtacaaacctcactttttatgtttattcctaaatatttcttactttaagttctttagcaaatggaattggtttttaattttcttttaaaattatttattgataatgtatggaaattcaactaatttttggtgctgttattctattctgcaaataaactgaatgtgtttgttagttccagttgcattttggctgactctttgtgattttcttcacagaaggtcatgtcatctacaaacaaataaaatttgacttctttctttctgaaaa

SEQ ID NO: 5024 - DNA, 915 bp, Homo Sapiens
  misc_feature (317)..(326): n is a, c, g, or t
  misc_feature (565)..(565): n is a, c, g, or t
  misc_feature (811)..(811): n is a, c, g, or t
ggtataattagtagttccgtgattgaaagtttattgtaattctactatcttcaaattagatacattttcaaaaggaaaagataattttttagaaacatcttaatattcactatttcctgaaaaaatccaagcagttaacgctttctggatggtaacaaagtaccttctaaaagataagtgctatgacaccatgtatgaatgtaattctcttagtaatttacctctgactatttggtgtcttaacgctttggtttatataatctcaggggttgtctgcaaaccaaaactgacatattctgtggttagcttttattacnnnnnnnnnnaacagaatgctttgctttggttatatttcttctttcttcttttgtcttatatggattaataactagtctccatgaacttcacttgaaagagcctgtaaaagttagatgagtctaaaagtgctctttgaagtagcaacaaattgggagtatatgctctgttatatagaaataaattgcccttgctattttcctacatttagcctttgctagattgaatatacattgagctaagaccttangaaattcactttctgcatgataaaatgacccaataaatattccactttgcttaataatgtacatacagtgcattattttttctatttgtagatgaatttaatgacagataattgtctgttccccgctgaaactgaagaaatctagtttttttgtgaacatttttgtggtcttatggataaagtacatgaagatttttgcagcagtattaggtggttcagtgggctgcactttaataatcagggtgnttaattttttgaccagggattgggactagaccctttttcaaataagaggcctgaaggggtatcaggacagtggaaaaaggtggcctggaaactctaaagtagcc

SEQ ID NO: 5025 - DNA, 947 bp, Homo Sapiens
  misc_feature (37)..(37): n is a, c, g, or t
  misc_feature (84)..(84): n is a, c, g, or t
  misc_feature (750)..(765): n is a, c, g, or t
  misc_feature (767)..(813): n is a, c, g, or t
aatgtcttcataaaccaaggactattaagtgtattanaatgaaacagtggggtttagtactccaaatgaactcttaaagaaaanaactaatcttggcatcctatcactatgtgatattttgtacatcttactgtatttacaagtttatttatcaaggattatccatcttgctaatggcctattatttatttcactttttgttggtctttatatccttttattaatgtgctaaaggaacctgtatatctattttggaactctttgaatagtctaaaatagactaaaaatggagtattttatagtttaaattacaaaccaaggtggttccccctaagatatatatcttggtttaccatgattccaaacaaaactaacttgtttaaaaatatttggagtaaagttttatttgcattacaaataggatacaaaaatagttgaatcaggatacagaaatctgctgtgttttgactagttatccctgttttatttttttagatgtgcttaattttatggtgtaactaaagattttgtttgtgtaatgcatgattaagacaataaagtattttttctagtcttccgagaaacttttctgatcagtttgcgagttttgatgagttttgtaaggtttttgttttacaaactatgaatcagcaaatttttaagattgtaccacatagcaaacatacagctgttgaaaaataatgtatataaaatgcatataataaatattaaattgtgtacctgtaaaannnnnnnnnnnnnnnncnnnnnnnnnnnnnnnnnnnnnnnnnnnnnnnnnnnnnnnnnnnnnnncttgtcgggccgcctcgggcccttggaaaaatttttctaaaaccatttcctttttggccgccgcggcccccccaaagggtaaaagggaaacagtgggcccataaccctggttttccctaagagaaaattcccgg

SEQ ID NO: 5026 - DNA, 608 bp, Homo Sapiens
  misc_feature (555)..(555): n is a, c, g, or t
ttttttaggagtacaagagtagctttatcatggatttagggctgtggttacaaggaagctgtaaggaataaaatgactcccatgaagacgtaccgtgcggacgagtggaaggagaaatttggccattacaaagacacaggaatatgttaagaagtgaggggcaggatgaaatcatctagggtaggtatttagagggagggcgccgtgcaaaataaaatcctcactatgaaacaaaggcggaggcaggaggctgcgttaggtggaagcagcggaggaaggagacgaaagggattgtcattttcatgtcgtggctttttagaagacagccatgtcctctactctgattctatcaaaatgtgttctcggggtgctggtaacgttcagccaacgaaataattcctatggcggcagtaggaataacaaaacgcagaagcgggaacgatgtctttttattcctccccagacgcaaacgtggatgcatgaggtttggtaacaggcaaagtcatctggttaacgtgactgatgcaaaaagtcccggcctgggcaaaaagaagntcactgggtgaatgggatggatcagactccctgtcctgagggggagatggttt

SEQ ID NO: 5027 - DNA, 1448 bp, Homo Sapiens
  misc_feature (1207)..(1215): n is a, c, g, or t
  misc_feature (1240)..(1251): n is a, c, g, or t
ggggctttcgcccgctgctgccgccgccgccgccggccgcggctgcactcccaagatggcggctcctccgggcgagtacttcagcgttgggagccaggtgtcgtgccggacgtgccaggagcagcggctgcagggcgaggtggtagcctttgactaccaatccaaaatgctggctttaaaatgtccctcttccagtggaaagcccaaccatgcagacatcttgctcataaacttacagtatgtttcagaagtggaaataattaatgaccgaacagaaacccctcctcccctagcttcactcaatgttagtaagcttgccagcaaagcacggacagagaaggaggagaagctgagccaggcctatgcaatcagtgctggtgtctctctagagggccagcagctcttccagaccattcacaagaccattaaagactgtaaatggcaagaaaaaaacatcgtagtcatggaagaagttgttattacacccccatatcaagtggaaaactgtaaaggcaaagaggggagtgcactgagccatgtacgcaaaatagttgaaaaacattttagagacgtggaaagccaaaagatactgcaacgttcacaagcccagcaaccacagaaggaggctgccctgtcatcctgagtccgtacacatggaggactcttccagcatccagccaaggaggcgctggtggtggcttcagcggaggcaggccgggggagggaagggatcctatatgtcctgttggctcttaacaaagggtcagcatttccaaatcttagacttgaacaaacaaaacacccaacaaaaaagaacaagagaataatttaaaagttgaatcattacttgactaacagacttcggtccaccatgtccttttcacagccctcttctggaacagtcaccttgttacttttatttttgaaaattattttcccactctgccctttacttctgactttcctttcctagtttgttcctgccattctgtttttataagtggctacacttgccttctgaatgattgaaagaaacttttacatcttttcttccaaaataaaagtaacaagctgaagacaaaaagccaagacgcgtgcgcacagcccagagtcagacacaccttgagcctgaccagttaaattcgacccggaagggtcggccccgcgcccatccaccaacgcacacttttcacccactgtttcccgnnnnnnnnnggttttataacactccctctgttgnnnnnnnnnnnngttctttccccgaagaactctcttataaaccaacacctttctctgaggccgccgccgcggtcccccccttccccctgaaccacgatagccttggcggcccgcctcaactcgcgcggtttctcccccgaccagataacatcccgacgcatgatctacatcatcaccccgcggtatggccaccctcccactccacgcat

SEQ ID NO: 5028 - DNA, 859 bp, Homo Sapiens
ggggactgtccctcttgaactctgcctttgggcacatgggagatggggacaggaaagatgataacagtggaaccctgtgaagaataggagaatgggaattctaaaataccagttcccaaacaaaccatctctccattggaagaggagctgttgcaaaccgtgttcatttaagcttctgatgaaaagcaatgtatgtttataagcttgcaagtaacagacaagatgttccaaggccgatgaggaaaatatcgcttccctgtctctgcctctaccttgctgtgcctctctggctttagcagcattggatgttgaattggtttggttcatttctctgaagtcggactgtcaggaggagccagaggttggctttctgggatgtgaaggggacagtgtcagcctaagcctctggagatgcttaggatgctgaattttaaccccttctttcactgcatggcccttcaaacagggattggcaggctccgcgagttacagagggggtgagtcttggagagaaccaacgactaaggtagcttagctctctgctttgttcttgggagccaagagaatgcaagatcctggtgggtgagcagtggtatgaagaggggacactggtgggtgaacagtggcatggaagtcactgatgcagcctctggccctcagtctccctatcggcaaagtggggggctcttcctatctctaaagagtttcatccctgacaggtggatgggtgaaagatccagagagtgggggtgaggggtgggccctgaagactttttgtctgtagctcttgcatattgagtgtataaacccggcttctggaccaacccaagatgaataaactggggcagaaaattaaaaa

SEQ ID NO: 5029 - DNA, 812 bp, Homo Sapiens
  misc_feature (91)..(124): n is a, c, g, or t
  misc_feature (655)..(655): n is a, c, g, or t
tgatatatccatgatgaattaaaatggagtggaacccactgatggtatgcagctgataagacgctatagagaaatgatatccggacacatnnnnnnnnnnnnnnnnnnnnnnnnnnnnnnnnnnccacaacaacaacaacaggacaacagagatggacgacggatcgggaaagccaaccagacagcgtgaggccaggacggaaagaggcacagggagctctgctcagtgtcgctacaggggatctctcaggctcacaacgggccactcctctagggaagttctggtctcatcatgatccttgtttggtctcactccccatgtccttctctgtccctcctccaactgccatttatttatttaactgaaaaagtaccaatcacccacataggcatgacatactcatccatgtacccatttcttaaaattgatcattgttaacatttggtgtaatttgctttatttatttttaatgaaataaataaaactttacagaaaatgctttatttttctctttgttccctccccatcctatatttttctcctaaaaaaccctattatcagaaatattagtgtgtattcccagtttcgactttttattttattacacacacactcccacacatagctgtgacaatgaacttcacatagtatggntctgtattttctctttgtttttcaaacttacataagtattttactatttctcatggaaaaactcacttttcccatccaacgttatgtttccttaagatctctctatgttgatataaagaaatctagctcattctttttaatgaaaataaagtatatt

SEQ ID NO: 5030 - DNA, 774 bp, Homo Sapiens
gggaagccaaggccctggtcccaaataagggtatttaataggcacttaggggactattaggatgtccccatttctctcctctttccattcctctaatctcttctcaccccagtgtaacgaatcgctacaggtttttaccaaaatgctgcagcagtagttggaaatgagttattttgcattactaaagtgttcaatcacattatcacgggtcacatttgtatataaccaggagatggccaaataacatctactgcagtgattttgcaaattcagcatagtcaatgtatccatcattgttcttgtcatcatctctcaaaacaccatctattatgttaatcagttcatcttcactcattagtggtgcctgttcactcccttcctccttatggacatgagtgatggctgtggagagttctaagccatcaagcaaattattgccatcataatcatgcattttgaagtaatggagctgcaattcttgtggcgacatctccgcctctggtttgttgatgacaccttctagatgctccatgatatgctcttggtcgtgcactgtgttcttatccaggcccatgctgccgggttgggagaagctggctgcaggctcctcagccctggcgcctggggcacaaaaggcccagagcaggcaacacaggaagggggttctgagcagggatctcatggtcatcaatatccttacggtctccgaagcagacgcgaagccctccaacgtgagcctcaccagcccccgtccccaaaacgctcttcctcccc

SEQ ID NO: 5031 - DNA, 414 bp, Homo Sapiens
tcacagtcctacacataatttatggtattcagaacatcactttataaactgttgccaaattaccacttaaacactaatatccaaatacagaatttagaaaattattttaaattttaactctaccatccccccgagctctcggctatgaatttagtctgggaagagggctccgtaataggccactgaggtcctctgtcccaccacatcatcctcccccgaaaactagctgcccgactgctctaccagacttgggctagaatttggcttcacggtggcaatgggaccacctgggccctacagtgtggcaaaatcaacttgcccacaaaccccatcccaggtgctgggatgctaacacactgaagctgaaagaccacacttggttttgccacagatcaagctgcatctgactagaca

SEQ ID NO: 5032 - DNA, 406 bp, Homo Sapiens
  misc_feature (127)..(142): n is a, c, g, or t
agtcttaacttttgctcttggatttaagtcaaggtactgtatagaagttgtgtaaaatcagtatgaaagttcaatgttgctgttcttgctcagtgattttaaagaaattgagtagttcctatgtgannnnnnnnnnnnnnnnctaaactgcattcctgtgcccacctacggcatgcctctatgtattggctactacagtgttttaaaaagtgtttcagatatttctctaattatgtacaacctaaaatgttggtgttttgtatggatcacaagtgcagcattccttaattccttctgctatatgtcacacagttgttatttggagaaccaagtatgtattgcatgaaaacattatgacttttttctcttagtttaaataaactccaaggtaactggacttctaaaa

SEQ ID NO: 5033 - DNA, 535 bp, Homo Sapiens
tcagataatcagacttgaggaaactgaaagccccaggttgagagaacagaggcctagggacctccagaccattggaatcactgtttgccagctgtgtggccttggtcatatcatcagcctctgggaagcctagttcccacatctggaaataaggatgatcatagctacctcacggttacattgcaaagccttactctaaaagctcccagcctccagaggctctcaatgaagagtcaccttcatggtcgtcttcaggaacaggacggatgaagaaggggtggggttaagactcaggggcacctgagggtctgagcccccttatgagtacccaagaaggactgtctatgcatgcacacccacaagcctatacaccatttatatacctacacgcacgcaagagacgcggagagataggcgatgcagactcgcgattcaatgatcgatatgctcataaaagtgctcaattatattttctgtattttgtatgctgtattttccaagacgtatattattttactattaaagaaaaaaatca

SEQ ID NO: 5034 - DNA, 480 bp, Homo Sapiens
  misc_feature (154)..(180): n is a, c, g, or t
ggggcttttaaaacaagtagttcatgaaagaagctgttggactcaacatagagtagagtaactatctttttagtctggatttctgccctgcttagattttaaaagtataagcatggattgccaattccacttgatgtaaacaaaactttttttnnnnnnnnnnnnnnnnnnnnnnnnnnnaaataacttattgtatcagtccaggttcagaaacttgtggtaggccagttccagatagtttcatttcacctgtaaactgtatcactttgactgatattgtaattttcaaatgtataatatgtttacagatgtgccctgcatttagtctgccttgttcctattttgatttttgttgagtctcctgcctgcttgccaaaagctaggatgcttcaggcccatgtacaattgaaagcagaggcatccttgagctttaaagcattgaacaaactggaaaatgcaacataccacataactgaagtg

SEQ ID NO: 5035 - DNA, 503 bp, Homo Sapiens
ccaacctattcctatcgcggtgtataaaatggatgttgttacctggacctaaaatgagggttccaccttgctgagctgggtctccttgaaaatcaaagagagggccagtcactgcccgccacaggctctgaaggcttcctgagagtagatttgattttatgtgggggctctgtcctgaggaagcaatttcttcacctcttttcattcccaatcttttataaatttctctctcaggatcgacatagatttcatgagaatatccagtcagcttgcaaaaaggctcaatatgatggtaggatgactgtccaatcactataagggtgacatttgcttcttgtaagaaactcctggggattttggccagatcctctacgtattccttgcagatgtaacacaggaaatgccgcacgaacaccaccacggcgcggcgctcccggaacagcgcgccgaacggtaccgctgcccgcgggcgtccagcaccggcagctcgccacggcggtcgc

SEQ ID NO: 5036 - DNA, 1181 bp, Homo Sapiens
gggaagttcccagggagaaggcagcgcgttttacccgagattcagggtctggctctgcttcccaggctagagtgcatttggcgcgatcacagctcactgcagcctcgacctcctgagctcaagcgaacttcctgcctcagcctcctgagcttcctgagtagctgcgactacagaaaaaagaaatcctctttttagaacatctcttggtggtaccatcagaaatgtcttccttaagtggaaaagtccaaaccgttttgggccttgtagagccaagcaaactgggccgtaccctgacccatgaacacctggccatgacctttgactgctgttactgtccacctcccccgtgccaggaagctatttccaaagaacctatcgtgatgaaaaatttatattggattcagaaaaacgcctattcccataaagaaaaccttcaattaaatcaggagacagaagccataaaggaagaactgttgtattttaaagctaatggtggaggggctttggtggaaaacacaaccactgggattagccgagacacacagacgttgaagaggcttgcagaagagactggcgtcccatatcatatctggagcccgggttttatgtggatgcaactcactcctcagagaccaggcccatgtccagtggagcagcttaccgatgtccttatgaatgaaattctccatggagctgatggaaccagtaatcagtgtgggcatttatttgggaaaaaattgggttggctcctgggcctttgacttggaaagtggaaaaaaaagggttctccacgggcaccagcctcatggccccagggtccagcattggggttgtccctcgttaaataatccattccctggaacggaagctccagggggccccaattttcagaattattcccaaatattggcaaaaaagacaggggggcaagacattcttcccaaaacaagtccattgtcacccccctgggaaataggaacttatttctttgtaatcaaaaaaagaaccttcttggggaggttttgcttcaccccttgggcgtggcctactttggggaaacaatggatcctccctttggggaaccttgaaacttcacttctaatttaacccaaacttcgggcgcccaaaaaaatttgaacactgcccctgggtggtgtataccccaaagcaattttttgaac

SEQ ID NO: 5037 - DNA, 511 bp, Homo Sapiens
ggctacacattaccttctccattaaaatatgttttatgccacatgcagaattttaatattatatagttatttgtgaaagtataactaaatagaaattttaagaaagaatgcctctaatattcatatcttagcactaaagaagcatatattattctgcagattgaattaaaatgttagttaccaagatatgaacttagacattttcagtaagcatttataggctattctagtagaaaactgtacacaatttcccatgaggctggtgaaggtttcttagcttaagcgactttttatctggttcttggattttattaaataatatttgaatgaacagttttgactaacagcctgaaaatattaatctttcctctcagtctgagcaagcgaaagtagataaattcatattgtatgtctgattctctttgggtttgaaaagaaataaagactctacttctaaattagcatagaaaaaaggagaatttctcttgatttatttctcagtaaggggtaa

SEQ ID NO: 5038 - DNA, 843 bp, Homo Sapiens
  misc_feature (761)..(761): n is a, c, g, or t
  misc_feature (763)..(766): n is a, c, g, or t
ggtggggaggaactacacagtcgtgattagaatttaactgatggttttgtattataacttctaagacctgccagaatgctagtcccgagagtgtcagacaaggaagaaatccctgggcctcttcccctcacccggcccttagatttcatggagcagccacttagcattgaattgcactaccctgagctaaacgtgtctgtgctttctaagataagagcttgatccctttcttctatcttaagacagcacctcctgaaaagaatcgaagttgtcacaactctcaattattttttaaatactgcatagattgagttttggtttattaccaacccttcccagaattgcgttggatctaaaactactagatctcatcccattcccatgtaaattaccacagaccgcagtaccggggctggagcggagtgaagctgtctgctgtaagaggagtggccatgtgagggcatggagtcattagtctcacaaacacactttggactgaagaggatcatttctttttgttcgtgaggtcactgtccaggcctctcatatcatgaccagacggcgggtctccatcttctttcactcctgtggccctggctgctttacacaatctgttctataaggttcaggtgttttcaagttggaaagatcataaatactcaaaattgttttcaagttagcaagttcttttaacagtcttttatgcaaaaattgaattaataaaataatctttttgtaccacaaaaacaccacacaaaaanannnnacatggtgggccgccttcggccccttcaaaagttttcttaaaccatttccttgggggcccggccccccttaagtaaa

SEQ ID NO: 5039 - DNA, 495 bp, Homo Sapiens
gaggggtcaggttgggaaaacatgaggaatggctgactccaaagcatgtggtgggtgtagggtgatgaaaggaggcccagttgtcactcactcctctctccctcccaagggtgctggctgagctgctggagctagggtgtcctgagcagagcctgagggacgccatcaccctggacctcttatgccacgcgctcattttctgccgccagcagggcttctcactggagcagacgtcagcggcttgtgccctgctccagaatcttcacaaggcttgtattggccacatccacgtcctccgagcctacatcaagacccaagtgaacaaagagctggagcagctccaggggctggtggaggagcggctcaaggccagcgaggaaaggctcagcagcaagttgactgcactagagcggcccttccagctacctccgggtaaaggcaagagcaagaccaagtgacccccaacattttccccaataaaggtctgggccagaa

SEQ ID NO: 5040 - DNA, 957 bp, Homo Sapiens
  misc_feature (521)..(554): n is a, c, g, or t
  misc_feature (725)..(726): n is a, c, g, or t
  misc_feature (728)..(728): n is a, c, g, or t
  misc_feature (731)..(738): n is a, c, g, or t
  misc_feature (740)..(820): n is a, c, g, or t
agagacttcactccagaattggaaagatggctgtatgctagattgccatgttttgaaaagcatatgttacctgaggctcaatcactgatccgccagcatgcaaaaaggtgctctaaagtgagcctcttagtgaatagcaaagatgatgagagggttcctgctttgaatttattaatctgcttggttaacaggtattttgaccaacgtgatttagctgatgagccatcttgatgtagctgatctctcagggatagaagatatttctcatgaaggcagcctaactctgaggaaaacaatgccaattcaagtacagatttcaacacatcttcaacactatgtgaagggttcacatcttaacctgtgcaattcagattgatactcagaatatgggttgatttgaatatctgaaatatcaatggaaaatcccactcagtttttgatgaacagtttgaacagttttctgtaatcaagcagcttgcatagaaattgtatgatgaaattttacataggttcttggtgcnnnnnnnnnnnnnnnnnnnnnnnnnnnnnnnnnntatttacttatatacatataaaattttattgaaaatatgttttggttactaaaattttgtttgactcctaacaaaagacaatggatggccttagcatcagaattaaaataatctggattaaatggcaatgtgttcatagtcagcaataaaattaaacatttttccctttannanaannnnnnnncnnnnnnnnnnnnnnnnnnnnnnnnnnnnnnnnnnnnnnnnnnnnnnnnnnnnnnnnnnnnnnnnnnnnnnnnnnnnnnnnnacactttgggggcccccttcgcccctcaaaaattttttaaaacctttcttttggcccgcggccccaaaaggaaaggaaaaagggccaaaccttttcccaagaaaacccggaaaagaaaagggttgggattccccccc

SEQ ID NO: 5041 - DNA, 1244 bp, Homo Sapiens
  misc_feature (1147)..(1151): n is a, c, g, or t
  misc_feature (1153)..(1154): n is a, c, g, or t
  misc_feature (1156)..(1156): n is a, c, g, or t
  misc_feature (1159)..(1165): n is a, c, g, or t
  misc_feature (1167)..(1167): n is a, c, g, or t
  misc_feature (1169)..(1169): n is a, c, g, or t
  misc_feature (1171)..(1177): n is a, c, g, or t
cgcggcggaaatcgcgcggatgccagaacgcgctctcagcttcgggtcctgcggctgcggctgccgccatcatggtgcggaagcttaagttccacgagcagaagctgctgaagcaggtggacttcctgaactgggaggtcaccgaccacaacctgcacgagctgcgcgtgctgcggcgttaccggctgcagcggcgggaggactacacgcgctacaaccagctgagccgtgccgtgcgtgagctggcgcggcgcctgcgcgacctgcccgaacgcgaccagttccgcgtgcgcgcttcggccgcgctgctggacaagctgtatgctctcggcttggtgcccacgcgcggttcgctggagctctgcgacttcgtcacggcctcgtccttctgccgccgccgcctccccaccgtgctcctcaagctgcgcatggcgcagcaccttcaggctgccgtggcctttgtggagcaagggcacgtacgcgtgggccctgacgtggttaccgaccccgccttccttgtcacgcgcagcatggaggactttgtcacttgggtggactcgtccaagatcaagcggcacgtgctagagtacaatgaggagcgcgatgacttcgatctggaagcctagcggatctcccactttgcatggctgtcttttacagatgggaaaactgaggcctgatgctggagattctatgagggtgctctcctcaagggtatcagacggtcgtaggttcttaagaatttgattcatcagtggcaggccatgcatagagccacgggaggtgcgtccttgttttccaggaaatgttcttagaacttggactactgattattaattgactgtgccttgggaaacagtgggaagtaacttggtgcagcactggggtattgttggcttcttgtgttggaaactttgtaatgtaaaaggaaaaactggaaatccccacgccctgtttccctttatcgtcttgtggttggactggttcaattcgtttaactcgaattcttgctcctggccgtggttaagctgtgtacagatgatggagagtttggcctcaagtttttataaactgagcgagactagtgttcaggatctcctcccttgtttaaatgtcaataaatgccccaactgcttttgtaagtccnnnnnannanaannnnnnngnanannnnnnnccctggtcggccgccctcggccccttcgaagaaccttttctaaaaccatttcgttttggccgccccg

SEQ ID NO: 5042 - DNA, 579 bp, Homo Sapiens
ggggtccagggacgctaccctcacgtgtctggttccgagtgctgcgttcggctgtgctgggaagttgcgtagacagtggcctcgagaccctgcctgcctgaggaggcctcggttggatgcgaaggagctgcagcatccaggggacaagatgccaactggcaagcagctagctgacattggctataagaccttctctacctccatgatgcttctcactgtgtatggggggtacctctgcagtgtccgagtctaccactatttccagtggcgcagggcccagcgccaggccgcagaagaacagaagacctcaggaatcatgtagaactggggggctttttctcctgagcagagaggcccaaggcatgctgtggagagacttcacctgccaccatttccaggtcaacaggactagagcgttgatggttttcaaaccctgttggaagaaagtgcccatggtttctctggttctgccagtttgacagtttatggaggcttttgaatcgtaatagcaatgtgagggtgaggtacacctacagacattaaataatttgctgtgtcaaaccaaacagccaccacccc

SEQ ID NO: 5043 - DNA, 462 bp, Homo Sapiens
ggcacgagggctcatctaatatttggctggaataaatcagagacttccataatcaagtaaattttaattttcatcattccatggagattcagtctgtctggaatcccggaacccctccacagaatcgtgtctggatccacactgtggtgtggctgccacggcctcctggctccagaggcagctgggccgggccaaggcaggaaggcgcccccatgtgtgtggcctcagtctcagcatctgactgtgctgccctgtccccagggaagagaatgaggaccacgtggacttgttcgcagtgggtcccggtgctggcaggagtgtgctggtgagccggctctgtctttgtaaatccttcaggggtcctacggctgactccaccggacagcccgtcctgggccgtgttaagcaccttttgtagaaatcgtatttttattaaaacatcaaatctgtgttcctgtaaaa

SEQ ID NO: 5044 - DNA, 766 bp, Homo Sapiens
gggacgccgcgtcacgagtcagccaaagatggctgcgcccaggtaatttgagcaaaggccacagtgaactccggcgtggctgaggaaggaggaggcacccacaggctgctgggaggagagcataaggctcaaaatggaaaatcataaatccaataataaggaaaacataacaattgttgatatatccagaaaaattaaccagcttccagaagcagaaaggaatctacttgaaaatggatcggtttatgttggattaaatgctgctctttgtggcctcatagcaaacagtctttttcgacgcatcttgaatgtgacaaaggctcgcatagctgctggcttaccaatggcagggataccttttcttacaacagacttaacttacagatgttttgtaagttttcctttgaatacaggtgatttggattgtgaaacctgtaccataacacggagtggactgactggtcttgttattggtggtctataccctgttttcttggctatacctgtaaatggtggtctagcagccaggtatcaatcagctctgttaccacacaaagggaacatcttaagttactggattagaacttctaagcctgtctttagaaagatgttatttcctattttgctccagactatgttttcagcataccttgggtctgaacaatataaactacttataaaggcccttcagttatctgaacctggcaaagaaattcactgattttaaacaaatatgtaaacaaaaataaaatggtaaaaacagtta

SEQ ID NO: 5045 - DNA, 1777 bp, Homo Sapiens
  misc_feature (1316)..(1447): n is a, c, g, or t
  misc_feature (1455)..(1455): n is a, c, g, or t
  misc_feature (1462)..(1462): n is a, c, g, or t
  misc_feature (1464)..(1496): n is a, c, g, or t
  misc_feature (1626)..(1648): n is a, c, g, or t
tcgggtggtttccgcccggcagcccgcagcccgctgcgccccgggccgcgtctcccggcggtgggagggggcggccccactcggttcctggcccctcgcggccccgtcagcctcccgctcggggtgcgccgcccttcgtctgggtctccgcccccaggacccgcggccgagagctccggagcgcggcttccccggccggctgcgcgatgggctgcgggaactccaccgccaccagcgcgggcgcgggccaaggccctgcaggagcagccaaagatgtaacagaagaatccgtaacagaagatgacaagaggagaaactatggaggagtatatgttggcctaccatctgaagctgtcaatatggtgtccagtcaaacaaagacggttcggaaaaattagaagaaaataacatcatgactcaagaatcaagagcttgctcatcagtttggaaggaatttggctccgtgggacgttgtaatgtgcacagacatttccaaggaaattctaaacagtcacccttcccttttgcattcccccaaatcttaagtgtatacataaaaccctgggtacatattgttgtggtaatagaagggaattggttaaacagtacacttgtttatggaactttctgtggccacctacgaaagacaagttaacaaactgtcatggaggctgttgttgcccagccagggccgctgcattttgacaacatttccaccctggccactcagcacatttcatggaggtcatgtcttttcactgatacttttttgatagtttttatataacaaaatccttattctatttataacttaagatgataaggcactataaattaatgacctaaaataatatatttgtctgttatcttttgctatttctacttcactttaatttttagctgtaaaattggtaaatggattcttacaactatctctttccatttcttactatttggttttcaaatttcatttaaatgtcagaatttccttttttaggaacaatgtgtatttcattgcactatttaaaaataaactcaaatttgcatgccatatgcacattttgattacatttttattttctttcgtgaaaggcatgtgcaactacaaatacttcatagctgtttgggttgctcattctacatcacgacaatctcatcatattatttctataacttttcaaggacttgcgatggatggttagtgggatatctggaaattaatttgataatgacttgtgtatctacttagtattgcaatgtaagttactcaattcaccaatgtatttcaacaattaaaacatttttatccctcttcnnnnnnnnnnnnnnnnnnnnnnnnnnnnnnnnnnnnnnnnnnnnnnnnnnnnnnnnnnnnnnnnnnnnnnnnnnnnnnnnnnnnnnnnnnnnnnnnnnnnnnnnnnnnnnnnnnnnnnnnnnnnnnnnnnnnaagaacanggaccangnnnnnnnnnnnnnnnnnnnnnnnnnnnnnnnnncgccccggggagcgggcccacacccgaaaaaaatacgtttccagaaaatctgaggggtctccggggatctccccggcattaacaccaacaagagaatcccgtcccgtggtatacgcccccggcgtcttgnnnnnnnnnnnnnnnnnnnnnnntttctcaaggggagtaattcggggattgaccccacaggggggggctccttcatcaaaattggaatgtcggggtcctggccggtcacctttgaggggattttgggagaaaagttggtcccaaaaatttat

SEQ ID NO: 5046 - DNA, 1400 bp, Homo Sapiens
  misc_feature (546)..(605): n is a, c, g, or t
  misc_feature (609)..(610): n is a, c, g, or t
  misc_feature (613)..(613): n is a, c, g, or t
  misc_feature (817)..(826): n is a, c, g, or t
  misc_feature (1345)..(1345): n is a, c, g, or t
ttaaaaggcgaaattctcttgggttccaaagacttactgggaagcctttaaagaccccacagtcgttaactggaccaattacggtcttagattaccccagtggccaggatatcattttataatgcattagaattgagtattgtgggtcccctaattctgtgggtgccttaagtgagaatttctaaatgattttcacattctaaatgactttgggttttgaactctccatctagtttacttctaaaatgggaacttgaggcaattcaggtatccaggcaaatctttgtatatatttttttgtgtacatgcacacatctcgaaatccatttccgtgtttaatgttagttgtttatgtgttagtattcctgtgtctactgttttgttgttgttaatatgggtaaagtgagccctgaaatacatgctaaacaagacatgaaatgcagaaaggtacatagtgtttcaagtgcatggtagtttgatctgtgttttactttattgtgttttcttgagtgtaaagaaagaataaatcaaagttcttcatacccnnnnnnnnnnnnnnnnnnnnnnnnnnnnnnnnnnnnnnnnnnnnnnnnnnnnnnnnnnnncttnnccnacaaccccggacgaggagaaggataccaaacccatgcgaccggggccccgagccgaaaacggaaaaggacctgggcctgactctgtgcccgaacgagaccccggtaaagaactagcgtttgcatcccaacaaataaaaaccgcccgagcggaaacctagggtaccaaaacaaatccatatgcgagggcaaagcccggtgactgnnnnnnnnnnttgggagccccaccccgacatctaatttccagtctcgccccggcccctgtcaaccaattgtggggtattgtgtgaatccccttataggcgcccaggcgggaaacgctaactccatccgcaaagggtaataattgaactcggacatcgcccaacggaaattctgccccttggttggcacttggggattaaacccatggccccaaaaaaggggggccgggaggtaaaaataaccattcttggccacagggccacccaatttagaatctggggggaagagcggaacaactctgcgctccgggggtataagccccgcaataacccgaatattttttgattcctgccctttcaccccggtttaaagaggggaacaaaggtctttggtgatttttcaaccggggaaacaaaaacctttgtatcccatatacaaagttgtgtggggaattctctcccacgctagcacgcggaaaacgcgggccccgttgcgccctctctccaccctcccaaggacaaaaacgaganacgcgcttttctgggcgttttggggccccacaggggggaacaaaagacccgagag

SEQ ID NO: 5047 - DNA, 662 bp, Homo Sapiens
  misc_feature (388)..(412): n is a, c, g, or t
ttttgacgggaattagtatctcgaaagatggtacgaaatttagaagatccaacaacccttgtagaatggacgctgcattcaggccaactactcactaatggaaaacggaaagatcaaagtgttaaaccaggagttgagagctgatgaaactgtgaatcaaatcgaaggtgaagccaccccagttaacctcacagagcctgccaagctggaagttaagttttcctggtttatgccatcggcaccgtactggatcctggccaccgactatgagaactatgccctcgtgtattcctgtacctgcatcatccaactttttcacgtggattttgcttggatcttggcaagaaaccctaatctccctccagaaacagtggactctctaaaaaannnnnnnnnnnnnnnnnnnnnnnnngtcaagaaaatgacggtcacagaccaggtgaactgccccaagctctcgtaaccaggttctacagggaggctgcacccactccatgttacttctcgtcgctttcccctaccccaccccccgccataaagacaaaccaatcaaccacgacaaaggaagttgacctaaacatgtaaccatgccctaccctgttaccttgctagctgcaaaataaacttgttgctgacctgctgtgctcgcagtagataccaaa

SEQ ID NO: 5048 - DNA, 580 bp, Homo Sapiens
ggggcggttgctatggttccgagggcaggactatgggaggctgccctgtacggaaaagaagaagaaatggcagtaaagagggcaaccatcattccacccagcccaaaaggaataagagaaaccctatctttcaggattctcaagatacagaggtagcaattttcatggagtgataatgaaaggagcagcagccgcattaatatcccagagagagcaagtggaccagaaggcaacttaaaccagattgttactgaacccgatgcaaactttccccagttcttgcatgaggggtatgtaccatgccaaggtctttactcccatatcaaccagaccttgaaggaggctcacttcaacagcctgcagcagcgagggcaagctccaacatgatgaattaggacttccttattccaacctaaactgtgtttataaaagcaattgcatacacaccaaaaaaagtctattggtttttaagtctacattttaagtaacaagttaatgggcagttgtttaattggggttttacttcactgttgtacttttaaaggggctgtgaataaatgtttatgaaatttttattttc

SEQ ID NO: 5049 - DNA, 885 bp, Homo Sapiens
  misc_feature (631)..(654): n is a, c, g, or t
gggggaagtaacccacgtgcttccgctggagcctctcgggaggcgggtaacgttatagtatttgtcagaagttggggtctccgtgggcattgtgatccgtcccaggcagtggattaggaggccagaaggagatcccttccacggtgctaggctgagatggatcctctcagggcccaacagctggctgcggagctggaggtggagatgatggccgatatgtacaacagaatgaccagtgcctgccaccggaagtgtgtgcctcctcactacaaggaagcagagctctccaagggcgagtctgtgtgcctggaccgatgtgtctctaagtacctggacatccatgagcggatgggcaaaaagttgacagagttgtctatgcaggatgaagagctgatgaagagggtgcagcagagctctgggcctgcatgaggtccctgtcagtatacaccctggggtgtaccccaccccttcccactttaataaacgtgctccctgttgggtgtcatctgtgaagactgccaggcctacgctctctgtagagagtcttcaagatcccggagtggtagcgctgtctcctggtgaaggagtatttgtcacactgggaatgtgactgccggggtatggatggggnnnnnnnnnnnnnnnnnnnnnnnncaaccacgtttgtttgacccccctttacaccaacccatatttacccgaaatttaaacctggtgggcgggccctccgcccctccaagaagcttttttaaaaccaattccgtctggggggcgcggcgggcccccttaggcaaaaggggaacaccgcggccatatccttgttttttcctagaggaaacacctctggccaaatgaaaataagggggttttgggaatttctccccc

SEQ ID NO: 5050 - DNA, 1465 bp, Homo Sapiens
  misc_feature (999)..(1144): n is a, c, g, or t
  misc_feature (1176)..(1217): n is a, c, g, or t
  misc_feature (1249)..(1258): n is a, c, g, or t
ggtgatagccaagataacgagtgatgagccactcaccaaggatgacatccctgtgtttttgcggcatgctgagttgattgcaagcacctttgtggatcagtgcaagactgtgctcaagctggcctctgaggagcctcctgatgatgaggaggcactggctacaattaggcttctcgacgtcctgtgcgaaatgactgtgaatactgagctgctcggctatctgcaggttttccctggctcgctggaaagagtgattgatcttttgcgggtgattcatgtagctggaaaagaaaaccacaaacatcttcagtaattgtggttgcgtgagagcagaaggtgacatctccaatgtggccaatgggtttaagtctcatctcattcgtctgattggaaatctgtgttacaagaataaagataaccaagacaaggtaaatgagctggatggtatcccgttgatcctggacaactgcaacatcagtgacagtaacccctttctgacccagtgggtgatatatgccatccgaaaccttaccgaagacaacagccaaaaccaagatttgattgcaaagatggaggaacaggggctggcagatgcatccctacttaaaaaagtgggttttgaagttgaaaagaaaggcgaaaagctgatcctgaaatctactagagacacccctaagccatgaatgaactacatccaaatacctgaatttttggaatctgtttcatggatttttcatcttctaccgtatgtgaaattgcaagtgtttgaagatttataagtacaaatttgggaacatacaaatcttttaggtagtagagtttaacgtgtataagctaaaagtgaaagtaactgagtgttctcttgtttctttgcattaatgtaactgtgtggtttgcctttgtccccctggatagaacgtgcatttaaagaatatattgtacttactgtgacagcagataataaaccagtctcttggagggcacaacccttatttgacnnnnnnnnnnnnnnnnnnnnnnnnnnnnnnnnnnnnnnnnnnnnnnnnnnnnnnnnnnnnnnnnnnnnnnnnnnnnnnnnnnnnnnnnnnnnnnnnnnnnnnnnnnnnnnnnnnnnnnnnnnnnnnnnnnnnnnnnnnnnnnnnnnttttttaaaacctttctttgggccccgggccnnnnnnnnnnnnnnnnnnnnnnnnnnnnnnnnnnnnnnnnnntcgggccaagaataagggttggattccccccnnnnnnnnnncccccgggggaaacgaacgttttaaaaaaatcccaaaggagttttggggggtttaatggggattatcaaaaggggccccaagcgaccctaaataaaatacccgcccccccctggccctttttggaaaatgggggaattcactaaaactttcgcgccaagggaaccccccccaaacgggttgagaaccccgaaaccccaggggtttca

SEQ ID NO: 5051 - DNA, 818 bp, Homo Sapiens
  misc_feature (472)..(472): n is a, c, g, or t
  misc_feature (474)..(571): n is a, c, g, or t
  misc_feature (709)..(718): n is a, c, g, or t
tctcattgattaatggacatgatgctgagattcaatcactacatgaaacacctggctgtgaaaacaaaacaacccagagggctgtgttccaagcagcgctggggaagctacgtaacagtcggatgccagttttggaagattcaccatgcgttctgaccctctgttcgtctctttcctctcctctttcttcaagaaggaaattgatcctagtgatttcagcccatgcattaaacaggaaacaataataaatttgtagaattcatatttttctaaagggaacttaaaaactgctgctacatgttatgtacaaaactggtttatgccacatgaacagagaatcacaagtttggttttggtactttttgttcctctttgtattcagttgtatagaacttccaaattcagaatgagaagaaagctgttctgtatcaaaccatttaagcaataaatgttatattttaaaagctgcaanannnnnnnnnnnnnnnnnnnnnnnnnnnnnnnnnnnnnnnnnnnnnnnnnnnnnnnnnnnnnnnnnnnnnnnnnnnnnnnnnnnnnnnnnnnnnnnnnntggggggcgcccttggccccctaaaaaattttttaaaaccttctctttgggcgccgggccccaaaaggaaaggaaactgggccaaacgtgttcccaaagaaaaacccgggaaaggaaaaggggttgggaatcccaccnnnnnnnnnnccccggggggaaaccgaagcgttttgaaaaaaaacccagagggggggtccgggagggcctttccggaatctttccacacgggggccccaggggggctccc

SEQ ID NO: 5052 - DNA, 788 bp, Homo Sapiens
  misc_feature (701)..(725): n is a, c, g, or t
ggggagaccggaagtgagtgatcgaaagcatggcgtcggtggtgttggcgctgaggacccggacagccgttacatccttgctaagccccactccggctacagctcttgctgtcagatacgcatccaagaagtcgggtggtagctccaaaaacctcggtggaaagtcatcaggcagacgccaaggcattaagaaaatggaaggtcactatgttcatgctgggaacatcattgcaacacagcgccatttccgctggcacccaggtgcccatgtgggtgttgggaagaataaatgtctgtatgccctggaagaggggatagtccgctacactaaggaggtctacgtgcctcatcccagaaacacggaggctgtggatctgatcaccaggctgcccaagggtgctgtgctctacaagacttttgtccacgtggttcctgccaagcctgagggcaccttcaaactggtagctatgctttgatgtcctgttgaggccatcggacagagactggagcccaggtgacaggagatggtgataccagaagtcaagggttggggtggcgacacggcctcccgaggaagaggtctgcttgatggtgactctgcaggagactctgaagtgactgctgggaaaccctttgggagacctgacctggggccaaaaataaagtgagccagcgtcatgaacgcatgctatttagggacnnnnnnnnnnnnnnnnnnnnnnnnnaaaacatgttcggccgccttcggcccctcgaagagctttcctaggaccattcggtttggcgcg

SEQ ID NO: 5053 - DNA, 529 bp, Homo Sapiens
tttaatccatagaaaatgcagtagtttggagggaggtgtacccttagaagtggttaatagaaccttgtataaacacctttcaccagcccttcctttagggcagcattcccatcctatcctctctcccagacattataaacatcttttaaacagaagtccttgaataatctgatataaaaatgcatgcctctgttaggcatggtgagggctttggaggggcggaaggagctttccttacgtagtgatgaactctccaggctggggagggtcccagtggtgggggaagggctgttcctggaaccgtgatgtccacagggggtgagggggagaaatgtctggctggctcctcactgtggaggtggcacaggggtgaccgtgcctgggctcggggctgtggagtctggaggcaggggggtgcctgggtctggcagtgggctccttctccttctcaagatgactaattggggctcaacactctgctggaacccttctcacagtggcctttatccccccgggtccgaattatggc

SEQ ID NO: 5054 - DNA, 866 bp, Homo Sapiens
tgaaaacaaatggataatttcatctactgcctttacttggggttaatgtgattcttaaacaccttcatcatggaactctcagagtggggtccgttttggtttcctggtggtgggttttgaaagataagggaaagcacattttgagcatgtctgggtaccatggtgcggatgcttgggaaccagaactgtttcagaggaatctaaagtctgattttagttttcagagacacagcttgttgtaaaacatgagaagacatgatttctaggactcaagcagcaagccaggattctaggttggctgctgtgtcatctttgaagtcaagacaaagctgggctcgaccttcaagggtcctcgttttgataatacttcagaatagggaactcatgtgaatactactatgtagaaataaaacctagaccttgagcgaacatctgtatattggttgaaaacgatagtggtaaccattgatcccccttcatttgatgtttggaaaattccagtaattatcatttttgcaacgaatatggataccacatagtactttggtgttacctgcttttgaaaaataaagtctttggttcacccggtgaactatttatgagttcttctggtgtgaagaaagggctcatgttgcatttccagccattgctacaaagaacctttatttgttcagtaagcggtagaaaatccttccgcgattaaaaacttcagacttgctgaatatcctgcaatgtcaagatgaccgatgttgagttgggtggatttgctaacgagtcagatttgaacatgaggctattggaacacaataggcgtcattgatggcggcaagccatagctttcaagttttaataaaatgcacaaaaga

SEQ ID NO: 5055 - DNA, 528 bp, Homo Sapiens
gggagttggggagcgcagatcccgaagcagcgctgggagcgtaagtgcgggcagagcactgcgccgtttgggaacgcaactttgaggagacagcgcggtggacttcagtgaagttccttatgacttcccctgaaattgcttccttatcatgggggcaaatgaaagtaaaaggctctaatacaacctataaggactgcaaagtatggccagggggcagtcggacttgggattggagagaaacaggaactgagcattctcctggtgtgcagcctgcagatgtgaaggaagttgttgagaagggtgtacagactcttgtgattggccgagggatgagtgaggccttgaaggtgccttcatcaactgtggagtacctcaagaaacatggcattgatatgcgggtcctccagacagagcaggcagtgaaggagtataatgccttggttgcccaaggggtcagggtgggaggtgtcttccattccacctgctgatggagccttaagaggagaataaatcactaagtgcccaaaa

SEQ ID NO: 5056 - DNA, 1309 bp, Homo Sapiens
  misc_feature (458)..(603): n is a, c, g, or t
  misc_feature (615)..(627): n is a, c, g, or t
  misc_feature (665)..(724): n is a, c, g, or t
  misc_feature (882)..(894): n is a, c, g, or t
ggggcttatgcggcggcgtggtgaaatagatatggcgaccgagggggatgtggagctggagttggagactgagaccagtggaccagagcggcctccggagaagccacggaaacatgacagcggtgcggcggacttggagcgggtcaccgactatgcagaggagaaggagatccagagttccaatctggagacggccatgtctgtgattggagacagaaggtcccgggagcagaaagccaaacaggagcgggagaaagaactggcaaaagtcactatcaagaaggaagatctggagctaataatgactgagatggagatatctcgagcagcagcagaacgcagtttgcgggaacacatgggcaacgtggtagaggcgcttattgccctaaccaactgatgcgtgctttctcaaatatacctactggattaatttatggcaataaaatttttttttgtcnnnnnnnnnnnnnnnnnnnnnnnnnnnnnnnnnnnnnnnnnnnnnnnnnnnnnnnnnnnnnnnnnnnnnnnnnnnnnnnnnnnnnnnnnnnnnnnnnnnnnnnnnnnnnnnnnnnnnnnnnnnnnnnnnnnnnnnnnnnnnnnnnnccctcgcggggnnnnnnnnnnnnntcaaaaatttataaaaccttccccgtgggggcccgggnnnnnnnnnnnnnnnnnnnnnnnnnnnnnnnnnnnnnnnnnnnnnnnnnnnnnnnnnnnnaacggggcggatcccccccaaataaaacacctcccggggggaaacaccggggcggtacgaaaaaaaactggcagcgcccacaacaaaagaaacccccccgggggcccccacccaggcggggcgatcacaaacactacccgaaagaagatggtatgctnnnnnnnnnnnnntcgggcctcctcgaaacaaaaaccagcggcgagaaatctcttttatataaaaactccggccccaccacgcccataccctcctaccacggggagggggggaacaccatgacaaaaaccactctcccccccaaaacagatgtgagccccctcaaaaaattaacttatttgccgccgcacgcccacaccccgggtacagaaacacatacccctcccccatcggcggcctaattgtcattacccaaggagagggagacaaccctcccccccaatatatggttaaacaagaaaaacctttatcctccacaaaacacttcgtcaacaaacaacccagcgggtggtttactaaccaacaaaacaccaatctctttctgtacccacacccgggagaaaaacacgctcccgaaacccccgcggg

SEQ ID NO: 5057 - DNA, 902 bp, Homo Sapiens
  misc_feature (689)..(699): n is a, c, g, or t
ggaaacgtttatcatgaatcaacagggtttcagtccttatcaaagagagatgtggaaagagctaaagaaaccaccctttgttcccaactccactttacccatattttatgcaacacaaacactgtccttttgggtccctttcttacagatggacctcttgagaagaattatcgtattccacgtttttagccctcaggttaccaagataaatatatgtatatataacctttattattgctatatctttgtggataatacattcaggtggtgctgggtgatttattataatctgaacctaggtatatcctttggtcttccacagtcatgttgaggtgggctccctggtatggtaaaaagccaggtataatgtaacttcaccccagcctttgtactaagctcttgatagtggatatactcttttaagtttagccccaatatagggtaatggaaatttcctgccctctgggttccccatttttactattaagaagaccagtgataatttaataatgccaccaactctggcttagttaagtgagagtgtgaactgtgtggcaagagagcctcacacctcactaggtgcagagagcccaggccttatgttaaaatcatgcacttgaaaagcaaaccttaatctgcaaagacagcagcaagcattatacggtcatcttgaatgatccctttgaaannnnnnnnnnngtttgtttgtttaaatcaagcctgaggctggtgaacagtagctacacacccatattgtgtgttctgtgaatgctagctctcttgaatttggatattggttattttttatagagtgtaaaccaagttttatattctgcaatgcgaacaggtacctatctgtttctaaataaaactgtttacattcaaaacccggaaaaaaccat

SEQ ID NO: 5058 - DNA, 1021 bp, Homo Sapiens
  misc_feature (682)..(706): n is a, c, g, or t
  misc_feature (829)..(829): n is a, c, g, or t
  misc_feature (903)..(903): n is a, c, g, or t
gggggtctccgctcaacgatccttcctcaaagcatggttgctgagtacccagagttgcgaggagttttttaactgatttagccaggtggcaatcatgagtgaatggatgaagaaaggccccttagaatggcaagattacatttacaaagaggtccgagtgacagccagtgagaagaatgagtataaaggatgggttttaactacagacccagtctctgccaatattgtccttgtgaacttccttgaagatggcagcatgtctgtgaccggaattatgggacatgctgtgcagactgttgaaactatgaatgaaggggaccatagagtgagggagaagctgatgcatttgttcacgtctggagactgcaaagcatacagcccagaggatctggaagagagaaagaacagcctaaagaaatggcttgagaagaaccacatccccatcactgaacagggagacgctccaaggactctctgtgtggctggggtcctgactatagacccaccatatggtccagaaaattgcagcagctctaatgagattattctgtcgcgtgttcaggatcttattgaaggacatcttacagcttcccaatgagaggccaggaagtgtgaacatactgatagaaaaagactatattttatccctcataaaatgttttaaatgtaaatgtacatgacnnnnnnnnnnnnnnnnnnnnnnnnnataattctttgttgttttggtaaaatcactttatcacaggttccaggacatggacacatcattttaggggctatcgttcaattcacctacacgtagtatgtgtcagacactacttagagctgngaatataattgtgactgtttctgctcccattgggttacatttgagtaaggagactgtgctcgtataaatagaanagttcagagagtgagaagtgctctcgaaggaaaaagataggttaatgggatagagagtggtagtggtgctgtcttggggatgttacctaatgagaccatgggggacatttctgagcat

SEQ ID NO: 5059 - DNA, 323 bp, Homo Sapiens
ggggagttcaaggcaattaaagtcaagagctaaggagggagggagagggtttagaaataccagcataataagtagtatgactgggtgctctgtaaattaactcaattagacaaagcctgacttaacgggggaagatggtgagaagcgctaccctcattaaatttggttgttagaggcgcttctaaggaaattaagtctgttagttgtttgaatcacataaaattgtgtgtgcacgttcatgtacacatgtgcacacatgtaacctctgtgattcttgtgggtatttttttaagaagaaaggaatagaaagcatccacaatcat

SEQ ID NO: 5060 - DNA, 893 bp, Homo Sapiens
  misc_feature (476)..(482): n is a, c, g, or t
  misc_feature (484)..(500): n is a, c, g, or t
  misc_feature (504)..(508): n is a, c, g, or t
  misc_feature (511)..(511): n is a, c, g, or t
  misc_feature (513)..(591): n is a, c, g, or t
  misc_feature (615)..(618): n is a, c, g, or t
  misc_feature (629)..(645): n is a, c, g, or t
gggatcccgagtgcatctggaatacgcagagtcagtaagaccatggctacgtcctcgatgtctaagggttgctttgtttttaagccaaactccaaaaagagaaagatctctctgccaatagcatttatgttccaaggcattggtcaaagagataagaggacaccccagggctctaattgaaaagagaatccaattacaccttccaaagtaattctacctgctagagcacaaagttatggaatcacctggactataagtaaaggaattggagtgtgatcctgagcctgaccagctctatggctttggccctgctgtttaacctttccctaagtctcttcatctgtaaaatgagcaactatactcacttatcactaagatttctccctattctcattctatctctctaagagctaacatgtagtgctttgtaagactatcataaataccatgtgaataaatttgtgttattatggaannnnnnncnnnnnnnnnnnnnnnnncgcnnnnngcngnnnnnnnnnnnnnnnnnnnnnnnnnnnnnnnnnnnnnnnnnnnnnnnnnnnnnnnnnnnnnnnnnnnnnnnnnnnnnnnttatatccgaacaccagaaaccgnnnntgggggtgggnnnnnnnnnnnnnnnnnaaaaaaattttctaaaaaccttttgttggggggccggcgcgcccctaagggaaaaaaagaacaaggcggccccaatcttttttttcccacaaaaacactcggcggcgcaaccacagagggtcgtggttactctccaccccaacataaaacaaactccccgcggtggggcgaccacagagatgtttctcttctaaaacaaatatttccacgagtggatgttcttcctgggacagtgtccctctctaccg

SEQ ID NO: 5061 - DNA, 672 bp, Homo Sapiens
ggccaggccccgacgtcgccgcacgccccgccgccctgaaggccgagcaggaggaagaagggctcccgctgcccctcgcaaacattaaggaagagccgccctctccggggaccccaccccagtccccgccggctccccctgtcttcctctagcgcctcctgtttcgacagccaagaccactcagccttcgagatggaggaggaagaggtagacagcaaggctcacctgcgcgggctggggggcctggcctcctgaccttcgccgccctgccctccgccgctccgcctgagctccccggtttgcagaatggaggagggaagttgaaggagccacctcctctgtctacccacccgtccccttcacgcccttgacactaaggagtggggggccctggactgccccttcctcccccatcgcccgcccccagaacccctgatgctggttaggaaccgctcaccccaacatgtgtcttaaggcaggacgacttggaaaaaaaggcggcggacagttggccagagggatggagactggtggggacgcccccgcctccctgtcccccgtttcacacactggacaccatcacctctttggaactgccagaccctgggggtccccagtgagcaaaggtctgtccttgtccctttgtctgtctgtgaataaatgtgagttcgt

SEQ ID NO: 5062 - DNA, 431 bp, Homo Sapiens
  misc_feature (394)..(394): n is a, c, g, or t
  misc_feature (402)..(402): n is a, c, g, or t
gctaaaaaggggaaaaaaacggcctgaagcaaatcttggttgccttctaacggcaggtgggcataaggctgtccttcaggaccagccagtttacaagcatgtctcaagctagtgtgttccattatgctcacagcagtaaatgcctacctctgtgtttgacatctgaaagaatacattgaagcagcttgttgcatttgtttttctggcttagtaatctaatagatttccttaagggcaggagatagactctggcccttgtttctagcctccttccttgcagtgtttacaacatagccagtgtttacagcatagcagatgctgctgctgattaagagaatagatgcaaacaaggcatgcatttggccaaaataaacaaatgctggtctgtcccganccccccanacacagagaacatacaaaacctgtcggag

SEQ ID NO: 5063 - DNA, 883 bp, Homo Sapiens
  misc_feature (737)..(738): n is a, c, g, or t
  misc_feature (747)..(747): n is a, c, g, or t
  misc_feature (752)..(763): n is a, c, g, or t
ggggcgtggggcgaaggcggcgcttggctggtggggcccgcggcgggattttcccgggcggcgagagcggatctatcttgggatcccatggctttctttactgggctctggggccccttcacctgtgtaagcagagtgctgagccatcactgtttcagcaccactgggagtctgagtgcgattcagaagatgacgcgggtacgagtggtggacaacagtgccctggggaacagcccataccatcgggctcctcgctgcatccatgtctataagaagaatggagtgggcaaggtgggcgaccagatactactggccatcaagggacagaagaaaaaggcgctcattgtggggcactgcatgcctggcccccgaatgacccccagatttgactccaacaacgtggtcctcattgaggacaacgggaaccctgtggggacacgaattaagacacccatccccaccagcctgcgcaagcgggaaggcgagtattccaaggtgctggccattgctcagaactttgtgtgagttgagcccaggcctctggttgcaggactcgtgaatggagcagttctgagaaccacccttttgctaagggagcttgggagccacatggctgctcccttcacactgggtaacagtgtagtatcctgtgagagaataaatgtattcatttatgtggttttcccaaagctttctggggatgtgggaaaaataaaatacacctgaagcaggccaannccccacaanacaannnnnnnnnnnnccctggttgggccgccctcggcccctcgagaaacctttcttaaacccatttcttttggggcccgggggccccgtaggggaaggggaacctgggccataacctgtgtttcctaggaggaac

SEQ ID NO: 5064 - DNA, 1063 bp, Homo Sapiens
gggcattttgttcgcgcggaagcgccgcggtagggtgggaacccaagcgggagagccgcgggatttgcggccgccgccatgccgtcgtccccgctgcgggtggcggtggtgtgctcgagcaaccagaaccggagcatggaggcgcacaacatcctcagcaaacggggattcagcgtccgatcctttggaacagggactcacgtgaagcttccaggaccagctcccgacaagcccaatgtttatgatttcaaaaccacatatgaccagatgtacaatgatcttcttaggaaagacaaagaactctatacacagaatgggattttacatatgctggacagaaataagagaatcaagccccggccagaaagattccagaactgcaaagacctgtttgatctgatcctcacttgcgaagagagagtgtatgaccaggtggtggaagatctgaattccagagaacaggagacctgccagcctgtgcacgtggtcaatgtggacatccaggacaaccacgaggaggccaccctgggggcgtttctcatctgtgagctctgccagtgtatccagcacacggaagacatggagaacgagatcgacgagctgctgcaggagttcgaggagaagagtggccgcacctttctgcacaccgtctgcttctactgagcccagcgcccgcatggagccgcctctggagcttcctgttgttcatactttttccttcctgacatttgtttttacttacaggtgttctgctggtgacggtagcattacccaaataaactgtgcatatgaaatgggagaggagatgccaaaacgccagatgaaagcaatcaagtttcttcttttccacttttacttatgagcaggatattgattacaaagtttttcttctttaaccaaaaaggaaagacaacggtttgtgtgcacttcccgacatacctgtgtcttcgtgtgcctgccttccctccctcctccccaccgggccggactgtacagagccctgctgcggcgtgttaggaatgacctggaattgtcaataaacagatgctgctgtcaaaaaaaa

SEQ ID NO: 5065 - DNA, 511 bp, Homo Sapiens
gggcttttaggatgcgctaaagggtcgtgagggctctcttaaaattttcttcacaagcggttatccagtcgtgccccgcggccctgctgctggccccggggatctgagtcgaaccctcttgtttttctctgagtcagtcttaaggtgaaatgaagtgtggcccagtggctcctcactgtcgcttctctagttttctgcctccttttagaaaattgaattgaaaagacaggatgaagtggacacagcatgtgaagacaattctttcaagaagtttggctgtcaaggaaaacagagaatgtgctaaagaacatacagacacagagcagacaggccacctttgcaaccacatggaggtttgtctgatattgaagctaaagaagctaagctggaagacagagagaccaagtcctgatgacattgtttgaacccagagatccagacatgcctgaaaactagttttaccactggacttatccgttgaatgagccaataaactctcttttatacttag

SEQ ID NO: 5066 - DNA, 710 bp, Homo Sapiens
  misc_feature (267)..(282): n is a, c, g, or t
ggaacctttatatgatatactatgactaggctgtgtatttcttttcagggatttttctaccttcagggttggatgtagtttagttactattaccatagccaacctgtagttttacatatacattttcttgtggagcaatagagttctccattttacagaagcattttaaatgtagtttgaatattttccacaagatgctgcaatgtgagttatcacttcatttatcttaaagaaagactaaactggttgtcagttacatctgacagnnnnnnnnnnnnnnnntcactgtgtaaccaggttaagtggtaaaataatccaggcgtcagtcaaaggcattttgctgactttaatattgattatatttttaacaggaatttaagaaaatattactggaattaaaaatatatatatattaaacaagaattttctttgctctgtctagcttaaactactactcaagctgcttaagttcttaagtattgtttgtaatcaccaataaataagtgcatttgtaattcatcagtcattattagcttttattaaaagaagattacgttttacaatgtaactataatctcttgaatttggtatcttattaatgagttttaaagatgtaaaacctaaccttttttaaagctccattgtcttatgtttttagaggcttttccgtaaacatatatcttacatataataaacttttcaaatcttaa

SEQ ID NO: 5067 - DNA, 649 bp, Homo Sapiens
gtttcagctcttcatagtgcgttgtgaaatggctggccagagtgtaccaacaaagctgtcatcgggctcacagctcagagacatctgcatgtgatcatctgcatagtcctctcctctaacgggaaacacctcagatttgcatataaaaaagcaccctggtgctgaaatgaacccctttcttgaacatcaaagctgtctcccacagccttgggcagcagggtgcctcttagtggatgtgctgggtccaccctgagccctgacatgtggtggcagcattgccagttggtctgtgtgtctgtgtagcagggacgatttcccagaaagcaattttccttttgaaatacgtaattgttgagactaggcagtttcaaagtcagctgcatatagtagcaagtacaggactgtcttgtttttggtgtccttggaggtgctggggtgagggtttcagtgggatcatttactctcacatgttgtctgccttctgcttctgtggacactgctttgtacttaattcagacagactgtgaatacaccttttttataaataccctttcaaattcttggtaagatataattttgatagctgattgcagattttctgtatttgtcagattaataaagactgcatgaatgcaaaaaccaaaccaac

SEQ ID NO: 5068 - DNA, 1482 bp, Homo Sapiens
gggctctgtcggccgcggaagcctggagtgggcggtacgcagacgcgcgcggtgagacccgctgtctgctcagcggactctgcccgcccccacctccccctgcgtcgggccgacatgaaggactcgctggtgctgctgggccgtgtcccggcgcacccggactcccgctgctggttcctggcctggaaccccgcggggaccctgctggcctcgtgcggcggcgaccggagaatccgcatctggggcacggagggtgacagctggatctgcaagtctgtcctttctgaaggccaccagcgcaccgtgcggaaggtagcctggtccccctgcggtaattacctggcctctgccagctttgatgctaccacttgcatttggaagaagaaccaggatgactttgagtgtgtaaccactctcgagggccatgaaaatgaggtcaagtcagtggcttgggccccatctggcaacctcctggccacttgcagccgagataagagcgtttgggtctgggaagttgatgaagaggatgagtatgaatgtgtcagtgttctccactcccacacacaggatgtcaagcatgtggtttggcacccaagtcaggagctcttagcttctgccagctatgatgacacagtgaagctgtaccgggaggaagaggatgactgggtatgctgtgccacccttgagggccatgaatccactgtgtggagcttggcctttgacccgagtggtcagcgcctggcgtcttgtaagtgatgaccgtactgtgcgtatctggcgtcagtatctaccaggcaatgaacaaggggtggcatgcagcggctctgaccccagttggaaatgtatctgtactttgtccggcttccactcaaggaccatttatgacattgcttggtgtcagctgacaggggctctggccacagcttgtggggatgacgcgatccgcgtgtttcaggaggatcccaactcggatccacagcagcccaccttctccctgacagcccacttgcatcaggcccattcccaggatgtcaactgtgtggcctggaaccccaaggagccagggctactggcctcctgcagtgatgatggggaggtggccttctggaagtatcagcggcctgaaggcctctgagctacctcgactttggacagagtaatgactccccagaaaacgtcatataagactttaccagcccctgagaggaccaggaggagcatccttgaccttcatttaacttggctcacttctcttcagacttgggtagaagtgcagagccacagaattgctttccttccccgcctttgacatgaggccttcagtaaagagctacagaacatcagtacattgttataccacagatttttctgcattaggccacagtgttaaatttttttggaggtaaatatactatttataatcactacatatagtaggaggggtatgtgtctcagcttttctgaagtgcaagacttaaagaa

SEQ ID NO: 5069 - DNA, 562 bp, Homo Sapiens
aacatcatgtgtagatttacacatactgtttcattctaaaatttagaaattgttcattaaatcccatttgaggtataagtcactcaggaagttaaaatatctctacacgtatatttttacattaaaaatacagtgttagcataaatccccttttcaggaagaacaaaaatgtcagtgcatagttagataaaatggtaaaatgttttactgaaagcatacttttttggaaaatagattcatgaagcctttaagtgctgcttctgtcagtcaaacgttaaaaactttaacattttcaaagtgcccagactgtgtacaaagacacatgtaatggagattgtacaggttgtttttttgtttgaacctttgaaagagtttaatcttaacgttttctaattttaaaattttaaaatcttgtttaacaaaagcttgtattaagatactgttttcatttcattacagaattgtttataaaagttcatttgttgaaaaataaggatcctttttaataccacagcatttgtactgttcctttttaatatactgaaaatataaaaggaaaaaa

SEQ ID NO: 5070 - DNA, 500 bp, Homo Sapiens
  misc_feature (12)..(12): n is a, c, g, or t
  misc_feature (280)..(294): n is a, c, g, or t
gatctgcatatnatgtattaggttaggtcacaaaggttttatctgaggtgatttaaataacttcctgattggagtgtgtaagctgaccgatttctaataaaattttagttgtacacttttagtagtcatagtgaagcaggtctagaaaataagcctttggcagggaaaaagggcaatgttgattaatctcagtattaaaccacattaatctgtatcccattgtctggcttttgtaaattcatccaggtcaagactaagtatgttggttaataggaatccnnnnnnnnnnnnnnnaaagactaaatgtgaaaaaataatcactacttaagctaattaatattggtcattaaatttaaaggatggaaatttatcatgtttaaaaattattcaagcactcttaaaaccacttaaacagcctccagtcataaaaatgtgttctttacaaatatttgcttggcaacacgacttgaaataaataaaactttgtttcttaggaaacc

SEQ ID NO: 5071 - DNA, 1076 bp, Homo Sapiens
  misc_feature (190)..(202): n is a, c, g, or t
  misc_feature (374)..(384): n is a, c, g, or t
  misc_feature (524)..(598): n is a, c, g, or t
  misc_feature (613)..(615): n is a, c, g, or t
  misc_feature (625)..(625): n is a, c, g, or t
  misc_feature (632)..(632): n is a, c, g, or t
  misc_feature (643)..(748): n is a, c, g, or t
  misc_feature (750)..(752): n is a, c, g, or t
cggcgcccgttgttttgtcactgaggggcgggagaatattatttattatctcggcgcggagagtaagagaataagagggggtggggtcttgctccctcgcagtgtgcggctaaatgcgagggcccccccgggttttgggtgcgggcgcctcccctccggcggcggcggcggttttttgtggagggttttnnnnnnnnnnnnngcctaggtaaagataagacggcgggcgggggcgggggttattgttttttgtagagccactgcggggggtgtgcccccgtggtgtaaagagcggaaaaaaataggctcaacaaacacccccgctgtgggttgtttttgttttacaagccgtgtggggccccggcgggcccggnnnnnnnnnnngtcggggagagaggaaccccccgcttgtttggggggccgtgtgtgttttttggggagaaggcgggtaaacccgccgcgtccccctcctttcaggcgcgccggccgcccccgaccccgatttttgggattactgttttttnnnnnnnnnnnnnnnnnnnnnnnnnnnnnnnnnnnnnnnnnnnnnnnnnnnnnnnnnnnnnnnnnnnnnnnnnnnttgctccctggcctnnnttctcctttntcctccncgtggcccccnnnnnnnnnnnnnnnnnnnnnnnnnnnnnnnnnnnnnnnnnnnnnnnnnnnnnnnnnnnnnnnnnnnnnnnnnnnnnnnnnnnnnnnnnnnnnnnnnnnnnnnnnntnnngtacgttgaacgtttattacaactaattggcgatgtgataagacagtgctcacgtggcctgaatgttggtcacaatcacaacaaagcttaatccagcccagcatatataagtgaaaatataaaccatgaagacatgtttagatatgtataagtacttagaaaagtgacgctgaacaattacatagctttaaaaaatatagagccatctaatgccattttacctcattcaactcttttttgtaagaaatgtgtctttttaaatttttataagacttctgttaactaggcagtgccatggaaagaaaggaagctgctgtaaagtcc

SEQ ID NO: 5072 - DNA, 805 bp, Homo Sapiens
  misc_feature (589)..(636): n is a, c, g, or t
  misc_feature (639)..(646): n is a, c, g, or t
  misc_feature (648)..(669): n is a, c, g, or t
aaatagataaacatgaatgtgattaataatgctgaaaaagtattagcctaccaaagacacactcaggctttagtgaataactttacataacctcagtttttaacacatgcatatcttctccaaccatgaaatcaaagcacggtgcagaacttgtaccaagtacaaaaggtccatgtatgattagcattattttcttttgcttttgtttatggacaatgttcagctgacataagcagaagttggccaaaatactgcctgtactgttaatttcctgtataattcacttaaataaaagcaggttaacctcaatgatagcagttaaaatgttctatcttatgtatttcttttaagtattaccattatggtgctactgagcgttttcttttggtaaaaagaaaaatgccatgggctgcagtcttcttccatcacttttccctaccaggtccattaatatgcttataacactagtgccagttattttatttgataatgcttatggtatttgtatatttgtttgcattccaattttgtttaataatgagtgtgtaaactgcatacgttaaataaatgtaaatactaatgtaaaaannnnnnnnnnnnnnnnnnnnnnnnnnnnnnnnnnnnnnnnnnnnnnnnttnnnnnnnnannnnnnnnnnnnnnnnnnnnnnctgggccggccgccctcggcccctcaaaaaaatttttttaaaaacattcggtttggggcggcggggccccgaaagggaaggggaaacttgggcccaaagcgtgttttcccaaagaaaaacccggggcaatagacaa

SEQ ID NO: 5073 - DNA, 677 bp, Homo Sapiens
gggtttctgacattttcattaacaacaacaggaaagaggcagttcccattacaaagcacttaaaattctagagataggggaatattccatcatggacattttttaagtggttattcactttaacttgaagtacaggttatctaccctgtattaaaagctgctgcctaaagacatctagtagtaccaagatgatgggatggaattttaacatcaggttttgtagccctactgaaaatttagcacgatcagcacaagtctagaaaccagactaccctgctgttctcatggaagctatgggtatcacatttaaaactcattgtcaatgtcccaaacgtcaccagagagggcatttgcagctccctgaatagtccaagtagctagagccaactggtttctgaacagcgtttcattaaaagcaccgttattttgtttacgcagtttcaagttctccagtaaagctggcagcgtgtgagagccggagccccagaagacatgtcggaaaggagactcttttggagatacgtagggagagaggaagtgatactccactctcatgacacgttcttgagtttcctcatgaaaatctgtctgtttctcagcatcccggaatctgtgtttgtcggaagtacgccgaagaattcccacgagagaaaaaagcactgaaaatcgcgcccatt

SEQ ID NO: 5074 - DNA, 1356 bp, Homo Sapiens
  misc_feature (720)..(890): n is a, c, g, or t
  misc_feature (897)..(1006): n is a, c, g, or t
  misc_feature (1023)..(1032): n is a, c, g, or t
  misc_feature (1134)..(1143): n is a, c, g, or t
  misc_feature (1185)..(1206): n is a, c, g, or t
ggtcaccagccttgggggtccagagcctaatttatattcactatccttccaagtcccgggtagcagaagggttgccatagatctcagtttgatcaaaaagaaggcttagaattctgcagttaagctgaggtttaaactaaaaaatgtttccttgggtcagtggttttgaggtccagtagctaggcttttctcttttgtccttcctgttggaatgaaaacatttcgattttccttcatctgtgactggtgccatagacacaggtttatagttttaacttacagtattgtttgaaatttacctgtttttcttgtcaaacctgagcactcctcctgctgaagtttcttatttaattccagagtactgtcctctactctaaggcattacttttaagtgtattatgaaggcagttttcaaaggatatgaccagttggggtaattcaaattaaaaaggaaaagatttgtttggaagtaactggtgtctctaagaggaatttttagatgtcagtttggaggctctttcccccctcaattgagagctcttgttattcagagctccaagactagacctggctaacaaacataggagacaaagttaggaaacattgatacaagctttgtacagagatttgtacatttgtgtaataggccttttcatgctttatgtgtagctttttacctgtaacctttattacattgtaaattaaacgtaacttttgtcnnnnnnnnnnnnnnnnnnnnnnnnnnnnnnnnnnnnnnnnnnnnnnnnnnnnnnnnnnnnnnnnnnnnnnnnnnnnnnnnnnnnnnnnnnnnnnnnnnnnnnnnnnnnnnnnnnnnnnnnnnnnnnnnnnnnnnnnnnnnnnnnnnnnnnnnnnnnnnnnnnnnnnnnnnnctttggnnnnnnnnnnnnnnnnnnnnnnnnnnnnnnnnnnnnnnnnnnnnnnnnnnnnnnnnnnnnnnnnnnnnnnnnnnnnnnnnnnnnnnnnnnnnnnnnnnnnnnnnnnnnnngggggggtttccccacnnnnnnnnnncccccggggccccaaccggttttcaaaaaaacaaagaggggttttgggaggtttttcgggcttctcacaagggggcccccggggctctttttttatatattnnnnnnnnnnggggattttttgggaaaggggggaaaatattaaaaaactttnnnnnnnnnnnnnnnnnnnnnnagggggtgggtagcgatcttttttttcccggcggccccaacccttttgggcgccgggggaaaaaattttcccccccgggggaaaacggggggcccaataaaaatcgttttcttggggccccccgtttaaaaaaccaagcggggggaaaca

SEQ ID NO: 5075 - DNA, 1205 bp, Homo Sapiens
ggcggcaccgagaagctgaaacggaagtggcgtacggcatgcgccggtggcgtgatggagcggcagcagcagcagcaacagcaactgcgaaacctgcgtgacttcctgttggtctacaatcggatgacagaactctgcttccagcgctgtgtgcccagcttgcaccaccgagctctggacgctgaggaggaggcctgtctgcacagctgtgctgggaagctgatccattccaaccaccgcctcatggccgcttacgtgcagctcatgcctgccctggtacagcgccgcatcgcagactacgaggctgcctcggctgtgccaggcgttgctgctgaacagcctggggtctctccatcaggcagctagccatacccaaccccaggaaggaaggccttggatggaccctcagattgaaggacccggtggaccttggggttggtgaatcctaaacagagagaattcgaggttgcctgaaagctgggtgtccttactccttttcctggagccaatatacccagtttttactcagtttgatttatattctgggcaaggaagctttgcctactttattggcacaatccgttgttctgtcgtttagtgcatatctgctggcttcagccctggcagctgagaaattgttttctatatgtagaaggaaaacctgagcatttgcaggcatctggttaaagcagggtctgtgtgtacaattttaaaacgggtaatatgccatgctcctagttcatcctcacaacaaaactatgagtaagcggtattagcctcacttaacagatgaggaagccaagattccagaaagtaccagaaggtcattttatacaacaggagattggttcctgcccagatgacagaaaatgggagctctgtctagttgtccttaagtctgactgacttcagtggctcataaccgtgagccaagtatttgttggttcataactgttgttttgtgaactatgtcttacatgtctagagttctgctggatctagggaaaggaggagctatcgaagtacaacggatcaaaaaaccacagggcttttgggcactgcctccttgggaagttagtggccacagaagagagatgaaacctgtaagaagtctggagtcttttggaacttcagccatttccccaggttgttactttcttagtatgtacagtcttctcaggatgagcagtaaaacctttgaacaa

SEQ ID NO: 5076 - DNA, 1844 bp, Homo Sapiens
gggggcgtttccgttgcttggatcagtctaggtgcagctgccggatccttcagcgtctgcatctcggcgtcgccccgcgtaccgtcgcccggctctccgccgctctcccggggtttcggggcacttgggtcccacagtctggtcctgcttcaccttcccctgacctgagtagtcgccatggcacaggttctcagaggcactgtgactgacttccctggatttgatgagcgggctgatgcagaaactcttcggaaggctatgaaaggcttgggcacagatgaggagagcatcctgactctgttgacatcccgaagtaatgctcagcgccaggaaatctctgcagcttttaagactctgtttggcagggatcttctggatgacctgaaatcagaactaactggaaaatttgaaaaattaattgtggctctgatgaaaccctctcggctttatgatgcttatgaactgaaacatgccttgaagggagctggaacaaatgaaaaagtactgacagaaattattgcttcaaggacacctgaagaactgagagccatcaaacaagtttatgaagaagaatatggctcaagcctggaagatgacgtggtgggggacacttcagggtactaccagcggatgttggtggttctccttcaggctaacagagaccctgatgctggaattgatgaagctcaagttgaacaagatgctcaggctttatttcaggctggagaacttaaatgggggacagatgaagaaaagtttatcaccatctttggaacacgaagtgtgtctcatttgagaaaggtgtttgacaagtacatgactatatcaggatttcaaattgaggaaaccattgaccgcgagacttctggcaatttagagcaactactccttgctgttgtgaaatctattcgaagtatacctgcctaccttgcagagaccctctattatgctatgaagggagctgggacagatgatcataccctcatcagagtcatggtttccaggagtgagattgatctgtttaacatcaggaaggagtttaggaagaattttgccacctctctttattccatgattaagggagatacatctggggactataagaaagctcttctgctgctctgtggagaagatgactaacgtgtcacggggaagagctccctgctgtgtgcctgcaccaccccactgccttccttcagcacctttagctgcatttgtatgccagtgcttaacacattgccttattcatactagcatgctcatgaccaacacatacacgtcatagaagaaaatagtggtgcttctttctgatctctagtggagatctctttgactgctgtagtactaaagtgtacttaatgttactaagtttaatgcctggccattttccatttatatatattttttaagaggctagagtgcttttagccttttttaaaaactccatttatattacatttgtaaccatgatactttaatcagaagcttagccttgaaattgtgaactcttggaaatgttattagtgaagttcgcaactaaactaaacctgtaaaattatgatgattgtattcaaaagattaatgaaaaataaacatttctgtccccctgaattatgtgtacatgtgtgtttagatttattattaaatttatttaacaatgttctctctttttaagctaataattgacagtggtgttagttgagaactgaatttacagttgggctttttgggcagtaagaaatgcaaaccatagactgaatttccttcatagaacatgatttttcctaaatataggaaagaacgaaggggtcccctgggttattttgccccatgtttattttagg

SEQ ID NO: 5077 - DNA, 501 bp, Homo Sapiens
  misc_feature (105)..(149): n is a, c, g, or t
ccctaaagaggacgaactgaagaaacgcgggaatgagctccagacgcgggagtttcctctctacaaagttacactgcagcagctgtctaccctgccccttggtcnnnnnnnnnnnnnnnnnnnnnnnnnnnnnnnnnnnnnnnnnnnnntgcgaaaagaaccacaattaacactgaagatgtgaagctcttagccaggaggagtaattcactgcatatgcaggaagcggcaggaataaggaaaagcagcctcctgactttcctcgcttggtggtttgagtggacctcccaggccagtgccgggcccctcataggagaggaagctcgggaggtggccaggcggcaggaaggcgcacccccccagcaatccgcgcgccgggacagaatgccctgcaggaacttcttctggaagaccttctcctcctgcaaataaaacctcacccatggaatgctcacgcaagtgtaatgacagacctgaataaaatgtattaagcagcaaaaa

SEQ ID NO: 5078 - DNA, 707 bp, Homo Sapiens
  misc_feature (654)..(662): n is a, c, g, or t
ggatagaccagtggcactgttgtttcacaagatgatgtttgaaactattccaatgttcagtggcggaacttgcaatcctcagtttgtggtctgccagctaaaggtaaagatatattcctccaattcaggacccacacgacgggaagacaagttcatgtactttgagttccctcagccgttacctgtgtgtggtgatatcaaagtagagttcttccacaaacagaacaagatgctaaaaaaggacaaaatgtttcacttttgggtaaatacattcttcataccaggaccagaggaaacctcagaaaaagtagaaaatggaagtctatgtgatcaagaaatcgatagcatttgcagtatagagcgtgcagataatgacaaggaatatctagtacttactttaacaaaaaatgatcttgacaaagcaaataaagacaaagccaaccgatacttttctccaaattttaaggtgaagctgtacttcacaaaaacagtagaggagccgtcaaatccagaggctagcagttcaacttctgtaacaccagatgttagtgacaatgaacctgatcattatagatattctgacaccactgactctgatccagagaatgaaccttttgatgaagatcagcatacacaaattacaaaagtctgaannnnnnnnnatcaagagggataaaacaccatgaaaaataaactttgaataaact

SEQ ID NO: 5079 - DNA, 1018 bp, Homo Sapiens
gacattcagaaatcgcggtcagatgctaaagcagtgcaaacagttcacgccatgatggaaaggaagttgatgaaggagcctgggaaactaaaattagtcacagagagaaacgacagcagcgtaaacgtgaaaggtgctgactgattctggctcattggattcaactatccctgagatagaaaataccatcacagttaccaccgagcaacttacaaccgcatcatttcctgttggttccaagaagaataaaggtgattctcatctaaatgttcaaggtagcaactttaaatctggaaaaggagattctacacttcaggtttcttcaggattgaatgaaaacctcactgtcaatggaggaggctggaatgaaaagtctgtaaaactctcctcacagatcagtgcaggtgaggagaagtggaactccgtttcacctgcttctgcaggaaagaggaaaactgagccatctgcctggagtcaagacactggagatgctaatacaaatggaaaagactggggaaggagttggagtgaccgttcaatattttctggcattgggtctactgctgagccagtttctcagactaccacttctgattatcagagagatgttagccgtaatcaaccctatatcgatgatgaatggtctgggttaaatggtctgtcttctgctgatcccaactctgattggaatgcaccagcagaagagtgtggcaattgggtagacgaagaaagagcttcacttctaaagtcccaggaaccaattcctgatgatcaaaaggtctcagatgatgataaagaaaagggagagggagctcttccaactgggaaatccctggggaaaccaaaggtttctgaaaaaatacccttggcgggcccccttcggcccttccgagaatcctttcctaaaccatttcctttggcgccgcggggtcccaataaggaacagcgacccttggcccataagctgggtttccctagggagaaacccggggtaaagaactaaggggcctggggattt

SEQ ID NO: 5080 - DNA, 1523 bp, Homo Sapiens
  misc_feature (933)..(943): n is a, c, g, or t
  misc_feature (1368)..(1368): n is a, c, g, or t
  misc_feature (1482)..(1482): n is a, c, g, or t
acctagacgtacacaggaattatgttgattgtgtgcgatggttaggcgatttgatactttctaagtcttgtgaaaatgccattgtgtgctggaaacctggcaagatggaagatgatatagataaaattaaacccagtgaatctaatgtgactattcttgggcgatttgattacagccagtgtgacatttggtacatgaggttttctatggatttctggcaaaagatgcttgcattgggcaatcaagttggcaaactttatgtttgggatttagaagtagaagatcctcataaagccaaatgtacaacactgactcatcataaatgtggtgctgctattcgacaaaccagttttagcagggatagcagcattcttatagctgtttgtgatgatgccagtatttggcgctgggatcgacttcgataaaatacttttgcctaatcaaaattagagtgtgtttgttgtctgtgtaaaatagaattaatgtatcttgctagtaagggcacgtagagcatttagagttgtctttcagcattcaatcaggctgagctgaatgtagtgatgtttacattgtttacattctttgtactgtcttcctgctcagactctactgcttttaataaaaatttatttttgctgcccccgccccgacgcccgccgaaaaagctgcgcgcctggaacaagacgcaatggcccgcgcgcacaaatgcataaaccctgtggggtcggcctctcggcccctcaaaaaaaacttttctaaagaacatttcggttttgggcgcgcggcgggggccctccgatagggcaacaggggaacccctgggtccccataagccttggtttctccctaaagggaaaacccccgtgggtgccgatggactataagcgggcccttgcggatattcttctcacccccgagataataaaaacaaannnnnnnnnnngggggcgagcgaccacacactgccgaagcggcgtgttctctctgtgagatacacacaatatactctcccccgccagagtcggtgaggacgtcttctctctgagagagggggcaccccattatgtagcgctgtggggaattatcgctttgtcccgacaaccgcggggatgagtcgtacgcatagagagcgcgagagagctgcccccggatcatatttctcgacaattgtgttacggggctaccccgcgcgctgcaccgtggggcgggcaacatgctcactttcgcggcactaacaaaacaactgcgtgggaggtggggaaaaatctgtccattctctagatcacacgcatttttactctgtcgcgccgccgacaacatgttgtgggaagaagagccccgtctcccctcagcaagaacgcgggtggnataataggaatatgagacacaaccgctgggaaaatactcgcggcacgcacggcgggcggtattattttcttcacgagcactccccttgcgtggtgtcggacggcatgtggttgncggacgtataacaaaatcatccttttcgcgctgcccgcagg

SEQ ID NO: 5081 - DNA, 450 bp, Homo Sapiens
ggggtctcgcgggagcgctgctggcggtcgggcgctcgggcggccctggccggggagacgagttgcatgtgttggttcagctggcgatagcggcgggagcggagccggcggggcctgtgcgaccgcctgggtttgtgaaatggctgctgacatttctgaatccagcggggctgactgcaaaggagacccaaggaacagtgccaagttagatgccgattacccacttcgagtcctttattgtggagtctgttcattaccaacagagtactgtgaatatatgcctgatgttgctaaatgtagacaatggttagagaagaattttccaaatgaatttgcaaaacttactgtagaaaattcacccaaacaagaagctggaattagtgagggtcaaggaacagcaggggaagaagaggagaagaaaaaacagaagagaggtggaaggggtcaaat

SEQ ID NO: 5082 - DNA, 1608 bp, Homo Sapiens
  misc_feature (68)..(68): n is a, c, g, or t
  misc_feature (147)..(147): n is a, c, g, or t
  misc_feature (162)..(162): n is a, c, g, or t
  misc_feature (186)..(199): n is a, c, g, or t
  misc_feature (476)..(476): n is a, c, g, or t
  misc_feature (702)..(758): n is a, c, g, or t
  misc_feature (943)..(974): n is a, c, g, or t
gatctatatgctacatctgggagtggttatctctcccccccacccgcgctacgtccttaggaacgggngacgggcgcccaatggcgacgagagggaagtcggtctgttccgcgcgctcgcctgtgcgttgcggcccacggcagaggnctctgtaacattgantctactcgtgcggatcggttccannnnnnnnnnnnnntacatggtgctcggcacggctgcatgcgcgtgctcagtcctattccatctaccagcccctgcacgtaggtgcggcgcacttgttacactcgctctgtggggcgacgagtaactgtttttatgtatgttagagagcatagtacccaacgccccttagtcgctggtcatatccgtactagtgtgcccagctaagcagtagggagagaccccacacccttgaggcggctaaacatccgccacgcactctccgctcgtgaggacactagcatctctcgagngcagcagcgggatcgtctccttcttttgtgcttctctctctgcctgccgagagagcacccggcgatgcggcgagtgtagtgttgctatacgctagcagcggcccggtcgtgctccctccaccgcgcgcggcctgcttcttgtgtcgggcgcgggaaagaatatcagcgtcctcttcgtggtcttagaccacggcgtcttcttttctggcagcgcgagcatgttcgnnnnnnnnnnnnnnnnnnnnnnnnnnnnnnnnnnnnnnnnnnnnnnnnnnnnnnnnnttggttttgctaaattattctaatgtcggagagggagggcgcggcgccacctctctgaatacctgcttttcctcggggttgagttgggcgcggtcgcttcgaatctgcctctgcccctctccttccaggtgcttcgccgtcgttgggtatggtgccgttgtggatctttctgatctttgatgacnnnnnnnnnnnnnnnnnnnnnnnnnnnnnnnncacattgaaagcttttattttgaaaaataaaatacaaaagtcattaggttgtaaatgtataatggtaatttcccaacttctcagaaacaatacaatgaattaaataattaggatatttaatacttattcacatcaatacactttaacaggcacacgtgttctacaaaacattagaacatgtacagacaacatatttcaaaaggagacatagcccaagtctgcttacaggatcccatttttaaaccctctccttgaaaacaaacgtcataatgtaagaaaagagaacaagaggagttttaacaggaaacacatgttccttctgggctccttactgcagggctgtgcatgaaatcgggatcaagagctctttgctcaggaggcagatccctcacgaggcccaaagctgtgcggacacctccatcctctcagtgggaggaaactggcaaatgcacaggcggcgcagccaaggtgcagacgctccaccaagcttggcaggggacagccaatcctaggaatttcccttctgctgaaaaggcagcaatctttcctcatgtatggaagaggctcctggttctgctactccacttgctcagtctgtggtttttctttaagaaagtcaggtagttggaattct

SEQ ID NO: 5083 - DNA, 479 bp, Homo Sapiens
ggggagacagccctgagatcacctaaaaagctgctaccaagacagccacgaagatcctaccaaaatgaagcgcttcctcttcctcctactcaccatcagcctcctggttatggtacagatacaaactggactctcaggacaaaacgacaccagccaaaccagcagcccctcagcatccagcagcatgagcggaggcattttccttttcttcgtggccaatgccataatccacctcttctgcttcagttgaggtgacacgtctcagccttagccctgtgccccctgaaacagctgccaccatcactcgcaagagaatcccctccatctttgggaggggttgatgccagacatcaccaggttgtagaagttgacaggcagtgccatgggggcaacagccaaaataggggggtaatgatgtaggggccaagcagtgcccagctgggggtcaataaagttacccttgtacttgcaaacaaaaa

SEQ ID NO: 5084 - DNA, 377 bp, Homo Sapiens
  misc_feature (192)..(212): n is a, c, g, or t
agaaaaaattgtaattcggcctatgatgaaatattttattattagatagcagtgtcactaataagttttaagttgtccagagttaattgtgaatatcagtacaggattcttataaccaaagcagttgtcttaagatgaatggctcatatttgggtgcagtatttgatgccccaaagaacaaacataaacccnnnnnnnnnnnnnnnnnnnnnttccagactgtcccctttggatgccagttgaatctgtgtcttgtgccccctgagggtctgcccggtcacatccccttgtcttctctagggttcacggggatccttctcatcctcttctaggtaccaggttccattagttttgtctgtcagtctcgccacatacta

SEQ ID NO: 5085 - DNA, 740 bp, Homo Sapiens
ccgagatggttggcaggcgaggcgaaagctgcacaggtccctacgcggcgcctcagcatgtcggacttcgacgagttcgagcggcagctcaacgagaataaacaagagcgggacaaggagaaccggcatcggaagcgcagccacagccgctctcggagccgggaccgcaaacgccggagccggagccgcgaccggcgcaaccgggaccagcggagcgcctcccgggacaggcgacgacgcagcaaacctttgaccagaggcgctaaagaggagcacggtggactgattcgttccccccgccacgagaagaagaagaaggtccgtaaatactgggacgtgccacccccaggctttgagcacatcaccccaatgcagtacaaggccatgcaagctgcgggtcagattccagccactgctcttctccccaccatgacccctgacggtctggctgtgaccccaacgccggtgcccgtggtcgggagccagatgaccagacaagcccggcgcctctacgtgggcaacatcccctttggcatcactgaggaggccatgatggatttcttcaacgcccagatgcgcctgggggggctgacccaggccctggcaacccagtgttggctgtgcagattaaccaggacaagaattttgcctttttggagttccgctcagtggacgagactacccaggctatggcctttgatggcatcatcttccaggcagtcatcaaagatccgcagctt

SEQ ID NO: 5086 - DNA, 276 bp, Homo Sapiens
accgacgatggtggcaagtgaatttctggtccttcatcccagtcagccagtaggtagtctcatttcctcttccctttaagtatgtttctcctctcacttcataaaggaactggcactcagttctcttcaggatggctatggtggagccactcacgtgaattctcaaagggaggccagtggattccatcctagaggctgtgttgaccgtatctccaaatagacaataacgaggcatcttgattcccacaactccagcagcacagggaccagagtgaa

SEQ ID NO: 5087 - DNA, 182 bp, Homo Sapiens
ctggtacattgtctccatcccatctgttctcatcgcctgtatttttaatcttgggtaaacatctccgttttcctcaagtcacctagaccagaatcatgagagttatcgtcactctcatgtccaggtactcaccaagtcctatcagttccttatcctaagtatatatgctatcaatccttcca

SEQ ID NO: 5088 - DNA, 537 bp, Homo Sapiens
gcgatatggtggcagcatcatgagggatctgcttccatgaccaaaacacctcctattagttcccacctccaaccttggggattaaatttcagtgtgagatttggaggggtcaaagatccaaaccatggcattccatccctgaccccccagatctcatccttcccacatgcaaaatacaatcatctttctcatgcaaaatacaattccaatagtccctaaaattcttaacttgttccagcaccaacttaacggttcaaagtttgagactcaaagcaagttccttctagctatgagcctgtaaaaccaaaaacgaataatttttttccaagatacaatggttgtacggtcattgggtagacattctgtgactgcagcagccaggatgtcggagcagcatgtaggacgttccaggactccttgaggtgcgccaggccagctgtgccccgggcctgtctccccaaaccatgctgtcactcctaggtctctggtcctctgtattgtgtagatacagcctcatagatgtctatagatgcactt

SEQ ID NO: 5089 - DNA, 565 bp, Homo Sapiens
  misc_feature (384)..(455): n is a, c, g, or t
acgatggtggcaagggaacggttgtaatggtgaaccatgggacgtcagtggggcctgagaagcaggctagctcgagagagcccgggctggtgtggcattgagctcagcagtagagcagtgggcaactaggctccctgtgatgccatgcagggcatttggtggaactgttgcctgcgatattgggaaggtgggctgtgtattcctccaaacctgtaatctgggtctggggacatgagagacactcatagtaaccccctgagaagtagcatggtgagatggctacacataaggaagctggagtctctgttcaaatccaggctttgccattttctccttggatgacctggcagcttacttagcctttctgggccttgatcccttatnnnnnnnnnnnnnnnnnnnnnnnnnnnnnnnnnnnnnnnnnnnnnnnnnnnnnnnnnnnnnnnnnnnnnnnnactcaactcagtacagatgctgttgctgcctggctgtaaaacagactggggattccacacattctgctgtccggagtccctgcgtgggagaggacagggctttttcctcc

SEQ ID NO: 5090 - DNA, 1419 bp, Homo Sapiens
aaattaaagtgtgcattgacaaagactctggggacgttgcagctctcagaggatcccggaaatttaacattctgggcacaaacacaaaagtgatgaacatggaagaatccaacaacggcagcctctctgcagaattcaaacacttgaccctgagggagcagagatgtgggaatgggggccgagccaattgtgatgcttccctgattgtgactgaggagctgcacctgatcacctttgagaccgaggtgtatcaccaaggcctcaagattgacctagagacccactccttgccagttgtggtgatctccaacatctgtcagatgccaaattgcctgggcgtccatcctgtggtacaacatgctgaccaacaatccccaagaatgtaaacttttttaccaagcccccaattggaacctgggatcaagtggccgaggtcctgagctggcagttctcctccaccaccaagcgaggactgagcatcgagcagctgactacactggcagagaaactcttgggacctggtgtgaattattcagggtgtcagatcacatgggctaaattttgcaaagaaaacatggctggcaagggcttctccttctgggtctggctggacaatatcattgaccttgtgaaaaagtacatcctggccctttggaacgaagggtacatcatgggctttatcagtaaggagcgggagcgggccatcttgagcactaagcctccaggcaccttcctgctaagattcagtgaaagcagcaaagaaggaggcgtcactttcacttgggtggagaaggacatcagcggtaagacccagatccagtccgtggaaccatacacaaagcagcagctgaacaacatgtcatttgctgaaatcatcatgggctataagatcatggatgctaccaatatcctggtgtctccactggtctatctctatcctgacattcccaaggaggaggcattcggaaagtattgtcggccagagagccaggagcatcctgaagctgacccaggtagcgctgccccatacctgaagaccaagtttatctgtgtgacaccaacgacctgcagcaataccattgacctgccgatgtccccccgcactttagattcattgatgcagtttggaaataatggtgaaggtgctgaaccctcagcaggagggcagtttgagtccctcacctttgacatggagttgacctcggagtgcgctacctcccccatgtgaggagctgagaacggaagctgcagaaagatacgactgaggcgcctacctgcattctgccacccctcacacagccaaaccccagatcatctgaaactactaactttgtggttccagattttttttaatctcctacttctgctatctttgagcaatctgggcacttttaaaaatagagaaatgagtgaatgtga

SEQ ID NO: 5091 - DNA, 552 bp, Homo Sapiens
  misc_feature (385)..(385): n is a, c, g, or t
tcgatagcggatcttccggagaagatccagaactcgcgtgcagcttctcctctcagcacactttgggctgggatggcagtggggcataatggagtcctgggcgatcgctgaatttcttccctctgcttcctggacacagaggaggtctaacgaccagagtattgccctgccaccactatctctagtctccctagcttggtgccttctcctgcaggagtcagagcagccacattgcttgccttcatatcctggaggtggggaagttatccctcttccggtgctttcccatcctgggccactgaatccaggacatcactcccatgccagccctccctggcagcccatgttctcctcttttctcaccccctgactttccctgagaagnaatcatctctgccaggtcaactggagtccctggtgactccattctgaggtgtcacaagcaatgaagctatgcaaacaataggagggtgtgacaggggaaccgtagactttatatatgtaattactgttattataatactattgttatattaaatgtatttactcaca

SEQ ID NO: 5092 - DNA, 624 bp, Homo Sapiens
gaggatcccgcgacgatggtggcaaggccaaaggagacagagtgaagcaatgacaagccaagcagccagtggggagctgctcctctctcaataaaagcctgacggtgatccaggaaaggccaggaggctcatgtttcattctgggcccttaattcccaaaaggcccattttttaaacccatgtatcttagtttttatctggtggaaaaaatgagaatcgtctccttccttctaagtaaatgccatcatccatcaagtgcctgctcggtgtggggcattagttggtccttctggcaacacttgaggggagatactatcacccttatctttgtagggaccagccccacagggtcggtgggtttttctccctgtgtgtggagacgagactgcagaaataaagacacaagacaaagacataaaagaaaagacagctgggcccgggggaccactaccaccaaaatgcggggaccggtagtggccccaaatgtctggctgcactgttatttactggatacaaagcaaaaggggcagggtaaagagtgtgagtcatctccaatgataggtaaggtcacgtgggccacatgtctactgtacagggggcccttccctgcctggcagctcgcct

SEQ ID NO: 5093 - DNA, 561 bp, Homo Sapiens
  misc_feature (423)..(461): n is a, c, g, or t
tagatggttggcaaggaccaaagggtagaagttacagagaagcacagttcatgatgaggaagaaagttcaatcctttggaaaagtaaacccacagaacagcctgtttttgcaaaactgtgcattttctattgaaaccaaggtcagggacatcatagcaggggctccctcaaggaaggcacatttgattaagtaattgccgtaaggcccttcacttctgagagtttgccaagtgcagtaagaatttaaacagccacattgtttgcacatcactgcttgagggggaaagaatagcaaccataagtaataaagtcaaggacagaacagtatcagacagcagtgaggatgaaatacctctgaaaaatgagatttaatttacaaaaatatgatttatgctcttttctaaaaatatgtctacttcgttnnnnnnnnnnnnnnnnnnnnnnnnnnnnnnnnnnnnnnngacacaacctagactcctagaagactcttctaagaggagctgagtgttgtcgcagcatcggacatttccagagtgcctgccactcaccagggacgtgagc

SEQ ID NO: 5094 - DNA, 481 bp, Homo Sapiens
gaaccccaacacgtacgacatccaccggctggagaagatcctgaaggcccgagagcatgtccgcatggtcatcattaaccagctccaaccctttgcagaaatctgcaatgatgccaaggtgccagccaaagacagcagcattcccaagcgcaagagaaagcgggtctcggaaggaaattccgtctcctcttcctcctcgtcttcctcttcctcgtcctctaacccggattcagtggcatcggccaaccagatctcactcgtgcaatggccaatgtacatggtggactatgccggcctgaacgtgcagctcccgggacctcttaattactagacctcagtactgaatcaggacctcactcagaaagactaaaggaaatgtaatttatgtacaaaatgtatattcggatatgtatcgatgccttttagtttttccaatgatttttacactatattcctgccaccaaggcctttttaaataagt

SEQ ID NO: 5095 - DNA, 827 bp, Homo Sapiens
gtagatggttggcaaggctaaactctcatccaccaggatattctcaggctttaggtccaggtgtgctatcctgcagttgtgcaggtaccggacagcttccagaacctcccccaggtgcgccctgatcttcccttcagtgaggcttccccatcgcaccacgcagtccaggaggcgaccctggtcagccatttctaagaccaggatgtagctggtgggggtctcaaaggtgtcgaggaggccgacaagcagggggtgctggaggctctgcaggatgccaagctcatgggtgacctggtcgcgcttcatcaagcttcttattcacaaacgttatgtggccacatgctcgcttggttcctgttctgatcacatttcttaacgacagaaaatctgcccctgccaagctcagccacttcactgtagaaggagtcaaagttgtctctccaggtcaccatgatcccatccatccctggacctaggaccctcaggctggccgacgatgaggctgaacccatgtcatcgacagcgatgcacgtgtagatgccgtcatcttccgtggtcacgcccacaatcttcagcgtggcctctcccaggtcactgtaggagatgctgtagtgaccatcgttgttcaaggtgttgtgttcagggcccttccaggtaattgaggctttggggcggccacagactcgacatctaggaacaacggtctcccctgtctcacacgtgacctcactcaatggaatgacgaattctgggggaacgtcataaatgtagttgggattgagaagcttgttgctgagtccttcccgtgacttccgataaccgttctc

SEQ ID NO: 5096 - DNA, 573 bp, Homo Sapiens
cacaccagctcggggttgtgggaaggacagaaggagaacttgggctttctttggtcagctggtggggcttggagcacttgtggttggggccaaaggtcaggtctggaaatgcagctattatgccaaaaccaccagagtgctctttagcttcaggcttcatgaattgcttttaactactcaggtagagcatttttactaggctataaaagtagagttcattttttttctataggtcagcattttacctatggatggcattttctattttcggtgacggactatgagccaggataaacacattactctcttctttaacaaaaagagcatggttaactccaaagacttctctagaccagcctggatggtacctaaactttaatcaaccaatgctcaagtaaaagagcagtatccaaccccagcacacctaactgtttggcataacataggtgagtagtgacattttccttatcttttccactgatactgtagggtcagcaccgtataccatgactctactcaatgtcgtccaactttttgtatccttgcttgggtttatcaaagataagttgaagg

SEQ ID NO: 5097 - DNA, 431 bp, Homo Sapiens
gctcggggttgtgtagcacatctgagccaaaccatttggcaaggcccacaggggagctgctcctctggctggggcgatgctccagctgggagtgcatgtggggcaggcctgaccggctgggcacgttctgaggggttgtctgaacgctgacagctgctgcatgggaaccagagcctggaggatgcagaactgagcgctgtagctgctgttgcaccattgccagatgcagaggtgttccaggacgagggtttaagagagggtgactagcagcaggtaaagggtaaaagggctgacccaggatggggccagatattccctgtaaatgactcaagtccatcccaggaggaagcacaccagtttggagcaaacttggaagatgctgtggatgtactccctgggccagcatcctctgtaccaaccccgagctggtg

SEQ ID NO: 5098 - DNA, 371 bp, Homo Sapiens
cgatgtaactctctggctgcttgagtctcctctggccacagcaggcagtgtgaaatggccagccagttaaaacttccaagaaacaaccctcagccagtgagggagtggaaggtggtgaataaacaccccagcaccagcagcctcctcttctgtacaccaactgggaacccacctcttcctgaaagtcctcccccactgactcaccggattgccacaagcttggcaagaatgtcccagtaaccagggggcacgcactgaagtgactgaggggttaccttggagttgatgccttggctcagatacagctcccctgtattcttcctctgtaaccttggacaaaccaacccctctaagccacgtcaacccacggg

SEQ ID NO: 5099 - DNA, 323 bp, Homo Sapiens
agctcggggtttggggcgtgtggtggttgcagttgaagaccagcttctgagcccctgcgtgtttaggtgggaggggaacctctgagcgtagagtttcctgccacagtgcactggtgtaggaaactgagatgctgtgaagtttctagagaagtggggggtgtgtggcaaattgtttctgaatcatgggaaatggtttatgatgcactgtcaatcattcttcacttaagtgtagtaaattttattgttattctgggccacttcatattttggttttgtgaataaaaaaatatttcctggtcgtgcacagtggctcatgtttgcaa

SEQ ID NO: 5100 - DNA, 597 bp, Homo Sapiens
gctttgggctacagcatggagactgctgagtggaggtgggtgtggccagtgtgaagctagcggtgctgaggtgacgcttcaggcagtaccgggacatgaagccggccacatcttttgagacaggggcctgcaggcgctgacctgggtatgccagcggcaatggacaatggagggtgaactgaaggcagtgcgggcatcccatttctgagcttcctactactcactgtcggcctcgctgcatttcacgttttaaagcttaaacactacacggtgaagctacgcctccatctcagggaagggacgctctaaacaggcagcctcggagatcatcaacacccacggtgctgcccctttcattccccttctgaagccgatgacgaccattccgtggctgtgctgtggcactcactgttcgcatttctccacgcagacaccgaggtacaacacccagctcaacacacaccaacgggtgcccaccaacggcagagcagtgtgctggtgtggggcagactcactcgcccaccaggcttggggtggaagggcagagagtctgtgttccaacatgcgccggcctgggccaggcagcaaccccgagct

SEQ ID NO: 5101 - DNA, 233 bp, Homo Sapiens
gctcggtaccgacctggccgagtcgtggttgccgcatttcgggcaggtgaagcctttgctggtgcaggagaattcaccggtgaagccgcactcgtagcactcgtcgatcggcgtgttggtgccgtagtaaggcacccgggtgtagctgtagtcccacacgtcttccagcgccttcaggttgtgctgcaggttcgggtattcgccgtagcagatgaagccgccgctggccaacg

SEQ ID NO: 5102 - DNA, 669 bp, Homo Sapiens
ggtcggacctgatacttaattcgtcggactggtgctagaagtccatacttctggtatcgaatagcactggattttggaaatgggcacttatttgtcctggtgtcaatgaagatgatgtaactggagagtttggagtagaggatgagctttttgtcttggggctgttaacagggccctcgaggtgctcactggccatggctgctgacacatccacgacagtatatggcttgcacaatggctgttccaggttcacaactcggtaaggttttgcttgctcttctgtggggacaaggtttatggttactgcttgcccagcaacatctgtagaggctttactttcttccttctcagtttgtacagcaatcttgccatctttctcttctaatcggagagcaaggactgctttgtgggtctctggaacttttattgagcttttggaagcctgtgatgaatctttatcctgattattactagagggactttcataattgggctcaatttccttcatgtccttagaatctcctgggttaccaggagataatcccccattacaaatcttctgggataaactactggctgtctcagaacgtgattcttctgttacagaagaatctggtgatgtggagtcagatgacaccatgctctgaatgctccttgtcataagagacc

SEQ ID NO: 5103 - DNA, 999 bp, Homo Sapiens
gcggcccgctctcccgggatgaggagcgcgcggcgccgcggcctcgcgacgcggagcgctcccgggacgatgaggcccggtcctcccgcgtcgggggcggctgcaccggcggagtccgcctccccttcttgtacaatgccagctcgctggtcagcgccttcagccgggcgcgcaggctccgctccgatgccttcgcctcctcgagctccttggccagacggcggcagtcctggccgcgacggccggccaccctgtgcccgaggccgcgctcctgccgcagctccagctccagcccgcgcaccagcccgcgcagcgcctcggcctcctggcgtgccgcgcgcccggccagcgcctcctcgcgcgatcggcccagctgcgcctccagctcccgcttctcggacgccaggcgcgacacctgctcccgcaggtgccagatctcattctcccgggtgtcccgagtgttctggccatccagcccttgcaggcggcccagttcctccttcagtgaccggatgatgccctgcagaaccacggggtctggcttgccctggtacgggaggggcagcgggtagtgaatcctgtcaaactccacggagtagatgaggatcaggtagcgcttggagttgagctgggccgacctgggggccaaggagcctgggcggccccccatcttgggttccgcagggactccaggtctgtgtaggtcagcaggtccagggtgactgactcactactctgagtgagggctgactccagcatatgacagaagatgttgaactgtttgaagttccctgtcttgtgagtcaaatcttcaatgaagccagcatcgaactcgccccgccactggtcagccgtcatccggtcctccacctccagctccagcacctgcccagaaaccatcacccgcacggcatgctccacaccccggaagacgtagtccacctgcaggccagccggctggtccatggccaaggttgctatcccgggaattccggaccg

SEQ ID NO: 5104 - DNA, 1017 bp, Homo Sapiens
  misc_feature (294)..(303): n is a, c, g, or t
caggatggtgttaataggtctgcctcagaatgagaatcaatccttttagaaaacctttatactaagcctcctcttcgaaattcacagtggcgattagcggactggagtctggtggcgattagcggactggagtctggggacatccgtggcaaagacaccagctcaactttagtgcttcccaactttatttagaatgacatggggtgggtgtctggtgtgtgtgttttccctacgcacctcccatagctattaacaactgaggaaggccagtgcagaatatttttggagaacgannnnnnnnnnaaataatatatcattcctatggggggaaagccttctttttctttttggctgagttattccctccctcccctcaataccctcagtactgactacttccctttcttttctcaggcctccccccaccgacttttgaggccagggttggccagatttagcaaaaccaaaacagagtgctgagttaaacgcaaatttcaggtaaacaaaagataattttctagcattaatatgccccacgcaatatttggaacacttatgtgaaacaatgattggtttttctgaaattcacgtttctctctgagtcctgtaactgtccccgaggggattgagcagaagctcgggtatgagccctgaggttgactgccggttatttttctgtcctgggaacagcctgacccacctccctgtctccatgtagccagtgaggggagggggagacacagaaccaaccacagccaggggcgtccccatggcgactgtggcccggcccctcctctcttgcctgactctcctctcttgcctgactctagacactaacttagttccaggttcggtgccctgttggtgctcctgtttccaatagcttaggtcccatggtgggggaggaacctcaggggctatgcagcccccgccagctgccctcgaatcccgtccaggccaattccagattctaaactgatttttttcatgatattgtcaaaacagtgaggaaacatt

SEQ ID NO: 5105 - DNA, 339 bp, Homo Sapiens
ttactataaccagggtttcattctgtctttttccactgaagtgtgacattttgttagtacatttcagtgtagtcattcatttctagctgtacataggatgaaggagagatcagatacatgaacatgtcttacatgggttgctgtatttagaattataaacatttttcattattggaaagtgtaacggggaccttctgcatacctgtttagaaccaaaaccaccatgacacagtttttatagtgtctgtatatttgtgatgcaatggtcttgtaaaggtttttaatgaaaactaccattagccagtctttcttactgacaataaattattaataaaataa

SEQ ID NO: 5106 - DNA, 575 bp, Homo Sapiens
tccggacatagaaatattttattttcttcccaatgtggtaactaaaatacatttaaacgaaggctagaatttaaaacaaaattcttttactgataagcacacttgcaaagtaatgaaaatgttacatgcattgctttgcatataaacgtccaagaagtatttgttgaccaaatgtctgaaaatgaagtatttttatctgttccgaaacgccataatattgcaaagaagcatttcaaattattgttgtgtgaaatgttcaaatttagcattcaaatttagcgttttcccacattttacccttcgatttacacaatttggaagaagagtagatgagtttgtcattgttacttaaaacaatgcgtcaccttgttagggaaagaaattaacacattggtcaaggagtgataattaaacagaacaggacatctgctgtccattcaatgttaaagttctaagcaaattagcatggagaaaagggatgggtagaaataataacagagcactagttgattagtccgcctccacattcacgcctgcaggcgttggacagatccggcttactgagtccaccatgt

SEQ ID NO: 5107 - DNA, 954 bp, Homo Sapiens
gtttgccttggcttggtttcatacactgatttatttttctatgctaggcagtagagtctctctgcctctgaggagcaggctacccgcatcccactcagcccctccctacccctcaagatttgatgaaaattccaaccatgaggatgggtgcatcggggaagggtgagaaggagagcctgcctgctcagggatccaggctcgtagagtcactccctgcccgtctcccagagatgcttcaccagcacctgcccctgagacctcgctctctgttccagcaaccctggttggggggtcagacttgatacactttcaggttgggagtggacccaccccagggcctgctgaggacagagcagccaggccgtcctggctcactttgcagttggcactgggttggggaggaagagagctgatgagtgtggcttccctgagctggggtttccctgcttgtccagttgtgagctgtcctcggtgttaccgaggctgtgcctagagagtggagatttttgatgaaaggtgtgctcgctctctgcgttctatcttctctctcctccttgttcctgcaaaccacaagataaaggtagtggtgtgtctcgaccccatcagcctctcacccactcccagacacacacaagtcctcaaaagtttcagctccgtgtgtgagatgtgcaggttttttctagggggtagggggagactaaaatcgaatataacttaaaatgaaagtatactttttataatttttctttttaaaacttggtgaaattatttcagatacatattttagtgtcaaggcagattagttatttagccaccaaaaaaaagtattgtgtacaatttggggcctcaaatttgactctgcctcaaaaaaaagaaatatatcctatgcagagttacagtcacaaagttgtgtattttatgttacaataaagccttcctctgaagggaaaaaaa

SEQ ID NO: 5108 - DNA, 756 bp, Homo Sapiens
  misc_feature (54)..(55): n is a, c, g, or t
actccccatgacccaccccagccccctggacccccttcatgacagatcccccanngcttgggcagaataggcgtcgagggcgcagaaagtgcggcagcagcagccgcagcagctatagagaggcaagagaaagagaaagcgggcggtggagtggttccggaagagctggtccccgtggttgagctggtccccgtggttgaattggaagaggccatagccccaggctcagaggcccagggcgctgggtctggtggggacgcgggggtgcccccaatggtgcagctgcagcagtcaccactagggggtgatggagaggaagggggccacccaagggccattaacaaccagtactccttcgtgtgagccaaccccacccgctccaccctttttaaaccccccagccctgctcgtgagattgggctgggtagggacagaggaggccgaaatccctcccccatgcttcctgacccttgttggccaagggcatctttgatggtacaagcagaggctcgggagaggctcccgtcacacactacaggtcccctccccagggcaggggatttgggctccatgagctccttgaggggctcttctggtcagccccaccctgggggccatttccccattaactacccccagcccgaggcagggtgagggggaagggctgtcagttacattaaggtggttgttgttgttgttttaaacaaaatggagaagcataaataaataaaaaggtttatctcggttcaaaaaaaa

SEQ ID NO: 5109 - DNA, 538 bp, Homo Sapiens
tgtatttttaaaggaataaatcccagtgtgcctgatttgacattcttgtcagcaaaaaaaacttaatttctagtaaatctataaaaatgggtaagtccctaaattacaaatgagaaaattgaagcacaaggaaaaaaataactagtttgaaatattttgaaaagtaataacataaaactagtatttgtagaagattatgtgttgtatataacaaattagtatttatagaatatgacctatttatctgaagtttataattgtttatacctaatacagttctttttggagtaagaatgattatataatcgttatccatttgggtataaatctgtatttttagttttttccctttgattagtatgtgttacatataaagacagaaaataaagtataaatcaagagcttaaattgtatataatttatttctacagagaaagaagattgataccttgctatgagtgaattcctttgttttatagggaaaatttattgtgctttttacctggttttttcaaataaaatattaaaatattaaaaa

SEQ ID NO: 5110 - DNA, 956 bp, Homo Sapiens
  misc_feature (700)..(814): n is a, c, g, or t
caccaggtgcctttggaggttatggctaggttagccctgcactccacctgggaacggcccctcatcacctgaagtcctctgctgtgttgactggaccctcagttcccacactgctaattactatgaaagctgctctggcctcgtcttctagcttgtgcctagttgaaagtctcacctttacaggatcatttgtaatgctggtgtacatgcagggaactcacaagctgtgtcaggtatgcaggacaaggaatgtctgctctggggggcacaggccaactatatggagggagggtcccaaattagcaaacccttcatttaaagcaaacccttgtcaagcctaccagagcagctgatacgtgtgcataacagtgaggcattgtgtcctggatcgtctgggagcccagtgtcaagtctgctggaatgcaggaagtagaacagaatcgccacaggactgttctggggccagcttcccttaactctgtagcctggcagtctgacccaaagttgccctcacccaaaggttctggctcttccctccctcacttttactttcccttcccccataagttggaggataaaatgggtatcaatgctaatatttccagggagaacatgaaaccagaggtttctttctttctctgtaatctgctatgaaagaaaataacaaatgaaaataaatgtgtactacactttgaaatannnnnnnnnnnnnnnnnnnnnnnnnnnnnnnnnnnnnnnnnnnnnnnnnnnnnnnnnnnnnnnnnnnnnnnnnnnnnnnnnnnnnnnnnnnnnnnnnnnnnnnnnnnnnnnnnnnttgccggccccccttcgccccttcaaaaatttttttaaaacctttcctttggggggcgggcccccaaaaggaaagggaaatgtggcctaacgttggttcccaagaaaaaccggggacttgacaaggggcttgggttcccccc

SEQ ID NO: 5111 - DNA, 835 bp, Homo Sapiens
gaggggctgctggaagttggcatttcgttcagagctgactttcaggcacccaaactggatgacgtgccaatgtccatttgccttatgctttgtgtagctgattaggctgggatttgaggtgataatccagtaagtctttcctcgttcctacttgtggaggatcagtagctgttatgatgccgagaccatttggagaagtatcagaggcctgaccgggacacataatacgacaaccacatcttttcctcatcatgccatgaggaaatggatgatttcatcttcttccatatgtcacctgggggaaaggctgcctgtacctctcaagctttgcatatttttactggaaactgaggcgtcaagatggctgtggcagctagcaaaagcaaagatgctttgtgcatagccttgtgaaaaagtatctttctatgcaataagatgaattttcctcccagaatatttagaaatgtagaagggataacagttcacagccaggtaaaatttaactggtggcttaatgactctgcacctttttctcaggaattctgcctaagttgtctgccttttctaccaccaaaaagacttttagttttctatgctttctcctgaattttggtagggtaaggtatttctatgtcaaaggcacagccttgatgatctcagggaaaaattttaatcactgtgtataatgatactgaaccttgattaataacagaaattcaggatgtaaagccacagaatgggatttattaatgtgggatacctcagactgtttgttttctttctgggaagaaaagtgtgttctataatgaataaatatagagtggtttttacttgt

SEQ ID NO: 5112 - DNA, 490 bp, Homo Sapiens
tcctgacgtcaaccctatctacgactactacgtacaagaaaaaattccagttcctgtgtggaaatcatccttgagataagcagtgccctctgcctgctgtattttggaacccatggaaaatacatttctcattgaattttctccacctctctaagttactgagaagtaatgtggtcctgttcctttaaaaagtaaatgatggaaggagtggaatttgccatatgatatgagcagaaactaattcactcgctgaaaagggggaaggaaatgtgatctcttgctggttctgatggaaagaagccagcagcacagtgtccctcaccccagtaggattctgtagccaagctctaacttgctctggaacctctcatttccaagtgaggttggtactacctgaatttgcattgtctcagatgcaagtgataagtttaagtacagtcagagaaggtaggtggccaagtccctggacagttgattgggttgacgtcag

SEQ ID NO: 5113 - DNA, 261 bp, Homo Sapiens
ttgacgtcacccaatcaacacttacagggtggatttttagaaaagagctgatctccgttaccattatgacctagaaagcatcaaaacaactttactgaaatgtccaggcatatgatagaaaataccaaaacccacctgaagctttcagaatgagggaacatctctagcccatattttaggtctgacaacaggtatctaagagcattttgttttttcttttagagataaggtctcactatgttgattgggttgacgtcaggc

SEQ ID NO: 5114 - DNA, 948 bp, Homo Sapiens
cagggtcttttcccctcaaaggagaactgtgtttatgaaactgtagttttgcctttggatgaaagggcatttgagaagactttaacaccaatcatacaggaatattttgagcatggagatactaatgaagttgcggaaatgttaagagatttaaatcttggtgaaatgaaaagtggagtaccagtgttggcagtatccttagcattggaggggaaggctagtcatagagagatgacatctaagcttctttctgacctttgtgggacagtaatgagcacaactgatgtggaaaaatcatttgataaattgttgaaagatctacctgaattagcactggatactcctagagcaccacagttggtgggccagtttattgctagagctgttggagatggaattttgtgtaatacctatattgatagttacaaaggaactgtagattgtgtgcaggctagagctgctctggataaggctaccgtgcttctgagtatgtctaaaggtggaaagcgtaaagatagtgtgtggggctctggaggtgggcagcaatctgtcaatcaccttgttaaagagattgatatgctgctgaaagaatatttactctctggagacatatctgaagctgaacattgccttaaggaactggaagtacctcattttcaccatgagcttgtatatgaagctattataatggttttagagtcaactggagaaagtacatttaagatgattttggatttagttaaagtccctttggaagtcttctaccattactgtagaccaaattgaaaagaggttatgagagaatttacaatgaaattccggacattaatctggatgtcccacattcatactctgtgctggagcggtttgtagaagaatgttttcaggctggataatttccttacaactcagagatctttgtccttcaaggggcagaaagcgtctcgg

SEQ ID NO: 5115 - DNA, 328 bp, Homo Sapiens
  misc_feature (174)..(189): n is a, c, g, or t
cggtaccccagggtcttttcccctcaaagaaaactatgtagtcaatttgtgaatgaaaggaattaaagatattccttgacatgtgaaatttgggtcttctgaacaaattttaagttttgctacacttatgtgttaatggctgtaagtttacctctgatgctgagtatgctaaannnnnnnnnnnnnnnngactatccttttgtgaggctgcattttaacttcctcatgtgaacagtctttcacaggcagttaggtttcagggtttaaaaaactcatttaccacaggtataattttgagtctgttatttgaggggaaagaactggagct

SEQ ID NO: 5116 - DNA, 325 bp, Homo Sapiens
acagctgatagcagcagtagctgggccccctccccgggaaaccgtgtactcaaccccgtccccagtggaaaacacccctcagaataatgagtgcaaaatggtggatctgaggggggccaaatgtggcttccttcacggtggagggctgcgagctgatctgcctgccccaggctttcgacctgttcctgaagcacttggtggggggcttgcatacggtctacaccaagctgaagcggctggagatcacgccggtggtgtgcaatgtggaacaagttcgcatcctgaggggactgggcgccatccagccaggagtgagccgctgcta

SEQ ID NO: 5117 - DNA, 490 bp, Homo Sapiens
tctgtgtttccagacaaggaaatggaagggaatgggggtgttggcggctggcagaaggtctcacgtgggtcagaggtagaagtggaaattcggccctagctcccctgggcctccagagccctcacttcctccactatagcaaagagcttggttctcgggcctccaggctctcctaggccttgctttccttttggaggacaggtaaatgagggtgacaaaggcccaagtccctggaatacaggtccataccacattgtctaaatcatcaaacgttaacctccgcaactgaaaccccagtgccgtcagtggtctacattaggtggaagccactatttttctttaacaagaggttttggcgattctcagaggacaccaggaggcccgcatgcctgagaagcagcagtagccaagtgcctgagccccatctgccaagaacccctttattatctcatctctccatttctgtccctgatgtcctaagagttgtgct

SEQ ID NO: 5118 - DNA, 511 bp, Homo Sapiens
taaggggttaatatcagcagagagcctctggaattcccaacccccacactaaggtctccattgcgattgaccaatagcccataccatattggctgttaaatgtgttgatattatccctgtatatagatgtatattgcatagaattatctccatattattgcttgatgatgaattatctgcaccggggtcacctggggcacttttcaaaaatgcagatggttgagttttacatactgcacccactgcatctctggaagatgggccaggatatgcatttaaactatctcccaggtgattctagggcattgtgtcaaatacagcctgcattttctggcatacagcaaacctgtcttctctctagatgccaagttccttaaagggaggatcctaagtcctaaaactcttggcattcaccactatgcatagcttagtgcttgttgacttacagcagagaggagaaatcatggattcagaagtgtatgctgaaaatataaattgggttgatgctgct

SEQ ID NO: 5119 - DNA, 1227 bp, Homo Sapiens
ttgagtatgaatagggtttattaggtcttttataaaaatattcactaacttttctctagtggtctcatcttctattctgtaaatggctcttagaaggaaatgttttccaggtacagatacctaaatgggtatctatctcacaatggcctggagttctgttccctcctcattccttaatgagtgcttgtcctgctgtgcccttgcattgtttaatttgttgctcccttttacgaaactcagaaattcttgatccataaagtagggcttttctgacgatccatcatttgtttccagatcaacagcaaaacacaggaaaagtgcatccagcacagtttcaaacacagataaaaaactatgggctactaagtaggcaaaaaaagctaccaataacagagggactgcccacacctggaatgcccgattgtagttaaaagccatgagtcctccaaaaacagtgaaacacaccactaacacctttcctagaaaaattatgaagtctccaaagcagttaatagatgtaaagtgacttgagttcttggacaagattttgaatgcatcttttgctgatgtacagaaatctgtcccattaatagcagttgtagtatatgcattctggttgagatggagcaggtatttgtcaagacaccagaaacagcagtagcagcatcggaacaggtacctggacaatgcaccatgctgctgttctttcagtgcgttttgcatgtacatgacaatgattctcggaatcctcaccacagagattaaaaatgaccctttcacaatggttccttgatggtagaagaagagaatggagagagacgaaaggatgggatgatcaggaggatcatttttacttctgttgaaataacaagtaaccactgccccagctatagtcatttgctggcacgcaaggatgaattcactagtccagatgaggccaattaaatggtacgaccacatgtaccgaatgcccgaaaggggcttatattccacttggccgccttccataacctgggcagctcctgcagttcccaggctcagcagcacagccacccagaggacccagaagaaaatgaggatggcaaatgtccacagtggctggaacagcaggaagggagcactgctgatggctttatttgtgatttggaaaagctcaactgtcaattttattctctttctgagaacaaaaatcaagacgagctgctaccctgtttggcaccgcccgta

SEQ ID NO: 5120 - DNA, 384 bp, Homo Sapiens
tggcggtcgagcggacccaccatcttgatctgcaggcagcccttcgttgtgctgctcgcgctgctgcttatctgtgtgtgctaaaaggggagggagtgtttctgtgcccattcccaggcaccttcgtgcagctgcaggcatctcccccacgcgcttccagcttcccttagtgtgcctaaagaaagggaaaggaatgtgctttaggcccactgttttcactggggcccatctatgtatgtggcttggtgattacccaggaacctcccaagtctgtgcccgagttgcttatctgtgttttacagcctgaaagatcaggctgctctttgttaggagaagtgatttctttgaactgcgtggtgtggtgagaaagggagcaatttctaa

SEQ ID NO: 5121 - DNA, 544 bp, Homo Sapiens
gcctggatgagtggcacctggcatctggagcatgcatttctcacaataattattaagctgtgtgataatttctgctttcaggacactcatccattatcttggctgtgagctccttgggtacgggtaccttgtatgtttaattttatatccctagcacaaagcaagtgcctggcacatagtcagtgccctaagtatttgtagagtgaagaatgccagcctctcttgtccctggtttccttatgtgttgaatgtggttgagtttgtccattgctagggagagacttccagtaataaaatttactattctagatgcttctactgttatgttttatctgcccatttatctttcttagttaccaggagaaatgtgtgacacctatattataatgaaaacaatcttattacttatagtttatctatattaaacaaatttaattgcatttaaagcattctttgatattgttgcttttgcaataaatatggataatcttggttataagggagttaaaacaatgctgtaataaataaagtgtttcatgtgatc

SEQ ID NO: 5122 - DNA, 497 bp, Homo Sapiens
gcggccgcggccgcgaggggctgctcggtgcccagcgaggtgcggcgcatgaactggcggtgcatgcggagcagcgcgccgcacacaagcacgttgcagaggacggtggcgagaatgaggaaggagctgaagcccgcgtacatgtaggagtaggcggcgtgcgccgtcacgttggtggtccagtcgatgaagcaccaggtgtctgggtactgcagccgcgagctaccgagacccatgttgggcagcgcgcaaaagagcacgttggacgcatagactgcaaagagcgtgaggcccgccaatcgcttgtccacgtagtggctgtagaaataggcatggttgatggccaggtagcgctcgacactcatggcgcagatgatgctgaggccggacaggctgaagaagagcagaatgaaggtgctgtactcgcacagcggctggcccccgcgccattggcccttcatgtacgtggagatagtcaccgagctcacccacagagt

SEQ ID NO: 5123 - DNA, 479 bp, Homo Sapiens
tgcaggggatctgggactaccagagactctgggaaatggacaaggtggggggccccactctttctctcctgcagtcccgtagctggggcctccttccttctcagggtctccccagcccagtccccttgctcccatcccactcggtgctgttgggtaggggccctgccaggaactgaccagctcagcgaggagccataatgtgcatatgtgcacaagcagggttgggggaggggggtgtgaggggttgtgcccaggtgttgccccctatctcctggggagggtgaggcagggcagggacagtctccagggtcagtccctggatgggtggttacctccccttcctccaccctaagccctggggccctgaaatggggtgggagggcaggggtgggagccctcctagtgggtttggggggttgggttcctgaatgcaccataatcgctgtatgaaatattaaaaagtctaaagtgaaaaaaaa

SEQ ID NO: 5124 - DNA, 446 bp, Homo Sapiens
ttttttttgactcttcaatgaaaatgtatttcacattaaacacaaggtacatatcatgcaaatgaggcatcaccatggtcacaatggtgctgtgaggtacaacaaatcacaagaaaacagacatttagcaaaataaggttccaggaaagatgagaggcattttctgaaagccagaccatgctatggtttctgtgtgcctgtcataaagggacttggccagtatttgccgagatggacagcaccgcattatgtggaggcatgtactttattgagtagagacacatacacagacatataatttctgtaactaatacattcttaaatgtagctggctgtaaaagcacatgaacaagattactactgagacttctttgtatctcctggttgcaaacctctctcagaattatgaatctttccaaacccttaattatacaagtcaaaacaaa

SEQ ID NO: 5125 - DNA, 392 bp, Homo Sapiens
gcggccgcagggggcggcagagacacgcggagcggctcgacagcagatggccgcagccccgcgcagttctgggcctttcccgttgggttcaccgtcggggaaggatcgcgcgcaggggacagcgcgagcccgggagggaaggacccggcttctccagatgcttggcgacaaagggcaggagcggagggtggcggagtgagaccgcgctgcccgccggcgccacacgcggcgcgcccagccgcgcccctgagccgcgccgccagcttagagtgggccgcctctccgccctgcagctctgcagctgggagaggcgcgctggggtccgactccactggcgcaacctgacgcggcgccgagccagacacgtcccggccgaacgatgcccgggctgc

SEQ ID NO: 5126 - DNA, 818 bp, Homo Sapiens
tatcttatctgtttcaattccttgctcatatcccatataatctagaactaaatatggtgtgtggccatatttaaacacctgagagtcaagcagttgagactttgatttgaagcacctcatccttctttcaatgcgaacactatcatatggcattcttactgaggattttgtctaaccatatgttgccatgaattaactctgccgcctttcttaaggatcaaaaccagtttgatttgggaatcttcccctttccaaatgaaatagagatgcagtacttaactttccttggtgtttgtagatattgccttgtgtattccacttaaaaccgtaatctagtttgtaaaagagatggtgacgcatgtaaataaagcatcagtgacactctatcttactccaagaagtctctttgttctccctccccctttcttgaaccctaggaataaaatggcagtttctctcaaggtcttcctgtggaattcccccacaggctgggagagccacaaagctgagagactcttatcacaaaatctttaaatgaacctagtaaacgttttctctggcccgcttctgacctccacagacaacagacaacttaataaaggaagatttatggcatagttcatggtggctgatagccacttttggtgtgttctgagtcatgttgcccagggagctttgaataagtggggagttgggacttagagacggccctcactgagcgtctgaggttttaacttgtcggttgcttgacctggatgaggtcttcctcacctgagtccaacacatgaacgttggttggcaacagtgccctcctgccc

SEQ ID NO: 5127 - DNA, 463 bp, Homo Sapiens
gttcagggctgtggggggccttggccacatacctgtcccttggctatgagcaggctttgggggcccttccgcggcagccccgggggccgaggtagggtcgggggcttagaggctgggatggctcctggccccaccgccagggggcagcgcaggccgggctgggaggcggcggcggcggctcgggctggggggtcaggtggacgccgccctccggggctggacgcgcatccctcagtccctcggccacccgggggtcgctccctcgtgcccaccgcacctgccgagcctctttggacccagatctgttcatgcttttgtcttcgtcactgcggcggggccctttgatgtcttcatctgtatggggtggaaaaatcaccgggaatcccccttcagttctttgaaaaagttccatgactcgaatatctgaaatgaagaaaacaaaccgactcacaaacctccaagt

SEQ ID NO: 5128 - DNA, 678 bp, Homo Sapiens
ggtggttgtgggtagcctaggagggctactggcggcagcagaaccgaggaaggcaaggttgtttcccccacgctgtgtcctgtgttcaggtgcgacacacaatcctcatgggaacaggatcacccatgcgctgcccttgatgatcaaggttggggcttaagtggataagggaggcaagttctgggttccttgccttttcagagcatgaggtcaggctctgtatccctccttttcctagctgatattctaactagaagcatttgtcaattcctttgcctcccaactgacaacacacgttcattttccaaccttcctaacatcttaaacctttcttctgggagaactagaagacagaatttgctttgattctctcaggcgctgtgcacaagccaggtcttctgttttctctttcttactctacccacattcttgccttctctatccaactgtgaaagtgaggggaggctcctgtccccctctcttaaggtccccaaacctgggagtgcataggtactaaatcaagcagtgcaacttgtaattaagcagctgcagtgtttacatgtttcttaatgtgtcatcttttcaatggctgtattaaaagaagaacgtttgttttaatggtctttctgattaaagaaagcccctgtggctttggaggcattgtgcccacggtccccc

SEQ ID NO: 5129 - DNA, 503 bp, Homo Sapiens
ggggaggcctgttagctagcagctcctcacgcctggtgactgagaaatggagtctggggggcctacagcaggccacgcgatccactgggcttctgggcacagaagtgcctcaacaggcacaggcaggctccccacagccacaaggaaccctgctgccaaggaagcagctcctgttggggtcatcagatttttaatctggctcagcaaagccatggctgtccagccttaaaaaaatgggtgatgtgggagaaatggagggtgtgtgaagagcacagctgggcctcgagaactcagggccagccttcccagcttgggtcctgtttcggagcccaggccttgcttccccttagccgccccagccagattcttttgcgccccctgctggcacacacaaagacagacccaggagcgcacatgtgaacgtgcgcatgcttgctgccagttacccagttcatgaacacgtgaagccttgacttcaggttaagtaataaaaatttattgag

SEQ ID NO: 5130 - DNA, 659 bp, Homo Sapiens
cacagggaagcagcagtagcagtgagattggggtggaagaggtgacatgccccatggcgtgattcattcatacattcagcaagcacttattgccagcacctgcctgcatgcctggtgaggaagtggcagttcacatcctccatcaagatgctcacggtctagcatttcccaggatcacaagagaacctgaagaatttagacctttcaattagttagggtttttcctataatgaattaatttgttcttaaaagacaggctccagccatcaatttgaaggcctgtgtgccagagacatttctttgattcaagtctgactcctttccttctgatttctggtacaggggtctgtgtaatcagcacatggcggggactgtctcacatgctccataagccgtaatatttctagcttgaagaaaaaaataataattcagagaactctgtttcttagaggaaattgacaggaagaggaattgagaagaattctatagaatgggtaatgaacaatggatcaggaacaatagcagaataataaggcccgcagaactacctggaaacctgaactctgggtcacacacagggtgcaaacttaagaaaactccccacagcttttaaacagctaggaatctgtgagttacggaagctacacaatacgtttact

SEQ ID NO: 5131 - DNA, 579 bp, Homo Sapiens
catgacccaggagtccttccaggagagctctgtgaaggagctgaggcggctggaggaccagctggccggcctgcagcaggagctggcggctctggcactgaagcagagctcggtggcggaagaagtgggcctgctgccccagcagatccaggccgtgcgggacgacgtggaatctcagttcccggcctggatcagtcagttccttgcccgaggtggagggggccgcgtggggctccttcagagagaggagatgcaagctcagctgcgagagctggagagcaagatcctcacccatgtggcagagatgcagggcaagtcggccagggaagccacggcctccctgagcctgacgctgcagaaagaaggtgtgattggagtgacagaggagcaggtgcaccacatcgtgaagcaggccctgcagcgctacagtgaggaccgcatcgggctggcagactacgccctggagtcaggaggggccagcgtcatcagcacccgatgttctgagacctacgagaccaagacggccctcctcagcctctcgcatcccctgtggtaccactcccccaccccggcatcctc

SEQ ID NO: 5132 - DNA, 598 bp, Homo Sapiens
acatataactccagaatatgacttatatcaggagtaggagtaggagtaggagtaggtgtaggatcaatgtcatcaggattgcttgagggataaacaaagttacttgtgcaatgttggatacttttgatgtcaaattgcttatatctatacttttactggcaataaatatgtgggttgcattttcttctgagatactttctggtttaaatgcaaagctttccttggagttggcctcctttggtgacagatcagtagtatttacttgaagagcatcatcaaaactgtctcttagatcaagcatacttgcacttattcttatgatataacgttgaacttttccaacatcaaaattatctcctggtgctgtccatgtaagaataatcttatcctcatgaactgtggcatcaaggtctgtgatttgacttggtgggtattggtcaggcaagggaaggcttgggacttgtgataccacaaatgcacctccggatgctgttcggctgaaatcctccaaggtggtctgagtatcctcatcaatttcaggtcttggcggttgcttcatttccccgttcacacccgctcgccaacaattcggtccacc

SEQ ID NO: 5133 - DNA, 418 bp, Homo Sapiens
ggtctagacagcggaccccaagctcgatctgaagctctgaggtctcatggatgcctgctcctggtccgataaacgagatggctgtggtggggaggagcctcaggcggcccgggacccgttggcgtccgtcgctgggaggcggagggactcagagccgaggctgtgcccaggactgtcccgggcgccgggcgatgccaacactttgtgctggttcccgccaaggggtcggcctccgggtccctgccgccaagtgcgtggcgtggtctcggcctccaggtcagacattgctgatacgggcctcccccgggaaggcagcgggatccgtggccctgtccgggggccgctcccgcctgacgtagcgcggcttccgtacgggctgactcttgggtccgcctgacccagcaccactgaagcgatg

SEQ ID NO: 5134 - DNA, 398 bp, Homo Sapiens
cttccgccgcccagcagcccccaggcagccgccagcgttcccagaccgttacctagcccagcgcccgaaagccgtcccttctatgcaataacacaatagtattactctactgcgatgttcggaactgcggtgtgtgtacacatactcacgtatatgcacatatttatatacaggaagaaaaaaaacagacaagatggggcttggtttataaccaccttgccctgtcttcgcttaactcctagaagccagtttggtgtaggggtgggggtgcggccaccaggtctgagctcttcctactgtggaaggctccagaaggcccttcacaaggagacccctcacctggatccagtcgactgcggggcttgcccctcatgtgggctgcctccatcgccacgtcg

SEQ ID NO: 5135 - DNA, 483 bp, Homo Sapiens
tttggcctggcccccgccgcccccctccaggtccacgcgccactcagccccaaccagacagtggagatctccctgcctctcagcacggtgggctcggtcatgaagatggagcctctgaacaacctccaggtggccgtgaagaacaacatcgatgtcttctacttcagcaccttgtacccactgcacatcctctttgtggaggacgggaagatggaccggcagatgttcctggccacatggaaggatattcccaatgagaatgaggcccagttccagatcagagactgccccctcaatgcagaggctgcgagcagcaagctgcagagcagcaacatcttcactgtcgccaagaggaacgtggagggccaggacatgctctaccagtccctgaagctgaccaacggcatctgggtgctggcggagctgcggatccagccgggcaaccccagctgcacgctgtccctggagtgtgagcagatgtgg

SEQ ID NO: 5136 - DNA, 1213 bp, Homo Sapiens
cggcggcggctccgcgggggaaacagcgaggctggcgcagcgccgaggccgcggccctgggggcccgcaatccacgccacggaatccccgagtgagcagggtgagcgcagccactgcccaacgcaaaccgtgaagaagcttctggaagagcagaggcgccgccagcagcagcagcccgacgctggcggggtgcagggacaatttctccctcccccagagcagcccctgaccccatctgtgaatgaggctgtgacgtggccaccctccctacccagcacactcggagactgtgggttctggacctagcagcctgggctttccagactggtgaccccaacacgcatgctgcctacactgacagccctctactcttgccctgcttctgctgccgaaaatttcctgcctcctgacttctacccaccctcggacccagggcagccgtgcccatttccccagggcatggaggctggaacctggagagtttctgcacccccttcaggacccccacagttccccgctgtggtccctggaccatcgctggaggtggcccgagctcacatgctggctttggggccacagcagctgctggcccaggatgaggagggggacacgtgagtataagggatagggttgtctgcagactcttggctgggtgggggctgttctcacggctgtcccccacctgtcctcaggctccattcacctgtatgcaggctcgggggctgcgctgggcggcatatgcttgcggctgaggtgctccaggtgtaccggaggtcttgacattcgtgagcataagggcaagacccctctcctggtggcggctgctgccaaccagcccctgattgtggaggatctgttgaacctgggagcagagcccaatgccgctgaccatcagggacgttcggtcttgcacgtggcgctacctacgggctcccaggagttctcttggtatggccagctggcaggcaggggtttgtctggggggtagactggttgcccagatttgtggcttccagggccaggaggccaggggatacccttacccagcagtctgccttctcttcctcccaggctgtgcttaactctggggtccaggttgacctggaagccagagacttcgagggtaagttgggtgtgggcaggctggtgtggtcggtgtggctggcgaggtgggtgcgatgcggtcctcactgtctccattcctgggctcccc

SEQ ID NO: 5137 - DNA, 113 bp, Homo Sapiens
aaataaaagtcatttaatgtagaatacttttaatttcactttctgtattttaattttgttgaagggctgattgggatttccatgttcttattaaaaatctaacaaatctgaaa

SEQ ID NO: 5138 - DNA, 564 bp, Homo Sapiens
  misc_feature (39)..(39): n is a, c, g, or t
  misc_feature (48)..(48): n is a, c, g, or t
acagaactggccagagctggtgctcaataagagcagggnaggtgcccngtagcagagcgaggtcagctctccagccccccactgcctctgagactggctctcgacgcacctgaaggctgatgtctgccccacgctgctgaaggagccagaaggtgacagtgccctggcccacacaggtgagctcgccggcgtcccaggggttgaaggccacaccatgcaccggctccgggaggcgggtggaggacacgaggtcataggtggccgtgccccacagggcgagggtgcggccatcgtggtcccccagtgtgacaagaagcctgtcatctggtgagaaggccagggccagcacggtggtgctatgggggaaaatgagatgctggcagaggccgccagacacgtcccagacgcggatctgacaatgggcggtcgtgctgcttcggcccgaggcagaggccaggacctgggcactgtggctgagggccagcgtggagatctccgcagagtggccggaccagtgctgctgggcgccagagtgcaggtcctccaccaccaacctgcggccgc

SEQ ID NO: 5139 - DNA, 574 bp, Homo Sapiens
  misc_feature (24)..(24): n is a, c, g, or t
  misc_feature (65)..(65): n is a, c, g, or t
  misc_feature (110)..(110): n is a, c, g, or t
gtcatcaacggtgatggtgcgatntggagcataccagagcttggtgttctcgtcatacagggcanagaggttgtgacaaagaggagagatacggcatgcctgtgcagccntgatgcacagttcctctgctgtgtactctccactgcccagccggaggggctccctgtccgacagatagaagatcaccttccacccctggctcaggggcctccaggttcacctcagtcttcttggagctcctcattttagcacagaaagccatggcattgcagtcctcttttatatttagatactgcatttattcagctgtccagtgttctccaagaagcaaactggattttcttctctactttccaaagctacttcagagaagcgcacttccgtgtgcgcctgggccaggcagcgccccgtcgctgcgctggctggggtcgaccggcaggctcgctaggcggccagccccgcggggccccagcgtgcgcgcgcccagggctgaggaggggtcgcggcgaggacagccgggactgggcgcaggcccgcactgtcagcagctccaggatactccgcggccgccccc

SEQ ID NO: 5140 - DNA, 1248 bp, Homo Sapiens
  misc_feature (48)..(48): n is a, c, g, or t
  misc_feature (450)..(466): n is a, c, g, or t
  misc_feature (502)..(512): n is a, c, g, or t
  misc_feature (664)..(664): n is a, c, g, or t
  misc_feature (706)..(706): n is a, c, g, or t
  misc_feature (743)..(743): n is a, c, g, or t
ccggccgcgtgcgggagtcggggtgaggcgcgccactcacctccgtcnccgctgcgctctcagggctgaacgtgccgcgctccaagcggctcttccgggacctggtgagcctgcaggtgccggaggaacaggttctgaatgccgcgctcagggagaaattggctctcctgccgccacaggctcgagccccgcacccaaaggagccacctgggcctgggccagacatgaccatcttgtgtgacccagaaacgctattttatgaatctccacacctgaccctggacggtctgccccctctccgacttcaactccggccccgcccttcagaggacaccttcctcatgcaccggacactgaggcgatgggaagcgtagaccccaaagatccctggagggctagttcgtatttttgtgttaaactatttgttagaataaagtaattttgctaatnnnnnnnnnnnnnnnnncacacgccaccccggaaacagctttcacaccagacnnnnnnnnnnntaaacacactttgttgggccccctcggcccccccaaaaaatttttcaaaaaccatttctttatgtgggcgcgggggccccccgcaaggaaaaaggggaacccgggggcccaaaacggttgtgtttcccatagggaaaaatcccgcggggtcnaatgaaactaaaaggggtctttgggacaatctcccacacccnataaataacaaaaaaacacgcgccccccgcgaggggngtccaacacaccacaataccgcgttctctccccgtagaaaccacacaacatctccgccaacaatagagtggagacgaatctctcgtggaggacgaggggctcactattttatcatgcgcggggagatttctctttgtctcacaacacgcgggggaggcgtcgccgaagctcgcgggagcaccttcccggagaatatatctccaatttgttgtcgcgcggccgccggggtctcgttgggagacgagtctcttctgtccgcgcaaacaaacgtggggcgcgggaaattgtccacgctacagaggcgttcttctcgtgcgcgcacacacgcggtataacaccctctcttccagataacggcgcccgtggaagagcacacacctgagccagcgccccccgcgggcggccatataatacaccctcctgtggctcgcccctggcggcaataaaaaatatttcgtcccccttggtggtaaaaacccgcggcacgcaaagaaaacttggctct

SEQ ID NO: 5141 - DNA, 442 bp, Homo Sapiens
  misc_feature (52)..(52): n is a, c, g, or t
  misc_feature (58)..(58): n is a, c, g, or t
atgctagtgtacttagggggtgtgccaggtgtctttcatggggccttccaanacccanctcccaccttctcccctcctttgcccggggacgccgaactctctcaatggtatcaacaggctccttcgccctctggctcctggtcatgttccattattggggagccccagcagaagaatggagaggaggaggaggctgagtttggggtattgaatcccccggctcccaccctgcagcatcaaggttgctatggactctcctgccgggcaactcttgcgtaatcatgactatctctaggattctggcaccacttccttccctggccccttaagcctagctgtgtatcggcacccccaccccactagagtactccctctcacttgcggtttccttatactccacccctttctcaacggtccttttttaaagcacatctcagattaa

SEQ ID NO: 5142 - DNA, 739 bp, Homo Sapiens
ttaaatttatcattttctttatcattggaggggagggaaagaaagcaagcagaggtggggatatagttacactatttaagagctgaatacaaagacaatgagtctttcatagtctcaacaactccacaatgaataactgtggattatctcatttataattcacattggataaaaaaaatcggttcccctctgtgtgtatcaatttaattcaaaccttatcttcagaatacaaagatgaatactacaagataaactaactgcaataggtttttctaagtagaagaccaaacaccaaagggaatccctctttccaatgtcttctgataaggcaagattttgccagaatggaagtctaacccttaaattaacatttctttgggccaagtaagaaactacagttgttgtgggtattaccctacaattaccatatgtattacatattaaattaaactcagcattaaatatgcttgtataattacgctgttaatgatgatagcagtgatgatgccggtggaaaaagcctgtctttagctcaagaaaagtaagggagacaaatgtagcaagcagaaagcaaacacagatttgggcaatttttgactaggaaagagaattttaagcatagaaatataaaaagaaaagtactaccttatttcccttacgtggaaataatatgaaaaacacttattagatatactggacaacaagagaactaagtactccaactctactgcagcattac

SEQ ID NO: 5143 - DNA, 818 bp, Homo Sapiens
cacatgtttctgcaacacgtatgcttcatcgtagcaggcccgaggtcctagtggattcacgtggccccagtaatcctcactttgagggtggacttcaggatctccatacacctccgatggtggagccaaggagcagaacgggcaccgactcgttttgccaagccccaacatgtttaatgtcccaatcgtatcggtctttaatggtcttgataggatttatacatgtaagtttggaggggaggctggagatgccagatggtatatctggtcaacctcgatgtagaggggctccaccacgtcgtggttaatcaactcgaagttctcatgtccgatccagtgctccacgtttctcttcctgcccgtgaagaaattgtccaccacggtcacctcgtggccgtccatcatgagtttgtcagttagatgggagcccacgaaccctgcgcctcctgttatcaaaattcttttccgatccttttctgataaaaactttactggtgggtatttctgggtaaagcttttttctaaatctctgattttctctcttagtggttcaaccatctcttcaatcttgctttcaatttttagttcaccattttcctggatagacctcatattaacgaagttgccccaaacagaggcgacgtaggccagcaaggcgatgcccagcagcagcttcatcctcctgcggttgacggcagacacgaggcgcagcagcgccttgctcaccatccccgggagccgcgcgggtccagggccctcccgcgcgggggcccgcctgctgcacaatgcgcggcggcgtcggcggcagcggccccgag

SEQ ID NO: 5144 - DNA, 531 bp, Homo Sapiens
  misc_feature (384)..(408): n is a, c, g, or t
agagcactcaccgcggtcccacgtgtgtgttttgaagcctaagatgtttgcaatgactctcaacagtcgctttgaccttttcccctagatctttagcagttaaggagtttttttcaaagcccaagtataaccacattttgaaaccagaagactgtctctctgaaccgtgcactatattgcagttggacatgagaaccgtgcaaatttctgatctagaggtgagaaaaagatgaattgctccttacattcgataatcagtgaccacgaaacactcagaccagagcctggcttatcaaaaaccttcagtgagtgctgggggtgtgagtgaataactaattattttattatgcaaataagtgaatttataaaacgtttgctactgannnnnnnnnnnnnnnnnnnnnnnnnacgttctattttgattctttcatattgtacaccattttatgtctccagcgtcttcattttagatttatgtttaatattctcagcatcttcaaaatcaaataaattatatttcgtttcaaaaaa

SEQ ID NO: 5145 - DNA, 431 bp, Homo Sapiens
tggtcagccaggctggtgatgctaacaattaggctgctaaagcttttctcctgagcatgccaggtaactttggctctgcactacctgtaacttaagcagtgattacttggtttgaattggtcctacggttacagcaataaatagtagagctgtctgcctgacttccaaaactgctcctctattctgtcatttccagtggcctgaagtagtatgggtagtagttaagaagagctcaggcactggggacagattgcctggatccagattctgtcctctccacctacaagctgtgtaacctgtataagtggcttaccttctctatgtcttgatcacctcatctgggatataatacttattgacttcatagggttgttatggtaatagtgctaagatcaatgcctaacacctaataaagactctattatgtagct

SEQ ID NO: 5146 - DNA, 136 bp, Homo Sapiens
cccccgccccatcaagcagtacagctcagaatatctggggagtttccatagagtgtggggggcatgaaggggtttctcgtggtctcctgtactccttttattttctctctttctctgcttttttaggtggaagaag

SEQ ID NO: 5147 - DNA, 550 bp, Homo Sapiens
tagaggatcccccttgtagagcttgtgcagtgtatgggttcaggcttctctgactacaataccaagaccttccggggatccacggtcttctgcatgggggatttctgcagaaggaaatataacactcgatggacaaatccccagctggaagaggtctctgtttattagtactgctttttgaatataaaatcaactctatcttttaggaagatagctaaatgttgctggaagttggaatgagagttttaattacgagctagacactgtatgagacatctttcctgtgctgcctcaggtcctcttgactgtaatcaactcaggagtcttggctcagtccctgtgaaaactgtcctcatgtggacaaatgccacagctcctagcctcatgtctgccaccctggggctccctgttgactctgaggggcaagactcccaggaccccatggatgctctagccatgtgcaaccaggagggtagggaggtggcactgctgggagatgggaattagtgaagttcttttgcttacccccctctgactgatcttcctatct

SEQ ID NO: 5148 - DNA, 339 bp, Homo Sapiens
ctggagatgtacagcgatgaggagtcaagcagactgctggggccagatgagcggctcctggaaaaggacgacagcgtgattgtggaagattcattgtctgagcccctgggctactgtgatgggagtgggccagagcctcactcccctgggggcatccggctgcccaatggcaagctcaagtgtgacgtctgcggcatggtctgtacttggacccaacgtgctcatggtgcacaagcgcagtcacactggtgaaaggcccttccattgcaaccagtgtgtgcctccttcacccagaagggaacctgtctgcgccacaatcagctgctactgcttggatcc

SEQ ID NO: 5149 - DNA, 933 bp, Homo Sapiens
tcaacacgtttccagactgacagtcgttacagggcccttctcttccgagatcacagggggatcaggaacacatcttgaaaaggtaggatccggcccaaatcctattttgcaggtacatcgatagctgcccatggtattcaaacactcaccattagggcatacaccttgtagctgacattcattaatatcttggcaaaaggtgttgttaacccgcttataacccggtaggcattccatcatttggttgtatccatgataagatggtttcttggggcatttctggcatttgttaaagccccaggaggtacccacagttccacagcagtcctcttgctttgaaaggccagggagcgctttgccacactgtgacccaatggtttcctggaagcaccggccaagctgtgtcttagcagccacggggtagacgtgaggaatgacctgctggtgggagtatgtggaatgtatggtctgggtcttctggacaggaagcccttggtacgagacttgggattggcctggttgagcttcttttgtcttctggcctgttgggccatcaattcttgaaacctgatgtatctggacggaagcttcaggaggatgtttcacatggatattgaatatgttaggaggaaatttcactttgactccttgctggctagtcacgatcagaggcaaggtatgtgttgaatggatgacatgcgaccccaacgccttgcctggctgctgggaatgctgataaagtttaggcacgctggcaccatggactgggatctgacaaagttttcctgtgaaatttggagggcactgacatttgtcccttgaactgcactggccaccatccatacatggaagatggcaattaccactcggaagttcgtgccgtctgggtgtcggcagcatgaccattctcactagtccagaatgcccctacac

SEQ ID NO: 5150 - DNA, 531 bp, Homo Sapiens
aagatacagcaggagggccaggtggcggggcggtatatctccagcgggcacatccagtgtcttagacctacagaaacctgttcttcatgtatcggagaaagtctgggtgcagcaacaggtacctgtccatgtgcagggcttcccgaaaagcttcctggggtctgtgcctgaaccagaaaaggttttttgacatcaccgtctgattcataagcagtgcttccagccactcatagtcccgggtgccttccaggaagtgcaagtagcggacgtccttcccaagaggcacgttcttgaaaccccgattgcccaatataaggagtgactgggtcagggagaaggcggtaaagccgtagaaggatgtccgagtccccacatcctgttcgtagcctttaatgagagctccgctcaatcggaacacgtagtcgtgactgtctatctcctggcccatgtgggagttgttcaggatgcccccgttgcccaccacggcacaggtgatgcaccggaggctcccagcggggaggctggccagga

SEQ ID NO: 5151 - DNA, 801 bp, Homo Sapiens
  misc_feature (598)..(659): n is a, c, g, or t
gcatccagctgtgggcctgccggtcaggtcgggcacctactacaaaccgtagtggggtggaggctgctggaggtgggagtgaggagatgagggcaggtctcaaacagtcctgactcacagggcctggaaacaagtcctatgtgggcctggggcctggggtcctcatcctccttgttggtctactcaggcccagcccagagctgtgttccctgtctcaggtcaagcagtggcagacgcaaggctttctgtgggcccccaagtggtaggagggagagtagcagagcatgggttactggaagccgggactgctagggctggtggccagggagctgcaagagtgaggctcagctctggctggttctgcccttacccctcctgcccgccggagaactgcacaccctgcccgctggccccaggacctgcactcccaatcctgctgtcttctccttccctgtgacctgaacaaggacctcactgcccgccttcccctcccaccagcccccttgggccaggcagggtgaggccaaatagctgcttggcccacaaatgggtgatggtcagatatgtgaatcaagctcctttctctagctagtgtttnnnnnnnnnnnnnnnnnnnnnnnnnnnnnnnnnnnnnnnnnnnnnnnnnnnnnnnnnnnnnnttaagaaaggaaaggatttgggctggggagcaaaagataatgtgaaactgttggtggactctctggtgaggggtgggcagaacttgctgctactagagttcttgggttctccatgatgttcaccctgggggcgggcagaggg

SEQ ID NO: 5152 - DNA, 240 bp, Homo Sapiens
gcaaaatacctcggtaaagccaacatcacaataaagcaggaagcgcattgttttagtttcccagtgcatctaagtcatgtttactgcatattgcagtccactaaatgtgcaatagcattatgtctaacaaatatacaaaccataatttaaaaatatttactgttcaaaatgctgacacagaaacgcaaagtgagcacatgctgttggaaaatggtgccaaatagacttgcctgatggcag

SEQ ID NO: 5153 - DNA, 192 bp, Homo Sapiens
acgcctgaagatcacgaatccaggatgatgtcaccaaggacagataaatcaaatgcctgtagatgaggggttgttgtagatgactccagagactagaccccagctcagccggcatttgttcaccccaagaatttctactacgagatctggagaggactcccatcaggctctgcaaagcctgtttcccagcag

SEQ ID NO: 5154 - DNA, 481 bp, Homo Sapiens
  misc_feature (135)..(179): n is a, c, g, or t
tgttacggtttagcctggcacagtggtgcatgcctgcagtcccaactactggagaggctgaggtgggaggactgcttgggcccaggagttcaaggtcagcctcggcaatataatgagactctgtctctaaaatcnnnnnnnnnnnnnnnnnnnnnnnnnnnnnnnnnnnnnnnnnnnnntcatgatagctcaggtttcagagaggatgctgcactactctgggaaaaaagtgaagtgacagctcagccctgacagcaggacctagaagggctgagatgaagaggctgacctgtagagctcagcctggacccacaggaggggtagttgagttcacagagggatactgccatttaagctggttgtgaatggggtggtatgaagaccgactgcactagtattctctccaggttacaaataccatgaccaaactgtgtaatgtgatactaatatgcagaataaagcatattaaaaaacaaacgta

SEQ ID NO: 5155 - DNA, 461 bp, Homo Sapiens
cgtccacccttccctcagctgagtggggagggcatccctgcaaaagggaacagaagaggccaagtccccccaagccacggcccggggttcaaggctagagctgctggggaggggctgcctgttttactcacccaccagcttccgcctcccccatcctgggcgcccctcctccagcttagctgtcagctgtccatcacctctcccccactttctcatttgtgcttttttctctcgtaatagaaaagtggggagccgctggggagccaccccattcatccccgtatttccccctctcataacttctccccatcccaggaggagttctcaggcctggggtggggccccgggtgggtgcgggggcgattcaacctgtgtgctgcgaaggacgagacttcctcttgaacagtgtgctgttgtaaacatatttgaaaactattaccaataaagttttgtttaaaaaa

SEQ ID NO: 5156 - DNA, 246 bp, Homo Sapiens
aaatacactctcttatttttctacttgtttttttgttaatcatagcaggatatgacaactcttatttgaattgattttttcatctaatgtaataatggaagccaaagtattcatatttcttaagatagccctaaatgtactcttgaacttcttactggaacaatgtttgatactctagtatgtaagctgtatttatgtaatatttagaacgacatgttaataaacaaagtaacattaaaacaggaa

SEQ ID NO: 5157 - DNA, 1165 bp, Homo Sapiens
cagatctgctcctcccctttcacaggtgggatcggcactcagggggtctggaaagaaggtcataagggagcatgataggatttggggcagagggacaggctcctctggggaaaccccccagagctctttaccaaggatgaaagaggagccaggccttgggctcctgatgaggagaaaggggccccaccggggtctaatggtgacagtccaaaccactccactggcctcctggcagaagccgagtgtgctggggtctccgaagagggtccctcctttttgggggaaggtcagcccagcccctccaaaggtctgatgtctccactttcacccgcaggccttaccgctctgtttatagtgacccaccctagatcttccccaagagggactggggtttctggggtccattctctgagtcagtggttatttgaaaatttgattttgattttattttttctctgtaaacttccaagctggcttttcccatttcaattcctgtgatttatgccaataaagtttgcccatgattttcaccctgtgctagtgctatttcttggtggtctgaacctcatggtcccagcagagaccaaacccaccccagatgcagctggatcaccagatggagggtaaattgtggatgtttcctttcttgaggtcaaaatccctggggctggggtccgtggtccttgcctgtggtcacaggtcctccccgtgggctttgctcctgcctgggcagttggtgaggacaggctggggagcagcgggatggggccctgtggggcagggcctgcccagggtgtgatcacctgggtttaccaagggcatcctcactcacgggcttgtgggtggctttccactcatttagaagtagggaaagaggctctaggacaagaacagttgaggatgggtctctactgcctcctcgtcgtcatgtccggatttgcgtgcttcctctttgctccggtcagatccagagctccagtcctaggccctctgattgtaaaggtgtccaggtcttgtgcttatgatgtgctcacatcagtgccggaaacgatgaagacaaagagacttttagtttgctgagctcgccaggtggcacagggaaccgggactccgaattcgcagctccagctccagctccagcccagcaggtggcagcagctcagag

SEQ ID NO: 5158 - DNA, 403 bp, Homo Sapiens
catttcttcatgtccattcagctctgaggccttcctggccctagctgagatcatcatctcctcctttgcttttaccccaggagtgaggttgggttagaggtggattctgattccgtagcagctaaattccattctccctgtcctgaccatcctgcctttacccataaagcacccgttcctactgaccaaatctctttactttgttggagaaaaaaagtattttgtttttaaatctattttctaatttaaatgcaatttaatatgtaaatctctgcacttttgtgtgagcctacaaatgtgtatgtgttgggggtttttcactctctggtatttcttaataaagaaatctttcttttggggggaagccaattaatgaaggagccttgaatggttttagaaaata

SEQ ID NO: 5159 - DNA, 277 bp, Homo Sapiens
aatagtagccatatgttattagtggagtactttatatttgacattaaagtgaagaagaagagtagtacttcacttttaggtttttagtagtgaaagataaaattggaaaaatagggaaagagcatagggaggaatagaatggaagtcaagtaaataaaaaactacaacctgacagttttttaaatcactttgaaaagtacattacttttatcaaagagtttctaattaaggcaaactatgcattatgccaaatattaagaacattttaaaaatgaaa

SEQ ID NO: 5160 - DNA, 469 bp, Homo Sapiens
  misc_feature (193)..(255): n is a, c, g, or t
  misc_feature (345)..(345): n is a, c, g, or t
  misc_feature (350)..(352): n is a, c, g, or t
  misc_feature (358)..(358): n is a, c, g, or t
ccgccgtaagtgtaggcgcctccgaccaagcagccaaggccgtattctccgtcctggaggcgcgaggcgggtaccatgcagccaccctggtccgggctgttgaggatctggtcgatgccgaagctaatgggctctgcgtgacccgggtggaggtggtgcggacccaggtgctccatgctggccctggccccannnnnnnnnnnnnnnnnnnnnnnnnnnnnnnnnnnnnnnnnnnnnnnnnnnnnnnnnnnnnnnaggcaacagcggctcctggctgcgcggagacttggaagcgaagtgcgcagaaaggctaaagtagaagggggaggggagggagagaggggngcccnnntttttnccctttttggctttttgtttccccgtttcggctgctcgctcgcttgtgacttctggacatcattcaccaggcgaaaaagcccggtgcaagagagccttgcggtttcgactg

SEQ ID NO: 5161 - DNA, 479 bp, Homo Sapiens
aagggaagacctgcagtgcacggtttcttccaggctgaggtacctggatcttgggttcttcactgcagggacccagacaagtggatctgcttgccagagtcctttttgcccctccctgccacctccccgtgtttccaagtcagctttcctgcaagaagaaatcctggttaaaaaagtcttttgtattgggtcaggagttgaatttggggtgggaggatggatgcaactgaagcagagtgtgggtgcccagatgtgcgctattagatgtttctctgataatgtccccaatcataccagggagactggcattgacgagaactcaggtggaggcttgagaaggccgaaagggcccctgacctgcctggcttccttagcttgcccctcagctttgcaaagagccaccctaggccccagctgaccgcatgggtgtgagccagcttgagaacactaactactcaataaaagcgaaggtggacatg

SEQ ID NO: 5162 - DNA, 395 bp, Homo Sapiens
ccggtgtacaatggtgtacgagcaggcaaggacgcgcttcgagagaggtgctgtccaatgtgcagcaggtgcagccggacatgcaggccgtcatccgagactgacatggtaccaaattatcacctccaaggtagcaccttgccagcaagatccgagccttcatcctccccaaggcagaggtgtgcgtgcggaaccatgtccagccctacatcccatccatcctggaggccctgactggtccccaccagccaggacttcactgaggtgcgagatgtcttcttcaaggaggtcactggacatgaacctgaacgtcatcaacgagggcggcattgacaagctgggcgagtacatggagaagctgtcccggctggcgtaccaccccctgaagatgcaga

SEQ ID NO: 5163 - DNA, 490 bp, Homo Sapiens
taaagaaagactacctttgagctgattataattctgaaagtttgcagagggctgctggttttgatagtaagacgaagaaggaggtggaggaggtggagggggtggtgccgtgctgttcagactttgttggttaaactgactgtatgttgctgaagattgtcctgagggtgtctgtgtaaataatgttccagaagttgcctgctgagtattggctggaaggttctgtgctgctggataaaagtttctttgaggctctcgctgaggtgttccaacttgaggtgactgtgaatgatgaggcctgtagggagatcctaactgctgtgaaggaggctttggtgaaagataaccatgctgtacaggtgtgtgaggcgtggatgactttggaggattttctaggtgaggtgatggaggacagtgccactttgttggcacagaaggcagcttttgtgaaattgctcagatgaattacgacgtgttctgaggttgatga

SEQ ID NO: 5164 - DNA, 451 bp, Homo Sapiens
agaggagccccccatacagcagtagcagccaacggcaaaggaccccgcgcgcttgctcgtgtttaatccaggttaagctatacacgtttaaatacatgtcggaggttacatggtctcatgcagtccctgtgatggaatgactcttgctcagtgacctcctgcagcgaggctgctccaaagggtcaaggttaggtagggcagagcacttttaaaaggtagtccgttagcaaagtgggcaccttctcattatcctccttcactggcaaagagaatgtttgtcagcatctgcaggtcgtccactgagggaggagaggctgtcgtctctgtaaggaattgactgtgtgcagatatctgttggtcagttctctgaggatgccaaaggtctggcggatgccactctgcagatacttttggagatcccttccatgctgatgcgcttgacgagtcattg

SEQ ID NO: 5165 - DNA, 329 bp, Homo Sapiens
cagagatgggagactttgggctggtgaccagatattagaggttaatggggttgacctgaggaactccagccacgaagaagccatcacagccctgaggcagaccccccagaaggtgcggctggtaggaaacaccgacaggtgctgtcgccaggaagtctgtatggggaacgattagtgggcggcagaacggaggacgtggagaggccggaggagactgtcgggcatgtgctcaggcaggtcagagtgagtctcaattggtactttgataatctcggctagtatatataagcattaataacatatatgatgcttgtcttttctgtctttac

SEQ ID NO: 5166 - DNA, 995 bp, Homo Sapiens
gagaactgccagtgcggtatggctcccggtatgtttgcctgggtcagattcaggatgtaggtctcatggtccaggaccacgtgagagctcccggagtagtttccatctatttggtacacacggtgacctgcaaggatgtggggctgactggaggggcaaggagcaagggtaactccagggaggggccacacatcctgcccatgctttgcaggctctggctccaacctccttcccctatcccaccaactccaggataagggaggctcccttctgactcactcaccaggattaaggccgatgtaggtagttgcactgggtgccaggaaggctacagccagcggccggctcagagtctcttcatcatagaagacctcaaattcatccacatgagtgtggccaaagaactgagcagccagggtgttctcatacctggctacaattcggtaataattccagctccagctcttcagacagtgccctgggggaatgtggccaattatatgcactttgtctcctcgatcctcagcagcctgaagctcccccaccagccactggagctgtcctgcgggatccgtggagttgatcaagagccagaagttctcacgggaacaaaattcatattgagagagatgaggcggagaccggggtatggggaaagagcatagaaccccccaattctgagggtgcgcagggcttcggcaggcagccagggctcccaagccttggccatcgcttcatagagccagcgggaggagtggttgccctcaatgaaggggggagggaagctattgacaggtgtgctttcatggttacccacagcagggtacactggcactggccccaggaacttcctcacaagtgctgtgacggtggtcagggcccgcagttggtcctgacgagtctggtgccagacatcatgtgcggggatgtctcctgcccagtacaccatatcaaaagggccggctgggcccagcccactcaacagctctccaggg

SEQ ID NO: 5167 - DNA, 993 bp, Homo Sapiens
acaacatcaggctaggtacgaggccccggtggttactcaggcacgagggtggtgcgtcgccagctctttcttgacgtgcttgatggaaccaaagcattactcctagttccagcctcagtgaactgccttcgccttggctccatgaagtgcactctgctgcttatcctcctccggcagtggaagagagagttaggttctgtggatgaaatccttggacccttgacggagatcctggagggagtgctgcaggccgaccagcaactcatggagaagaccaaggccaaggtgttctcagcattcatcacagtgttgcaaatgaaggagatgaaagtaagtgacatcccccagtactcccagctggtgctgaatgtctgtgagaccctccaagaggaagtgattgcactcttcgaccagacccgccacagtctggcattaggcagtgccacagaggacaaggacagcatggagactgacgactgttctcggtcccggcacagggaccagcgtgatggggtgtgtgtcctgggcctgcacctggccaaggagctgtgtgaggtagacgaggatggtgactcctggctgcaggtaacccgcaggctccccatcctacccaccctcctcaccactctagaggtgagccttcgcatgaaagcagaacctgcatttcactgaggccacattgcatctgctcctcaccctggctcgcactcagcagggagccacagcagtggctggagctggcatcaccagagcattggtttgcccttctgagtgtgaccagctgagcacaacggcacaagacagacacctagtgcctctcggaagtccctggatgccccactgggccaggagtctaccgctggacaaggcccggagaggagcagatgcccaaactcggggcacaagtactgccgaggccggacatcaggggtgacacaggacgaccaaaagagccaaagcaagaagaaagaaacaaggcacctgcggagggcc

SEQ ID NO: 5168 - DNA, 486 bp, Homo Sapiens
aatgacacagcacggatgtgggaaaggggatcccccacgggggcaggatggtccatctcaccggggtctcaccaggactccccgctcccacccagggccagcacgagcacctcccgttttctccccagtgcagagcgtggggtgacaggagtgggactggagcaggggacatttggtgggaggcatgtcctcaggcctgggagaccaggctggccccagcctccctgtgcggtcaggggcctgtggaaccctagaggatggagcaggtggacagtcaggggtgggcaaccctgccagctgggtactagggctattggggctggagggtctaccccactgtactctagccacaaggctgtggggtggctgctttgcccaccagctgtccccctgataggggatctgggctgcaatacttctgtatcctccctgttctctctctctctacttacacacacctgggattggtgtggtggacttcctgat

SEQ ID NO: 5169 - DNA, 280 bp, Homo Sapiens
acagggacccccttaccaggccagccatgttcctcacagctgacactggggaagaaatgtccccatcaatgtctgggatggagggacaggagaacagggcttagaaaggagaagggaggccaggaagcgggagaatgaacccctaacccttcctccgccgccctctgctgctggcctgtcactggtcgaggtggtccggggattcacgcccagtgctcctctgctcttcttgcctgtagtcatcctcctcctccctctctctggaaagttctcttagctg

SEQ ID NO: 5170 - DNA, 997 bp, Homo Sapiens
gccctcgaggatctctaggcgccccggacattctctcaacctcaggttgttatccccagatcagcatggtcttgcccaccaccttcctccttggccagccggctggccatcctgagagcaaagcacttcttcccgagcagcgagttcccgccgtacccactgccaaaggagatgatctctctgcggtcaggcaggtgggcgatgagcgtcagctccgggttgcagggccagttgttgaccaaaggcttttgtaaaggcagagggcaccccacagaatggaggcatttgacaactccccatcgcccagtgcttccaggacgggcgtgcccatccgcgtcatgatccgcatgctggccaccacgtagggcgaatccgtcagctcgatgccgatcttcgacagaggtgagcccagcggccccatgctgaatgggatgacgtacatggtgcgacctttcatgcaccctgggaacctggcattgaacgctttctcaaaatcctcctctgacatccagcgaccgagctggctgaggcctgttttggggatgggcactgtgtctctttgctcttgggtgacgataaccgtcttgctttcgatcctggccacatccctggggtcagtgagagccaaccagcagttgtcatacttcttcagccgcctgaggatgccctcttcctccatctggcccagaagccgcccattctcctcctcagagccgtcacagatgtggatgtgatcaggctgacacagctcagcgttattctcgagaaactccctcactgcctggggcaggctgtccaggcttccctggacaactttggccgagaggttcaggccgttttgcagctgaggaggcatttctgcagagtgctgctaaggggcacgaatgtgaggtcacctttcttctctttggatgatctcgaagggagatccacaggtttctttccgggctcttcccgccagcaagtttgtgttcccatcccaagattcggaccgtac

SEQ ID NO: 5171 - DNA, 553 bp, Homo Sapiens
gcgtccgcctccttggacaagccgctcatggaccattagacttgagaagacgacccacgtggtgactgcaaagccctgggtacttgccttcatgttctggtttggttttccctttttctgctgctcttggcagcagcctggtcatcatctgcttgtgggagtgggaaatgggtattttagacccaacacaggttctaaatttaaaacaaataataattggaacaaataaaggttcttgtacccagagtgattctacatgggaaaaacaaaccagcttttttcagagagtgaccgaataggaagaagggattcagaaatatgatgtagtagaacatgccctgcaggaagaaaatgttttctctcctgcgtatgttaagaggaaatcagtttaaaatgcctgctaatcaaatgtcgactcagctaaccatatgtccaggttgctgcagagtttctttcaaatctgagtgttgcctgctgaactcggaggggagtttggagaaattttagacagcagctctgtgttctttttttgccgcagccaataagataatag

SEQ ID NO: 5172 - DNA, 488 bp, Homo Sapiens
  misc_feature (445)..(445): n is a, c, g, or t
ggaccgcttgtgacctaaccgcagcgcctgtgtgcaacgtggtggggctcccggcagggctcggctctgcccaagaggcccgccctggggctgcgccgagccgctttgccaaggggtttccttctcactcagacgcatgatggccccaggtgtggccgcgggagccgagggatggacgggctggacctggctcgccgtaggagacgccccccacccctgggctggagtccagcaaggccgctgatcctgcatccccatgcaaggaggttcagagctcctgtcgtgtggtccccgaggatggctctccagagaagaggtgcccgggcggcgtcctctcctgcattcctgacaacaaccaacagcccaagggcatccctgcctgcgagcagaatgtctccagaaaggacacccggtcagaacaggacaagtgcaaccgggagcccancaagggccggggccgggccaccggagacgggcttgctgaccgg

SEQ ID NO: 5173 - DNA, 354 bp, Homo Sapiens
cacagcttcatctgtatttacagctgctccccagagcttgcattactgcctgagctctacctcccgtcaggtcagcagcagcattagagtctcatgggagtgcgaaccctgttgtgaactgcacatgcgagggatctaggttgtgcactccttatgagaatctaatgcctgatgaatctaatgcctcatgatctgaggttgaatagcttcgtgccgaaaccatcccccacccccatcctgctaccccgagtccgtgaaaaattgtcttccgtgaaaccggtccctggtaccagaaaggttggggaccactggcttaaaataccaataaatttttgaaccttaaaaacttaaaaa

SEQ ID NO: 5174 - DNA, 548 bp, Homo Sapiens
ttgaagctaaatgcagtgatatgagctctgaaaatacacctgggcctccctcttccatggacagagttaatacagctttgcaaagagctcaaatgaaggtttgcagtctgtctaatcaaaggatggggcgtagcctgctaaaatcaaaagatttgttaaaacaaaggtacttatttgcaaaagctggctatcctctaagaaggtctcagtctttaccaaccaccttattgagcccagtaagggttgtgtcctctgtcaatgttcgattatctccaggaaaagagaccagatgcagcccaccttccttcacctataagtacacacctgaagaggagcaggaattggaaaagcgggtgatggaacatgatggtcagtctttagttaaatcgaccattttcatctctccatcatctgtgaagaaagaagaagccccccagagtgaggcgccgcgggtggaggaatgccatcatggaaggactcctacctgttcacggcttgctccaccaccaatgtctcagtctacctgttcccttcattccatccactct

SEQ ID NO: 5175 - DNA, 590 bp, Homo Sapiens
  misc_feature (456)..(476): n is a, c, g, or t
gcggccgcccgccccgcgcagggaaaagcccgaccgggccttctgctccgcagaggccgggtggttgaactccgcgcgggtttcctaaccgctaaaggtgcctttcggtggtggctgtctcagaagcacgttaaaatgtcctacccaccccaatctagatgcggctgtgggggaatgggagcggccggacctcccagcctgacagtgcatcaagagctttgcggagcctacagcccggatgggacgactgaggccctcccgctggcgagctggccgagggctcgtccctctccagctaaagcgccagcttacgatacagccaaactgccggctctcatcggctgtgggagcaggaggcccccaggggtaaatcccggagcctcgtctctgaagcctggcgcttgtgtctcagaaggtgcgggacccacagggacacttgaatcagcaggctcacgnnnnnnnnnnnnnnnnnnnnngcctgtgtttgccctggacctccagctagggctgaccactaattctgtcatgtgaccccacagtgcaggtagctcccccaagaccaagcccaaggcgcgtccgtgtggaggctg

SEQ ID NO: 5176 - DNA, 464 bp, Homo Sapiens
gctgtctagaggatcccatgcgcgacgcttccatcaacagcactaataatctggaatctaatgatctataatctttctctccagtttctgtccatacgctcttggtctcctcccctagggcatatgaagaaccgaatgcatagtgagtccataaaacaaatggtgtgtagatattaatatcagggtgtcaacttgtttatgcttttacctgaaagctgaagtaatctgcaactggacattaacaatagataaattaccatcttttctttctcatttcttattttatgttattatgcattcttttaaattcccacatttactggaagtgtagaagcgctttaataatgagcttttcactgatgatcttattacataaactcaggaaggaaaaatacacataaatcttgggaggacagttcatgaagactcatcatgcagacttgttaacaagagttggaatttcc

SEQ ID NO: 5177 - DNA, 478 bp, Homo Sapiens
tctatataactttatgccacccttaaatgaatcattgggtatacctgtcatgttggatcctgtaatcacagttttccctgctcacctttttgtctaagatctattgagaaagggaaatatgggaaggagaaccatttgatcagaatacaaccaatagtctttaagcattgttaaagtatgaaactgaaatacattcaaaacacttaatccttgaggcttgtgatctgagtaattagcaggtatgatgctgggactggaaaatagaaagtaataactaaagggttaatgtgcaacgttattttttggccttgttcatgattttatgttttcagtgtcctgtgtacatatagaattgttaaagttgtcatttccaatatttatattagaaaaattatttagatactttataattttaaccggcatttttaataatgacacttgcatttattgtattgtaataaatttcacttttaacttt

SEQ ID NO: 5178 - DNA, 438 bp, Homo Sapiens
caggctgatgaccagtttccaaataatcagtgtatactacagtgcaacaaaattacaccaattccaatttatctttgctttgtgattcagaagtgcctcagggcattatattgactttttaattgtgtatggaagttaccattaatagtgttccagtgactgcttggaaacaaagagttcattgtattgatttatttatttttgctaatattctttatggtggtttttacagtgtcaatcacctagacaatctggagacttgttttcttttatatttgatttacttcattagtagtagcagtagttattagtatttgctttttgaccatgtttaaactgctataggagaaactctggtaaaacatactcaagtaataacattattccaaaaaataaagtgctgttagaattcaataaactgacgtttactaaaaaaaa

SEQ ID NO: 5179 - DNA, 593 bp, Homo Sapiens
  misc_feature (80)..(80): n is a, c, g, or t
atgcagctgctggtggccgtgggcaccgatgtcttccaggctcaccagaaggacacagagcgctatgtgctcaccaaccntcaacatcggggcagaactgcttcgggacccgtccctgggggctcagtttcgggtgcacctggtgaagatggtcattctgacagagcctgagggtgctccaaatatcacagccaacctcacctcgtccctgctgagcgtctgtgggtggagccagaccatcaaccctgaggacgacacggatcctggccatgctgacctggtcctctatatcactaggtttgacctggagttgcctgatggtaaccggcaggtgcggggcgtcacccagctgggcggtgcctgctccccaacctggagctgcctcattaccgaggacactggcttcgacctgggagtcaccattgcccatgagattgggcacagcttcggcctggagcacgacggcgcgcccggcagcggctgcggccccagcggacacgtgatggcttcggacggcgccgcgccccgcgccggcctcgcctggtccccctgcagccgccggcagctgctgagcctgctcaggtagcggccgc

SEQ ID NO: 5180 - DNA, 484 bp, Homo Sapiens
aggtcgggaacctgaagaagtgtttctgacaatcaccaaatcatccgaatgacatcaaaagcagcccttatctcagagaccgagatttctgtggtctcaacttcgctttggtataatttctggcactcaccagcctctatcattatgactttccccccagtgtattatttctctaataggtttccttttcacgttcttttagcacagactggcactttaccctctcaatttggaagttagcccctctcctctgttacttttcccttcacccaactacagctgtgatctagaacattcatagtcatatttctgctactactaccttcatttatcaagactttttatgagaataggtaaaccaagcaataacttcctaggactgaatcaccaccccagaagagcgagaggctcctttcatatgcctgaggccacaccccttaacctgttctgacaaaatagtggctggcccatgtaccagctccat

SEQ ID NO: 5181 - DNA, 638 bp, Homo Sapiens
actgtgctagctgggaaggatataaagatttttaaccatagttggcatattgtttgtgcttcctggatcctgccctcaaatagttcagacaaaaagaatgtaaacccagttatagaatgaggtaaaaatttaatcatcaatatatgtacaggattaagaagtactatagaggtgatttattctgtcagggtcagcttaacaaagaagttgtcatctgacttgatgtataaaaaatgggtcattgattagggatagaaaatgggatgaggaaggaaaaatggggagtgattccttaatggttacagagtgttgggcgataacatcacgtatgttatccccaacactgcctacctcagagcataaatgcatacattctagagaagatgaagacttaagtgaaaatttagcccaagatgaaacatctaggctggaccttggatttgaggagtgggatgtagctggcctgccttggtggtttttaggaaacttgagaagcaactatacacctagaagtaatggctcaactgatttacagacaaatcaggatgtgggtactgccattgtttcagatactacagatgacttgtggtttttgaatgagtcagtatcagagcagttaggtgttgggcgataacata

SEQ ID NO: 5182 - DNA, 683 bp, Homo Sapiens
  misc_feature (633)..(633): n is a, c, g, or t
  misc_feature (658)..(658): n is a, c, g, or t
ccagcttctgaccatcctggtggtggtggctgaggacctgggtgtgtacacctgcagcgtgagcaatgcgctggggacagtgaccaccacgggcgtcctccggaaggcagagcgcccctcatcttcgccatgcccggatataggggaggtgtacgcggatggggtgctgctggtctggaagcccgtggaatcctacggccctgtgacctacattgtgcagtgcagcctagaaggcggcagctggaccacactggcctccgacatctttgactgctgctacctgaccagcaagctctcccggggtggcacctacaccttccgcacggcatgtgtcagcaaggcaggaatgggtccctacagcagcccctcggagcaagtcctcctgggagggcccagccacctggcctctgaggaggagagccaggggcggtcagcccaacccctgcccagcacaaagaccttcgcattccagacacagatccagaggggccgcttcagcgtggtgcggcaatgctgggagaaggccagcgggcgggcgctggccgccaagatcatcccctaccaccccaaggacaagacagcagtgctgcgcgaatacgaggccctcagaggcctgcgccacccgcacctggnccagctgcacgcagcctacctcagnccccgcacctggtgctctcttggag

SEQ ID NO: 5183 - DNA, 335 bp, Homo Sapiens
gaggtgccagccttcctgaagggccagaaaatttagcctggatctcctcttttacctgctaggactggaaagagccagaagtggggtggcctgaagccctctctctgcttgaggtattgcccctgtgtggaattgagtgctcatgggttggcctcatatcagcctgggagttatttttgatatgtagaatgccagatcttccagattaggctaaatgtaatgaaaacctcttaggattatctgtggagcatcagtttgggaagaattattgaattatcttgcaagaaaaaagtatgtctcactttttgttaatgttgctgcctcattgacctggg

SEQ ID NO: 5184 - DNA, 795 bp, Homo Sapiens
  misc_feature (167)..(188): n is a, c, g, or t
gagatacagtcacagtcccataagccccgtgccacaggccactggccaaccagcatccagctcatcccatctacagccaatgcagcggccctcaactctgccatcctctgctgctggttaccagttaagagtgggtcagtttggccaacactatcagtcttctgctnnnnnnnnnnnnnnnnnnnnnntcccttcaccacagcgttttagccagtctggacagagctatgatggcagttacaatgtgaatgctggatctcagtatgaaggacacaatgtgggttctaatgcacaggcttatggaacacaatccaattacagctatcagcctcaatctatgaagaattttgaacaggcaaagatgccacaagggacccaacaggggcagcagcagcagcaaccgcagcaacaacaacacccttctcagcatgtgatgcagtatactaacgctgccaccaagctgcccctgcaaagccaagtggggcagtacaaccaacctgaggttcctgtgaggtcccccatgcagtttcaccagaacttcagccccatttctaacccttctccagctgcctctgtggttcagtctccaagctgtagttctaccccatctcctctcatgcagactggggagaatctccagtgtgggcaaggcagtgtgcctatgggttccagaaacagaattttacagttaatgcctcaactcagtccaaccccatcaatgatgcccagtcctaattctcatgcttgcagcttcgaagggtttggactagaaggggtaccagaaaagcgactgac

SEQ ID NO: 5185 - DNA, 403 bp, Homo Sapiens
aaaaaaggcaagagttctccaattgcacaaatcgcactatttgtgttcccagcgattaacaggcagaaacagtagacacttaatacaaaatgtgctagcagatagatatttcttttactcaaaggacctgaattcagtgggcatgtccttttaagttcactttgtcgtagatagtttaagatatggtcatttctcagtccttaattctccaagtctagatttataaattaacaatgtgaatcctgttgtgaaattggggaaataatgtccacctcgattttaatgtataacccaagatgcttttcacatcaaagagatgatctatcagcctgtgtaacattactaagcctaaaaaaagattcacaagaatgcacacacgactgaataatgtaccactaccgta

SEQ ID NO: 5186 - DNA, 289 bp, Homo Sapiens
aataacattaatcattaatgtctgaacttgggtgttggggataacatcacgtgatgttatcgcccaacacagaggaaagggtttggctgctttcttgaaggctattgggtatcttattcctcttatggatgcagaatatgccaactactatactagagaagtgatgttaatccttattcgagaattccagtctcctgatgaggaaatgaaaaaaattgtgctgaaggtggtaaaacagtgttggggatagtgtaggggataacatcactatgttatccccaacactgtc

SEQ ID NO: 5187 - DNA, 787 bp, Homo Sapiens
  misc_feature (544)..(577): n is a, c, g, or t
  misc_feature (610)..(682): n is a, c, g, or t
accttgcaagctccagagctcccaggtccagtggcctgctgaaaaatcttcccttgtttggcttaaatatgtcatggctgtacatgaaacgtaacccttgacttcccctcctgtcaactcccctgagccttgttcctctgagtaagaggcagcacccaggagctctgaacagtaggacacatccttgactcttctctcttttcacatcatcagaagttctacaggagctacctctgcctggttcactcccactcaggtttcaggttttaattagagcatcagtccccacaccagggaagcctccactaacctctcagactcgtttgggaaccccctccatcatcatatgctctcagatccacacacccttctgtactgcactgaacactatcagcaccggtcctttatgtttatgtccagactccactaaatagtgggaatggtagggcctttctctaccatcccacccagctcctaaaacactgctcaggttcatatctagatttcgaaatacacaaccttctgttaacatccactaacactnnnnnnnnnnnnnnnnnnnnnnnnnnnnnnnnnntacaagaacgtaactctgtctcaaaaatgaaannnnnnnnnnnnnnnnnnnnnnnnnnnnnnnnnnnnnnnnnnnnnnnnnnnnnnnnnnnnnnnnnnnnnnnnnaggtaatagtagatgggcttcaataggtaggcaggggccagatcacatgggatcttgtcgccatgtatagacaggtactggactttgcgcaagcacagttttcat

SEQ ID NO: 5188 - DNA, 750 bp, Homo Sapiens
gataaagtgatgaagtactgactgagtacagtattaatctttgcctgatcgttatatgggaatgtatatgcttcttgactgacaatagaatgttgtattagttttcattgtgtctttatttgcagttcacagcacttttgttttccatatgctacaaactaaaagtttagcaattacgttatattccaattctggagcccagactgtacaaattagatgaaattctaattcgccattttaggaagaaatcaattacctaaaattactggctcttgccaacataccctttagtatgtaaaaaaataagcttcaaatgcgtgggttaaagttaactatcaatcccagtttaagaatgatatttctgtaagaaaactgctttattttccaagttgtagtatttaacataggctgagtcacaaataagattataattgtatcttaatgcagttgtctctgccttacaagtcactttgatagaaacatactaagcagaacaaatatagccaataatttaaaataatcatcccccaaaccatttctcaaacctgctaaaactttgagcatgtgaataattttctcctcttcacattcttcttatgtgggaaggaagtgaatttgaaatattaaaatctgccctttggaataggctactttggccgtttataacttgatttctactcggggaggaaggtacattccccatagctttcccaattgggatatcctgtgatatgattgcagcttgtgaca

SEQ ID NO: 5189 - DNA, 356 bp, Homo Sapiens
ggacttgtcacagctgccaggagtggtattgatcaatgtgaggctctgggtattgcttcctttcaatttgtctcagagctagttgtagtgagtcattctgtcttatatgatcgtgtatcgtgaaccatcagtaatagtgttgtcaggctagccaaaaagggtttagaggtcttgcgggctggggaggttgcaggagcgactacatgtgcactacatgtgcgtctcgttgacttgagcaatcttgagcaatagcggtgttttgtaactttttcctaagactggtgaagttaagttttcttgtctctctttatgcactccttccctacctgctattattcatatacagaataagagca

SEQ ID NO: 5190 - DNA, 617 bp, Homo Sapiens
ggagtgaacccgggagaaatatcgctattcgcgacttccactatgtcttatctataggagcagtgttgccattatagggggcttgttcactgattccccctattctccgggtacacactcaaaccaagcatgagcaaaattcactttgtaattatattcgtaggagtaaatataacattctttccacaacactttctaggactatccggaatacctcgacgatactccgattatcctgacgcatacacagcatgaaatactatttcctcaataggctcattcatctcactaacagcagtgatattaataatcttcattatctgagaagcatttgcatcaaaacgagaagtatctgcagtagaactgacaagcacaaacctagaatgactacacggatgtcctcctccctatcacacatttgaagaaccaacatatatcaacctaaaataagcataagaaaggaaggaatcgaaccctctcccactggtttcaagccaacgtcataaccactatgtctttctcgataatcgaggtattagtaaaatattacattactttgtcgaagttatattataggtgaaaagcctatatgcctctattggttaccctttccaact

SEQ ID NO: 5191 - DNA, 673 bp, Homo Sapiens
ccacgcgtccggatgacgctcagcctgcagattccggtgaaaagaagaagagtttttccacctttggaaaggactccccaaacgatgaggacactggggataccagcacatcatctctgctctcggaaatgagcagtgtgttccagcgtctcttaccgccttccctggacacctattctgaatgcagtgaggtggatcggtccaactccctggagcgcaggaagggacccttgccagccaaaactgtgggttacccacagggggtagcggcatgggcagccagtacgcattttcaaaatcccaccaccaactgtgggccgccacttggaactcactccagtgtgcagccttcttcaaaatggctgccagccatggaggagatccctgaaaattatgaggaagatgattttgacaatgtgctcaaccacctcaatgatgggaaacacgaactcatggatgccagtgaactggtggcagagattaacaaactgcttcaagatgtccgccagagctaggagattttagcgaagcatttttgtttccatgtatatggaaatagggaacaacaacaacaacaaaaaaccctgaaagaactggcattgccaaatagttgcatttatcataaatgtgtctgtgtatattgaatattaaatactgtattttcgtatgtaca

SEQ ID NO: 5192 - DNA, 481 bp, Homo Sapiens
tagaagtggtttgtagacttcctttataatatttcagtggaatagatgtctcaaaaatccttatgcatgaaatgaatgtctgagatacgtctgtgacttatctaccattgaaggaaagctatatctatttgagagcagatgccattttgtacatgtatgaaattggttttccagaggcctgttttggggctttcccaggagaaagatgaaactgaaagcacatgaataatttcacttaataatttttacctaatctccacttttttcataggttactacctatacaatgtatgtaatttgtttcccctagcttactgataaacctaatattcaatgaacttccatttgtattcaaatttgtgtcataccagaaagctctacatttgcagatgttcaaatattgtaaaactttggtgcattgttatttaatagctgtgatcagtgattttcaaacctcaaatatagtatattatcagattaa

SEQ ID NO: 5193 - DNA, 781 bp, Homo Sapiens
  misc_feature (35)..(35): n is a, c, g, or t
  misc_feature (216)..(216): n is a, c, g, or t
  misc_feature (429)..(439): n is a, c, g, or t
cacagttcagatccctttccagattgcaacctggncctggcatcccagctccttcctgctcgtgtcttaacctaagtgctttcttgtttgaaacgcctacaaacctccatgtggtagctcctttggcaaatgtcctgctgtggcgttttatgtgttgcttggagtctgtggggtcgtactccctcccctcccgtccccagggcagatttgattgantgtttgctgaagttttgtctcttggtccacagtatttggaaaggtcactgaaaatgggtctttcagtcttggcatttcatttaggatctccatgagaaatgggcttcttgagccctgaaaatgtatattgtgtgtctcatctgtgaactgctttctgctatatagaactagctcaaaagactgtacatatttacaagaaactttatattcgtnnnnnnnnnnngaggaaattgaattggtttctacttttttattgtaaaaggtgcatttttcaacacttacttttggtttcaatggtggtagttgtggacagccatcttcactggagggtggggagctccgtgtgaccaccaagatgccagcaggatataccgtaacacgaaattgctgtcaaaagcttattagcatcaatcaagattctaggtctccaaaagtacaggctttttcttcattaccttttttattcagaacgaggaagagaacacaaggaatgattcaagatccaccttgagaggaatgaactttgttgttgaacaattagtgaaataaagcaatgatctaaact

SEQ ID NO: 5194 - DNA, 636 bp, Homo Sapiens
  misc_feature (13)..(13): n is a, c, g, or t
  misc_feature (88)..(88): n is a, c, g, or t
gcaagtgaaagancgaaggcagagagaagaaagaaggcagagtaccctacaagaagttttagaaagggaacgaagagaactagaaaanctgtatcaggaaaggaagatgattgaagaatccctgaagattaaaataaaaaaggaattagaaatggaaaatgaattagaaatgagtaatcaagaaataaaagacaaatctgctcacagtgaaaatcctttagagaaatacatgaaaatcatccagcaggagcaagaccaggagtcggcagataagagctcaaaaaagatggtccaagaaggctccctagtggacacgctgcaatctagtgacaaagtcgaaagtttaacaggcttttctcatgaagaactagacgactcttggtaaccatgtttgctgcccagcttctaacttacataccgtgagaagttacgtaacatttactcctttgtaaatgtttccctatcatcagacaaaactcaataaaaatgtgtgtaatccaatgtgggttttttttccataattaattttgataccatagtgtgtgaaccaagaataatctagtcacgtgaaacctcttctccagtcatagtatttctcattcattataataaaagtaactggcttttaacctcctt

SEQ ID NO: 5195 - DNA, 610 bp, Homo Sapiens
  misc_feature (116)..(116): n is a, c, g, or t
  misc_feature (121)..(121): n is a, c, g, or t
actcggccaccttccccccaagtacttggccccaccagcccccaccttactcgcccaccttcccccaaaggctcaacctacttctcccacttcccctggttactcgcccaccagcnccacntacagtctcacaagcccggctatcagcccggatgacagtgacaaggagaactgagggcacgtggggtgcggcagcgggctagggcccagggcagcttgcccgtgctgccgtgcagttcttgcctccctcacggggcgtcacccccagcccagctccgttgtacataaatgccttgtggcagagctcccggtgaacttctggatcccgtttctgatgcagactcttgtcttgttctccacttgtgctgttagaactcactggcccagtggtgttctcactcctaccccacccaccccctgcctgtccccaaattgaagatccttccttgcctgtggcttgatgcggggcgggtaaagggtattttaacttaggggtagttcctgctgtgagtggttacagctgatcctcgggaagaacaaagctaaagctgccttttgtctgttattttatttttttgaagtttaaataaagtttactaattttgaccaa

SEQ ID NO: 5196 - DNA, 892 bp, Homo Sapiens
  misc_feature (786)..(805): n is a, c, g, or t
  misc_feature (807)..(811): n is a, c, g, or t
ggggccctacaactgcaccctgagccggagctgcccagtcgccgcgggaccggggccgctggggtctggacgggggtcgccatgatccgctttatcctcatccagaaccgggcaggcaagacgcgcctggccaagtggtacatgcagtttgatgatgatgagaaacagaagctgatcgaggaggtgcatgccgtggtcaccgtccgagacgccaaacacaccaactttgtggagttccggaactttaagatcatttaccgccgctatgctggcctctacttctgcatctgtgtggatgtcaatgacaacaacctggcttacctggaggccattcacaacttcgtggaggtcttaaacgaatatttccacaatgtctgtgaactggacctggtgttcaacttctacaaggtttacacggtcgtggacgagatgttcctggctggcgaaatccgagagaccagccagacgaaggtgctgaaacagctgctgatgctacagtccctggagtgagggcaggcgagccccaccccggccccggcccctcctggactcgcctgctcgcttccccttcccaggcccgtggccaacccagcagtccttccctcagctgcctaggaggaagggacccagctgggtctgggccacaagggaggagactgcaccccactgcctctgggccctggctgtgggcagaggccaccgtgtgtgtcccgagtaaccgtgccgttgtcgtgtgatgccataagcgtctgtgcgtggagtccccaataaacctgtggtcctggnnnnnnnnnnnnnnnnnnnnannnnntccttggtcggccgcctcggcccttgaaaagctttccaagacctttcgttttgcccgcgggccccattggggaatgaacca

SEQ ID NO: 5197 - DNA, 594 bp, Homo Sapiens
  misc_feature (272)..(423): n is a, c, g, or t
cgatctagaggatcccgtgatgtatccccaacacctgaaaacaggatgaaagcctgtgtactgcaattccttttacccagtgtatcatgtctacctatcaacagaaaattacaaagcatacttaaaaggcagaaaatgcagttgaagagactgaacaagcattagaaccagagtcagtcgtggcaggagtgttgggcgataacgtatttatccccaacacagaaaagataatattgctaataaaatttaaaaagtgttgggcgacctcccannnnnnnnnnnnnnnnnnnnnnnnnnnnnnnnnnnnnnnnnnnnnnnnnnnnnnnnnnnnnnnnnnnnnnnnnnnnnnnnnnnnnnnnnnnnnnnnnnnnnnnnnnnnnnnnnnnnnnnnnnnnnnnnnnnnnnnnnnnnnnnnnnnnnnnncaaagatagtattgttactttggggggccaaggcagaaggattgctcgggcccaggggttcgaaaccacctggttaacatagggacaccctgtatctaccaaaaacaaaacatactaaaacaaaccccacaacagaaaagatatattgctaataaatttaaaagtgttggg

SEQ ID NO: 5198 - DNA, 582 bp, Homo Sapiens
  misc_feature (521)..(531): n is a, c, g, or t
tgttatgctggtgtttgaaacatgatactcctgtggtgcagatgagaagctataacagtgaatatgtggtttctcttacgtcatccaccttgacatgatgggtcagaaacaaatggaaatccagagcaagtcctccagggttgcaccaggtttacctaaagcttgttgccttttcttgtgctgtttatgcgtgtagagcactcaagaaagttctgaaactgctttgtatctgctttgtactgttggtgccttcttggtattgtaccccaaaattctgcatagattatttagtataatggtaagttaaaaaatgttaaaggaagattttattaagaatctgaatgtttattcattatattgttacaatttaacattaacatttatttgtggtatttgtgatttggttaatctgtataaaaattgtaagtagaaaggtttatatttcatcttaattcttttgatgttgtaaacgtactttttaaaagatggattatttgaatgtttatggcacctgacttgtnnnnnnnnnnnctacaaacaaatcctctagaatcattaaattgtgtccctgtattaccaaaa

SEQ ID NO: 5199 - DNA, 884 bp, Homo Sapiens
gcacgagtcggagtttgagccgagtgagcaggaagactccagctctgcagagaggggcctgggccccagccccgcaggggacgggccctcaggctccggcaagcatcatcgccaggccccaggcctcctgtgggacgccagtcaccagcaggagcagccaaccagcagcagccatcatggaggcgctggggctgtggagatccggagtcgccacagctcctaccccgcggggacggaggacgacgaagggatgggggaggagcccagcccctttcggggccgctcgcgctcggcgccccccaacctctgggcagcacagcgctatggccgcgagctccggaggatgagtgacgagtttgtggactcctttaagaagggacttcctcgcccgaagagcgcgggcacagcaacgcagatgcggcaaagctccagctggacgcgagtcttccagtcctggtgggatcggaacttgggcaggggaagctccgccccctcccagtgaccttcgctccacatcccgaaactccacccgttcccactgccctgggcagccatcttgaatatgggcggaagtacttccctcaggcctatgcaaaaagaggatccgtgctgtctcctttggagggagggctgacccagattcccttccggtgcgtgtgaagccacggaaggcttggtcccatcggaagttttgggttttccgcccacagccgccggaagtggctccgtggccccgccctcaggctccgggctttcccccaggcgcctgcgctaagtcgcgagccaggtttaaccgttgcgtcaccgggacccgagcccccgcgatgccctgggggccgtgctcactaccaaatgttaataaagcccgcgtctgtgccgccaaa

SEQ ID NO: 5200 - DNA, 550 bp, Homo Sapiens
gcgataacatcagtatgttatcgcccaacacaataaacccaaagcttcagggttaacggaagacatgatgcagagcaagcctctgtgattcctgcccagcacctgtgaggcctgacgtgtcagtccccaataaatgctcttctgatatgtttcccgtacaggcaaggaggcttgggtagtgcagatttgtgtatttcaatctttgaaagctctgatgtaatttagaaatgaaatccaatcatgagtccaggtagagaacgcctgctgtaatctacactgttgctgggactgcgcattctgtatataaccgtgttgggtgttgggctatcgcccaacaccttaaaccccccgagcacacaaagcagtgagaagtagttatcttcctggttctttctagttgcctaataacatagttggcttgctctggtctcaagtcaatttggaaacagagagagaatcaagagaatcaaatcaggggacgaagcaaaacaaaagtgaatagcaaacaataagcacatgaaaaatgtgcacaatagcctggggaatacgt

SEQ ID NO: 5201 - DNA, 477 bp, Homo Sapiens
tcgattgatggctgacagccctgtgactgcaactgtaggctccctggaggccctccaggaacaaaagaattagctttgaaagcaagttattttcaaatgtattagattggtctcatgggagtggaacaaataataatacagtggttttgctactaccactggttagaaatatataagtagtccatggatatgtgattacaaaagaatcctatgtatgtatctagagtgagatgggaaagtgtcccgcttaccctccttctacctccaccacttcctggcccagaggtaatcactgctaacaggttacagcatgaatatgtagtctgtttttcataactctatagaaatatatgtacatatttatattttagaaacaggattatgttatgtgtgtgttattctgtgtcttgcttttgttcacttaatgtgttttggatatctttccatgtcagtttataaagttttatttttaatggc

SEQ ID NO: 5202 - DNA, 548 bp, Homo Sapiens
ggctgcacaaaggatgcaacataacaaaaatttagaacaatgtacagcagccagtatagaatccctaagataactataatatttttaaataaattatgcttcatatttttattgtttcatggcatttccattcacgaatcaccttttttcctaaataagtgtatctataattttatgagtcgtttgtccaaatatgtagaacagggctttgggagaaaacaaatacactcacaatttttctcaattgccaacagactagtttatttgtttctcttgtaatacgaacatgctattctcttagtttttatcttcaataacatatgaaagatccaaaatcaaattggctgtctctacagcaacctgtaggccactaagctttgcagtcaaacagtccaaggtcaggttgctggctgagaccacagcttcatgtggaaggcagctttgtggcacaaatggacgacgtgtgcttcttaagaaagaccagttgagttcttcctggctattgtataatccacagccacactgtgaaagcaaatctggccagttag

SEQ ID NO: 5203 - DNA, 1323 bp, Homo Sapiens
cctggggtcagagccaggttcagctgcgaggctgctggtggctgtggagagcttggggcttccttggtcgcacccaccacctgcctgcccactggtcagccttcagggaccctgagcaccgcctggtctctttcctgtggccagcccagaactgaagcgctgcggcatggcgcgcgcctgcctccaggccgtcaagtacctcatgttcgccttcaacctgctcttctggctgggaggctgtggcgtgctgggtgtcggcatctggctggccgccacacaggggagcttcgccacgctgtcctcttccttcccgtccctgtcggctgccaacctgctcatcatcaccggcgcctttgtcatggccatcggcttcgtgggctgcctgggtgccatcaaggagaacaagtgcctcctgctcactttcttcctgctgctgctgctggtgttcctgctggaggccaccatcgccatcctcttcttcgcctacacggacaagattgacaggtatgcccagcaagacctgaagaaaggcttgcacctgtacggcacgcagggcaacgtgggcctcaccaacgcctggagcatcatccagaccgacttccgctgctgtggcgtctccaactacactgactggttcgaggtgtacaacgccacgcgggtacctgactcctgctgcttggagttcagtgagagctgtgggctgcacgcccccggcacctggtggaaggcgccgtgctacgagacggtgaaggtgtggcttcaggagaacctgctggctgtgggcatctttgggctgtgcacggcgctggtgcagatcctgggcctgaccttcgccatgaccatgtactgccaagtggtcaaggcagacacctactgcgcgtaggccgcccaccgcccgcttctctgccaaaaggacgcccacggggagatggccgcacccacagctgcctttcccaccaccagcctcggtgctctgccccatgctgggaggagggagggagggacaggtgcctggagcccccggaaccctgtttctggaaggccctagctcaggtggcttcagggcctccggaccccccctgggaggggtggccacgtgctggctgcggaacccagggcaggggtgggaggggcctccagcactttttatatttacgtattctccaaagcagtgttcacacgggagccagcctgtgcccccagcctcctggaaaacaggttggcgctggaggagccgggtcttggcatcctggaggtggccccactggtcctggtgctccaggcggggccgtggacccctcacctacattccatagtgggccc

SEQ ID NO: 5204 - DNA, 164 bp, Homo Sapiens
ggcgataacatcacttatcgcccaacactccccactgccgcagacagttcagctggtattgctcaccaaggccaatgtcaaagagaatttggtattcttttgtgttcattgattattcaaccagtgttgtgttcctgtgttgggatacatccggaccgcgtgag

SEQ ID NO: 5205 - DNA, 828 bp, Homo Sapiens
aggctatggttgactataaacagtgtaaaaaaagcggctggtacgctccggattcccgggatatcgtcgacccacgcgtcggaagagataaaagcaaacaggtctgggaggcagttctgttgccactctctctcctgtcaatgatggatctcagaaataccccagccaaatctctggacaagttcattgaagactatctcttgccagacacgtgtttccgcatgcaaatcaaccatgccattgacatcatctgtgggttcctgaaggaaaggtgcttccgaggtagctcctaccctgtgtgtgtgtccaaggtggtaaagggtggctcctcaggcaagggcaccaccctcagaggccgatctgacgctgacctggttgtcttcctcagtcctctcaccacttttcaggatcagttaaatcgccggggagagttcatccaggaaattaggagacagctggaagcctgtcaaagagagagagcattttccgtgaagttttgaggtccaggctccacgctggggcaaccccgtgcgctcagcttcgtactgagttcgctccagctccggggaagggggtggagttcgatgtgctgcctgcctttgatgccctggggtcagttggactggcagctataaacctaacccccaaatctatgtcaagctcatcgaggagtgcaccgacctgcagaaaagagggcgagttctccacctgcttcaccagaactacagagagacttcctgaagcagcgccccaacaagctcaagagcctcatccgcctagtcaagcactggtaccaaacattgtcacgaagaacgttgggaagctgca

SEQ ID NO: 5206 - DNA, 774 bp, Homo Sapiens
gtaacagggcagtcctgaatcaaataaaccatttgtatgttggatttgaatgggtgaactaattacaggctaaaataatgccttttttagtgtttttaatttttagaattcactacataaatgtaagtaatgtgggtctcaaaaacactaggaacttttaagtgtcttagcacttcctcgatgtgcctgccctcaggaagtgagttcacatttgagacaactgcactccagtgtggacgtgcctttgtcttcaggccacgccgaagggtgtttaaagcagtcttgcaggtcgctcctttcccagccgtggataaaaactgaagccaggaatctaataaggaaggctgatttcctcagttccattagaggaatggggaaggctattctaaagaaaaaaatgggattgttttctcggcagatctgcaaggctggctttaagagcacaaggagggaaagtaacgaaagggctggactactataaaagttacaaatacgtagttagaccaatagatttatatagtcaggttttgtcatgtaatttattaactaactattacagaaacacagctaagaatatcaagtatttctctggctcttgacagaaaaaaatcagttgacttaaccctttgctgtcaaaagagtggcgtttcctgttctgggtgctactgccaaaacgttatggtacttagagtcgggatgcacaattcaaccaccgacttatcaatgcagccgctgtgtatgcaatggccgttaccttaagcactgagccacccg

SEQ ID NO: 5207 - DNA, 481 bp, Homo Sapiens
  misc_feature (304)..(312): n is a, c, g, or t
ggtgatgttatcgcccaacacagagaataaataagctggtaacatttcaggaaaaaaagaaaaaggcatgaaccctgaccctctgttatttgtccgtttatcatcaaatattttagcatgcctggcatatagtaggcactcacaataaatgttaaactattaagtatctgtaactggcagttacatatgactgattcaaaatgagaaaattaattaccattctttgtattcacagatacttatttatgagtgacgtgcagttagttatacaatcagcctgggcgacagggcgactctgtctccnnnnnnnnngtcatccacttgtgaatgaatgtacacaacgcttattaataagtgtaatattaaaatatatcttttctgaaagtctttcagtgacaatacagagttagttacagatttaatgttaccgaattcatgtacattgaaaatttcggacattttatactggtggtgttgggat

SEQ ID NO: 5208 - DNA, 209 bp, Homo Sapiens
catgggcagcctgatgtctctgcctttgacttcacgagcatgatgcgggcagagagttctgctcagtgtgcaagagaagcatggcgcccgcctgctgctgggactggtgggggactgcctggtggagcccttctggccactgggcactggagtgcacggggcttcctggcatcctttgtgcagaacgggatactcaagaatcagctatg

SEQ ID NO: 5209 - DNA, 170 bp, Homo Sapiens
taaacttcgataaaagaagtctgcacatgggcttgctgaacttattatctgttcatttccacaagatgatatctgcaaaggtatatttttcagaggactgtgtgccgcttcttctttctcacatcttattgccttaaagcaaaactttcccttctccctactgcaagttt

SEQ ID NO: 5210 - DNA, 108 bp, Homo Sapiens
ttccataatatgacaatattcaaatctacctcactgcatttttgaatcaatctcacagcatcctctgttgactgtttttctgtatgcacaggcaagtgagcttgtggt

SEQ ID NO: 5211 - DNA, 301 bp, Homo Sapiens
agtgagacctgaaagagattatatgaggaaatgtggagtccagcttcatttgtgtgctgtctcaaacattttagctcagagtctgaaatacttttggtcaaattaggactgattttaattgtcttattatacaatttcacagcctcatcatccagcataaaatatatcaaaaatgacttaattccgtcatatccatgacaattccaaactgtttttaataactttataattgcctccaatattttaaaatttattaggaacactgttcatgtttaaacaatcgggatcctttgtgcagcac

SEQ ID NO: 5212 - DNA, 311 bp, Homo Sapiens
agcacccatgccacagaacacgtgccacactgactttcatgtaacgccacatgtcaaggggtcacactgccacatataaccgtacgtgtcatgcattgtcatgacaccctcattgtgtgtcgcatgtccccaattgatcacacatatcccacgtaatgcagggtactcctttgtccagacccagctcctggttcccaaaaaagttctccctgaggactgcagcaggacacacgtatccttcctcctgggtggagtgcagagcgccctccgaggctcttctttcctgagtcatttatcccagtgggcgaaag

SEQ ID NO: 5213 - DNA, 557 bp, Homo Sapiens
  misc_feature (84)..(110): n is a, c, g, or t
tttataaaaaatttattgagatgatgtaattataggcttttctttaaaaattatttgcaactcactggccctgagaaaaggcannnnnnnnnnnnnnnnnnnnnnnnnnngttacattcatttgattcagtcccttataaaccccacacctcataaacaagagattagaaactaaacaaaaaggggggcggggaaggaaattctagagtcgttctggtttgcaggtggttgcggtcacaaagagaaatcatcaagaatgttcacttggcatgtgtgaaagattcagggggtctgcagctgtttagtgttgatgcagttgggtcaaaagagtatcaggttagtcttctgtgggttttagggagggattatggtgcctccctcccaccccactggcttccttgtgtcacagcctttatttctactccgaagaggagcaggagagagtgaacagcctctaactagcaccaaatgcttgggcaaagaaaactgcccctttttcttggtgtgttttcccaaatcttttatcttcagtttcctgggtgggaatgagccacaca

SEQ ID NO: 5214 - DNA, 560 bp, Homo Sapiens
gaggcttcagaggtgaatttatgcttgggaagcctgatcccaaacctgaagggaagggacttggatctccttatattgaataagctgtttggaggaaggtgtctgtctgggaggatggggcagtaaatgaggttggcagagtggcagtgggggctctgcagagccagccttggagcctgctcattctgggcccttgctgccaaggagcccagcctcacctagcaggaaaggagatgaaggccctcctcccaggaggtagggtcttggctgccccgaacttaaatgcttttgaaatctcttagatgtggaaatattttttcgaacctgaaaatgcagctggtagaatttcaatggaagcataatccatgtaaaatatattttagttgatattttgtaaaatgcactttttgtgtgtgttgatcctggtttcccagatctgtatttcagtgtttacaagggaggaaggacctttcctcacctcccttttgacagagattagaagtacttctttaagaaaaaaataaatttgagaaattgtattgatttagaaaaggatcgtt

SEQ ID NO: 5215 - DNA, 454 bp, Homo Sapiens
tgattccttaatctatagatgagtcagctccacacttgagtctctttttagagggaaatcagtaataaagctgtaaaataaggaaggaatcattgtcagtttgtgtcttgatctggtggtggttgggataagggtacacatcattttatacaaacactaaagctttttgctaacaacatagcaggtcaaaattcacacataagaaagtttaactctgtactgttcacactttttaatcctgtaaataatgctgcattttgatggttcttacttttttggtatttaatgtgggctgattttacaatgttatattcacttccagatgcatacctctgctgctttctctcctataaatagtgatgctataaacttcctttcacagagatcattctatttcaaatcactttaatgattattacaatgatttcattcaaataaaaattttaaaatatta

SEQ ID NO: 5216 - DNA, 527 bp, Homo Sapiens
gatagggtttctgacagcatgacccacacccacttttccagacctcatctccacatgaagccagcttcttagtctacctttacagaccaggtgctgtctcctggccttgattcaatgatagattgtcatttttcatcctgtctactgtggtttgaatgtatgggtccctcctagattcatgatatggtttggctctgtgtccccacccaaatctcatgttgaattgtaatccccagtgttggaggtggggcctgctgggaggtgattggatcatgggggtggtttctaatggtttagcaccatcctgctagtgctttctcgtgatagagttctcacaatatctggttgtttaaaaagtgtgtatcaccgtccccttcactgtctctctcctgctggccatgtgaaatgtgcctgcttctcctttaccttctgtcatgattgtaagtttcctgaggcctccccagaagaagacgcctgtacagcctgcagaagcatgagctgattaaacctctttttttttttcaaat

SEQ ID NO: 5217 - DNA, 421 bp, Homo Sapiens
ttcttcaatcccgtctccttcccaagctcccggctttttctaatcaggcaggcgtctgtcaaccctctccacttctgggctgaagcctccccaagccccgctgcgccaacctgtgtggggtcttcttcgggcctccctctccgccccgctcctgctcctacctgcagcacccccagctccgactccagactctctgcatcaggtctccccactccacgctccgggcgccccaactccaacaccacgtcctgccgcgcaggttcttccccgcgcggaggagcgcgcagggtgggcggcttaccatagcaagtgatcctgcgatagggaacgcgcccttgccccgaggctgcactaccacaggaaataacatatgtaaataaatttatttttttatgaataataaaacgcgctgtaaaaaccg

SEQ ID NO: 5218 - DNA, 530 bp, Homo Sapiens
  misc_feature (126)..(126): n is a, c, g, or t
  misc_feature (494)..(494): n is a, c, g, or t
  misc_feature (512)..(512): n is a, c, g, or t
caagggagccgtgtactggacagacgtgagcgaggaggccatcaagcagacctacctgaaccagacgggggccgccgtgcagaacgtggtcatctccggcctggtctctcccgacggcctcgcctngcgactgggtgggcaagaagctgtactggacggactcagagaccaaccgcatcgaggtggccaacctcaatggcacatcccggaaggtgctcttctggcaggaccttgaccagccgagggccatcgccttggaccccgctcacgggtacatgtactggacagactggggtgagacgccccggattgagcgggcagggatggatggcagcacccggaagatcattgtggactcggacatttactggcccaatggactgaccatcgacctggaggagcagaagctctactgggctgacgccaagctcagcttcatccaccgtgccaacctggacggctcgttccggcagaaggtggtgaagggcagcctnacgcaccccttcaccctnacactctccggggacact

SEQ ID NO: 5219 - DNA, 602 bp, Homo Sapiens
tcagaccggcagcatcttccgacttggaaaaacagaccatggcacctacacccccagcacccagaagtgacgcccacagagaaaggcctgcgcctccctgaggagatcctatctcagcgggatgctgcctctgcccgcaccctccagctgcgggctgagaaacccccaacccctgccctccccaacccggggcagctgtcccggatccaggacctggtagcaaggaaactggaggagactcaggagcttctggcagaggttcagggactgggagatgggaagcgaaaggccaaggacccccctcggtctccgccggattctgagtcagagcagctgctgctggagacggaacggctgctgggagaggcatcatcgaattggagccaggcaaagagggtgctgcaggaggtcagggagctgagagacctgtacagacagatggacctgcagaccccggactcccacctcagacagaccaccccgcacagtcagtaccggaagagcctgatgtgagggcagggtggggtctggaacttgtcgggttggacagactcttatctccgtgttgctggataaagcttttttatttacctcaatcgaaa

SEQ ID NO: 5220 - DNA, 893 bp, Homo Sapiens
  misc_feature (740)..(741): n is a, c, g, or t
gctggaccggtccggattcccgggatctgaacatggcggcggtggtagctgctacggcgctgaagggccggggggcgagaaatgcccgcgtcctccgggggattctcgcaggagccacagctaacaaggcttctcataacaggacccgggccctgcaaagccacagctccccagagggcaaggaggaacctgaacccctatccccggagctggaatacattcccagaaagaggggcaagaaccccatgaaagctgtgggactggcctgggccatcggcttcccttgtggtatcctcctcttcatcctcaccaagcgggaagtggacaaggaccgtgtgaagcagatgaaggctcggcagaacatgcggttgtccaacacgggcgagtatgagagccagaggttcagggcttcctcccagagtgccccgtcccctgatgttgggtctggggtgcagacctgaggagcgctgcgaccctcctaggctattgactgttaagtcctcaggtttggcccagattccagttcgtgcctctgaggtccaccagagggcgcatgaagcccaggctgttgccaaaccctaccctgccccacaccaaggagccagccaaaggcaaataaagttattgagtgtttagtagaaaggaaaaaaatacattcccaatatcccccgttacatactcccgcccatactccacgctatcaccgcgtgggaccccatatcccatccagcgttattttnngtcttgtggggcgcgccccgggcccctggaaagactttttcaaaaaccattctgtgtgggggcccggggccccccggagggaaaggaacccgggggccattacgggtttcccaaggagaaccccgggccctgaccaaagggggtgggattcc

SEQ ID NO: 5221 - DNA, 402 bp, Homo Sapiens
gggacaggcgcgcccgcgccgcccgctccagctgggctagtgctgcacattccggccagcccctcctcaagaccccattcccaagccccttctcagctccctcgggccggcagagcggctctgatcagtaaaatgctgttgaaggcccacgggcatgactgcacccctcactaattggtcattggtttggggaggacaccactgtcccagtggaaccttgagcacaccttggagccctcctcttcctctccggacctgtgccaaactgtgagtggcacagagcaaggactgtatgtgttctcttctttgttgcatactcagttccttgaccaccagtgccaagcacacagcgagcactccctgtgtatctgctgagtaaataaacgaatgaacaaacccaaa

SEQ ID NO: 5222 - DNA, 498 bp, Homo Sapiens
ctccgccctgctcagccagggctttgagcctcttcggttttccggccagacccggaaaaacgaaaacacagcttggggagcccccactagccggcgcctgtgccagctcacctctggccatggcgcagctgccggtgcacacgtgcggccaaggccagctccacattcttccctccccctcccacttcaccgtagccccgaaccctgcgcgcagagaaagggtctcagctccacagacgactgggtccctcctcaccaaaaatggtgagacaagatttcatctgtcggccgaggagccacaagcaggtttgtctgagagggatggtgctgggggaaggctttggattgcatctcaaattaagctttgctccttaaatgtggcgctctcgccaagaaaaagcttggggcctgaattcttgagatttatggtgcaccttattgatcaaatttatctggactttttttagttccccgatgtgtccctatcattaaaaaaaa

SEQ ID NO: 5223 - DNA, 724 bp, Homo Sapiens
ataagtacccagcacatccaccagaagtctttctcctgccccgagccaggcctgtgggaagtctttcaactttaagaaacactgaagggagcacatgaagctgcacagtgacacccggatctacatctgtgagttctgcgcccggtctttccgcactagcagcaaccttgtcatccacagacgtatccacactggagaaaaacccctgcagtgtgagatatgcgggtttacctgcccccagaagggcttccctgaactggcaccagcgcaagcatgcagagacggtggctgccttgcgcttcccctgtgaattctgcggcaagcgctttgagaagccagacagtgttgcagcccaccgtagcaaaagtcacccagccctgcttctagcccctcaagagtcacccagtggtcccctagagccctgtcccagcatctctgcccctgggcctctgggatccagcgaggggtccaggccctctgcatctcctcaggctccaaccctgcttcctcagcaatgagctctcctccagctttggctttgggaagccagactccagggactgaaaaggagcaacaaggagagggtctgcttgagaaatgccagatgcttggtccccaggaactaaggcgacagagtgcagggtgggggcaagactgggctgtaggggagctggactactttagtcttcctaaaggacaaaataaacagtattttttgccgggc

SEQ ID NO: 5224 - DNA, 559 bp, Homo Sapiens
tttttttacggaaacagactgtttaatagtgggagggaaaacccaacatgaaatataaaacaagtaatcatgcgccttgtgagttttggtttctgttgtttctttctgggtgtatgtgttttgatggcaacgtcggtctgaacagcctgctccagcatttctcggggaagaagctgaggatgcggttggtcccagggatcgaaaggcctgctgacacgccctcagcttcgccagccaccaaaaccctggacagacgagttatttgacccaaagctgaaccctcctgtgcctgatccaaaaccagagaatccgctactctgggtcccaaaaccagaagtctgttgggacagtgatccgaaagtgggggcattctgactcgcgagcgtgccgaaggatgtggtgttgctgctgctcccaaacccgaatcctcctgcgctggcagctgcagtgccctctccgaacactttgcctcccgtcgagcccagagggcttgtaaaggctggggctgaaccgaatgctggcacccctccaaacccaggggatcccccaaaagtaggag

SEQ ID NO: 5225 - DNA, 401 bp, Homo Sapiens
gggtgaggggaccctactctgttatcccaagtgctcttattctggtgagaagaaccttacttccataatttgggaaggaatggaagatggacaccaccggacaccaccagacactaggatgggatggatggttttttgggggatgggctaggggaaataaggcttgctgtttgttctcctggggcgctccctccaacttttgcagattcttgcaacctcctcctgagccgggattgtccaattactaaaatgtaaataactcacgtatagtggggaggggagttccaagtgtgccctcctctcttactcctgcctggattatttaaaaagccatgtgtggaaacccactatttaataaaagtaatagaatctgcaaagttggacggagcgagaattcgtgg

SEQ ID NO: 5226 - DNA, 672 bp, Homo Sapiens
atcaagaggaaaactatagccagggaaagaattgacaatctcatagacccaggatcgccatttctggaataatcccagatatgcaggttaccagttatatgacaatgaggaggtgccaggaggtggcattataacaggcattggaagagtatcaggagtagaatgcatgattattgccaatgatgccaccgtcaaaggaggtgcctactacccagtgactgtgaaaaaacaattacgggcccaagaaattgccatgcaaaacaggctcccctgcatctacttagttgattcgggaggagcatacttacctcgacaagcagatgtgtttccagatcgagaccacttgggccgtacattctataatcaggcaattatgtcttctaaaaatattgcacagatcgcagtggtcatgggctcctgcaccgcaggaggagcctatgtgcctgccatggctgatgaaaacatcattgtacgcaagcagggtaccattttcttggcaaggaccccccttggttaaagcggcaactggggaagaagtatctgctgaggatcttggaggtgctgatcttcattgcagaaagtctggagtaagtgaccactgggctttggatggtcatcatagccttcacttaactaggaaggttgtgaggaatctacattatcagaagaaat

SEQ ID NO: 5227 - DNA, 726 bp, Homo Sapiens
tacgcgagcttccatcaagttcatggatgtacaggtgatgaagaggaagaaatcaaacaagaaataacatggtgaagaaatattctcatcacccgaagtatagcgacatactatggtgcatttatcaaaaagaacccaccaggcatggatgaccaactttggttggtgatggagtattgtggtgctggctctgtcaccgacctgatcaagaacacaaaaggtaacacgttgaaagaggagtggattgcatacatcggcagggaaatcttacgggggctgagtcacctgcaccagcataaagtgattcatcgagatattaaagggcaaaatgtcttgctgactgaaaatgcagaagttaaactagtggactttggagtcagtgctcagcttgatcgaacagtgggcaggaggaatactttcattggaactccctactggatggcaccagaagttattgcctgtgatgaaaacccagatgccacatatgatttcaagagtgacttgtggtctttgggtatcaccgccattgaaatggcagaaggtgctccccctctctgtgacatgcaccccatgagagctctcttcctcatcccccggaatccagcgcctcggctgaagtctaagaagtggtcaaaaaattccagtcatttattgagagctgcttggtaaagaatcacagccagcgaccagtaacagacattgatgaagctcgtgctggaccgctca

SEQ ID NO: 5228 - DNA, 673 bp, Homo Sapiens
  misc_feature (36)..(36): n is a, c, g, or t
  misc_feature (111)..(111): n is a, c, g, or t
  misc_feature (308)..(345): n is a, c, g, or t
ggtcaaaatcagctttatcccttggtaattatatcntgttttgtttcttgactcctgtccattcagagaaataaacctctaagtttcttggcccctgaattaagccaaaancccttagaagaaatcccttaaatacctctgcttagaaattttttcatgcacactgtggaatgtatgctaattgaacatgcaattggggaagaaaaaatgtagaatgatttttgctatttctagtagaaagaaaatgtctgttttccaaagataatgttatacatcctattttgtaatttttttgaaaaaagttcaannnnnnnnnnnnnnnnnnnnnnnnnnnnnnnnnnnnnnaggtcatgatttctgtgaagcaaaaagatgccttttaccatgaattcttgagtttacatcaataatattgtatattaaggggatcagaagtaggaaggaaaaaataagagatagcagaggaaaaagaaaaacatttcctcttataacttctgaagtaatttgtaaaaaagatttgtagagtcaatcatgtgtttaaattattttatcacaaacttaacatggaagatattcctttttaactttgtggtaacttctttgaagttatttagaaatatcctttggaacaattattttattgtctaataaatattgacttctcttgaaaaaa

SEQ ID NO: 5229 - DNA, 562 bp, Homo Sapiens
catcttttagcaacccaccaggtgattctcaaaaagtctaaagtttgagaaccactggtagagataactgagaaaatggagaaggcagacagggaaagaacaaagccaaataaaggaatggaagggaaataacttctgttatgatagggtggctgaggaaaagaaggatgcggtacatactaaggtactactttctttttctttaaatctctatgtaacaaaagttaagggcactagagaagcttaataacctaattctagtaaagttagaacattggaaagatacctacctcaaacttcacatcattatttgaaaatactcaagatgtactcccctcagagcaacagtacgagcaacatcccctatcagatgacagcatcaacaccaaattataaatgttctagcctcattcctgggtctactttgtatctcctaacctcattttttcattttactttctcatctacctgttatcctattatatttcatatgtaaccataaaccaccttattgcctttttgtaaaaaggtttacttggaatcaatcactggtaccactgat

SEQ ID NO: 5230 - DNA, 392 bp, Homo Sapiens
  misc_feature (14)..(14): n is a, c, g, or t
  misc_feature (189)..(251): n is a, c, g, or t
gtgctgcacaaagngatgcctcctgaaattgctgattcaatttctcctaataaaataggaacaataattagctaataagaaatcaacaaattaaagctatgagagaattaagtgagatcatgtaagcaaagtacatgtcacagtgctctgcaaataggcagtgctcagaagtgtcaccttttctctttnnnnnnnnnnnnnnnnnnnnnnnnnnnnnnnnnnnnnnnnnnnnnnnnnnnnnnnnnnnnnnngttaagcaatgtgaaagtactctataaagtataaggctgaaatgtactgggctcagaacatataggtctgttccattttcgacacacgtgatattagcagcacggtacatttaaggacacgggttgattctttaatcacag

SEQ ID NO: 5231 - DNA, 725 bp, Homo Sapiens
ggggtgatctagcaggatcttacgggagccttaaccctcggaggagtactggcgaagacgagaagaagaggagcgtggagaatggaaatgagacgctatgaagaggacatgtactggaggagaatggaggaagaacaacatcatggggatgatcgccgccgaatgccagatggaggttatcctcatggtcctccaggcccattaggccttctgggagtccgaccaggcatgcctcctcagcctcaggggcctgcacccttacgtcgtcctgactcatctgatgaccgttatgtaatgacaaaacatgccaccatttatccaactgaagaggagttacaggcagttcagaaaattgtttctattactgaacgtgctttaaaactcgtttcagacagtttgtctgaacatgagaagaacaagaacaaagagggagatgataagaaagagggaggtaaagacagagctttgaaaggagttttgcgagtgggagtattggcaaaaggattacttctccgaggagatagaaatgtcaaccttgttttgctgtgctcagagaaaccttcaaagacattattaagccgtattgcagaaaacctacccaaacagcttgctgttataagccctgagaagtatgacataaaatgtgctgtatctgaagcggcaatcattttgaattcatgtgtggaacccaaaatgcaagtcactatcacactgacatctccaat

SEQ ID NO: 5232 - DNA, 333 bp, Homo Sapiens
  misc_feature (46)..(47): n is a, c, g, or t
  misc_feature (71)..(71): n is a, c, g, or t
  misc_feature (109)..(110): n is a, c, g, or t
  misc_feature (113)..(113): n is a, c, g, or t
  misc_feature (139)..(140): n is a, c, g, or t
  misc_feature (147)..(147): n is a, c, g, or t
  misc_feature (175)..(175): n is a, c, g, or t
  misc_feature (200)..(200): n is a, c, g, or t
  misc_feature (212)..(212): n is a, c, g, or t
gagctccggtaccccgtgctgccaccaaagggatgcctgcttgaannccacgggtgatcacaatcatgaantggtgtgatctgtgacaccctgtagcacacttttgcanntcnagggctcccattagccccctccttannggtgctngaatctccccactgttcccaaatagagntgttacaccaccttgggcctgaatntggtctttcttntgaattcttgcttcaaaaagaaagtgttgggtttttctttagggggacaatgacgtggactttattttttctaacacaagtcttcagaaactctgtgcatcctttgtgcagacggggatcc

SEQ ID NO: 5233 - DNA, 715 bp, Homo Sapiens
aaattctacttatccaatggaagaatacaagcagtaagatgttcagcaggtattactggtacaaatgtagtaaagaagtgtcagggaggcagctgttacaccaaaagatgcacattcaataaagtaacaggactctatgaaaaaggatgtgagtttgttctccaatcccgccagacggagaaggcttctataatgtttgcacaacatgttgattctatagttgaattctgtacagaacaaaaccacaacaaagaagctccaaacaagcaaaatcaaaaatgcaatctccgaagcacatgggaagtgatccgtgattctgaggactttaagaaaaccactcctatgacaacacagccaccaaatcccaccttctcattgctgcagattggacaaagaattgtgtgtttagtccttgacaaatctggaagcatggcgactggtaaccgcctcaatcgactgaatcaagcaggccagcttttcctgctgcagacagttgagctggggtcctgggttgggatggtgacaattgacagtgctgccaatgtacaaaatgaactcatacagataaacagtggcagtgacagggacacactcgccaaaagattacctgcagccgcttcaggagggacgtccatctgcagcgggcttcgatcggcatatactgtgataaggaagaaatatccaaagttaggtcactcggcgtgagcagggtacc

SEQ ID NO: 5234 - DNA, 393 bp, Homo Sapiens
cgtagcaagctcggtaccccaccactcctatagatcagtcatcacaaacatcaagatgtgaagtagatgctattagaattgttaaagaacaagcatcaagcatacgctactcaccccctactcccctgaaaggcaccaccttacttcacagaggtcttttgagtggctgagagtaagtgtaccgatctaaaggtcagcagacactaagttctggctttaccatttaataactgattagccacatgatcataaaaaaatctctctctcaaactcactttcttgaaccagaaaatgggagtaacgctctacctgcttcaatcttgttacataaattaaaaacttttgtcaacggcggtctgttcactgatctataggagtggtgggggatcctct

SEQ ID NO: 5235 - DNA, 466 bp, Homo Sapiens
caccactcctatagatcagtgacagataaagacagcattacgaggctctacaaatgaggttcactgtctcagtgacctcctaaggccagaaacaggacgagagacaaatacaagtcacaaaaatgtttgtttcacaggctgagctcccatgcgtgaaaaggatcctgcagttctttctaagcctttactgcaaaccacagcacaattcaaagtgttgcagaactttgagaaatacaagcatttctagaaagcaacactggaacaagcatgcctgtaagagcagggtgcctcctgccaaacatttgacaaacccagcttgctcactgttggcaaaaggcgccctgcccagcactacctgcccattcgtggccagatggtcaagaaacccgttttccccattctccaattgttacacaagaccatgtgaaaacattactgatctataggagtggtgggggatcctcta

SEQ ID NO: 5236 - DNA, 527 bp, Homo Sapiens
gaggatcccccaccactcctatagatcagtaaatcggaatttatcggtgggacttaagtatccattttataaaatgtttctgagtgattccaatgtgtagctatattttccgtcagatttctctaatttcttgtgatgttcactcctttctattttggcattatgattatttttcaggttttgtctcctgttatagaattaaggaccttgccttcttcatttctgtatctgttatgaacatatgaattggttatcaggaaaaggttctcagtcacaggcacagttgtgtcctgagcttaagactcacaggttaatgctacagtctttgttcttcatgaggtcagaagttgcttgtgattaagggtgtgggtaactccacagtgcagacagtggaaggaggtcaccctgtttgacatgtttttaggtgtaacaccggaactaagaattctgtgtacatgtggggtggagaggcagggatgtgtagggaaactgatctataggagtggtggggttccgagctcgatcgc

SEQ ID NO: 5237 - DNA, 565 bp, Homo Sapiens
  misc_feature (399)..(399): n is a, c, g, or t
  misc_feature (408)..(408): n is a, c, g, or t
  misc_feature (500)..(500): n is a, c, g, or t
cgtgcgaaggataggaagtcggacatttgtctgtcagagaaaaggcatcattgtccgctccattaagaacagtgacacacctgctacttccccttcacagacacaggagaaagccgcctccgctggaggcccggtgtggttccgcctcggcgaggcgcgagacaggcgctgctgctcacgtggagacgctctcgaagcagagttgacggacactgctcccaaaaggtcattactcagaataaatgtatttatttcagtccgagccttcctttccaatttatagaccaaaaaattaacatccaagagaaaagttattgtcagataccgctcctttctccaactttccctctttctctgccatcacacttgggccttcaatgcagcgtggtgtggccaccngtccgtgtnccctctcggccttcctcccgagtccaggtggactctgtggatgtgtggatgtggcccgagcaggctcaggcggccccactcacccacagatnccgccggccacttcgggtgtgagcgctcaataaaaacaacacactataaagtgtttttaaatcca

SEQ ID NO: 5238 - DNA, 682 bp, Homo Sapiens
tcccccgatgctgattcgacaaagatatatcatcagcaaagactggcatcgtcacgcacaaccttacaatatggcttccaagggataccttgcagacaaaatttttctttggttttcaaacaggagacatggtcaaggctggtgttccaaaaggaaaatataaaggcgtgtggtttggcgaagtggcatgcagaaaaagcggaagttttgacatcaaaggaaaagatggaaagcgaattggcacaaggcattcactacaaatatattcgtctcattcaacgattggatgggtacacgtatcgaaaggagggaatgaaacttcaattcctcccctatctttaggcaggggcttccttgcgcgagtttcgtgacataggtgagtaaaaaatcttatttattgcttgcgattgtatttttcatacagatactatataagttgcaataaagaatttccgatttttcgtttttgtttttatctccataaagccgactatgatataacgtggcgagtgatcggctggatgtaaaacaaaatttcaacttatatagttcacggaatacctgtgttttccaacaaagaagacttttcaattaaaaaagtagtgctatttgtgttatcttttgtggcattttccgtttcctttttgatgtatatgaacacgcgccgatacttcctatctca

SEQ ID NO: 5239 - DNA, 390 bp, Homo Sapiens
  misc_feature (60)..(92): n is a, c, g, or t
agctttaaaaaggagggaggaagccatttttaaaaggactccctacatgacctgccaccnnnnnnnnnnnnnnnnnnnnnnnnnnnnnnnnncaatacaggagcttaccttgaacctttgaattgggccaaattgcgatgaccactgcatcctggaaaattgtatttcaccagcactacaactcctcaacagcaccaaccaataaactatggatttttgtactaagccagttgcctctttcaaaacaacttgtcaacttgtctaatcaccctcagctttttttaaaaacccctcctctaccctctctcttcagaacacaagtggcttctagctgaatctgtctcccaattgcaattcctaagacctcaataaaaacacctgtcgagcatg

SEQ ID NO: 5240 - DNA, 887 bp, Homo Sapiens
  misc_feature (762)..(762): n is a, c, g, or t
  misc_feature (815)..(825): n is a, c, g, or t
gctctccgggcctttctctggcttccttggcttgcctggtgggggaaggggaggaggggaagaaggaaagggaagagtcttccaaggccagaaggagggggacaaccccccaagaccatccctgaagacgagcatccccctcctctccctgttagaaatgttagtgccccgcactgtgccccaagttctaggccccccagaaagctgtcagagccggccgccttctcccctctcccagggatgctctttgtaaatatcggatgggtgtgggagtgaggggttacctccctcgccccaaggttccagaggccctaggcgggatgggctcgctgaacctcgaggaactccaggacgaggaggacatgggacttgcgtggacagtcagggttcacttgggctctctctagctccccaattctgcctgcctcctccctcccagctgcactttaaccctagaaggtggggacctggggggagggacagggcaggcgggcccatgaagaaagcccctcgttgcccagcactgtctgcgtctgctcttctgtgcccagggtggctgccagcccactgcctcctgcctggggtggcctggccctcctggctgttgcgacgcgggcttctggagcttgtcaccattggacagtctccctgatggaccctcagtcttctcatgaataaattccttcaacgcccaaaaacacacccggctttcatatcaccccatatgtggaaagcttttccacaagcgcgtagccactattntccttgtggggcggcctcggcccttgaaaagcttttccaaaactttttgtttnnnnnnnnnnnccccggaggtttatggaacctggggcatacccgtgttcccaaaggagacccggggacttgaa

SEQ ID NO: 5241 - DNA, 1550 bp, Homo Sapiens
  misc_feature (1428)..(1428): n is a, c, g, or t
  misc_feature (1461)..(1461): n is a, c, g, or t
  misc_feature (1465)..(1465): n is a, c, g, or t
gcggccgccgcagtcaagggcgacttgtggttggagtgagcaggctcctggcttccagggcagcaaaaacccccaagcactttctagaaggaatgtgtttcattctgactgtaaacacatttgtaaatgctgagaccaaaccccgacttatggatcctgagccacggccgtcactggccccgctaagcctcatcaccacacggccaggccagaccagcacccgcggacgccagctccacccctgggccccgaggttcccacccgctgaggagccgggagctccgagaaacgcgccaggagctccaagaacgcaggagcagcccgcggtcggcagcaagtttgcatttctaagtgaccacatctaataaaatgaaaaacgggtttactaaaacaggtccaaagacaacacggaagataagctacaaatccagcacacaaggcccacccacaccagccccagcggcccgtggccaggacagggctgaggctccagtctcctccaaagcccagtcacacattttggtttttgcttcccctttcaggtttttaaaagctaaacctaggagcctggtgggtctgcctgtgctgggcagtgtgtccagcctgccgaggtcacgctctggtgcgcggtgccctcagtggcgccttgggtctcggcgcctgggcctcactcctgcgcgatgctcctcagcacgtacttgaccgtgtaagcaaaggctgcaaacccaactatcacaaacaagttcgccagggcgccacccaggagtccgtggtgccggttggcctgctggagccctgcgaggtttgggacggcccccggcgcattgccccgttgagcaagctgaatccccttctggaccaggtgcgtcttccccggtctggaaccacggtctggcaaggggagagtctggggtctgctactgagttcgtcttgtgctttctgtttttgtttaatctcctccacgacttcaggaaataattcacaaaagactttatctttcaaattaaatgctaaactctgcactgccagttgtcttttcgtgaagtccgacgtctctatactgcccagggtggggcccttctccaccatgaagctcaggagcccagtcaggatggtggagacagaccaggccgggttccacgtgtccgggtggaaatccgtgatagaaagacacagcctggtgttgcacttaaacctcccgttgggagtgatcatatagatactgggaggtttgaaaggaaattctctgggaaaaattagttttccatgataatagccaccttcataaggggtcatctctgggcctcggacgacatagtgccactcgagaatattcgaagggaggggctcggcacagatgtaaggcaccgggtctttcttaatgcgaaggtagtcctgcttcagcctctgggttgccgtggtcggancccctcttactgctggtgctgctcatctctccnctgntctgcgcgtgggccgccgccgcgctcaggctcgccgtagtcgaggccggagcagggtgcggaaaagcggggcccgcgcccgaaac

SEQ ID NO: 5242 - DNA, 720 bp, Homo Sapiens
  misc_feature (145)..(153): n is a, c, g, or t
aatttccaccaaaattaactacagggtctctgaagtgtatataaaatgttttagtgcaacatcttacaaatagttttcctttaaaaaaacagaaacaaatcaacagctctctacatcatgcatgggtagttttcttaccccatcnnnnnnnnncctcaataattaacgcagagaaaccattgtttgaaaagaatatgaaaacttgctacagaaacacccggtgaaagagggtgtggtcatattcatgtcctagaatgcgcctagcacagtgtagtttttcataaatgcaacattgtagacatagatgaatccagagtattcagcagttttcctccgtctcagaagactaaagctccagtagacaatgcgcaatgaggtctcacagccactggagggcaccattaccatccatctgacatcgcatttccatagaaatggccaaagaaagaaggtcctggggtttttcatagaaagctcaaaaagttcaacctttgatgctatcccccagcccaatacaaaatacacagaaaaagcaattattaaaatactggcttcggtttctttttttcctttcaaatttcctacaattgctttacatatttgtgtgcagcacctacttctttatcgccgtgaactgaaatctaagatttcaaactgaaatcttagttacacatcctagtcccagccagcgctctggcaacctcccatttagacagagga

SEQ ID NO: 5243 - DNA, 376 bp, Homo Sapiens
  misc_feature (284)..(284): n is a, c, g, or t
tcctggtggcttataaacaacataaatttatttcgtacaattttagaggctgggaagtccaaaatcaaagtaccattatatttgatgtctggtaagggcttattctctgctttatagatggcaccttctcactgtgtactcacatggcagaggggcaagggagttctctgggacccctttaatgaggacatcaatcccatttatgagggctttttcctcaggacctaatcacctaatccaaattaatactgatacattggatgttgggtttcaacatataaatnttggtggaagacggcattcaggttataggacatgcttaactttgcttagtgcacgtttgcttcaacactattaggcttttgtagatatggcc

SEQ ID NO: 5244 - DNA, 446 bp, Homo Sapiens
gcggccgccggaaaagcgcttcggccacatccagcagcagtagcagccgcaagaccgggactcgaaggcccaccgcagccggactaagtcgtccaaggagccgccttcggactacaaggaaccgcccaaggcctaccgggaggacaagaccgagcctaaggcctacaggcggcggcggtccctcagcccactgggaggccgggacgacagcccggtgtcccacagggcctctcagagcctgaggagccgcaagtcccccagcccggcaggaggtggcagcagcgcctattctcggcggctgccgcgctccacgagcccctacagtcgacgccgctcccccagctacagccgccacagctcctacgagcggggcgcgacgtgtcccctagtccctacagcagcagcagctggcgccgctctcgcagtccctacagccctgtgctcag

SEQ ID NO: 5245 - DNA, 3028 bp, Homo Sapiens
  misc_feature (27)..(27): n is a, c, g, or t
  misc_feature (55)..(55): n is a, c, g, or t
  misc_feature (171)..(171): n is a, c, g, or t
  misc_feature (278)..(278): n is a, c, g, or t
  misc_feature (326)..(326): n is a, c, g, or t
  misc_feature (420)..(420): n is a, c, g, or t
  misc_feature (518)..(518): n is a, c, g, or t
  misc_feature (523)..(523): n is a, c, g, or t
cgtatggcgggaggggtggggggaatncgcgctacagggcgacgagtgatctatnaggacgcggtgtgggtatcaggctggcggcaattatgtgtagtgcgtagggcgctaataaagtcagtgggcgcggggtttcatcacggaggtggacaaaaaagatgggcgtgagcncctcatgcttgtggcgcgcgtaagagacgggtatgtggtacgagccgcgacaagagggggagtggttgtgctcggtgtttggctaccatggggcgcgaatatccgcntctctcggcgtgcaaggcggtgtcacgcccaaccgcgttctcatgggnggtctctctccaaggcacaggggcgtccccgcagggtatagtgtgggggcacgggcgtatatatattggggtgggacgcgaccgcccgcggatntatctcctcagcgcgcacgaggtccagggtgcgtcgaagtgctcgtctgaccgcaccccccccaaagaggtggggtacattcacccaaggcaggtttntcggntggtggagacacgggcaggatccggagggtgggatattgtggagaaggcttgccggccgtcatggaccacagataagtgtggggaggggaacgtgttcccgaaaggtaggcgtcggataaaggggcgtgtggacagggagtgtgtcaacacccgttcgttcgctgggcagaaatgggacatagcgcgggaggccgtgccggggttgatatatcgaggggggcggccttgcgccccgccgccgggagtgggggcgcggcgaaattgccgtgcaggggctccagttatggagttgttttagaaacagcgtcgggtggcccctgggcgtccgtttatgggggggaatccaaacgctagtcgggggcggggtctcctaggaaacaagctatggccatggacgctttcggcgcgggcccgcgcgccgaacgaatggtttcgaaagctttttgagggccgaggcggcccggcaagagtgtgttttttcagaagtttttctttgggcctgttgctttctgggttggtgttgctgttttggtcctaacactccacccacacgcaggtttatttccatcttccaggggtggaaagagctgtccccaagacactcaagaggggtgggcacaggccccatgtgagcccagggtaggacgggctggagagggccccacgcagcacctgccctgccagcctgtctgcggcccacccaccctcccattaaagtcacgttgtctcgaagcatgggtttccaggtccttgagcatagcagtggccgcaggccacctgggagcagcaggcggggcccctggtgaggatgccttgtaaccttgcggcttggcttcaccgcagatccactctggaatgacacggttcccaccccgccaccttccccctcaaaacactgatcgggcgacgatccgctgggccggcagctggagcccagccgtggccctgcctgagccagtccagtttgtaaaataaatagcaagcgttgccggcttctgtacctcctccctgtgcctgccggccccgcccagccactcagacacttgtttccggggtgtgaaccacctccccgtttttctcaggctcagccttcaggaaatgctccacctcccgcaagtccacccccgagtctgcaggaggcttgtggagcttctcctcctccgcggccgccacctcaggctgtggctctttgggcttcttcctaatgcagaagaagttgcccagcagcaaaatcagggaggaggtgagcacctcggcccccgccaggatgaacacgtacatgtagacgtgggtcgcatccaggagtttgcctcccgaagggggcccgacgagcacggccaccgcctccatcagcagcaccaggccaatggcactggagaacttgtgggtgcccacgatggccatgagcacctcgaactgcagggcccccaccatgccgtaggagatgccaaagaagatgcagaagaccacgaggccgccgtagtcgcccgccgtagagcccgccaggtccgcgaggccgttgaagaacatggagaagctgaagaggtagacggagtagggccgcaccttcccaagccccgccacgaagcccgcggccggccgcgcgaagatgtcaatgaagcccaggatggtgagcaggaaggcggccttggtgtcgggcacgcccaggtccttggcgtagctcaccacgaacacgggcgggacgaagagccccagcaccatgaccgaggcggccacggcgtaaagcacaaagccgcggtcccggaagacgctcaggtctagcaggcgccgggagggtcgcggcggccccgagcccggctgggccgtgaccaccaggggcctcatgagtgcggcacacacgcagcagttgagcagcaggccgcccaggatgaggaagccgccccgccagccgtagcggtcctgcagcagctgccccagcgggctcagggcacacaggaagacagggctacctgctgccgccagcccgttggccatggggcgccgcttgctgaagtagcggttcagcatgatgagcgagggctggaagttgagtgccaaacccaaccccgtgatgaccccagtggtgaggtagacctggatgatgctccggcaaaaggacgcagccaccatgcccagcgacgcaaagagaccccccacaagcatgacgggccggcagccaaagcggttcacgcacacactgcagagcggacctgtcccgtagagcatgtgccagcaggatggaggagatccaggctgtgtcgctgtagccgatcccaaactcctgtatgagctccttgaagaagacactgacggccttggggaaggcgtaggagaagccagtgatgacgaaacagccgaagagcactggaccagccccagccgccgtcaggggccttgacgcctgtggggccctcgtccaccacggcccctcccatggccaggaggcctggttccgcctcacctgccgccgctgggccgcctcagcccgcctctcgccgcctctg

SEQ ID NO: 5246 - DNA, 519 bp, Homo Sapiens
ggcacacccatccgtttgctggggtgtggcagccacatccaagactggagcagcaggctggccacgctcgggccagagagagctcacagctgaagctcttggagggaagggctctcctcaccctgccaggaagcttcttaacatgtgacaggaccagggaccaggagcatggtgaagccaagtggcagatgggagccaacctggatggccttttggggaaggagggcatgtgtagcagagaacttaggggggcctccttgcctttctcattcttttgccctgcatcctgtcatttctgttcttgtccctcatacatctttggagaaccgggctccagactttgttccctgactcatagtgccgcttgttaggttagggttagatggggagagacagggcacagaggacctgtctccccggctactcttgccttatggctctagtgtgtgacctacagagcatgctccacaagcccctgcctcacctcactgtcatcactaataaacatcatgcacagtc

SEQ ID NO: 5247 - DNA, 436 bp, Homo Sapiens
agtggcctggcttgtcggagcaagtttcatcagccctagggaaaacacggccctcctgggaacctccttacctggagtaaccggacaccttagacggaggtgcctgagggtggggtgggatttgcagggtcattatcagaacatgaggataacttccttgcccctgctctgtagccacctccttggcaccggcctctatttgtcataaggcggcgtgggcgagcctgacacaggccagccttggcacgaggggggccaggggttctgagaagcgctgccctgtgagagccatgctggccttcgtctccatctctggttgacgggctgtccgtgtgcctcctgtgtgtctgcagacaagtcttgctgtgctttatttgtgaaactttaatgaggaaaaaacaaataataaatgttctcgttttgaaactcaaaaaaa

SEQ ID NO: 5248 - DNA, 570 bp, Homo Sapiens
aaaacattctgcatgttgtatctagtctgatgtacttatccatctcattacaaacaaaaacacacagactgcatttgtagctctgtaatccttgaatacggaagtaaattttcttctttcctgactttgacattgtagctatactgtttccatttttgtttttacaaatcctttgggtctaattctgtgagcctacctatagcactggattaaaatgtctgcatcatttctttagttatccagttaactttaaaactgttgtaaaagtgtaaaccagcccatgacaggtttttgtacatgttaaagaacttcattgttcagttttcatgattattgtgtaaggaagactgatgtagatgttctgtgctgtcctggaccatgttaattacacttacgacgtattttagttccacatcacaatgatttgtccccagtgacccttttatcctttctaggcacatttcttgttgttgttgttgttgcagttcccctttgcattgtattgctttgacaactgtaatttgaatcagatctgaaagaggtccagaataaaatatattttgatattaa

SEQ ID NO: 5249 - DNA, 1035 bp, Homo Sapiens
tgcgcccgctgccagtgccgcgcgctgggctcgggcatggcggtcgactgctccacgctgacctccaagtgtctgctgctcaaggcgcgcatgagcgcccccaagaacgcccgcacgctggtgcggccgagtgagcacgcgctcgtggacaacgatggcctctacgaccccgactgcgaccccgagggccgcttcaaggcgcgccagtgcaaccagacgtcggtgtgctggtgcgtgaactcggtgggcgtgcgccgcacggacaagggcgacctgagcctacgctgcgatgagctggtgcgcacccaccacatcctcattgacctgcgccaccgccccaccgccggcgccttcaaccactcagacctggacgccgagctgaggcggctcttccgcgagcgctatcggctgcaccccaagttcgtggcggccgtgcactacgagcagcccaccatccagatcgagctgcggcagaacacgtctcagaaggccgccggtgacgtggatatcggcgatgccgcctactacttcgagagggacatcaagggcgagtctctattccagggccgcggcggcctggacttgcgcgtgcgcggagaacccctgcaggtggagcgcacgctcatctattacctggacgagattcccgccgaggttctccatgaagcgcctcaccgccggcctcatcgccgtcaatcgtggtggtcgtggtggccctcgtcgccggcatggcgtcctggtgatcaccaaccggagaaagtcggggaacgtcaagaaggtggagatcagggaactgggggcgttgagacacgaaccgggcttgtacgtccccggcggggcagggattgcggtggggtaccggattcggtatcgtccccgaccccagtgagttacggctttcctgattctcggggcaaggagacgttaatcctttcaatttctggctttccgctccctttgggcacaccccgggttatagaatctggcccagcgctccttattccactcggctgacgagagcttctaaatgttcct

SEQ ID NO: 5250 - DNA, 515 bp, Homo Sapiens
caaaggagcaatgacatttcctagaagttactctaagaatttccctagagggtcgggtatcatctcagccagatctttctcatccttcaaggccctgtttggtacagcttgctaggaagctgttccagactgcagcagccctctctggggtctctctaccacttcccaggcactcagaacttgtgcctcagtagactgttttgtggcactgtcccattctctgattctccatgtgagctggttttatcccatccagcatggctgtgaaatcctaaaggttcaaaccccagccactcttcacctatatttcccccaaatggctagcacgggaaagggcccaaagtaggtgctcagtgctgatgagagagtagaatttaaataccccaggaagcattgtgagttactacggaggccatgaaatgctgccacctccccaagctgattaaagagtgatactaggaaaataggtagggaagggctaatcagaaatgcctctggttcagaagatgctgagt

SEQ ID NO: 5251 - DNA, 572 bp, Homo Sapiens
ttttttttccttttaaatgcttcttttatttcattggttgtacattgggtgagtgaactgaatattacaaccaaaacatagtattgatacaaattagactcctgtttacactgtaaggtaatgaatgagggaattctttaagtgttacagaaagatttagtagaaatgttaccagtggtatggctgaaagaatatttcggtgaagtgctgttatatcctgaaaaccaagagtgaaatgtagttcccatacaagtggagagttagtctcttaactacagtatttgttgaactgatatcttcatgtcttggatattggtgatttttgttttttaattaaacaaagcatttaagatttattcatcatagtcagacttctgaatataaacaaacttttggcaaataatatttatacagaaaaatagttttagatcctctcaaatcccagaattattctataaaattacattataaataaataaaaagcaaaatctgttgtacatatatttgtacatctatgcatttgccttgcctcctccttattgtaaatggcatatttatgactctttgcatat

SEQ ID NO: 5252 - DNA, 412 bp, Homo Sapiens
cgtactgagtctgtaaggcccaaagtgggtacagacagcctgggctggtaaaagtaggtccttatttacaaggctgcgttaaagttgtactaggcaaacacactgatgtaggaagcacgaggaaaggaagacgttttgatatagtgttactgtgagcctgtcagtagtgggtaccaatcttttgtgacatattgtcatgctgaggtgtgacacctgctgcactcatctgatgtaaaaccatcccagagctggcgagaggatggagctgggtggaaactgctttgcactatcgtttgcttggtgtttgtttttaacgcacaacttgcttgtacagtaaactgtcttctgtactatttaactgtaaaatggaattttgactgatttgttacaataatataactctgagatgtga

SEQ ID NO: 5253 - DNA, 478 bp, Homo Sapiens
cctcatcttgcaggtgctgaaccaacatcatcagtttctattctaatcaggccccttcccaatctccatttctctgccaagcccatttacccccacctcatgcatcccaaggctctactgggtccctggacctaaccctgctttcatcctggtggccttaactacagtggaggtggaacttcccaggaggggaagggacagaccagccccagccgctgggccaacttccaatcattccagctagaagagcttccccctgacaccctgtgactgagcctgtgtcctgtctgcctgcccagccatgctccatcggctgtgagggcagtgcccggagaggccagagggttggagctgcagggacccgtttggacccacagcctctgttctagagatgcttgtataggctgttaattgtgatgaataaacgttcaaccctcggcctgcagccagagtagccaggccgcgcaccccaaaaaaa

SEQ ID NO: 5254 - DNA, 461 bp, Homo Sapiens
ggtgtactacttcaaatacaaaggtgaaaccgagtgcttgccccagaactgttacaatctgacaatacaaaggaatgtactaatcagtgaatgtagtaataacagtagttctaacactactgatttcaaaattcaagttataaataggaaagaaaaatcctaatatgaattaccaatgaacaacaaagacttcatacaggacttaaagtactacaaggtagttaacctttctttccaagagggagacctcactacagcaaagagactgatgagtctcaccacagaggaactgttttactgtccaggctggtcctcagcctcctcatcctgtaacacattcttaggagcttcttacagctctgtgggatgggacttgagactgcacccctgaatgtttaagaataaagacagcatatgccaggcggggtggctcatgcactgatctataggagtggtggggg

SEQ ID NO: 5255 - DNA, 574 bp, Homo Sapiens
aatgggcatcgttgtaataaaggaggaaagtgcgacttttgaaatgtttggaaggtttatttctcatgcacattccagggaaaagcagagagtaaattagagacgggataggaaggccgtgggagaactcgatcctagcctgtgtcagctggatgtgtttacgtggagaggcgtggccactttttaggtcacctgaagcagtttagcctttggatagaggaacctgcctgaatttatggcattagtggtggcatttttttgtgtacaagatgtgggtgatggaggggctgtttctttttccgtgtgggtggttaataatcgttagtctcggagggcgatgctcgtaggatatttcaggtgagtcagggttggatggtcatcggctttcagagggagaccacgggaatgttcagggaaacaatgtcagcttctctgaggaccagaattcatgttcacgggcagtgatgagttggcttatggagtgagtccagtctggaattccgccgtgcattctagcctgtatcatctcatttggacaaatgatagcacgttgaaattaaaatgttaaaaaacc

SEQ ID NO: 5256 - DNA, 361 bp, Homo Sapiens
gtcacctgcagagaaggctaccagcagaagccagcagcactgtgaccttatggaaagtggacagtgttcacaggcacattaggtaaatactgcttcagtgacccaaagaaaaatgcaaaatcacagaagattgtagcaagagtgacttatgactgaatctcagagaactgaactgtaggcttcaactatcccctgcctgagctcagagaaagaacccaagaaagagccctagctgagctttggaaataggaaagctagaggccaggagctttcttctgcttacctgaaacaccatttcaggtgttttttgtagcacagaaatggctgctataagggttagggcgcattcatcatgtaaacc

SEQ ID NO: 5257 - DNA, 426 bp, Homo Sapiens
agaacctgatttggcttctggctcagatgtaaatgggagtacagagtcatttgaaatggtcattgaggaagcaactatagattcagcaacaaagcaaacctctggtgccacaacagaagcagattgggttcctctcgagctgtgctttggaattccactgttcagttccgaattaaaccggaaagtttgtaggaaaattgctgcacatggcctttgcagaaaagagagccttcaaaacctcttacattccagtagaaaactctctctgcaagtccttaactttgttcactcattccaggtaacaaaaaccaaaaagtccaaatggtacttgtactgagctttaagtatgcacaacacttctgtgtttgtttttgagtcaccacagcagcaagatatgaaataaacattaattttattgtacaaatg

SEQ ID NO: 5258 - DNA, 555 bp, Homo Sapiens
ttcaaagctttcaatggcattctgctgcctgttcaatacagaacaaatcccttgaactaacagtcgagctcccttaccctagattcttatctagtctcattcagcacatatatatgacatacacaaactcacgaaactctaccttctgtgcagcctacatactagaaactcagaaagtcattttgctatagcatctgtttgtgcctgctacagatacgatcctggaatatctttccttcttaactccaaaacttatccaaccttttgatcttgctcaaacaatagtttgcttcaagtctatccaaatttactctccagctaaaaagaaattctccctctcgtaattcatttgaactttttttcacaagacacttaagactttctgctctctgttgttatttatgaacgtgccttctagcccttactaggatgctcctttaagacaagatttatgattgatgcaccattcctacaacagtggtgtttatatgttaaactgtcaataaaaatatgttaaattaactgacactttctatctggattagctgattttac

SEQ ID NO: 5259 - DNA, 1598 bp, Homo Sapiens
aaggctagtacgagccgccgttgtaaatcggcacgaggcagaagtctcctgattatgttggctgctctggtgaaggcagaactgggcttcctggagagctgcctgcgggtgaaccccaagtcttatggtacctggcaccaccgatgctggctgctaggccgcctgcctgagcccaactggacccgagagctggagctctgtgcccgtttcctggaggtggatgagcggaactttcactgctgggactatcggcggtttgtggccacacaggcagccgtgccccctgcagaagagctagccttcactgacagcctcatcacccgaaacttctccaactactcttcctggcattaccgctcctgtctcttgccccagctgcacccccagccggattctggaccacaggggcgcctccctgaggatgtgctgctcaaagagctggagctggtgcagaatgccttcttcactgaccccaatgaccagagtgcctggttttatcaccgttggctcctaggccgagctgacccccaggatgcactgcgctgcctgcatgtgagccgggacgaggcctgtctgactgtctccttctctcggcccctcttagtgggctccaggatggagatcttgctgctcatggttgatgattctcccctgattgtggagtggaggaccccagatggcaggaaccggcccagccatgtctggctctgtgacctgcctgctgcctccctcaacggaccagttgcgcccaacatacattttcgcgtcattttggacacgcaggcgatgtccagaaagaatgcgtgcttttaaaaggccgccaggagggctggtgccgggactccacgacagacgagcagctattcaggtgtgaactgtcagtggagaagtccacagtgctgcagtctgagctggaatcctgtaaagagctgcaggagctggagcctgagaataaatggtgcctgcttaccatcatcctgctgatgcgggcactggaccccctgctgtatgagaaggagaccctgcagtacttccagaccctcaaggccgtggaccccatgcgggcaacgtatctggatgacctgcgcagcaagttcttgctggagaatagcgtgctcaagatggagtatgccgaggtgcgtgtgctgcacctggctcacaaggatctgacagtgctctgccatctggaacagctgctcttggtcacccatcttgacttgtcacacaatcgcctccgaaccctgccacctgcactggctgccctgcgctgccttgaggtgctgcaggccagtgataatgccatagagtccctggacggcgtcaccaacctaccccggctgcaggagctgctactgtgcaacaaccgcctccagcagcctgcagtgctccagcctcttgcctcctgccccaggctggtcctcctcaacctgcagggtaacccgctgtgccaagcggtgggcatcttggagcaactggctgaactgctgccttcagttagcagcgtcctcacctaaagaggccctgccccctacccttgccctttaacttattgggactgaataaagaatggagaggccctctcaggctaccaaaaaaaa

SEQ ID NO: 5260 - DNA, 495 bp, Homo Sapiens
gaggacaatgaggaggaggaaagaagccgaggcaaggagcagcggaagctggcacgacagaggagccgggcatggctgaaagagggcggtggggacgagcccctcaacttcctggatcccaaggtggcccaacgagtcctggccacgcagccagggccaggccggggcaggaagaaggaccacggcttcaaggtgagcgccgatggcggctgatcataagggaggaggcagacggcaacaagatggaggaagaggaaggtgccaaaggcgaagatgaagagatggctgacccaatggaagatgtgatcatcaggaataaaaagcaccagaagctcaagcaccagaaagaggctgaggaggaggagctggagataccccctcagtaccaagctggaggctctggcattcatcgccctgtggccaagaaggctatgcctggggctgaatacaaggccaagaaagcaaaaggtgatgtgaagaagaaaggccggcctt

SEQ ID NO: 5261 - DNA, 269 bp, Homo Sapiens
ctcgccatgttggccaggctggttcaaactcctgacctcaggtgatccggccacctcagcctcccaaaatggtgggaattacaggtgtgtgggccaccgtgcctggctgattcagcattttttatcaggcaggaccaggtggcacttccacctccagcctctggtcctaccaatggattcatggagtagcctggactgtttcatagttttctaaatgtacaaattcttataggctagacttagattcattaactcaggatgcttcttga

SEQ ID NO: 5262 - DNA, 785 bp, Homo Sapiens
acccctttgggacggcgggagacagcggggatgctgcagcacagcccgcattcacaggcattaaagggaaagagggctctgccttgacggagggggctaaagaggaaggaggggaggaggtcgctaaagctgtcctggaacaggaagagacagccgctgcttcccgtgagcgacaagaggagcagagtgcagccatccacatttcagaaactttggaacaaaaacctcattttgagtcctcaacggtgaagacggaaaccatcagttttggcagtgtttcaccgggaggagtaaagctagaaatttccacgaaggaagtgccagtagttcacaccgaaaccaaaaccatcacatatgaatcatcacaggtcgatccaggcacagatctggagccaggcgtgctgatgagtgcacagacgatcacatctgaaaccaccagtaccaccaccactacgcacatcaccaaagcgctggctcaggcaattaaagaggccaaagagcagcaccctgacatgtcagtgaccaaagtagtggtccataaagagacagagatcacaccagaagatggagaggattgaccagaggaataacttagcttgcacatgaatgcagtcatgcaaaccgttaggaaaaccagagcctatatggagttccctcttctaacccaactgacttgtatctgtccgtggaaaatttcagtccagaagaattgaccttgaccattaataaagacactggcagagagatcttcccataataaagcaatctgattcagcatcactaaa

SEQ ID NO: 5263 - DNA, 632 bp, Homo Sapiens
aactggtccggtttctatagcattttttcaagtggaaaagttaactaaatggttgacacacaaaaatggtggagaaatcgtgcatatgccaatttttggttaaaacctttggttttgaactatactgctttgagatctcatttcagaagaacggcatgaacagtcttcagccacagttgtgatggttgttaaatgctcacaattgtgcattcttagggtttttccatccctggggtttgcaagttgttcacttaaaacattcttaaaatggttggcttcttgtctgcaagccagctgatatggtagcaaccaaagattccagtgtttgagcatatgaaagactctgcctgcttaattgtgctagaaataacagcatctaaagtgaagacttaagaaaaacttagtgactactagattatccttaggactctgcattaactctataatgttcttggtattaaaaacaaagcatatttgtcacagaaatttagttaacatcttacaactgaacatgtatgtatgttgcttagataaatgtaatcactgtaaacatctatatgatctgggattttgtttttattttgaaatgggagcttttttgtttacaagttcattaaaaactaaaaactgtt

SEQ ID NO: 5264 - DNA, 810 bp, Homo Sapiens
cctgtggagggactccattatcccacgcagcctggacaacctgggttacaacctctaccatcccctgggctcggaattggcctccatccgcagagcctgcgaccacatgcccagcctcatgagctccaaggtggaggagctggcccggagcctccgggcggatatcgaacgcgtggcctgcgagaactcagacctccaacgccagaagctggaagcccagcagggcctgcgggccagtcaggaggcgaaacagaaggtggagaaggaggctcaggcccgggaggccaagctccaagctgaatgctcccggcagacccagctagcgctggaggagaaggcggtgctgcggaaggaacgagacaacctggccaaggagctggaagagaagaagagggaggcggagcagctcaggatggagctggccatcagaaactcagccctggacacctgcatcaagaccaagtcgcagccgatgatgccagtgtcaaggcccatgggccctgtccccaacccccagcccatcgacccagctagcctggaggagttcaagaggaagatcctggagtcccagaggccccctgcaggcatccctgtagccccatccagtggctgaggaggctccagacctgaggaccaagggatggcccgactcggcggtttgcggaggatgcagggatatgctcacagcgcccagacacaaccccctccacgccgcccccaaccacccagggccaccatcagacaactccctgcatgcaaacccctagtaccctctcacacccgcacccgcgcctcacgatccctcaccca

SEQ ID NO: 5265 - DNA, 685 bp, Homo Sapiens
tttgcagaaacctgggtggtacgtcaaaattgatctcgccacttggattggcagttcctaccccagggaacggccacccagatcccttcgatgagatcatcctgttctccctccctcctgccttagactgggactcagtacatgttccaggtccccatgctatgaccatccaagagttggtggactatgttaatgccaggcaaaagcaagggatctatgaggaatatgaagacattcgtcgtgagaaccctgttggcactttccactgttccatgtctccaggaaacctagagaaaaaccgttatggggatgtaccctgcctggaccaaactagagtgaagctaacaaaggcgaagtggccatactcagacagattacatcaatgccagtttcatggatggccacaagcagaagaatgcttacattggcacacaaggtcctttggagaatacctatcgtgatttctggctcatggtatgggagcaaaaagtcttggtgattgtcatgaccacccgctttgaggaaggcggcaggagaaagtgtggccagtactggcctttagcaaaagactctcggatccgatttggcttcctcacagtgaccaatctaggcgtggagaacatgaatcattataagaaaacaacgctagaaattcacaacacagaggaacggcagaaagcctccg

SEQ ID NO: 5266 - DNA, 353 bp, Homo Sapiens
tgggtcctccctgcctggctgccacactatccatctggctattgtcttagctttggtcaagtaaaaagcaaaggaagctggagttaaaaactaaaagaagtagaaaaaaaagaacaaaagaaaataaaatcaaggacaagacaacagcatgctcagccaccggaccacagcctgtgactcggtgccacctggctgtccctgtgcgctgccggaccctcggctgggccaccaatggctgagccaggcccatgggtacagacagacagacagatattgcatatatcaggttttgtttttgaaacatacaggatacccttcatattcacagctggaagcaaccccggacacggata

SEQ ID NO: 5267 - DNA, 194 bp, Homo Sapiens
gatctagaggatcccgtaatgacggtggttgagggaggagtgtgctggagtactattgaattaaataataatgatgtgattatcttgaatgtacatttgtaccattgaataatgagccttgtgcagtgggagagcgtgttctagaatacaaggaggtagattggggcatctcaccaccatcatctaggcggacc

SEQ ID NO: 5268 - DNA, 415 bp, Homo Sapiens
ccacaagctgcatcagttatggattgatagcctgattggcctcttccagcactttgataagctctctggcctgttttaggttacctggggtgaagaaggtatagccggtacccttgttggtgctacgggctgttcggccaatacggtgcacataatcctctgagctgtttggatagtcatagttgatcacaaacttgacatcttccacatcttccacgtcaatgatgagtcagtgtgtaggttgatgtggcagggaaagagaaggtaaaggacatgccaacaacaggtgggaagcacgaatgcagatgacagcaagaggaacggaaggtgaagttagtaaccatctctgcacagaaacaaaaaaagactcatcccaacagagtaaaagaggattactattccaggaccccatgat

SEQ ID NO: 5269 - DNA, 503 bp, Homo Sapiens
tgtcagtcacggttctcagagtattatcacttagaatctgactgagctgggatataacagtggctcacgcgatgacagagtctgatcagtctcaatagatgctataaaattttcttcctttaaacttctggtgtccagttccgtaggaccctttcctgtggcacttggtgcccgaggtcccagttgtggaactctcagttgtgccatagcctttgggtccccccgcccagctaggccaggatccttgccaactggggtatttacactttctgttggacttctcttccgcttgtctggttctttactatagtagtgggtctgggcaatctccaaaagcccaaagatgctggccacacttctgcacaacctcatctcctacatgctgctgatgaaggtaaataagaatgacatccgcaagaaggtgaggcgcctaatgggaaagtcgcacattgggcttgtgtacagccagcaaatcaatgaggtgtcgcagagggtaccgagct

SEQ ID NO: 5270 - DNA, 254 bp, Homo Sapiens
ctcggatgagaggtgtctggccactctgccctgagtcactaggccagcaaaatgcttaggagacgtcttatggtagctcgcttctataggtgagcttgaggagttgggaggcagatagaaggtcccaaagtggagatttacctgatctgaagttccttgataatcccactgaagagagagtccattcagtggccaaaacaaagaatctgtatttccatgacaccttaaaattccccattaaatcaaaaatctcc

SEQ ID NO: 5271 - DNA, 594 bp, Homo Sapiens
caggtgggacacagacatgaaaaaggaggatgagaaggtaaaaagaggaactgggaacacagacaccaaaaaggacgatgaaaaagtcaagaagaatgaacccttacatgaaaaggaagccaaggatgacagcaagaccaaaacacccgagaaacagatgcccagtggccccaccaagccctctgaaggaccggccaaggtggaggaggaggcagctcccagcatatttgatgagcctctggagagagtgaagaacaatgaccccgagatgactgaggtgaacgtcaacaactcagactgcatcacaaatgagatcttggtccggtttactgaggctctggagttcaacactgtggttaagctgttcgccttggcaaacacgcgagccgatgaccacgtggcctttgccattgccatcatgctcaaggccaacaagaccatcaccagcctcaacctggactccaaccacatcacaggcaaaggcatcctggccatcttccgggccctcctccagaacaacacgctgaccgagctccgtttccacaaccagcgacacatctgtggaggcaagacggagatggagatcgccaagct

SEQ ID NO: 5272 - DNA, 1150 bp, Homo Sapiens
  misc_feature (945)..(954): n is a, c, g, or t
tggttgaggtgatcgaagtcctggaagtccttctgatcttcgtttatctcaacatgatcctgctgtacctgctgccccgctgcttcacccctggtgaggcactgctggtattgggtggcattagctttgtcctcaaccagctcatcaagcgctctctgacactggtggaaagtcagggggacccagtggacttcttcctgctggtggtggtagtagggatggtactcatgggcattttcttcagcactctgtttgtcttcatggactcaggcacctgggcctcctgccatctgtcttccacctcatgacctgtgtgctgagccttggtgtggtcctaccctggctgcaccggctcatccgcacggaatcccctgctctggcttcttcagttcctcttccagacagacacccgcatctacctcctagcctattggtctctgctggccacattggcctgcactggtggtgctgtaccagaatgccaagcgggcatcttccgagtccaagaagcaccaggcccccaccatcgcccgaaagtatttccacctcattgtggtagccacctacatcccagggatcatctttgaccggccactgctctatgtagcccgccactggatgcctggcggccttcctcctcctggagtatgtgcgcctacttccgcatcaagcctttgggggccaccctcgagggaggtcgctggcccctttttctggatgaaccaaacagtggacccactcattctggaggggggtctacccggctgcgtggggaagggggctttccgcccctggggtgaacccccaggagcgcggcaccccgcaaggggtagccctgggagggagcccagggacccccggagcccgtaaggcggggggcccctggactcgccggggaccggagggataatggggggcgccccacccgctgggggagagcccgtnnnnnnnnnnacccgcggggcacgcgggaccccaaggaggtctttggcgggggggagccggagcgccgatagactctggccccgagaagagatccccggaccactagcgagggtttgagcgctttgagaggggcggagcggaccactaaacccgggcgcgcagggcctggggaggtggggggcgccagcagcgaggcgacggtgcc

SEQ ID NO: 5273 - DNA, 917 bp, Homo Sapiens
  misc_feature (899)..(899): n is a, c, g, or t
ggcgggaaacaaaaggagacggacctcagtacagtacaggatcatctgccggacccgcgagctcatcagcctgcggggctccatcctggaagatgctacgcccacagccaccaagcatgggaccgggcggggcctgcccttgaaggatgccctggagtatgtcatccccgagctcaacatccactgcctgcggctggccctcaacacccccaaggtgacggagcaactgctgaagctcgatgagcaagggctctgccggaagcacaaggtgggcatcctctattgcaaggccggccagagctccgaggaggagatgtacaacaatgaggaggccggccccggctttgaggagttcctctccctcatcggcgagaaggtctgcctgaagggcttcaccaagtacgctgcccagctggacgtcaagaccgactccacgggaacccactccctctacacgatgtaccaggactacgagatcatgttccatgtctccaccctgctcccttacacccccaacaacaggcagcagctgctacggaagaggcacataggaaatgacatcgtgacgatcatcttccaggagcctggcgcgctaccgttcacccccaagaacatccgctcccacttccagcacgtcttcatcattgtccgagtccacaacccctgcactgataacgtctgttacagtatggctgtgacccgatccaaagacgctcctcctttcggcccccccatccccagtggaaccacattccgcaaatccgacgtcttcagagacttcttgctggccaaggtgattaacgctgagaacgccgcgcacaagtccgacaagttccacaccatggccaccaggacccgccaggagtatctcaaggacctggccgaaaactgtgtctccnacacccccgattaacttg

SEQ ID NO: 5274 - DNA, 169 bp, Homo Sapiens
tttgtacaaatccaagattttaatggctgttaaataataaaaggaaggatatttgcactatatacattctgtccactgacgatactgtcagctggccatgcattttattgcacatataaacagtgtacaaggatcttgaagacgtcttagccatagaaggactgcattt

SEQ ID NO: 5275 - DNA, 677 bp, Homo Sapiens
  misc_feature (141)..(141): n is a, c, g, or t
tcgcaagagccgctggagcagcagctttgataccatggttgtcccttgagtctgagctagatgtgtccccgataaactgtgagacctccctgttcttggtgacccaaggttgtctttggcccctccaacaaccttgtgtcncagccctgcccttcttcccaccccctcaatctgctagtccctgaagcctttaaccaaacgggagtgggcacagaaagccttctcctggcaacaggacaagggctgcccgcgtgtccagccctgttgctctcctggcgctgagaggtgggtccaagcagagttgatcagtccctgcctgccctgcctaggtctagccaggggaggttgtgtgtgtgggagaagaccccgggatctgctggggtgggatggaggttattaaagatctaagtgaggaggggctggggtttggatgcggggtgaggcccgagcgctcacacttcgtgtagggcgggcaggggcctgacctcttgcagggcagtggccttggtgccctacccctgccctgcgcagtatttattgctaaattattgtccaggaggggcagcactgggcctggccccccgggtatttattgctgtacatagtgtatgtttgtgatatataaggttttctttattttgtatatgatcaataaaccttttaaagagaaaaacaaa

SEQ ID NO: 5276 - DNA, 566 bp, Homo Sapiens
ttccattgttctgtataatactgaataaatcaatttacttttacatgatcgtataagtttctagataagataaacaaattttgtttaaatttttttaataaaaatcttaaaacactttttttctaacctagactgagaaattcatgtttacttttctaggtgtatgatactttgtaaagttgatactttcctaagaatttaacatgtcatatttttgaaatagatttaagtgtgcttcttattgctaaaaatactaaatgtcatgggtcatagtatctgatatcaatatcgttgataacatatccacaggtaacaccatgatgtaggcataaatggaaaacaaaaaccctactatttcaaatatattgtacttttttatttctgtaagccaactgtgtgccattttcactggacttttaaatctagactttagtgatgtctacattgtaaatgatcttttgtggatatttgtcacttggtttcagaaagttcacaaatgtagcaacagctcacatgactgagtaggtagaaaatgtgagaataaatctcatatatatagttttgaa

SEQ ID NO: 5277 - DNA, 428 bp, Homo Sapiens
agactgaaagatgggcaggaagtatatcatcacaagctttgtgtttgatgttaatgtgtatgatttttatattatgggaaataagctcttagaggagtgatataatcaggtttgtgttttagaaatctgtgtaatgaatgaatgaagaaagaaattgaagaatcatgtaacatatgtgatcgcatttttgtaaaagaaccatgtgtgtttatatgtgtttatatatatacttgtgtatgcaaaggtaaaagtctgaaaggatatatgctaactgttcacaatgataaccccccaggaatgggattggaggggagggggcttctgtgtttgttatgtatgctgggtgggatattgtgcttttatttctatattgtttgaatttttttacagtatgtattatttttgtaataaaaattttaaaaaattcc

SEQ ID NO: 5278 - DNA, 577 bp, Homo Sapiens
attctatccatctcagaaacagcacggctgctctcataacgaggccatgaccatacctttcctcctagacagatcctttcaactaatggctttgctttgcagctgccagccttgccctggctctgaatggcgtctttaccaacacaataaaactgatcgtagggaggccacgcccagatttcttctaccgctgcttccctgatgggctagcccattctgacttgatgtgtacaggggataaggacgtggtgaatgagggccgaaagagcttccccagtggacattcttcctgtatgaatatcatatggactctaccctatgcttgttttcacatcattgaatttaacctagaaagctagtagggatgggaaaatctgactactcttgtttctacaatttggaaaatccccccttctttagtaactccacagtttaacaagtctgagccttgactatttgggtaaatattacagaacagaaaggtagtttaccttcatgagatttgcacatttaattgttatattatttgcctagatcctgcaatcttgtactagcaataaaaatacctttaacgaag

SEQ ID NO: 5279 - DNA, 494 bp, Homo Sapiens
gggccgcgggcaggctgtcactcaggttccggttcaaggtcaggacattcagcagaacctgtggtagccaaggtacagaaaaatcagggctgtcccaggggtgatggtccaggattcctcagctctcacccttggtccaggctccttagtcttgagaattcttacaccgggtgtcatctgagcctcctaacagccctggaagacaggcaggcctgtgatgactgtttccatttcacagagagggaaagtgaagtccagcaaggaaaatgacttactccagagtttagaggaagccagggaagatacaccactagaaccaagtctctttaatctagcccggggctcccttcttttctctctggatagggcaaggttaatagctaggagtggtctagggcacaatgtgggtgcttttaacttaccggttaggagtgtgcgtaggctctggaaccaaactgactccctgctctttctagctgaaggtgctcgaccta

SEQ ID NO: 5280 - DNA, 1176 bp, Homo Sapiens
ggtccggaattcccgggataaaaaaatggcttcaattcctgccgttacacaaaactccttccccccaggcctgagaagccatcagtatgtgattactgaagtaatggcaggtgtaggatcaacaggtccccaagatgtcattcctgcccttttagaagccctgttacatctccgaagtacattcattgtgtaactattttgactgactttaaaaaccaatgctgtgaaaagcttcattccataaacatcaacagtgagtgatttgtagatttaccttagccaaaataccaatgctggaagcattgtgtttgcattgaagctgctgttcaacaagaaaatttataaatttactaatgtcttagcatggtaaagtttgcacattaacagaaattaagactgcaaagcaggttaaacttgcttctttataaaacagatgttgggttaatagcatggtttactgtattaaagacttatacacccatttttaacctcattcagacatcaagttatgtgtagcttcacaatggttcaagtggcttacttcaagaaatcttatacttgacagtacaccaattttattgactaaaaatggatgaactttcctaaagatccaaagggcccatcttagtatcacgcaaaagactgagcccttcaaaactgacatcttaaggcccaatcaagatccacatatcctgattttgaactatgtgaaagtgggactgttaagtgcaagactaaaataaattatagcagactttttagtaataactttccattttcaaacagtatatcctgggggccaaagggctatttcttaaagaggcatggtaaatgtatttatttatctaaaggttttttccccatgtaaacttgatatacaaagtttagtaatttgctcccctttcatattaattttcaacacgtatactcaaatttggcatgtaccctttcaacatcttccataaaattaaacaccttttggaaaaaagaatccactattttcctgctcaaaggtttcgcctacctaaagtggaacatgttaaaaatctatgtgaccatcactggacagctttctctcaaaactttccttcaacgccatggattagcaccagttttgtttactttaaggtacttttcccattcatcatctggttataataaatggatggaagaaat

SEQ ID NO: 5281 - DNA, 1288 bp, Homo Sapiens
  misc_feature (860)..(970): n is a, c, g, or t
  misc_feature (1095)..(1104): n is a, c, g, or t
caactgtctgattagaatcagccaagtctttaatctgcaatctttgcctctcagtagatcctgaaccgttggggttgtacagtgaagagaccttagagcccgttctagtgctgttcaaaaactgttccgaagggtagcaatgattgatgaaagcattaaatagcttgtatcctagtacttcctctcctacctatcagtccctgctcctattcccacctcagcaactgaaagccgcccccagagctctgccctgaggatataaacacatttaaattactgtcatatgcttcctattgcattgagcatggtgatctggagctagcagcaaagtttgtcaatcagctgaagggggaatccagacgagtggcacaggactggctgaaggaagcccgaatgaccctagaaacgaaacagatagtggaaatcctgacagcatatgccagcgccgtaggaataggaaccactcaggtgcagccagagtgaggtttaggaagattttcataaagtcatatttcatgtcaaaggaaatcagcagtgatagatgaagggttcgcagcgagagtcccggacttgtctagaaatgagcaggtttacaagtactgttctaaatgttaacacctgttgcatttatattctttccatttgctatcatgtcagtgaacgccaggagtgctttctttgcaacttgtgtaacattttctgttttttcaggttttactgatgaggcttgtgaggccaatcaaaataatgtttgtgatctctactactgttgattttgccctcggagcaaactgaataaagcaacaagatgaaaactggagagagggggggcggcgcgagcgctcaggtccgggagcccnnnnnnnnnnnnnnnnnnnnnnnnnnnnnnnnnnnnnnnnnnnnnnnnnnnnnnnnnnnnnnnnnnnnnnnnnnnnnnnnnnnnnnnnnnnnnnnnnnnnnnnnnnnnnnnccgctgcgcggcgccggaaaacttctccccgcgccttcgtgggcggccggcggggccgcccggaggcggaggcgccgccggcgaccacgccggcgcacccaaacaagacccacgggggcgcggannnnnnnnnntggcggtcgcccggcacaaaaaaacacgccccggggggggcgagcaccaccgggagtgcgggaagagacgagcgccagagggcggcggccgcgcccggcggatctcttctggggggtccgtccggcggcgggcctgctggcgggcagcgggtgtcgcatgcggtgactggcgcgcgcgcgcgga

SEQ ID NO: 5282 - DNA, 1240 bp, Homo Sapiens
gggcccgccaagcgcctcggagcgcgcaggatgcgctgggcggccgccaccctccgtggcaaggcgaggccccgggggcgggccggggtcaccacgcctgccccagggaaccgcacaggcacgtgcgctaagctgcggctacccccgcaagcaaccttccaagtccttcgtggcaatggtgcttccgtggggaccgtgctcatgttccgctgcccctccaaccaccagatggtggggtctgggctcctcacctgcacctggaaggggagcatcgctgagtggtcttcagggtccccagtgtgcaaactggtgccaccacacgagacctttggcttcaaggtggccgtgatcgcctccattgtgagctgtgccatcatcctgctcatgtccatggccttcctcacctgctgcctcctcaagtgcgtgaagaagagcaagcggcggcgctccaacaggtcagcccagctgtggtcccagctgaaagatgaggacttggagacggtgcaggccgcataccttggcctcaagcacttcaacaaacccgggagcggggcccagccaggcgcacgacaaccacagcttcaccacagaccatggtgagagcaccagcaagctggccagtgtgacccgcagcgtggacaaggaccctgggatccccagagctctaagcctcagtggctcctccagctcacaccaagcccaggtgatggtgcacatggcaaaccccagacagcccctgcctgcctctgggctggccacaggaatgccacaacagcccgcagcatatgccctagggtgaccacgcagtgaggctggtgcccatgctccacactgggaggccaggctgaccccaccagccagtcagctacaactccacatcaactccacatgcgcccagctcgagactgatgagtggaaacagcttccaagtgtagggacccctttgaggggcccacctgacatccaaggctgaagaacccagcggggaagggttctggttccggaatatcctgggccgaaacgatttttatagttatgggaccaccccgaaaccactacttgaggggaaatttacttagctgggggccctcccctaaactaacatttccttttaaaaaaacatgggaaaagtgtttaaaccacaacccagttttggtttatcccaaatagcaaaccccgcccataatttttcctttccggcgactaaacgcaccacaagtacggccttaccaattacccc

SEQ ID NO: 5283 - DNA, 468 bp, Homo Sapiens
agccaggaatctgcctatgtggtagacccaaccattactacttgaacccccttagaaaagcttttccagcattccataactcaggttcctcatttataaagtgggaaactcataattgtcctacctacctcacaggggtgttgtgaggatcaaaggaacagatgaatgtatgagcactttcagacatgtaaggcactgtcatgtaacaagtaggggaaagactctggagcacattagtgctggtgtgtgccaaccccgtgggctgttgaccgtaagggatattcaagtaggaggaggaagagaagatggcattgctaataaaggttgtgatacacaaccataggattaactgcctcctcaagtccatcatgtaaataaggtgctatgtataccaacttctcaccacctttgtttttctgttcggtaatcctggtgtggacaaataaagttttcacttgtatgtaaaaa

SEQ ID NO: 5284 - DNA, 1056 bp, Homo Sapiens
gcctgggtggcgaattcggcacgagggtcaggtcggtcggtccccactatgggcctggagctgtacctggacctgctgtcccagccctgccgcgctgtttacatctttgccaagaagaacgacattcccttcgagctgcgcatcgtggatctgattaaaggtcagcacttaagcgatgcctttgcccaggtgaaccccctcaagaaggtgccagccttgaaggacggggacttcaccttgacggagagtgtggccatcctgctctacctgacgcgcaaatataaggtccctgactactggtaccctcaggacctgcaggcccgtgcccgtgtggatgagtacctggcatggcagcacacgactctgcggagaagctgcctccgggccttgtggcataaggtgatgttccctgttttcctgggtgagccagtatctccccagacactggcagccaccctggcagagttggatgtgaccctgcagttgctcgaggacaagttcctccagaacaaggccttccttactggtcctcacatctccttagctgacctcgtagccatcacggagctgatgcatcccgtgggtgctggctgccaagtcttcgaaggccgacccaagctggccacatggcggcagcgcgtggaggcagcagtgggggaggacctcttccaggaggcccatgaggtcattctgaaggccaaggacttcccacctgcagaccccaccataaagcagaagctgatgccctgggtgctggccatgatccggtgagctgggaaacctcacccttgcaccgtcctcagcagtccacaaagcattttcatttctaatggcccatgggagccaggcccagaaagcaggaatggcttgcttaagacttgcccaagtcccagagcacctcacctcccgaagccaccatccccaccctgtcttccacagccgcctgaaagccacaatgagaatgatgcacactgaggccttgtgtcctttaatcactgcatttcattttgattttggataataaacctgggctcagcctgagcctctgcttctaaa

SEQ ID NO: 5285 - DNA, 744 bp, Homo Sapiens
caaagcctggagctcggccctgtatctcgccgccctgtactgtgctgaggagaccaacagtgcagtctgcagagacgtcagcatccctggcttcccgactgtgaggttctttcaaggcctttaccaagaacggctcgggagcagtatttccagtggctggtgctgacgtgcagacgctgcgggagaggctcattgacgccctggagtcccatcatgacacgtgggcccccagcctgtcccccactggagcctgccaaggctggaggagattgatggattctgtgcgagaaataacgaagagtacctggctctgatctttgaaaagggaggctcctacctgggtagagaggtggctctggacctgtcccagcacaaaggcgtggcggtgcgcagggtgctgaacacagaggccaatgtggtgagaaagtttggtgtcaccgacttcccctcttgctacctgctgttccggaatggctctgtctcccgagtccccgtgctcatggaatccaggtccttctataccgcttacctgcagagactctctgggctcaccagggaggctgcccagaccacagttgcaccaaccactgctaacaagatagctcccactgtttggaaattggcagatcgctccaagatctacaatggctgacctggaatctgcactgcactacatcctgcggatagaagtgggcaggttcccggtcctggaagggcagcgcctggtggccctgaaaaagtttg

SEQ ID NO: 5286 - DNA, 251 bp, Homo Sapiens
ctctagaggacccctgcttatggcaggccaaggaaagaaaccaagagaaacctctaattctgaatcatcactgggagcaaaacacagactcacaagaggaagggcaagagaagggtaaagaacaagagagaccacctgaggcagtgagcaagtttgcaaagcggaacaatgaagaaactgtaatgtcagctagagacaggtacttggccaggcagatggcgcgggttaatgcaaagacctatattgagaaa

SEQ ID NO: 5287 - DNA, 1090 bp, Homo Sapiens
ttgtgtctgtcttcctctttctctctcttcctactcgagttattcttgtgcggtggatgtctacgcgtctttcgtcttgagtgcgctcacaccttttcaaagtagtcgtgtcctgaacctgtttgacagcccggtctgtgatgcacctcgatcttttgggcttctcggcccccctaccctacttgcttccgacgccttcattggggaggggtcaatcctgggttcttccccagaaaggcacagatggagccactttgcttcagcctagaaacccggagaaggggaaccgcctgcgctgggaagggaacccaattctgcaggcgcagccaccccaaaggctggatccttaagtgaaggacaaagccaggcctcaagggtgactgtgatcaggactgaggggtggacaaggtggcccaagtatggctccaagaccccgaagccccacgaccctcccaggtgcccgcaatgatgaccctcaggtggcagtgaccccgtcactgtataagacattttctcctgctgagcaaaaggcatcatcccctgcaaatacctcttcccacgtctttcttccctggtaccaaaaagaaccctggacctttcctccttcttcttccctcctgccagtgcagtggccttggtcttggaaactgaagggagaaggtctggcccccagggtggggctctcctttccctcccccagccccgccgtcagcactggccctctgtgaggttcgatacttgaacgccccctgccctgtgccttggacctgggcaaagctaggaggaggaaacagcacaactcacagtttgagctggggggtggtcttggcaaggctcctgtctgtacccctccctaaccttctcaaaagaggtgcacagcctctcgggtgacttggaaactcctggacaaattccattctaacttattttgacatgtatacaaaccaactgtttagagattccacttgtgcaaagccctactgtgtttttatgttcctgtttaaaagagaagtttacttagcaataattataaataaatgaatattctttaggtgaggtgactgcaaatgcttctttccccagcagatcg

SEQ ID NO: 5288 - DNA, 964 bp, Homo Sapiens
  misc_feature (375)..(511): n is a, c, g, or t
  misc_feature (520)..(658): n is a, c, g, or t
  misc_feature (762)..(770): n is a, c, g, or t
  misc_feature (836)..(844): n is a, c, g, or t
caaattttataaaattgtacagttttttaaaaactactcacaactagcagatggcttaaatgtagcaatctctgcgttaattaaatgcctttaagagatataattaacgtgcagttttaatatctactaaattaagaatgacttcattatgatcatgatttgccacaatgtccttaactctaatgcctggactggccatgttctagtctgttgcgctgttacaatctgtattggtgctagtcagaaaattcctagctcacatagcccaaaagggtgcgagggagaggtggattaccagtattgttcaataatccatggttcaaagactgtataaatgcattttattttaaataaaagcaaaacttttatttaatnnnnnnnnnnnnnnnnnnnnnnnnnnnnnnnnnnnnnnnnnnnnnnnnnnnnnnnnnnnnnnnnnnnnnnnnnnnnnnnnnnnnnnnnnnnnnnnnnnnnnnnnnnnnnnnnnnnnnnnnnnnnnnnnnnnnnnnnnggttggggnnnnnnnnnnnnnnnnnnnnnnnnnnnnnnnnnnnnnnnnnnnnnnnnnnnnnnnnnnnnnnnnnnnnnnnnnnnnnnnnnnnnnnnnnnnnnnnnnnnnnnnnnnnnnnnnnnnnnnnnnnnnnnnnnnnnnnnnnnnggggggaacccggggtttttaaaaaaacccaaagggggttttggggggtcttttcgggatttctcaccaggggggccccagggggctcttatatataaatcttnnnnnnnnngtggcgaatttttggggagagtggtggataattatttaaaaaactttccgcgccccgcgggagaannnnnnnnnaaacgggggtgttggacaaccctttgataccccccccgggggattcaccaccccccttggcggccccttgtggagaaaataaattttctcccccccggtggagaaaaacgccgggggccc

SEQ ID NO: 5289 - DNA, 321 bp, Homo Sapiens
ttgcatatggcaaggccaaggctgcgaagagagtgtccaggagaaaccagtcaaatcagcagaatgggtccgcagatgccgggattctaaacagcaatggaggtcacaattttataagataacaacaaaacagtctctgtgaaaatcttgggagaaattccaagcaggagtgagagggaagaaccttcatccagtcaacaacctgtagcggtatccggaatacgcacagcactatgagctacaacagagcacacggcagcacacagaacacagtaaaaccttgggaagcttggcctgccatatgaagggatcctgtagagt

SEQ ID NO: 5290 - DNA, 302 bp, Homo Sapiens
ctccactcggagaagcgccaagcggcagagattgccaatgccaagtccagagcggttagataaggtagtagattccatggatgcattagataaagttgtccaggaaagagaagatgccctaaggcttcttcagactggtcaagaaagagctagacctggtgcttggagaagagacatctttggaagaatcatctggcacaagttcaagcagtgggttataccttggcacctaaatagaaagatactataggagacgattctggccttgccatatgcattgcatatggcaggccatgccaaag

SEQ ID NO: 5291 - DNA, 311 bp, Homo Sapiens
ttgcatatggcaaggccaagtgcgtgatctttgagaggttttggtaggtaagaaaggaggactctatgcatgtgtgatggcagtcgggggtggtaatttgggaacacttcatctacctttgttcctttgtttgtactgttttcttaaacctgtggaatgttttcccacttcccctgcgcaaatcccaccagccaacagcttcttcagctacaactgtagcattcctctgcagtctctcctttgtcgactttctttcatagtgactgcatctgacctattcttgccctgccatatggaagggatcctctaga

SEQ ID NO: 5292 - DNA, 520 bp, Homo Sapiens
agctcggtacccttgcatatggcaaggccaaggcggggcatggaacagcaggggtcagatgttaggggaagtacgtcggcacccgggtggggatcttgaatactatgtcaggcacccacaacaagagctttgggtgctttgtgtctagggccgggtacccttgtttctgctgctgatgccgtgtttccagtctggatttcagcaaaattaactgacccatccttctatctgatgcctgttttcttctctctcattagggagttccgggtccagcttttagcccacttatctgcctcacagctttcagcctacttatctgccttccttaatcttttcccccttctaacctcttttgctggcctgtgctcccagagttcccagagtctgtctacacaactccctgtatgtccttggcctaggaattttttcctgtgtttctctaaccagctccttagaacctggaacttgtttccatggtctatacttcttttctctatttatccatctgtcttctgattga

SEQ ID NO: 5293 - DNA, 519 bp, Homo Sapiens
ggagaaggcttgtattagtcccaagccacagaagccatgggataaagatgcctgggagatcccccgggagtccatcaagttggtgaaaaggcttggcgctgggcagtttggggaagtctggatgggttactataacaacagtaccaaggtggctgtgaaaaccctgaagccaggaactatgtctgtgcaagccttcctggaagaagccaacctcatgaagaccctgcagcatgacaagctcgtgaggctctacgctgtggtcaccagggaggagcccatttacatcatcaccgagtacatggccaagggcagtttgctggatttcctgaagagcgatgaaggtggcaaagtgctgcttccaaagctcattgacttttctgctcagattgcagagggaatggcatacatcgagcggaagaactacattcaccgggacctgcgagcagctaatgttctggtcttccgagtcactcatgtgcaaaattgcagatcttgcctgccataagacagggtcctcta

SEQ ID NO: 5294 - DNA, 641 bp, Homo Sapiens
caagcccccaagatggcggcagcggcggaggagcggatggcagaggaaggaggcggcgggcaaggcgacggcggttcctctttggcctccggctctacccagcgacagcctccaccgcccgcgccacagcacccgcagccggggtcccaggcgctcccagcccccgcgctggctccggaccagctgcctcaaaacaacacgcttgtggcgctgcccatcgtagccatcgagaacatcctcagctttatgtcctacgacgaaattagcccagctccgcctggcttggtaaaagcaatggacttggtctgccagagaatgttgaatcagggatttctgaaagtggagaggtaccataatctatgtcagaaacaagttaaagcacaactcccaaggagagagtcagaaaggagaaaccattcattagctcgtcatgcagacattcttgctgctgttgaaacaaggctgtcactattaaatatgactttcatgaaatatgtggattccaagtctctgttgcttcatcccaggaaaggtgattgatgagatttatcgtgtgttgagatatgtcaattctaccagagcccctcaacgagctcatgacgtacttcaagaattaagggatatatcctctatggcaatgg

SEQ ID NO: 5295 - DNA, 637 bp, Homo Sapiens
ttgcatatggcaaggccaagtgaggcaccttggcttctctctgcaggcacaagggcttctttttcacctgggtcatgatgacacagttcaccactcctattattagtagacccaaggctgtcacactcacaatcagtccaactggaagagcgaagtcgccagtgctcccttcagctggggggctggggcccattgggagcaggaaggaggtgcttggagcagtgctgggttctggagttggctgcgtgtgttgggatcgagtggacactggctggggtaagtgtactgcccctggggccatactccgggtgggggacgtggacgtgcagactgcatccatgcttgcattcccagggatggccaccacgttacagatctggtggggcctgcaaatatccgaggatgaagtcgtgttggagaacgtccccggggcacagggcttgcacaccacgtctgatgtttcagttccttcagggaacaatccgaacttgtcaaccactcagacactctgcgggacagctgggccttggcactagagccctaggagaggtctggtctggccacgccgaagcccgggcggcacttgcgcagcggcgcgcacagacggcacccctcctgcttgctcagcgcgcagtac

SEQ ID NO: 5296 - DNA, 488 bp, Homo Sapiens
ttccacagcttttaaaggtcctttaaggatccctgggactttagaatgaaacctccggccctgcaaactgtcacgtgtgctagaaggttcgatgcctctggaatgcatgtgatactcatctccattttgtttccttgattgcatttttgttcttttagcagatctgtccctgtgggtggtgtctaagaagtcggacaccttggtttttgtgttagaatgagctgggcagctgcaatcagcttctttatatgcaaattaggcacgacccatctgtggttcctggttggtggctaatgaagtgaggggagggagggatgtcaccccaaaagtaggccctcccattggctttggccaggccagacacttcacatcgtttacatggttctgtgtaattttaaagtttatgtgtataaagcgaagctgtttctgtgaaactgtatattttgtaaataaatatattgctactttgaggttcatggaaaaaaata

SEQ ID NO: 5297 - DNA, 495 bp, Homo Sapiens
tcagctcggtaccaggcacttgatatcatgaaccgggcggtgtctccaactggtgcctacatgcagccaggagcacgggagaacattgcctatctcacccacacggagcggaggaaggacttccagtacgaggccatgcaggagaggcgggaggctgagaacatggctcagaggggcattggcgtggccgctagctctgtgcccatgaactttaaggacctcattgagaccaaggctgaggagcacaacattgtcttcatgcccgtcattgggaagcgacacgaagggaagcagctctacacctttggccgcattgtgatctacatcgaccggggagtggtctttgtccagggcgagaagacgtgggtgcccacctcactgcagagcctgatcgacatggccaagtgaactgtggcaggtccagaaccagtcagagacttgcccctaagagggatgtactgtaaataaacagtatttttagatcaccttcaaaaa

SEQ ID NO: 5298 - DNA, 567 bp, Homo Sapiens
  misc_feature (287)..(287): n is a, c, g, or t
  misc_feature (567)..(567): n is a, c, g, or t
ggattgaccatccttatacccatctgttgccacttgtgccatccatcccattttatccatccattcctccagttgtggacaccagcatgactttcagctccccctaccccaacagaactttgctgcaatggccattcttatatgcccctatggacccatgggacaattctctgggatacatgctaggagcagaattgctgaatcatagggaatgcatgtgcttagcttggctaagcaatgttggagtaaaagcttttggtttagcatcttctcagcacttctagggnaggcaccaaaaagggaggatggcactgactgagcccacctgagatagctcctagaccccagccctctgtgtcctcagaatcacacactgctgctcatcacttcagcttcccgaagatcatggcaatagcagcatgcctgtaactgtcccaagtacaaccaaaaattcttcctaaagagagggaaccaaagtcacacgggtcaccttgtccacctgtgtggacgttgctcatgttcacatacccttccttgcctccttcaaggcaggtctggccacaagcn

SEQ ID NO: 5299 - DNA, 407 bp, Homo Sapiens
ggtagattaactagcaggcctaatttaaaaaaggtaatccagctaaagggcaatttacttttttgtacttcagactatcttgattgtcaaagtgtacgaactgtaattttaaaatttatactgccacatgattgtaaattttagttgtcttaagttaggaattggtgaaaagctatttatgctggatttgggtcaaaatgacttatttgcaaaaaaataaataatgggaagaaagggctgtataatgaaatactgcaagactcacatattggttggaaatttccctcaaatcacctaccgattacccttgatttccctttgttttcagtttctcaaaacgaatgaaatgaaatatagcagaatgttaacccatataaaaataaagtgtacccaaatattgtaatgta

SEQ ID NO: 5300 - DNA, 941 bp, Homo Sapiens
gaagagggaaatgcgcgggggtctcacagatctgaatatacctccgttaaggggaactccgactctctgagttgtgggaaggtaatttttgtagaatacccaagccgtcttcccaatttcccgggaaccaccaggtacctggaggctggggcctgttcaatggcccaaaaaatatttccgcccgcccccattggaagggaaggggggtccatatgatccaaaaaccactatgaagatatggaacctgattggtaaacttggcctgctgatatgctgcactgtacgaatgtgttgtttgcctagagaatttgaaaaatggatgtttgctaatggggttgccttgtggtcatgtgtttcatcagaattgcattgtgatgtggttggctgggggccgacattgttgccctgtttgccggtggccttcttataaaaaaaagcagccatatgcacaacaccagcccttgtcaaatgatgtcccatcttaaccatgtgcaatttgtcctttataagctttgagtatcttacagcttgcctttttaatgttagtcacaatgtttttgtggtttgaagtttagtttaatgttagtgcagtgacgggaaatacacattatgctaatgttgatgacagaatttatttggttgccttgtgtgttaattgaatgcatacctaattgtaaaatttttttatttacaacattggaaattcagaagttaatgtttttttgtaagcacaaaagaagtattatagaaatttatcctagcaagactttacaagataggatcaaattctaatggaattgagccggtttcttatcctaaatgtttcctccctttttacaatctctgtccagcacctcttggttaaataatgtatgctgtgagacatgaaattaaaacagacctatgaaataaattattttaaaaccagaagattaaaaaaa

SEQ ID NO: 5301 - DNA, 969 bp, Homo Sapiens
  misc_feature (309)..(309): n is a, c, g, or t
gggaaaagaccatgccaactacctttaacagagaagggaataaacagaaaaataaatgtgaaataccttcagaagaattctctaaagatgttgctgctgctgctgctgacagtcctaataaacatgtcagtgtaccagatcgaatcacaggaagggcgggactaaaggaactacaagctgttagcccttcccgaatttggaattttgttgaaattaatgtttctatggaagaactgcagaaattaagaagaactcgaatatgtcacttaattcggccattggatacagttttggatgatagcattggcntgtgcagtctggtttgcttctagaggaattggttggttagtggcccaggaaggagtgaaatcctatcagagcaatgcaaaggtagttctcactggaattggtgcagatgagcaacttgcaggttattctcgtcatcgtgtccgctttcagtcgcatgggctggaaggattgaataaggaaataatgatggaactgggtcgaatttcttctagaaatcttggtcgtgatgacagagttattggtgatcatggaaaagaagcaagatttcctttcctggatgaaaatgttgtctcctttctaaattctctgccgatttgggaaaaagcaaacttgactttaccccgaggaattggtgaaaaattacttttacgccttgcagctgtggaacttggtcttacagcctctgctcttctgcccaaacgggccatgcagtttggatcaagaattgcaaaaatggaaaaaattaatgaaaaggcatctgataaatgtggacggctccaaatcatgtccttagaaaatctttctattgaaaaggagactaaattgtaatgtgattcacaatgtaacaatataaaaataagtttttatataattatataaaagtaagatactctgctgctttactattgtataatatagtagttttaaagttcagggaaa

SEQ ID NO: 5302 - DNA, 687 bp, Homo Sapiens
ctaggcctttatcaagtaactggaaaacttttcttgcagccaacaatctcaatgtcgttagtaggaagataagaggggagaaaaagctgtagaacaaatgttggggttaccattgaaaatctaatgtctgcaatatttttctcctcacaacttggaaacgttcccagttcattttcagtcctgttgtgagcacagttctgaagggtttattattgtcaaaataagtttgtttgtttgtttatgttgggtttttaatgttgtctcttgacccttaatgctcaggttcttgtgggagttaatcagccacatccaacgttaccttgagggggaagaagagggtgatgctcagaagctaaacaagacaggggccacatgaccctctattgattagccccaagtagaaagtcctgtggttttatgtttaatggtaatagttgatcatatatggcataattttctatcagcttcctactcagtcactataaacacagacttgaaatagtactttaaatgtccaaatacctaaatgtgctaaactggaggtaactatttctaggtagttgaatttttgaaagtcatgatcagccacacaactgttttgtacatacttattttctcatgcacttttctgtatgcaaataaagctataaatttactcatttcaataaactggagtggcagaatatc

SEQ ID NO: 5303 - DNA, 551 bp, Homo Sapiens
tgctgcctggaggtcggtttcttcctgggtgttacgggcaactgctcacacagttgtttctctgtgaacatttccagtgtttaatccaaaatgaaaacccaccaatgcttttgctaacttcagtgccttttataaatcatttttaaatttcctgaacttgctttttgaggatatacagggatattaagtagacgcaggattgtttttgtttgtaaaaattctgaattgaaactttgttttaaaaaaaggcttctttctttcatatgacaagagataggtcaggaatattggaatcaagatttaaatgttaaaattcgattttgttacacagggtgtgttcatttgttttgtagcagacaagatctagatcccagacagaaacaacacatgctattctaaaaagccgcattttaaaaggcaccttggttctcaaaagaaatcagaatatggatattcgtagtgatgatctgttttctctaaaatcttaccatattgtctgtatatggttgtaaattcaaatggaaagtaaaacgttttggccctgaaaaaaa

SEQ ID NO: 5304 - DNA, 750 bp, Homo Sapiens
  misc_feature (264)..(264): n is a, c, g, or t
aacccttcttttaactgcacagcaccttattcatgcgatgcggtatctgctccaatccttgcgtgctcttctcactgcaaatgcctgctcacctggttaatctagctctccagaatgatacccatccactcttttaaattcaactaccaggattcagttttattcacagatctatctttagctcgggcgtatataaacgcactaggttaaaacttacttggtcagcagcatccaacttctaggtacatgtccaaaggaactgangaaagcatctcaatgtgtgaatgcctacctgtgttcattgcagcattattcagaagagccaagaggtggaagcaaagtaaatgtccattgacagatgaattggtaaacaaaatgcattatatacatacaatgcaatatcatttagccttaaaaacaaaattctgccatatgctacaacatggacgttatgctaagtgaaataaaccagttccgaaaggacaaatacacccatttccacttatatggggtatctaacgtcaaactcagaagaacaaagtactgcggtatttgccacaagctggtggaggagaaaatgagttgttcaatgggtattgagtgtcagccacgcaagatggaaaagctttttgagatttgttgtataaaaatatgcctatagttaacaatactcttcggtacacacaaagtatgtgaaagggtaaattttatgtgtttttatcacaataaaaattgtaataaaagaaaaac

SEQ ID NO: 5305 - DNA, 451 bp, Homo Sapiens
ctacttagtaaaaacaacagtcaaagaaaaaaatttaattatagctcaacagtgagatgtttaacaaagttattatactgtaaacaatgaacactgatctaacaaaaaattatgatcaaactgaaaattaagacatgggaaaatggaacaaggagagtatattgaaaatattttcttccaatctatgttttgcattttcattttcctaacagtatttttcatactacgtatatatatattttttaccaccatgtgttcaagtttttaatctcaattttttcttcaaagtttgtgctttttgtatcctgtctaaaacattgtcctacccaaaagttgggaatatttttacatatgtatgctcctaagaattttataattttagctctcatatttaattctatgactcatttcaagttaatttttatgtgtggtgtgaaataatgttcaagac

SEQ ID NO: 5306 - DNA, 578 bp, Homo Sapiens
gctgaatagcagaaggttgcacctcccccaacattagatgttctaagtctttccattggatctcattggacccttccatggtgtgatcgtctgactggtgttatcaccgtgggctccctgactgggagttgatcgcctttcccaggtgctacacccttttccagctggatgagaatttgagtgctctgatccctctacagagcttccctgactcattctgaaggagccccattcctgggaaatattccctagaaacttccaaatcccctaagcagaccactgataaaaccatgtagaaaatttgttattttgcaacctcgctggactctcagtctctgagcagtgaatgattcagtgttaaatgtgatgaatactgtattttgtattgtttcaattgcatctcccagataatgtgaaaatggtccaggagaaggccaattcctatacgcagcgtgctttaaaaaataaataagaaacaactctttgagaaacaacaatttctactttgaagtcataccaatgaaaaaatgtatatgcacttataattttcctaataaagttctgtactcaaatgtaaa

SEQ ID NO: 5307 - DNA, 519 bp, Homo Sapiens
tcttgccgctgggggcctgaagacattcctggaggacactcccatcagaacttggcagccttgaagttggggtcagcctcggcaggattcccactcctcctggggtgctgcctgccaccaagagctcccccacctgtaccaccatgtgggactccaggcaccatctgttctccccagggacctgctgacttgaatgccagcccttgctcctctgtgttgctttgggccacctggggctgcaccccctgccctttctctgccccatccctaccctagccttgctctcagccaccttgatagtcactgggctccctgtgacttctgaccctgacacccctcccttggactctgcctgggctggagtctagggctggggctacatttggcttctgtactggctgaggacaggggagggagtgaagttggtttggggtggcctgtgttgccactctcagcaccccacatttgcatctgctggtggacctgccaccatcacaataaagtccccatctgattttt

SEQ ID NO: 5308 - DNA, 444 bp, Homo Sapiens
tcaaagttacaatagtttaataatttaaataggaccaacttcaggaacatacatactcatacataaaattaaacaatttaattttgaacagtgtattgaaatacatcaaattcttaaaaatcccccaaatggactcaagatcatggatatgaaaaggtaattttgaagtactaaagactagagtaaaacagacaaagtcattactttgcatttactaataagacaacagcctgtggatacattagacctttataagaacacttctaggaaatgttagaacaacgagtcattaaaaaggaatataaatgagttcataaagataaatgtatagctgacaatttctttggtcctcgaagtcacacttgtttttactttaaaatgccaaacatgagttgagtgctcagaattctacctataaatgtctaaatattaagcaggctaatg

SEQ ID NO: 5309 - DNA, 759 bp, Homo Sapiens
tctgatatgagcatatattattagtctattcaagcacagttttgaagttagcaaacatctaaatcctcacatctctacaaggtaggtcaaagtatgattcttctcagttgtacaagataaatggctgtataacatgtctagtcatagttaagacaacaattggggacagtgctttggtctgattgccatgccagcatcatattttatctgtgaagggtggcttggttgtggaaaactataaaaactggatgcaaaagtaaaatgcaaccttgtttggtgacgtccagttcctctggaattaggaaaaaccacttgtgtttaagaacaggagtcaaatcaatttttaaggaaacagattctaatacaaaaaccttttctgttgggtctagtaggtctggacaaaacatctccctcttttccttttatattttcctcatcctcttcttgcagcgctggttgaaaacaggggaggaccccatgaggctgtcagtggagtgggaaccatagctgctatctgagtcatcagggctctgaggaatcccagcttcactcatgcctgacataggctcctcgaagacatcactgcccagcacaccatgcccagagacattgccttcttcactttcttgaggctccattttcacatgggacagattccaaaggaggagaagcatttacctctgcacttgaagcctgtggtgaagcttcaacctccaggttagattgaaacgttcgctctgagccagtgcactccgccgc

SEQ ID NO: 5310 - DNA, 422 bp, Homo Sapiens
  misc_feature (42)..(52): n is a, c, g, or t
ggtccagatataaatagtaacctaaagttcttgctgtgcttnnnnnnnnnnntcatgtggccctttcaatatttgaactgctaagcaatgacatctgtagttttatctccttttttatgtcatagaaattaatatgatactttaaatatgtaaatataatacattaggtaatgctattatttatatctgtcttaacataatttaagttgtagctgtgtcttggaaatatttttaaggtaatctatattcacattgcctgtgttaatgctttttaaagtttgtatacatcagatgtatatttttggtttggcataagctacgattgtaatttttcttggctttttgttcataaagaattttttgaaggaatggtaacaaatggtaatttacaaatggttgtgaataaacacatttttacactt

SEQ ID NO: 5311 - DNA, 433 bp, Homo Sapiens
ttgcatatggcaaggccaagttaggactaggttctgtccagcacagtggttaatagcatgggctctggagtcacatggcctgggtgcaagtccctgtactagccacataatcttgggcaaatttcttaaatatgagcctcaggttctccatctgtaaaatggggataataatgatatctaccttcacagataaaacatttagtagaatactggacatgcagtaagtcgttagaaaacatgaaaattccctggttcgtgttatctagcttggccccttgaatttcactgaggggtaggccttgaactagggaagggctggggactgggcttgttccacacccctcatttttaccccatcctgctttagaaataccagatcctattatataatggagatgtagacttggcctagacataggcaagggtaccgagc

SEQ ID NO: 5312 - DNA, 1140 bp, Homo Sapiens
  misc_feature (1014)..(1014): n is a, c, g, or t
  misc_feature (1020)..(1089): n is a, c, g, or t
  misc_feature (1096)..(1097): n is a, c, g, or t
  misc_feature (1102)..(1102): n is a, c, g, or t
caggatgacactccaggaaggggactgcggaggaagccagactgtgtccctgacaatgggaacagccgacagtgatgagatggccccggaggccccacagcacacccacatcgatgtgcacatccaccaggagtctgccctggccaagctcctgctcacctgctgctctgcgctgcggccccgggccacccaggccaggggcagcagccggctgctggtggcctcgtgggtgatgcagatcgtgctggggatcttgagtgcagtcctaggaggatttttctacatccgcgactacaccctcctcgtcacctcgggagctgccatctggacaggggctgtggctgtgctggctggagctgctgccttcatttacgagaaacggggtggtacatactgggccctgctgaggactctgctagcgctggcagctttctccacagccatcgctgccctcaaactttggaatgaagatttccgatatggctactcttattacaacagtgcctgccgcatctccagctcgagtgactggaacactccagcccccactcagagtccagaagaagtcagaaggctacacctatgtacctccttcatggacatgctgaaggccttgttcagaacccttcaggccatgctcttgggtgtctggattctgctgcttctggcatctctggcccctctgtggctgtactgctggagaatgttcccaaccaaagggaaaagagaccagaaggaaatgttggaagtgagtggaatctagccatgcctctcctgattattagtgcctggtgcttctgcaccgggcgtccctgcatctgactgctggaagaagaaccagactgaggaaaagaggctcttcaacagccccagttatcctggccccatgaccgtggccacagccctgctccagcagcacttgcccattccttacaccccttccccatcctgctccgcttcatgtcccctcctgagtagtcatgtgataataaactctcatgttattgttccccngagaannnnnnnnnnnnnnnnnnnnnnnnnnnnnnnnnnnnnnnnnnnnnnnnnnnnnnnnnnnnnnnnnnnnnnggggggnnggttngggggttccccctccaaggggccccccctaagcggccc

SEQ ID NO: 5313 - DNA, 351 bp, Homo Sapiens
atggcaggccaagcgaacatatcttgagaacagtgctatattaaggaaagctctgcaatgaaatcaaaataagattctactagaaaaccgtgctaaggagtgcccgggggtaggtggggaagtatggaaaggcaagaaccgaagtctagctaggcagtgtcaggagacacctggaagagtggtattcagctagaggaaattgccacaaaattagatggaaattttcagtgttgagggatctaaaaaagaccaatgtgattcagtccagtgcatagatgcagaactcatactgcaaatgtccaaattgtccttcctgtcttttcttgtcaaacttggccttgccatatgcaa

SEQ ID NO: 5314 - DNA, 375 bp, Homo Sapiens
ctcaagggcaacctgagccggcacatgaaggtcaagcatggcgtcatggacatcggcctggacagccaaggtgggtgggccaagcgcaatggacagagcaggaatgataccaacatgacgcactcaggagcctcctgcccagttagaggagtggggaggctggccaaggctgagacttcgttggggtgggctcaggtctggaaggggggtaccctggaaggccatgatgacaataacgatgggatatttatgtcttcttcaaaggacttaaatgagatcacgtaaacaatataataaaaatcataactaacatttattgagtgctaactgtgtgccaggcctttattaactcatgtgatcctcaaagcgaggttg

SEQ ID NO: 5315 - DNA, 754 bp, Homo Sapiens
atggcaggccacagaggaggagggggaagcggcggcggcaaaggaaaatgcttggacagaagagatgagtactatttccactaaggcctagaattgcctactgtacaaatagtcctgatcaggcaatatacgaatggcccaaggaagccaccaaattgattttcaggttttacatgacctgcgacaaaaattccctgaagtacctgaagttgttgtatccaggtgcatgttacagaataataataacctggatgcctgctgtgctgttctctctcaggagagtacaagatatctttatggtgaaggagacttgaatttttcagatgatcctggaatttctggtctacgcaatcacatgacttctctcaacttggacttgcaatcacagaacatttaccaccatggaagagaaggaagtaggatgaatggaagtaggactctaacgcacagcattagtgatggacaacttcaaggtggccagtccaatagtgaactatttcagcaggagccacagacagcaccagctcaagttcctcaaggctttaatgtttttggaatgtccagttcctctggtgcttcaaattcagcaccacatcttggatttcacttaggcagcaaaggaacatctagcctttctcaacaaactcccagatttaatcccattatggtaactttagccccaaatatccagactggtcgtaatactcctacatctttgcacatacatggtgtacctccacctgtacttaacagt

SEQ ID NO: 5316 - DNA, 894 bp, Homo Sapiens
  misc_feature (407)..(415): n is a, c, g, or t
gctgtgtgtgttagcttgtatatatatttttaaaaatctacctgttcctgacttaaaacaagaggaaagaaactacctttttataatgcacaactgttgatggtaggctgtatagtttttagtctgtgtagttaatttaatttgcagtttgtgcggcagattctctgccaagatacttgaacactgtgttttattgtggtaattatgttttgtgattcaaacttctgtgtactgggtgatgcacccattgtgattgtggaagatagaattcaatttgaactcaggttgtttatgaggggaaaaaaacagttgcatagagtatagctctgtagtggaatatgtcttctgtataactaggctgttaacctatgattgtaaagtagctgtaagaatttcccagtgaaatnnnnnnnnnttttaagtgttctcggggatgcatagattcatcattttctccaccttaaaaatgcgggcatttaagtctgtccattatctatatagtcctgtcttgtctattgtatatataatctatatgattaaagaaaatatgcataatcagacaagcttgaatattgtttttgcaccagacgaacagtgaggaaattcggagctatacatatgtgcagaaggttactacctagggtttatgcttaattttaatcggaggaaatgaatgctgattgtaacggagttaattttattgataataaattatacactatgaaaccgccattgggctactgtagatttgtatccttgatgaatctggggtttccatcagactgaacttacactgtatattttgcaatagttacctcaaggcctactgaccaaattgttgtgttgagatgatatttaactttttgccaaataaaatatattgattcttttcta

SEQ ID NO: 5317 - DNA, 794 bp, Homo Sapiens
tcggtacccttgcatatggcaaggccaagccattacgggagcacagcatgtgctgactactgtacttccagaccccttccccttctttgggactgcccagtccttgcacctcagagttcgccttttcatttcaagcataaggcaataaatacctgcagcaacgtgggagaaagaagttgctggaccaggagaaaaggcagttatgaagccacattcattttgaaggaagcacaatttccaccttattttttgaactttggcagtttcaatgtctgtctctgtcgcttcggggcataagctgatcaccgatctagttgggaaagtcaccctacagggttagtagggacatgatcagcatcctgatttgaaccctgaaatgttgtgtagacaccctcttggggtccaatgaggtagttggttgaagtagcaagatgttggcttttctggattttttttgccatgggttcttcactgaccttggactttggcatgattcttagtcatacttgaacttgtctcattccacctcttctcagagcaactcttcctttgggaaaagagttcttcagatcatagaccaacaaaagtcataccttcgaggtggtagcagtagattccaggaggagaagggtacttgctaggtatcctgggtcagtggcggtgaaactggtttcctcagctgcctgtccttctgtgtgctgatgtctcttgtgacaattgttttcctccctgcccctggaggttgtcttcaagctgtggacttctgggatttgcagattttgcaacgtggtact

SEQ ID NO: 5318 - DNA, 348 bp, Homo Sapiens
ttgcatatggcaaggccaagaaagtcaccagcacatgccacatgtcttacagactgtccataagccaaaagtggtcctcatgctgatggcaagagatggaatttgaaaaaagagatacctcttgcatatttcaaagtctctccagtaatttgaggggaaaaatatcaaaaataaagatgaaagtctagcaaactagtagaacacagaaaagggggcataagtccctgtatcctaatgctggctggcttccagcatgtcattttgtatacatttgtcattttgtataaagacatcaatgaggaatacatgactgggtgcaataactgaccttggccttgccatatgcaa

SEQ ID NO: 5319 - DNA, 292 bp, Homo Sapiens
ttgcatatggcaaggccaagacagaactcttgatttctaactccttgtctgaatcctgcttctccagcctttctcccatttcagtaagcatcatcagtatcccctaatttctcaagcaaaatctctgaggattgttcttaatcttttttccttaccactcttcatctccctcgtagttaatccttaagtcctgtcaactctgcctataaaatatatccctgtctacttttctaatctgtactgtagccaccctactctaagtcaccaccatctcttgccctgccatattcca

SEQ ID NO: 5320 - DNA, 345 bp, Homo Sapiens
ttgcatatggcaaggccaagctgaacttagtgtctccatggcattttctcctcttcatggcctctctctacagagggctcctctttcctccctgtgacctgagtcatcctctcccttgactctcgcctcatctgatccatcccaggtcctgtccgtgctgagcctgtggtgcccagagtgctgtggtagcccctcagtagcctccctcctcccttgtccccactgctgccccatgattttctccacgtttcatgtccccttcctgaataaaatcctccagggcccttcatcatccatgatctttttgacctttaccttaatctaccttggccttgccatatgcaa

SEQ ID NO: 5321 - DNA, 497 bp, Homo Sapiens
  misc_feature (56)..(56): n is a, c, g, or t
agcacctgtgccgtgtggccatccggctctaccttcagccgtggcctgtggatgtnaaggtcaaagccctgcctctgcccgacaggctgaagtggtacctccttagcgagcacagtggctccgtggaagatgacatctgataggtctcaggctacaggaacgggggacacgggcagctcaggtcagcctgttggtagatgctgggacagcattagaagagggtctttttgatctgggagatgagacgggatccttcatgagaaaagccagccaggtagagcctaaagctgtgatcactccagtggtgaagggtgcagctctggttcttccagagagactgcccccttccctccagcggcactccaagtcccccccatgtgggaaagaggaacagggcttggatggatgtttataccctctgaatgggagggcagtgccagggcatttgcagaagctgggaaggaccaagcctcagcaccccagggctgcggggctct

SEQ ID NO: 5322 - DNA, 591 bp, Homo Sapiens
agtgtgactgacacaaacagggaaaaggcatgatgagctcagtcctggtggactcaaggcagatgatggtgctgaggctgtgggagacgagggaggaggctcaggggtggctttcacctgggctctgtccatggaggtgaggacagtgagatagttgggcctcagtgctgtgtggaccctttcttgtctccctgatgactggatggagggcctggaggaagaggggtcttagaggattcactcatgtccctgggggagggggactcactccaggtctcaggtctgcactgacacatttgtttgtggcttggggctgcctgctataaactattgggggttcgtccattttggagttataacctaaggcagaaactcagatggttcaaatgtcctcttcatgaagcaatgttatcagcgtataatttagattgtcttgcaagagtctcatttgttgtttttctaaatgcctgccaatattgtttgaaaatctacaaatgtgataaatgtatcttcaaagttaactggttgcaggttgtttaaccttatatgtacaatttcacatatgtataaaaacagtagtttgggcctctt

SEQ ID NO: 5323 - DNA, 531 bp, Homo Sapiens
aaccgcataatttcccaacatgccacctgggtgacgccttcagcatgaaccacattgatgtctcctgctgtactaaaagtggctgtaaccacccagacctggatgtccagtaccgcagtggggctgctcctcagcctggccctgcccatctcagcctcaccatcaccctgctaatgactgccagactgtggggaggcactctcctctggacctaaacctgaaatccccctctctgccctggctggatccgggggacccctttgcccttccctcggctcccagccctacagacttgctgtgtgacctcaggccagtgtgccgacctctctgggcctcagttttcccagctatgaaaacagctatctcacaaagttgtgtgaagcagaagagaaaagctggaggaaggccgtgggccaatgggagagctcttgttattattaatattgttgccgctgttgtgttgttgttattaattaatattcatattatttattttatacttacataaagattttgtaccagtgaaaaaaa

SEQ ID NO: 5324 - DNA, 1060 bp, Homo Sapiens
  misc_feature (668)..(668): n is a, c, g, or t
  misc_feature (672)..(672): n is a, c, g, or t
  misc_feature (674)..(674): n is a, c, g, or t
gggagtgtgggctgtgccgtggctggaagttactgtgaggcggcggctaagaaggcggctctggtggcggcggtggaggctgaggcggcggccgaggcggcgacggaggaaacagaagatggcagattttttgaaaggactgcctgtctacaacaaaagcaattttagtcgatttcacgcggactccgtgtgcaaagcctcgaaccgacggccctcagtctacctgcctacccgcgagtacccgtctgaacagatcatcgtgacagaaaagacaaacatcctcctgcgctacctgcatcagcaatgggacaaaaagaacgctgccaagaagagagaccaggagcaagtggagctggaaggcgagagctccgcacctccccgcaaggtggcgcggaccgacagcccagacatgcacgaggacacttaagactctcaactccacaggcgcctcctgccaggtctgctcctcggtcgcccacccgcctgcccgccatgtgtaagcaccccgcccgcccgcctccctgccggcccatccacaccctgcgtccacaccacttccaacctcataggagccgatgtatttattttccttgagtttttatttatgctgtaacctgtatcaagcggtgggttaaaggggacatcagacccagtagtcttatgttggnagangntttttaaaaaaaacatctgtgtccccccgaccccctctttccatcgggccagttccccgattcctgcccccagttctccagagaaccagagtgtgtctgtgagagtctctagcgggggctttactgtggccgggcaacaggggcggacccggggtggcctgacctaccaggacagccgagtggccttctcccccccaacaccgatccaggccattgagactcggtcttgtcccaccttcgcccggaactttcccatgcccagacctcactcagctgcacgcacgttggggagaagtcggcccttgggatctttctcttgagtcattttatttttatcatggactagtgcgtgctccgtgtccaccccaataaaagggtctttccta

SEQ ID NO: 5325 - DNA, 672 bp, Homo Sapiens
ggtttccccgcccagtgctaccttccagaacaacgcccagggccgcaaggtcctagagctccctgaaggtggcctggaagaaggcggctcatcttcacagtgggcacgtccagcacacagggtgagacggacaccgtggtatggaacgagatccaccacaagacagagatggaccgcaacattacgggccacggctatcccgaccccaactacctgcagaacgtgctggctgagctggctgcccagggggtgaccgaggactgcctggagcagcagtgacctcgcaccccagcacgcccgcctctggtggccaccccgctgccccatggctggctgggtggccaggcaggaagtgcccagcccgagaggctgggaggtttgttgagggtgtggggtgtgccccacctgaagccggggctccccctgcctgcctctctctcctcctcccctctgggaattgggcagccctgggcagttgtactcatgggggcttaggatgcagctacctcagtgcgcagggcccgtctgtcctctgggggctgcttcgggcccgcggtgctcggggcctggtgtggggcgagtagagacttccccagcctggacgggcgtgggttctgggtcagcttcttttacctcaattttgtttgcaataaatgctctatagccaaagcc

SEQ ID NO: 5326 - DNA, 726 bp, Homo Sapiens
gctcggtacccccgtgatagttctggcagacggagcactgcagaaaccttcaaatgataggtgtcattgaaataaaagcaactaaggtctgtgacagaggaccaaatgtaaaagtcgctgtaatgaaatgctgccaggcacgtcaacaggcaataatcaaagcactatcactctatcagttgcttctcagaacttgactttcaccagcagcagctcaccacctaatggtgactcaatcaataaagaccctaaattatgcactaaaagcccaagaaaacgactgtcttctacattgcaagagacccaggtgcctcctgtaaagaaaccaattgtggaacagctttcagcagctaccatagaagggcagaagcaaggcagtgttaagaaggaccaaaaggttccacattcagggaaaacagaaggttcaacagcaggtgctcagattcctatcaaggtatcagtaaatgtcagttcacacataggagcaaatcaacccttgaattcctctgcccttgttatcagtgattcagcttgggaacagcaaacaaccccatcatcatctccagatataaaagtaaaacttgaaggaagtgtctttctcttggacagtgatccaaagtcagggggcagctttaaatccaaatggatggcaccaatcacttaaagatctgagtttatatctgcagctgtgaacacagcaagaaatagggtatgacattctgagcc

SEQ ID NO: 5327 - DNA, 834 bp, Homo Sapiens
  misc_feature (513)..(525): n is a, c, g, or t
gggtgtcaaacgtcccctggtcacacacttgaatatttttttagaagtgtgatgtggtatgataaccataaatcagacttaattattttccctttaacaagggaacagggcatcctgaattttagagcctttcagcaataagaagggatgttggtgagctttgatcctcttttggttttgcagttgttaggagtttttgctggcattttgaatatgctgctttcagaaaaaccaaggaagttttaaaattgcttcctggtccttagaggactaaaaacaagaccctcattcccactttcatttccactctagcaaaaactgggcttgcgtttttctccaactcctcgtttacacccccccttccatgtccaagccttccattcctaagtgggattggctcagttttgcccatccatatggcagcatctctaatagctcttgtacagggtatcagatattgtgccttttggtgccaggttcaaagtcaagtgccgatctatgaaccagtgtacnnnnnnnnnnnnntccaggtatttgaaggagagacgctccattgtgaataaagagctcataccagctcctaagccctattaagaagaggcctggtcctctaatgccttgtttccatttcagttgttctttgagagacagaatgatgtactaaccattcgtgattattaagatagggttgggtcagggcttagggagggggcagaaatattggggatagaaaaaaaatctgatcattcctcagtgctacccatttctgtcctgtgtgggctgcttagctagacagcaggagaataaagtaccccgagaaccataatgaaaaaa

SEQ ID NO: 5328 - DNA, 584 bp, Homo Sapiens
gctcggtacccccttgatagttctgggtatctggtccaactccctgatcttataggtgagggaatctaaagtctgcaagaaaagaacacgcctggggcctgggactgggatcacaacagagcaggaccaggaccaagcttcctgactgagcttcctcccatttccaaagcccttcacctggagaacgtgcttcccgggcttcaggtttcagttcagggagcctgctgtccagacaggtgcccccgctggtccacccgaccactgtccccctctctcagagcactcctcaagctataggtgaaggacaccatcatctattcatctagcttccccgctggactgagagtaactcgagtgggcattcctctttgtgtcctggtactgagtgcagtcaatgacatcacatggatactgtgtgtagtgaacaggggatcaacttgtccccattggccagggaatttcctagctttagcaatgcaagtcccaagtcctggaaaacccctcaaccaagatggctggtcactgctagcgacactaacaggatcagacagcctggtcacactttccccttctctaactgtcct

SEQ ID NO: 5329 - DNA, 770 bp, Homo Sapiens
atggtgccctggctggagcagcacgacagctgccccgtctgccgaaaaagcctcacgggacagaacacggccacgaacccccctggcctcactggggtgagcttctcctcctcgtcgtcatcgtcctcctccagctgcccagcaacgagaacgccacaagcaactcgtgagcccacgtcggccgtcgggaaagcacggggcctttcccacccaccctcagccagcgccacacggcacccacagactgggtgccccggcggcgccacgcttggctggtcagcgctgcaggtcccgcctgttccagggcaggacccgggcccggcccaccggccccctggcttgggaaggcgtgggccacatggtcccctctggggcgtccccagcctccccgtcctctgtctaacctcaccctctaaacgttcagcggtggaaagatttttataattttaaattattactgctttgaaataaacggacgtttgagctcacgtggcggccatgcatggtttgtggcggaagacggggcccagcggctcccccagcgctgaagcacggggttcagcggctcccccagtgctgcaggtgccgccaggacgggccacgtgggcccccagcctccccctcggccgcctccacgacccggagtaggggggctcgggaccatgaggatgaccagcaaaattcaagaacaaaactgctccaacagacttttttaaaggaaaaaatatgtgtatcttgaaagctatttaaaatacactacttacaaagag

SEQ ID NO: 5330 - DNA, 106 bp, Homo Sapiens
aaaaaaatatgtaaagtgcagtcttctgtattcctgcatattgtatatacctgtatatgttttcctgagcagttaaataacaataaatatgacgttaatggtgaaa

SEQ ID NO: 5331 - DNA, 887 bp, Homo Sapiens
gtcccctacgagtgcttacaattccttcaaaattcacatggaagccaagctggcccagcccgttcctcctcagggtcatttccacagtctcgcagcctctcgtcactattactaatcgctgaacaatttccctgatgtcttcagcacagttgtctaccgaggacaggaggacacattctcctctttcgtaaaacactttgatactcactaatccagatgtccacccaatcacatccctgcaggaacagttgaatacaacattcttggaatccttttcaatcaacatgatgaactcattggagatcccgagaagacattcaatgtcagcagactggccgaagtcccgggctatcacgtgccacatgatggccccaatgctaaacaagtgggcatccttccttggctttaccttctcctttttcttcgcacccagcgtaatgaagctgaacttcacagaggtatccacggtggcggttgtgacaaagttctccgccagatctttcaagtactcctgcctcgttcgagtggccattgctcgaaacttttctgatttatgggctgcattttctgcattgattactttggctaaaaggaagtcccggaacacggctgactttggaaaagttacacctttgggaatcggtgggccaaatggtggcacatcttttgatctggaaactccaacactataacacacattttcggtacatggattatgcactttgactatgacaaagacatgctgaaagtgagaccggatgctttttggagtaaaaggaagtgccccaggctcctggaagacgatggtgacgatgtcatttcctatgtgccttttcctcagtagctgttgtctgttgtcgagcatcgtatggggatccttctagacc

SEQ ID NO: 5332 - DNA, 628 bp, Homo Sapiens
tcataggttcggaggattcattctgttgatgtaaggttgggtctcaactgaaatagttaacaggcagagagcatatctcttttgaaactgtatttggagtaaaaggttcggatactgagccactgataaggtgtatggaggaaattgtttcataaaactaaaaagcaaccgtaagaaaataaggttggagccaatatgacgagaactgatgatgtaacgattctgcccagaatgttctgaccatgtcatcaaatcatgccctctaagcaatacaagacacacaagagaagtcttcacaaaacacacgctgggctctcacacactcattttcggattttgaagggatttcacaagatttcaaatctgcccagatcatctcaaaattgttcatttctaaacttgaaatgtctcccaacagagactttttggaaagtaatttgggcaggtcgtttgttcccattatcaattaccggtcagtatgtaagtagctctcttcccatgtcaaagctgcccctggccttcctcttgctcatgctctaattgtgttattagtcaggctccaaagtctgagtgtagctccatctaccacaccctctgggccagttatgcaaaagctctctgactttcc

SEQ ID NO: 5333 - DNA, 781 bp, Homo Sapiens
caggcacgcagcggtgaggacctgcggccacagctcggcgccaaccaccgcgggcctcccagccagccccgcggcggggcagccgcaggagccctggctgtggtcggggggcagtgggccatgctgggggcagtggaaggccccagtgtggaagcaggcggaggacattagagacatctacgacttccgagatgttctgggcacgggggccttctcggaggtgatcctggcagaagataagaggacgcagaagctggtggccatcaaatgcattgccaaggaggccctggagggcaaggaaggcagcatggagaatgagattgctgtcctgcacaagatcaagcaccccaacattgtagccctggatgacatctatgagagtgggggccacctctacctcatcatgcagctggtgtcgggtggggagctctttgaccgtattgtggaaaaaggcttctacacggagcgggacgccagccgcctcatcttccaggtgctggatgctgtgaaatacctgcatgacctgggcattgtacaccgggatctcaagccagagaatctgctgtactacagcctggatgaagactccaaaatcatgatctccgaccttggcctctccaagatggaggacccgggcagtgtgctctccaccgcctgtggaactccgggatacgtggcccctgaagtcctggcccagaagccctacagcaaggctgtggattgctggtccataggtgtcatcgcctacatcttgctctgcggttaccctcccttctatgac

SEQ ID NO: 5334 - DNA, 338 bp, Homo Sapiens
tcagacgctgaactatgtgaaacaaagtaatagacaaaggggtcgatgcagctgttaagggtagagaggcagagggctacaacgtacagggcatagacatggctctggccctggctcgttaactcagaaaataatgcaccacaagcagaaggttactaggagtgaagcagatcaggtacatggccaggacagtgacaatgagtttgatggccctcttccttctctgctctgagttttcatccatggcagaagatcgcagcattctgatcatcagcacataggcagaggctgtgaggaaggctgggaacagaaagaccccaatggccagagagatactg

SEQ ID NO: 5335 - DNA, 624 bp, Homo Sapiens
agttcattatattcatattttttatttgtattttcaagactttaaacatttatgtttaaaagtaagaagaaaaataatattcagaactgattcctgaaataatgcaagcttataatgtatcccgataactttgtgatgtttcgggaagatttttttctatagtgaactatgtgggcgtctcccagtattaccctggatgataggaattgactccggcgtgcacacacgtacacacccacacacatctatctatacataatggctgaagccaaacttgtcttgcagatgtagaaattgttgctttgtttctctgataaaactggttttagacaaaaaatagggatgatcactcttagaccatgctaatgttactagagaagaagccttcttttctttcttctatgtgaaacttgaaatgaggaaaagcaattctagtgtaaatcatgcaagcgctctaattcctataaatacgaaactcgagaagattcaatcactgtatagaatggtaaaataccaactcatttcttatatcatattgttaaataaactgtgtgcaacagacaaaaagggtggtccttcttgaattcatgtacatggtattaacacatagttcagcgtctgacg

SEQ ID NO: 5336 - DNA, 977 bp, Homo Sapiens
atttctcccatgtctgttacccgttaggagctttttacccagaatttttggcaatatgcttttcttcaataaacaagccttcaatcaatcaattattgtctgacaatctgaattgggtaaagtctttctgaaatatgtgtaatctttagacaaattcttcttgtttcccttcataaatcagcagtgctccatcttcaaataaatcatgatcagtcacaatcttaactcatgtgctcatatgttctcttcatccaacattttgttgaaaccatcacataagtttttgtaagtggggtttaaaattcccaaaaggatttatacaaggcagccaaaattcacaatctgaaaaatgatcaaacacattattaacccgtccatgtgacttggcagtgaggtggcgctgaatgatttggtgcagcatctctcctgcattcatttaacagcctggataacacattccggtcaaaggtataatccacctgatggaaactgaccacggtcatagcaagctgatgaactttcttcttaaatttctccatcaatgctagctcatcttgattaaactgattattcctataaagaatggccagcttgatgactgtcttgatgaggttcttgatgatcttctctgcctccttcttgttttgggtgtactccctggtcactctgtagagctcatccagcacctcactacttgtgtcgtctattaaggtggtggcgatggatttggacaccattttacccaagatcttcttttgtgcctgaacggccaggtttttggaattaaagacatctgtggccacttccttggattcttctgcttcggagtgcataatgtcaggataaccagctgcaggggcgattaccgcttcacatgtactcggacgagccgcaagttcgctctgcagcgaaatccgcacacgacggaaaataaaggaagaagccactaaaatcaaaacctccccggggcgggagag

SEQ ID NO: 5337 - DNA, 502 bp, Homo Sapiens
  misc_feature (18)..(18): n is a, c, g, or t
  misc_feature (52)..(52): n is a, c, g, or t
  misc_feature (63)..(63): n is a, c, g, or t
  misc_feature (122)..(122): n is a, c, g, or t
  misc_feature (126)..(177): n is a, c, g, or t
  misc_feature (210)..(210): n is a, c, g, or t
tacaactatgtttaattnccaatggtaagggaagggcttcatgtggctattnggaaagtactnctcaactagccggggcatggtggcataattcctgaagtaggaggatcatcccctggagnccannnnnnnnnnnnnnnnnnnnnnnnnnnnnnnnnnnnnnnnnnnnnnnnnnnntgacagagtgagaccctgtctttaaaacaaaangaaagtacttctctgcaagtaaattttatggatataatctttattctgattaaataaatgattaccctaatcagctattatttattattttctatttaacattcatttttgaagtgccagagacctgcctatgtcgcataaagtttggtcagatatatgcaaatgcagtgttagtgaagatcatctgaataatgatcactttcacatgccatattagttatattttagtatcactgctcattgtgcttcctctctttaataaagtataaatcaagcaattaaaagctgtgta

SEQ ID NO: 5338 - DNA, 532 bp, Homo Sapiens
agcgtctgacgtcagacgctgaactatatgtgtaaaggaatatccactatcaacaatgatacagcataattcggaaggattatctcggaaatacctatgtgcactgagagccccagcatttactcttaatactgcttgaaactggtattcttcaaatagaatttcattcattgattcttgaattgaagtgaagttaaagtatggttcagtgataataatattagtatctaaaaaatcaacctgatacatttcttttccaaaaaggtaatcccaaacttgtctctgaacatcccaattcaccaagtagcccttttgaaaagggaggatgtaaaagagtccagaagggtcttttatttcatctatctggttggcagtaaaagttttaagacgtgctgtttttgaccggaactgacaattaggaataaccgacacattttcatggctgtaaccgattttggcgttgtaagctccattatccagcactaaggtcgtcatctcaccaccaaccacaccgcagccgtagttgttttcc

SEQ ID NO: 5339 - DNA, 565 bp, Homo Sapiens
cagtcaaagaaagacgatggcagatttcattacattccacatgctggttattaaagaagtaaaaaattcctctctttccaaaattggtagtgaaaactttctgatcaacggagtgaatctggggatctgtgaggtagatgagtccttttccattaccggttacccaaccttgtaaatcgaccacaacatctctatgattagaaaactcataagaaaaatggccataggccaagccatattctgtgtctttgtattctgttttcaccactttcgtgttatttgacaattttacaaattctcccagtatgtaaggctccacactgatacatccctttattgtcttgtcctctaaaatcagtagtattgtggatgggatgtagaatatctgggtgggaatgttttgttcatagagtctcttgttaaattctgtcacatagtgctgtgcggtcatctgccgctccacatcagtgaagtggtgccagagccccttctgctccttatagtctttcccaacatacctccccagaatttcttcttgatgaagatgggaaagtcagtgcgtatt

SEQ ID NO: 5340 - DNA, 551 bp, Homo Sapiens
  misc_feature (297)..(441): n is a, c, g, or t
ccattcgactcgcacccgtcagacgctgaactatgtggttgataaacacaaggatattaaaagtcaattatgcttattcttaatccaggaataaatgaaaaccaaaattaaatcaactcatagaccttattacttgccacttccttacctctttgttactgttatttatatagctgtagtcattactactttcatattagaaaatgtttgtttctccttcttggattttttcataaatcattgaattctcactttctcacaaaatggtacttcattgaaggatgtaattagtctcannnnnnnnnnnnnnnnnnnnnnnnnnnnnnnnnnnnnnnnnnnnnnnnnnnnnnnnnnnnnnnnnnnnnnnnnnnnnnnnnnnnnnnnnnnnnnnnnnnnnnnnnnnnnnnnnnnnnnnnnnnnnnnnnnnnnnnnnnnnnnnnntatagaatattatagctagtttataaaattttcagactcagggttaaattatttaatgaaattaaactattaaaatctaaatttaactcacatagttcagcgtctgacgg

SEQ ID NO: 5341 - DNA, 974 bp, Homo Sapiens
ccatggcaatgttgtccttgaatgggggtgaaagcctatccttggtggaacaaatactactacactattacacttccacactatttatttggggatgggctgggagtgacagtagcctagtagttcagctacctgattactgccccattcttttagaagcacatgtctgccaaggagtggtttgtactgctgtgtttggtacatctagtcttttttctgctataagttttccttacctgtcctttagtgtagattttattcatcacaggacagaataatcaaggacaaccaaaatccttttgttagtttcagtacctcagctatcaacatttctgagctaccattcaatgttcctctgtgtcatggagtgaaattcttgttttgtgggtattaggagtgtgggaatgtgataacctaaacaacctttgctctgaaattccatttttccctctttccctgagttgtattgacctacagagttaatttcctttgtatttttttaagaaaatattaaaaatcaacggtctcaaacaaaaacaaaaaggcgagaggcccaaccctgtcgggccgcctcggcccctcaagaagccttttctagaccctttcctttgggcggcgcggccccccactcagcgtaaggggaacactggtcccttagctggttctccctaggggagaatcctgggggacatgaccttaaatgcctttggctatcttcccccaccaataaaaaaagaacgtgcccggggcgggctaaacccggaggggggttctgggagacaaacctcccaaaaatgggcgagggttctctgaagaggcccctgtaaggctgtgggaaccctctttcccaagcgcgggaggagccgccacaacccctgggaggccaccccatattaactctcacacaatttaaaaacccgcccctcgggggccccccgcggccccccactttccacttttgggggccggaaaaa

SEQ ID NO: 5342 - DNA, 637 bp, Homo Sapiens
  misc_feature (78)..(299): n is a, c, g, or t
tatttcgatagggacttgttccgccgggcaaataggagtacagtgatgctttcacagctcactgcagcctccatctannnnnnnnnnnnnnnnnnnnnnnnnnnnnnnnnnnnnnnnnnnnnnnnnnnnnnnnnnnnnnnnnnnnnnnnnnnnnnnnnnnnnnnnnnnnnnnnnnnnnnnnnnnnnnnnnnnnnnnnnnnnnnnnnnnnnnnnnnnnnnnnnnnnnnnnnnnnnnnnnnnnnnnnnnnnnnnnnnnnnnnnnnnnnnnnnnnnnnnnnnnnnnnnnnnnnnnnnnnnnngcttcagttttttcaactgcgcaatagttaaacccatttactttgcacataccatggggttatagggaggtcaaataagcagcaggagaaagcccccctactgctcacccggagggcaactgaaaaccaccctttaaacccttcttcccgagaacccagttgcaaaacagaacttacggcggctcatagggcacacccacactatgtcgaaaagtggttttcgtaaaccaaatattccaaaggcaaatttacctcccactcgggaaagatgctcgagagggggccaaaaccaatcgcttttttaccagggctacatggttggggggaacgcccaacaa

SEQ ID NO: 5343 - DNA, 292 bp, Homo Sapiens
aatctgtgccaaaaatgtgttttcagaggaaatcttattttcatattcagactttgtattgcccactcatttgtataagtgcgcttcggtacagcacgggtcctgctcccgcgatgtggaagtgtcacacggcacctgtacaaaaagactggctaacccctcttcctattaccttgatctcttcccccaacttcctaacacttattaatttatgaaactgtttttctcagcgcagttttgttttgtgtgtccattggattacaaactttattaaaaaatataaaacacaaaa

SEQ ID NO: 5344 - DNA, 872 bp, Homo Sapiens
agcggccgctgagtccagcccacgggcccccagatcgcgcagagccttaagcaactgcaggcacttgaggtagcaggcacctggagctgcccgttcctgcagccaactcagcagcttctgctcctggcgtgctgtgttcacaccccacagtgcctccgcacgcaggccctcagggagctccaacaggggcgcgctgggcaagggtggcggtggtggcgccacaaggaagaccccatctcccagatggacagcggggatgagacgcacagccatagaaaggcggcagcagccgtagtcagtgcggcagggcaagatgtgtaaggtggggggctgttccaggccacctggggtcaaggtgacccgacagcgcccctccaggctgtaacgcacagtggccaaggagcgctgcagatgcgactggaaccagcgcagcaccagagtagcagagaggtgacgccgcccgcgcacatccacgcagaaggcatcagcaaagggtttgcagtcccgaagccagtggccccccgaggcccccgatggtgagggtggtgccttgagggcgcacaagaagcagccgcggaaggccggggccagcgctggctcctcgcccaggctccgtggctccagcgccacaagcggcgggaggcgcagtggcaccagcacgtcgaagctgtcgggccggcggattttatgttgctcgtaggcgctgcccacctggatgaagtctccgcggaaggccaaggccagcgctcccccaggaatgagaccgggggacccccgggcgcggccagcccgcaccagctcgcccacgatccggctcacgtgcgccttgctgtggcccaacacgtgcggagacaggcgcacctcatgctcgt

SEQ ID NO: 5345 - DNA, 691 bp, Homo Sapiens
  misc_feature (42)..(42): n is a, c, g, or t
ttcagaagaaatgtaattcagcagatggccctctacttctcnaaaggccccctgaccttcacgaccaaaggatataccaggagggttcctcaagattcgagatggcagcaaggaacccaggtcgagatgggacattgtgcggctcatcccacctcagacgtacctgcaagctgaggttgaagacggccagaacttggagaagagacggaatcttctgaactgcctcatcgtccgaatcctcaaggcccatggagatgaggggctgcacattgaccagcttgtctgtctggtgctggaggcttggcagaagggcccgtgtcctcccaggggtttggtcagcagccttggtaaggggtctgcatgcagcagcactgacgtcctctcctgcatcctacacctcctgggcaagggcacgctgagacgccatgacgaccggccccaggtgctgtcctatgcagtccctgtgactgtcatggagcctcacactgagtccctgaacccaggctcctcaggccccaacccacccctcaccttccataccctacagattcgctcccggggtgtgccctatgcctcctgcactgccacccagagcttctctaccttccggtagccctagacttggggtcaggggaaggtagagctggagcttttacagaaataaaacccaagagtttgattataaaaaaaa

SEQ ID NO: 5346 - DNA, 524 bp, Homo Sapiens
cgtggacgagaggaagctgcgcgagctgacgcagcgctacctggccctgagcgcgcgcctggagaagctgggctacagccgcgacgtgcacccggcgttcagcgagttcctcatcaacacctacggaatcctgaagcagcggcccgacctgcgcgccaaccccctgcacagcagcccggccgcgctgcgcaagctggtcatcgacgtggtgccccccaagttcctgggcgactcgctgctgctgctcaactgcctgtgcgagctctccaaggaggacggcaagcccctcttcgcctggtgagccgccccgcgcccgccgccttgcctgcagtaaacgcgtttgttccaacccggggccgcggtgcctcctgcgcgtccccccggaggggaaagggccgcgtcccccgcgcgcgaggccagagaaggccccgctcccaccggtgctgggccccgaccgcagcccgccgctgcccgcacctgcggagtgcttctcacccctcattaaaatcatccgtttgcaaaaa

SEQ ID NO: 5347 - DNA, 606 bp, Homo Sapiens
tcactaacaaagaacccctctgtcttcaaggactagaacctatctttaaagccgtgctcttttaaaataagctttctcagaatgttggcaaatcacttcaatcctcaaatcagtcttccttgtggaatgctgcctttattatatttgaattgacaggggaacttggtttagggttaagacgttggaaggaaatctaaggaaaattaatcctcacagaggtccgggtttagtatatgtcttgagaggagacttgtgaattcccagactctgcctcctggtttcctttctcatttctttctaactgtagctatcattactggctgtggatagcccatagctattttccttgcttttcttttttaaaggggtctgttctgcagtggagaagacattctggtgaccagacttttgcttaccttttcctattctgttgccaatttttgttttccccacattctatagccataaacctgaagatgagtaaaactggtgggtctttaataaaacaacaacaaaaacagcagtttgtgatatagcagaggtttaaatgtaccctccccttttatgcacttcaaataattaaatctctttaagaatgaaaaaaaa

SEQ ID NO: 5348 - DNA, 968 bp, Homo Sapiens
aatatacggctaggtacgaggcctggggtcgaattcggcacgagggaattgcggcgtatgcgcggctctgtggagtgcacctggggttgggggcactgtgcccccagccccctgctcctttggactctacttctgtttgcagccccatttggcctgctgggggagaagacccgccaggtgtctctggaggtcatccctaactggctgggccccctgcagaacctgcttcatatacgggcagtgggcaccaattccacactgcactatgtgtggagcagcctggggcctctggcagtggtaatggtggccaccaacaccccccacagcaccctgagcgtcaactggagcctcctgctatcccctgagcccgatgggggcctgatggtgctccctaaggacagcattcagttttcttctgcccttgtttttaccaggctgcttgagtttgacagcaccaacgtgtccgatacggcagcaaagcctttgggaagaccatatcctccatactccttggccgatttctcttggaacaacatcactgattcattggatcctgccaccctgagtgccacatttcaaggccaccccatgaacgaccctaccaggacttttgccaatggcagcctggccttcagggtccaggccttttccaggtccagccgaccagcccaaccccctcgcctcctgcacacagcagacacctgtcagctagaggtggccctgattggagcctctccccggggaaaccgttccctgtattgggctggaggtagacacattgggccagggccctgactgccctcatgcaggagcgcctcttcgacgatgaatatgcccgggcgcttccagttggccgctactgtggggtcctccatccgcttgcactgggaacagtggtactccgagcgggggcgaaatacctacggcagtcccttatctgctaattcttcccgcctggcggctttggc

SEQ ID NO: 5349 - DNA, 799 bp, Homo Sapiens
gatcatatgatggcaacattcatcataagagagccagtaggcagtgactgtaagcatcacagccaccaattatgtcacttttagaattgtgagcaaattcacaagaacacacagtgcaatttttagctgcatacatttcttctgagctccaactcagcaatatgcaatctggacatcaaagcattagccaaatatttgaggaaattttcttactaaaataccaagtatctgataaatcaattttaccaaatatataaacatatagaaggataagtgcatttagtagaaatacttacaataaaaaaatctcttaaaatctatgagccattcaatgtatacacaacgaaagaagtggcaataaggctatgattacagctccaggtcctgactgacctcgccaagttccatacacaatatattttttaatgccatgtgattgcagtgtgtgtgcgtgtgtaaggtgggagtgatattcacacatatgtagttctgaacatctacacaaacggcatgcacattgttgagaagttatctgttctcttattgcatacatcttactcactgttgaatccctagcagttttggggttgggttagggtcaagcataggaaatcatcatatttctttccttctccactcttgaggatctggaatcaggtcacagactgtgctgggtccacacgcttacatatgtgaacctcgcaagtaactaccattccctcaataggcccacatagacaccacggaacaagcaaataaggaccctctgtctaccataaatagaacttgatgctttcac

SEQ ID NO: 5350 - DNA, 646 bp, Homo Sapiens
tggtctagaggatctccctgatatggctgggggtagaggaaagaaataaaaataaaaccgtaattgatgagtgtcccgtgggcaagagctgaactagagatgtgtacaactagcagcaacaactgtggaaaaagtacaaggcaaatagctgtctccattaattttcctctgtaggttattattttttttaatattcaaaacatttattatggttttcattttataaaaatgtatattttttaagggatgggagaatgttaaatacttcatgctaggtagaccttgttattaagaacccttccactgtagtaacttcctccagttcatacattcatgagtgcagggtacatatataaatatccacacgcatacatccacacacactgcctcgagggctggggaagactaaaatttattggccacacacagcagggcctctggtggactcacccacattgctcccaggagagcagtgggctcacttccttctctctggtctctgccttcacacagaccaagaaccctacaacacgtcgttaaatccaacttttaaaagcaagaggcatctgtctgaggatgagggtaagcaaagtaggaaagagggtggagataagaacaccaaacacttttagctggagttattatc

SEQ ID NO: 5351 - DNA, 230 bp, Homo Sapiens
tcagacgctgaactatgtgtgcatgaaatgatacacctggaatttgctttcaaataatgtgagattgtgacaaaaatgggtgggcatcagatgaaacaagattggccatatgtagagaatcgctgaagctgggcaatgggtaccttgaggttcattgtgctgtcctctctagtttgctgtacagtcgaacttttccacatagttcagcgtctgacgggtaccgagctcag

SEQ ID NO: 5352 - DNA, 690 bp, Homo Sapiens
tctagaggatctccctgatatgctggagatcgtctgtatgataatatccttctaaaatattcgctggctaactagaccatggcatcccatgctataatgaatccaggtgattcctcagctgggtgtccgctccccacattcccaccataacccagaaccataaggacttaaggcacaagagaaaagtcctcaaatgacatttatctgaaacttaaagcacatggcccccaaaagtaacccatttcctcggaaaggggaaggttctgaataaatgtaaagaaacatcaccatcagcgggtgcaactggtccacatggcatttttccaaatagaatcaaaccagacatagacccttcttccacaacacccatctaaccaatgaagcagatgtgtacaaatgttagggaaggggcaggttggttaagtaaattttaaaaaagataactgtaaaagaaatatggtttatgaagtgtggctagagtaaatctaagtgatgtttatcattctcatagttttatagagtgttgggtaacagctcattaataataggggaaagagaactactggagtgctaataactcattattcaaattgaattattaacatgacaatcttacaggaaatgataatccatttctctgaaaaatatatggtagagaatgacatagtctcattaaattatatataccaa

SEQ ID NO: 5353 - DNA, 633 bp, Homo Sapiens
tatgctggcagaaactgctgacctttactgtaccttcccactccaaaagtggggaggggaactcctgtgcgggagtgctcagcgtctcaagggaagacagtcattaacctgtctaaactctatgttaatagaaccttctcgataattgctttcattaagtgtggttaatgtgaacagtacaagttatagcaagattggcagaagaacaaagtaaatatttaagactttatttcaggatgcagtggggtcgaggcaaggagaagataagtcagaagctgtatctgatggtatctgaggttgaaacacagtgaacctcttggaagcaagtgccagtccatttctcatcagtggttcacagaatcctaactctggggaggcagatgggtgtctcctggagatggttgtgtgttcaggttttctcctttcgcttctggcctctgtcagacatgaatgacatggtgatgaagataaactgccttccctgtactgcccaggaatgcaatgaggattaagaaggtggcttatagcctgtgtctatgccacatggggaggatgcttgctcgctgagggcagaaggcattataagcaactgagttggcaggagtgtttgcaatgcggggtgagtgtcggagc

SEQ ID NO: 5354 - DNA, 333 bp, Homo Sapiens
tgctctccgacccgtcagacgctgaactatgtgtgactctagtgcgtaatacagaccctgtgaggcataaaacccaaccatccttcccctctttgaagagagagcacctttgatacacactggacactttctcttcccagctggcaaagcgattatcaccagtaaaggtcttctttctaccttttagccatcgtggtggtcttttggacagcaataatcaaactgttggatcagagaggcaagcacaatgacgatttctaatattcacctgaatcgtcactaaaagagcttccaagtgcactttggaagtgccatcgaatacctttcctgggt

SEQ ID NO: 5355 - DNA, 469 bp, Homo Sapiens
  misc_feature (241)..(250): n is a, c, g, or t
atcccccctggatatttctggggctgggtatagtgcctgatgctctcaaatatatgcgtgtagaatcaaaccagaagaagcaggctgaggcactgagtgaaaacctatgtggatgtcctgctgccttttcctggtggagggtagatcattcccaactctgcctgaaactttgatgccttattggaggaagagaaaggtaactcccttgttgagccatagagctcttagtttttctttcttnnnnnnnnnntcactcttctttcaaacaccattaaattagtccagttatgtacactgggcttgtattgcatggtttatataaaagctaagttctttctttaagattggagccctccgtgtgagtgatttcaggataaaaggccttagaggattagacacattattcgtttgtaaaactgattgctcaagtgatacagccctagggctgccccctattgtcttgacactg

SEQ ID NO: 5356 - DNA, 574 bp, Homo Sapiens
ctcggtacccgtcagacgctgaactatgtgcacttcaaatattatgccagaaattttgtccaaatattcatgttcggtaaacagagacacatagttttcttgatttgaaactgttctgaggacttgagaaactagagaaaacaagaaaatagcagccccacaaatttaaaagctatcatctctaccattagcatataaccatccaaaaatctgtggaatgtttagatttactcatgaatgatgctcattcgtagaaatattttgaacaccagtagtgctatcaaggcccagtaatgttccaagataagattgttctctaggatctagcatctgttcaggtcgaactgggtgaactatatttgcaggttgaggagtaagagtatatttttccagaaaagctaaatccgctgctcgtggataatcagttgactgtggctgtggtgacagaatctcatgagaagatggtgggagtgtggtagtatgacgcactaggtcactcggagtgtcaggcatctgaactggaaccagagttactggaacacatagttcagcgtctgacgggtacgagcatata

SEQ ID NO: 5357 - DNA, 639 bp, Homo Sapiens
ccctgaatattctggctgatggctttgctattttccatagaaatcttagcctggtgtgctcgcatttccttgctttccctgtcatgggacagtttcagctgctgggtttgctgctcgtgggcattgatagagtagctttttcagcagctcacactgctggctgaggtgcaggtctcggatttcttgctcctcagcactgtgggtattgatcatttctgaccattcctttgtgtgctgtgctacaatctctttgaccttagatttgtgatctgatgtcagcgtctgaattttgatttctgtttctttttacatttcgagacaattacttccccccttcttcttcattgccttctctaggattttctcatgagtcgacttctctttgtcatactgtgccacaattttgtcaacttgcgtgcagtgtaacttctgcatggtactgtgttcctttgcatgtttcttctttaaagaatttagctccttctgctgtttctttaaatgcttcaagtaagccttcatctgctttaagtcttctatccttacttgagggataagttcaatacctttcttggcttccacaccagaggccaggccagccgtggtggttggtctgagctcagagctactctgaggggtcac

SEQ ID NO: 5358 - DNA, 642 bp, Homo Sapiens
gacgctgaactatgtgaagctcaatttatctacttcaggaagaccaagagctacatcagctcaacagggatttgaacttgtggtcccagcgacttctggactaatgaagctgatggtgagatgactaagtcatcaccactagctaatgggcccccagagaggatacatgtgatcagaatgatttattgatcaatgctgacctctaaaactactttaggacaggcattggaaatgtaaaaccacttttactgtgccatggctcaggctgctgttactttggctttgtaaaatgctgtatgggactgggatcaatcattgctaggccttgcagtttgctgacctccattaggaaaagaacttctatccagaatgcataaagaattaccgctcagcaacaaaaaacaataaaattagaaatgggcaaaaaagaaacttcactaaagataatgggtgtagccaataagcacaagaaaaagtgcttgacatcattattcatcagggaattgcaaatgtaaactacagtaagaagccacggcatacccaccagaatggctaaaattaaaaagactgacaccaccaaatgttggtacatatgtagaacaaccaattccacacatagttcagcgtctgacgggtacgaga

SEQ ID NO: 5359 - DNA, 319 bp, Homo Sapiens
ctccacccgacggggtgcccatcttgttgccccgggtgaactatctgaactactatctaaagtcagtttcttcccacgtgcactacattccagcagcttttacttagcaaagaacattttccagcaatttccttatctctccttaacaccattttctccccttttcctactggatcattctcatcagcatgtaaacaagttattacttgtttcccaacctgaccacatttttcatcttccgtctccgtaaatctgatctgtgccccactattaatttcactgaatttctatgatgcctttacctgatcttcctgcatgc

SEQ ID NO: 5360 - DNA, 437 bp, Homo Sapiens
gacgctgaactatgcgcaaacctaaatgtcagtcatatcgcggagtagaaaaagagaaagttggagttctagacccagctttgcccctgactagccttgagttctggagcaagccacctggtctagaaagtggctttcctgggctatagacagtgcatagtacagcctgccctgtggagctcaccaacctgcagataggagcaaacaaagccatgcacaggaagatgcaggcaatccacagtgttagtaaaagaccatctcagaaataggagccactgttttcctaagcccaaatggactaattagaccagacagacccctcactcatacccatgttgaatcagtcccagaaacactgtcaattccaactaagcaatgtcccttgattctgcactctcctctccagctgcaggaccaatggatggggataccatggg

SEQ ID NO: 5361 - DNA, 1186 bp, Homo Sapiens
  misc_feature (21)..(21): n is a, c, g, or t
gtgtcccaaccgtggtttatntgggtggggccaagggaaaaatccaaggcattctttttcccggtaattaattttacttcttcatttcataacattcgatatgctctggaattctttaaagtatctcaaagtgttttctggagaaatctttttactacatcattatacttgatattccatagcattgctatggactttagaataagaggcttaacaattaggctttggttttaatgtcatctggacagaagttggacatgctttgataacacaattcaactactacacatattattgtaatgtgaaataacacatttaaaaagacgaaggttcccctttcagtagttataatctgtattattcaagactgctgcaaaactcacaaaagaatgatatggataacaagaaagtataggaaaggggtaagacactcacttaaagctttaccagaacacaacacaaagcaagaacatcaattctctacatttgtctataaggcagatggcaactttttatacaagatctaaaatatggtgcttattaagaggtagaaaatactaaaacagcatttaagaaaaacatgttgagttatccaaaacaatcagttattttgctaaacttttacaaagtccaactgctgtgtggaataaactgtatgttttatattaaactgggacattccatactcaacagggaggtgatcaaacggagggacaaaaaacggggtggggtgggaagcaggaaacagtctcttaacttctcaaggactcagctctcactaaggagaaatttcctactgtctctctgggatgctattgtgatatttaattaattggaattcttttctcttatgaataatttctctgagcaacagggtacaattttgcatataaggcaatagaactatagggaggaacaagttcaaatgcttccttttcaagaaggtgccgtatacgtcttatataaaaatatacattccattaatcttatatccactccctaaccactaaaatgcaaatgaaaatattcttcagactccagcaccagcagaattgttctgtatgagcaattcaagagctgtctgaggcaaaaagatatttcagctaccaaattaaacttgggtagcttacgcatgggtgagtaaccctgggaattcttatttcttaatgcacctgggagaggttga

SEQ ID NO: 5362 - DNA, 1084 bp, Homo Sapiens
  misc_feature (1040)..(1040): n is a, c, g, or t
ccctacttggaaataagaaacttttgttcgaggcaaattcatggtttttaaaagttgggacttctatacccaaactgggcattaagggtattatagggcattggatttttgttttcttattttcaggtttgtcagtttctttactaccattatttttttctagccggagataacgtataatcacaaagtaaggcctagagaccatttatagttgtttgcaatatcatgatcacattaactctcaagaattgatataagccaaagtgaaaagaagtcaactagaaccacatttggtcacattcaaacagtctccaaaaacacttcactaatatacatgtttccttcttgactgattttgtgttaatttcatcaaaattataatcaataaggctgcaaaatttttgtagagttgtttttctagggaactactgtgttcaaatgaatgtttttaatctgcaaaatgtcattagtaatgtccgttctataaacacggttggcaaaataaaaaggcacaaaagagggtaacaagaaatgttttcagctttcagtgaagagtacaaagcatgtacccttcatgaagaaaagcacagtaaaatattcagtaattcatgcacaacttgagctacaagaaaacttctcttcaggtaggtcctgaggcttgaaaagaaaatgagttttcctaatcacatgcttcacgtaaaataaaatgtaaagctgcacatacacatgtggttttaacagtggacccatggtttttaaatatgaggcaattaaatgaaagaaaacaaaccaaaatactttcataaacaaagcaactccatctgtagcctctgtcctttttaccactcagtggggtaaaatgtccaataaaacgtgaaatgcagcatatgcgatcgtgtaatctaaaaacttttcatgataacttattgcgaattgcacttgacagttcaccacacaatggaaaactggccccttgttggttcacacagtccttgagcccaaagtgaagtcaccaataaaatgatctggaagtataaagncttgagggggatcttagagtcgaccgcagcatgcagctgccgcc

SEQ ID NO: 5363 - DNA, 1163 bp, Homo Sapiens
  misc_feature (498)..(534): n is a, c, g, or t
  misc_feature (697)..(715): n is a, c, g, or t
  misc_feature (757)..(817): n is a, c, g, or t
tttgttgtattagaaaccaaccagatgtgccacgcggagggggtaggtttattccgcgcccggttttttgtgtgattataagtagcggtggggcggcagaagtgatgggggagcaaaatattttttgtgtgccgcccccgcggttgtgtcgttcccacgggggtgggagaaaatagttatattttgcgcaacaggagcgagccagaaaggtgtgtgtgatgttgcaccattggggaggaggtttcgagggttgttatacaaatccccgcgttttgtgtgagagggatatgcgcccaattgcgggcggaagaaaaagtcttaataggggggtgtaatagaacacgatgttttaaaaaaagaggggggcacgacggcggggggggctataatttgggaagtatagaggagtccccactgggggggccgcgcccttgtgtgtggagagacccccggtgaatggcctccgcaagaactccccatttgggaaaatgtgtttannnnnnnnnnnnnnnnnnnnnnnnnnnnnnnnnnnnnaatttgttaaaatatccccaaccccttggtttatgtgcccagggttttttctttgggaaaccagtattgagcccaaggttccaatacactgtggggcgccccgccccccaaaaggaaggttttaggaaaattttttggggggggcgggggggccccacaaggnnnnnnnnnnnnnnnnnnnaaaattggaaggattgtgtggttttatgtgtgttaggtgtgnnnnnnnnnnnnnnnnnnnnnnnnnnnnnnnnnnnnnnnnnnnnnnnnnnnnnnnnnnnnnaagtatcagtttttattaaaaagtgcattttgattaatttatgatctaggtaagctgtaagataccagtatactctctggaataataactttacaaagatttaaaacaaacaaaattttaaaagcctttttatttccttcaccattattgttttacaatacaaatatcaccttgtgaatacacaaaaaaatcctacggaagataattctgctgcacgtaaaatacagaatggatatatatacttcttcattcttaaaaaactattttgttctccacattggcaagtatagaatagaatacttccccaaacatatgtatgttaggagtaaaacttagagttacatgc

SEQ ID NO: 5364 - DNA, 997 bp, Homo Sapiens
cccttcagcctggctggctctccagccatctcggaaagcttctctttcctaaaccctccatactcgcaggttcagctacagaggtaactgcaggctcaggttctccagggtggccagcccaccagcccaccgtcccggtgcagcagtgcctctccagcgacagctccaccgcgagcctggcgggctcccgaccttgctccccagcacgtcgtctccaagccacggtctcaccaccctccatcagcctcgggcgacaccaaggggaacagagcgctggagctcctcgaagtcctcccgaccttagcggggctccgttcatcctcccggacgtggccaggccccgctctggccccgcgcccgcccctcccgcggggctgcccctggctctctgccggagacccggactcagtgagtgagcgcagcgcggccatagggcttcctgcagcggggtctcagcacgtcttctggctggactctggggtctcctggcctggctgtgtctcctggttctcagcgctcgcctcccacgcggggcggagtatgggagtgggctgctcccgcggaagaatcctggggaagttgaggcactggctcctgctgttcagaacactgcccgacgtccccagagctagccactcctccttcccacccacccgcagcactctcgaggtcgcaacggcagtcaccaggtcccggggcctgcgttcagctgcttgatccgactaggtttggcttcggacccgaatgggtcagctccacgcccgatggagtttttcaagctggtgcctgcacgtgcccccgccgcggggcatgaagccgtgggctgcgcccaaactgcctcacaaccaccgctgacccgaagcctctctcactccgtccactgttagaaacctgaagctgccctctgtgagaaagcgttgggattgaatccagacttttggggaaccttaacaataaagaatacaaaatattgactaaaaattggatttgaaagtga

SEQ ID NO: 5365 - DNA, 971 bp, Homo Sapiens
  misc_feature (752)..(760): n is a, c, g, or t
gggaattcccatttgcagaaaccctatgagattaacctgatggaggaactaactctgaagggagtaacccagtactacgcatatgtaactgagcgccaaaagtacactgcctcaacacacttttctccaggcttcagataaaccagtcgatcattttctgtaactcctctcagcgagctgaattgctagccaagaagatttctcaactgggttattcttgcttctatattcatgctaaaatgaggcaggaacatcgaaatcgtgtatttcatgatttccgaaatggcttatgccgcaatcttgcttgccctgatctgtttacccgaagtattgatatacaagctgtgaatgtggtaataaactttgatttcccaagctggcaaagacctatctcccccgtattgtaagaacaggttcgcttgggtcatctttggccttagccatccaccttgcatcacatatgaatggatggctttccaccctgacaaagtatttggaggatccaccctgggcaccaaaaaatttttaccctatttccggagtaaaccttttgataaaaaagccctgtaatgggggggcaccattacccccatttgtcagcccctgggaacaaaattttaataaaaacccttaaacccacccccgggctttttggcccaattttacacaaaacggccccccgttgtggggattccggcgaaacataattcaccgtttttggggcgggggaatggcctctctttctccctttnnnnnnnnnaattttttcaatcttttttaaatttctggcgaaacccaccgtgaggactttttacaaagagagcctccacaacaatatttttcctttctctattaacactgtggggcacaaatgaaacaaagggcttgccccccaacaagggcactctttcccccttttttgggccccaacaatggccttgtaaagtggcgacgcacgtaacttgtaaccc

SEQ ID NO: 5366 - DNA, 2059 bp, Homo Sapiens
  misc_feature (944)..(984): n is a, c, g, or t
  misc_feature (1034)..(1043): n is a, c, g, or t
  misc_feature (1255)..(1462): n is a, c, g, or t
  misc_feature (1470)..(1569): n is a, c, g, or t
  misc_feature (1602)..(1643): n is a, c, g, or t
  misc_feature (1673)..(1682): n is a, c, g, or t
  misc_feature (1765)..(1779): n is a, c, g, or t
  misc_feature (1858)..(1866): n is a, c, g, or t
  misc_feature (1906)..(1932): n is a, c, g, or t
taagaggatcccctgttagaggttgtggcgctgtagagttggtggcaggattgtaggtggatccatagttagctgccaaaactaaacaaagaataaaataaccattagaatgtcagaataatactttggtggcccatagaagttctggattatttagtaactcaataaacaattgtagtttatgtttagttattctaatatatttaagtttctttatttccctaagtagacaatattatgatttcttcagaaactatcaaaaaacacttttgatcatacttcaagccaaatcaactgacctgccacaacccttgtagaggtggtggcaggatgatcaagctgttctcgctgaagcagcagaagaaggaggaggagtcggcgggcggcaccaagggcagcagcaagaaggcgtcggcggcgcagctgcggatccagaaggacataaacgagctgaacctgcccaagacgtgtgatatcagcttctcagatccagacgacctcctcaacttcaagctggtcatctgtcctgatgagggcttctacaagagtgggaagtttgtgttcagttttaaggtgggccagggttacccgcatgatccccccaaggtgaagtgtgagacaatggtctatcaccccaacattgacctcgagggcaacgtctgcctcaacatcctcagagaggactggaagccagtccttacgataaactccataatttatggcctgcagtatctcttcttggagcccaaccccgaggacccactgaacaaggaggccgcagaggtcctgcagaacaaccggcggctgtttgagcagaacgtgcagcgctccatgcggggtggctacatcggctccacctactttgagcgctgcctgaaatagggttggcgcatacccacccccgccacggccacaagccctggcatcccctgcaaatatttatnnnnnnnnnnnnnnnnnnnnnnnnnnnnnnnnnnnnnnnnnaatcccctgccttgccttgcctccccttcctgccacgtgcccctagttannnnnnnnnnaacaccatgtgattataaggcgcgctgcctcccccgacccactcagcgatgggaaatgaattggcttgtctagcccccctgctgggtgcttgttcagcccccactctgggctgtggagtgggtgggcaacgggcctgggtagctgggcccaggcaacccacccctccacctctggaggtcccaccaggctattaaaggggaatgttactgcnnnnnnnnnnnnnnnnnnnnnnnnnnnnnnnnnnnnnnnnnnnnnnnnnnnnnnnnnnnnnnnnnnnnnnnnnnnnnnnnnnnnnnnnnnnnnnnnnnnnnnnnnnnnnnnnnnnnnnnnnnnnnnnnnnnnnnnnnnnnnnnnnnnnnnnnnnnnnnnnnnnnnnnnnnnnnnnnnnnnnnnnnnnnnnnnnnnnnnnnnnnnnnnntttttttnnnnnnnnnnnnnnnnnnnnnnnnnnnnnnnnnnnnnnnnnnnnnnnnnnnnnnnnnnnnnnnnnnnnnnnnnnnnnnnnnnnnnnnnnnnnnnnnnnnngggggacccgcggcgtttaaaaaaaaccccaannnnnnnnnnnnnnnnnnnnnnnnnnnnnnnnnnnnnnnnnncccaaagggtttcttaaaataaaataacgnnnnnnnnnngctggcactttatttgagaatgagggggtggaactttttctgccctctttccccccccgccagtgggaaacccccccccgaannnnnnnnnnnnnnnagaccccgtggaaattccccccgtggggcgaccacgccccaccccttggcccaccctggccaacaacaataataatttnnnnnnnnnggggggaggaaacagagggcggggagaaacaaaaaagatnnnnnnnnnnnnnnnnnnnnnnnnnnnttcttaaactacacaaaaccgggggggaagcaaccccccgccccacacgtgatttgtggttcttcccgcccccacgaagaacacctttttttccccccaagaataaacccccctttttttgagggag

SEQ ID NO: 5367 - DNA, 1243 bp, Homo Sapiens
  misc_feature (164)..(172): n is a, c, g, or t
cgagggaggaggtgtgagaacacgaagtgtggcgacggtggttggatttccctcttttcctatcgccgagtccgcggggaaggggccccttttcgtggtgtgtttagtacccaccatatgaaatagtggggagggggtgggtagaggtgttgggtgtcatttcnnnnnnnnnccccctgggaggtagttcggaagcgtgcgcccgcctgaattattatatgatgcgtctggggggcgttacccgcagggcggttttttaattttgtcgcggaaaaatggagggctcccatgtaaggggcggggagaggattctgcattttcctgttcgcccgccgaaaacaaaatccggggaggtattatatatgggtggcgcggcgggggaaaactgtgggtgaggcggaagccaaaaggggaggggggtgtgagatttacgttatgtcggcgcggtaggggttttacaccaacctagaggttccggtgggttggtggtagggacaaaatgtgtgggttttggcgggccattattggccgcgccgcattcccggtgtgttcccttgaaggggatttttaccatgtcttggttcccaagaaaggggttaaacgcggggggacaaggttggtaagggggccttccttctttcctgggatgcagcaaggaattttccaaagggataagtggtctccatttgacgcttttggcgaacatttttttatgttgtgtgccaccgagggcatggtcaagcgagcttcagctttgcgttcagtgttggggccctgggagctctttcgaggcagaagtagattttgccttgccactgaggcggttctccaggggtgcagctgcagccacctccttgatctctttcacagtttcatgcaggcagtcctccgccatgtttttttgggaggagctgtccttgagcacttcatagggcccttccatccccagcccctggtccccgtccacacttctcgccgtgagcatggtatccactgcgctctcgggagggattctgggcagctcccgactctgatgacattttggtttccctgtgctgtcctgggaatccagcagatccgaagccgatgtctggacttcctcgtaatgctgcatgcaggtcagagtactgtcctctgaaagaatgtccccattggtgagtgccccattctgctcactgctggcaggagcatctgttgccaggctagtaactgaacggctgaacatctccttgtctgaaggctg

SEQ ID NO: 5368 - DNA, 391 bp, Homo Sapiens
atccaccaaaatctatattagagtatgtggcaataattaatatatttatatggaaattgtctcatgccttataagctcctaaaataaaatcaaggtcattatgtgactaatgatagcactaggaggaaaagaaaatactgaaagtaaaacagtcttcagccttggtttcagctatctcttcaaatcagcattaagtatttaatatcagatataacatttttggcttgtcagaccagtaaatcatgtttttccactggacaaaggaagctgaagaaacaactgttgaacaaactaaatgctgtgacatgaagcatctgacttctaagtctgagtatttagttaaaatgattggtgaacatttaactgggcaaaaggaatggcatccatcatc

SEQ ID NO: 5369 - DNA, 807 bp, Homo Sapiens
gggggcccagaggctgtgttgaggctaatggcggtgcccacggaactggatggagggagtgttaaggagaccgcagcggaagaggaatcgcgagttctggcacctggcgccgccccgttcggaaattttcctcattattctcgcttccaccctccggagcaacggctccgcctcctgcccccggagctgcttcgacagctctttcctgagagtcccgagaacgggccgattctggggctcgacgtggggtgtaactccggggatctgagtgtggctctatacaaacacttcctctccctacctgacggggaaacctgctcagatgcctcaagagaattccgtctcctctgctgcgacatagatccagtcctggtgaagcgagccgaaaaagaatgtccttttcctgatgccttgacttttatcaccctggacttcatgaatcaaaggacccggaaggttctcttgagctctttcttaagccaatttggacgttcagtttttgacattgggcttctgcatgtcaataaccatgtggattcatctgaatcatggagaccatggcctatgggagttcctgggccatctttcctccctctgccactacctccttgtggagccccaaccctggaagtgttaccgggcagctgcaaagcgtctccgaaagctgggactccatgattttgaccacttccactcccttgccatccgaggtgacatgcccaatcagattgtgcagatcttgacccaggatcatggcatggaattaatatattgcttgcaaccacacagttggggcctcacgccaac

SEQ ID NO: 5370 - DNA, 571 bp, Homo Sapiens
  misc_feature (82)..(82): n is a, c, g, or t
ctacaactaccctacgtgactcctcagactttggcctaggcgagaccccaaaggccgcggggcagcgtgatcaagacgcaanactcccggggcaagtcgcggcggcggaaggaggacggagagacgctccggtgcgtgtactgcagggacatgttcaaccacgaggagaaccgccgggccactgccaggacgcgcccgactccgtgagaacttgcatccgccgggtgagctgcatgtggtgcgcggacagcatgctctatcactgtatgtcggaccccgagggagactatacagacccttgctcgtgcgatactagcgacgagaagttttgcctccggtggatggctcttattgccttgtctttcctggccccctgtatgtgctgttacctgccccttcgggcctgctaccactgcggagtgatgtgcaggtgctgtggcgggaagcacaaagcggccgcgtgactcagtttccctcccttctccctccatccgcagccacaggggaactcgtctcttacatactctcatcttctcccccgatacagcgaccaggtatgaacaacagtgca

SEQ ID NO: 5371 - DNA, 1133 bp, Homo Sapiens
  misc_feature (540)..(540): n is a, c, g, or t
  misc_feature (650)..(650): n is a, c, g, or t
gggtgtatgatgcctgttactagcattcacatggaacaaattgctgccgtgggaggatgacaaagaagcatgagtcaccctgctggataaacttagacttcaggctttatcatttttcaatctgttaatcataatctggtcactgggatgttcaaccttaaactaagttttgaaagtaaggttatttaaaagatttatcagtagtatcctaaatgcaaacattttcatttaaatgtcaagcccatgtttgtttttatcattaacagaaaatatattcatgtcattcttaattgcaggttttggcttgttcattataatgttcataaacacctttgattcaactgttagaaatgtgggctaaacacaaatttctataatatttttgtagttaaaaattagaaggactactaacctccagttatatcatggattgtctggcaacgttttttaaaagatttagaaactggtactttcccccaggtaacgattttctgttcaggcaacttcagtttaaaattaatacttttatttgactcttanagggaaactgaaaggctatgaagctgaatttttttaatgaaatatttttaacagttagcagggtaaataacatctgacagctaatgagatattttttccatacaagatanaaagatttaatcaaaaaatttcatatttgaaatgaagtcccaaatctaagttcaagttcaatagctttagccacataatacggttgtgcgagcagagaatctacctttccaccttctaagcctgtttcttcctccatatggggataatactttacaaggttgttgtgaggcttagatgagatagagaattattccataagataatcaagtgctacattaatgttatagttagattaatccaagaactagtcaccctactttattagagaagagaaaagctaatgatttgatttgcagaatatttaaggtttggatttctatgcagtttttctaaataaccatcacttacaaatatgtaaccaaacgtaattgttagtatatttaatgtaaacttgttttaacaactcttctcaacattttgtccaggttattcactgtaaccaaataaatctcatgagtctttagttgatttaaaataaaaaa

SEQ ID NO: 5372 - DNA, 621 bp, Homo Sapiens
agcggccgcgcaggaagtaggcatagcatcagcatcctggaaggcagcgtcgatctcagagggcacccctctccagtcagtggccctgcgggagcacgggactgtctacacgccgggtgctggggtggaaacgccagtagtccctgcctcggaagaagtagatcttgttcttctcgggaccccagaccaaggcagcatggaccgggaacctcaccaggcccagctcggtgaggggtgcggggcccaggactggcttttcaccgtcgtacacccagtactgagcaccttggaagaaccaaatgtggccctgggcatcctcgaaggcagcgtccacagggctgggcagtccctgccagtggcgagaggccaatgctgggtagccgggctgcagctggcccccacggaggcgccacacaaagcccgctttgaagaaaaagagctcgcctcggatggtggagaccgcgtcaaaggaagcctcacaggcatcttggcgggcagtctggctccagcggtgcaatctcataggtgtctatcccacactgtgcgccatgtgctgtgtcactaatgtgacagtgggccattgctgcacatatccgtagtgaatcgccatgcagatctctg

SEQ ID NO: 5373 - DNA, 544 bp, Homo Sapiens
ctggtgctgctgaggatccgggccgagtcgggcaccaagggactctttgcaggcttccttcctcggatcatcaaggctgccccctcctgtgccatcatgatcagcacctatgagttcggcaaaagcttcttccagaggctgaaccaggaccggcttctgggcggctgaaaggggcaaggaggcaaggaccccgtctctcccacggatggggagagggcaggaggagacccagccaagtgccttttcctcagcactgagggagggggcttgtttcccttccctcccggcgacaagctccagggcagggctgtccctctgggcggcccagcacttcctcagacacaacttcttcctgctgctccagtcgtggggatcatcacttacccaccccccaagttcaagaccaaatcttccagctgcccccttcgtgtttccctgtgtttgctgtagctgggcatgtctccaggaaccaagaagccctcagcctggtgtagtctccctgacccttgttaattccttaagtctaaagatgatgaacttctga

SEQ ID NO: 5374 - DNA, 298 bp, Homo Sapiens
gcacccaatatttggtctgtaattccttaaaatgtatttgtctgattctggtatccagtaatgctggcatcatgagcctgtaaaaaattccttccacttcaatatttttaaaagcatataaaatagatattattttttccttaactatgtataattcaccagtgaaactatccggacctagagttttctttttgagtagacttttactacaatttttatttctttagcatataaaaagctactcagggctaggcatgatagctcatgtctgtaaccctaccacttcaggccaaagcaa

SEQ ID NO: 5375 - DNA, 1632 bp, Homo Sapiens
  misc_feature (756)..(805): n is a, c, g, or t
caggtcaccgccagcacgcgcctgcttcccgtctgcgcgagtccacgcagctccccaggcccttcaccagcacagcagcagcaggcatggcagcaagcgtggagcagcgcgagggcaccatccaggtgcagggccaggccctcttcttccgagaggccctgcccggcagtgggcaggctcgcttctctgtactgctgctgcatggtattcgcttctcctccgagacctggcagaacctgggtacactgcacaggctggcccaggctggctaccgggctgtggccattgacctgccaggtctggggcactccaaggaagcagcagcccctgcccctattggggagctggcccctggcagcttcctggcggctgtggtggatgccttggagctgggccccccggttgtgatcagtccatcactgagtggcatgtactccctgcccttcctcacggcccctggctcccagctcccgggctttgtgccagtggcccccatctgcactgacaaaatcaatgctgccaactatgccagtgtgaagactccagctctgattgtatatggagaccaggaccccatgggtcagaccagctttgagcacctgaagcagctgcccaaccaccgggtgctgatcatgaagggggcggggcacccctgttacctggacaaaccagaggagtggcatacagggctgctggacttcctgcaggggctccagtgaagcccagcactgctgcagggggtgggctgcctgcctnnnnnnnnnnnnnnnnnnnnnnnnnnnnnnnnnnnnnnnnnnnnnnnnnnatgcacatgcaacaggtgcgtctgtctatatgtctgggttcttgtcttttgtggtctgtttgtcttttctacctctttctcttgcagtgatagactgagggggtaaaatcaagagaaaaaactctcaggaatcaaggaacataatcctgtggagggtaatccattacatgagcttctcctgttcttccactttcctgcctggctttcactccttcccctgctctgcccagcctttccctcccacccactcctccttctgcaaatgccctgaagccagcccttaccccaacacccacttccccacctccttagccccagatacatacatgcccacatgcacgcttacatgtttagagccatccttgtttccaaatatgacccttcgcttgagggcaactgcataggtacatctaactctggactggcatgcacattgtcatgtgcagctttgcatatacacacatgcatacatgagcctccacacaagcacttgcacacatgtggactcctaaccatgctaacctcactggctgggaaggtggggaccccatgggccagcccttgcaggaggcccttttgcaaggcttagggtgtggccagccctgaaagctacttggacacaggtttcagctggccccagcccagaagtgacccccagaaagggagggccaccgctttgccccctgcttttacccttccttctgggtgctctacacctcaggttaccaggcctgaggcatctcagccaagcttgtttcctgctctgaggcttgtggggtgggagccagagtggaggtcggtgaaataaagtgatgcaattagaaaaa

SEQ ID NO: 5376 - DNA, 602 bp, Homo Sapiens
cctgtacctcgactgtcacacatattgaatgccagttcccgtgtcaatctatttcctaagtagctattgcctaactctctttactttacattctccccttgctgctggtccaagccatgagtaccggtctgaattattgcagcaatgtcccagctggtctcctttccttcagcactgtccttccccaatacactctctacagcacagccaaatactacaacctcaaagactttcccttttgttggaatgaagtccggaattcttaacatggatagcaaggcctgttattttcccttccttgtattattctcagcttcatctcccatcattctccagagcatgtgcaactgtcctctctgcaccctaaactccaccatatgcacattcagtaatgtggtaatgtcaagaactctccactttccaactttgcatatgctcttgcctctgcctgccctgtccatcatcttgctaatttctattcacactgtaggatttagtgcctcttccatgaaccattcatgaactccacatcacccagtcctaaaatcaaggatgactgcttgcataacatcctatattctgcctcatcctggaagtgatta

SEQ ID NO: 5377 - DNA, 582 bp, Homo Sapiens
agtaccagagccctgctatttccaccacatcctataaaagctcagaacccatagcaggctcctggttatggctcagagttaatactcggttcacataagcctctctctggagggggataggaagtagaggcagtgccacaccgtggtgatgggtggggccctgaaagttaaccctggctctgccagtgattcaagctggtcgaccttgggcaaatgcctagccctccaagccacagcttcctcctctataaaatgggaataacaacagtaaccatctcacaggggtgttgacaggtgaaatgaagtcatgcgccgatggggcacagtctttgtacatgacaagtgctcgcaattgacagctgctatgattttattattgtcattacccagaacaggagatgctttcgaaagagggctctccaaggccttgggaagactttggggttggtggaagcccctggggtaggtggaacggcctggggtcaatctcctatttgtcccataaaacagcacctagactggaagacgggctcatctactgaggcttcaggagaggccccatggccagatatatcagggtac

SEQ ID NO: 5378 - DNA, 976 bp, Homo Sapiens
ttttcggtttgttgttcagtgtttattaagtagattcagtcttatatatgatatacagattcaaaaggaaaaggattccacatacttatgaaatcagtgcatttagcaagtaataccatggagataacagctcgattaacagctcattggtcttttgttaagtgagggagagagggagtcggcctgtgctagtcattccacaaacaaaacagaatttagtcacatcacgtagagaagacacattctaagaattaaaatattaagccacatttactggtaaaactcactatatagaacacaaataatttttatagagagcattgaggaggaagtcctcacctgcttagaagagccacgttaagttgcataggtgcatatctgtaaaaatataatttagaggtgaagccattaatagagtcacctttaaaagttggtgccatccactgtttgccttaagtgcttactatctggagccctgtgcccctccccggaggtgggacctcatgaaggagctgcccccagaggaaccctgaagaaatggcttgtactatctgcactgaaagtcttaaatctcatctcagatatggaactcatgctcttccaaaacatgtctaaattatgccagaggactaaagacctcttgggttgtccctaaatcctggatggcttgatcctgaaggcaacatgagtcattctgaccttcccactcccaggctgcccagggaagaactacattcatcccacagctctgcagcaaagtcctgccttcccttttcctctgtccatgcagttacccaccagcagccaataagaggtctctcttctgactcctgctcctaaatggaccacataattgaggcatatgggccatctaccaggtggaaagtgtttttcagccaatctgagttctacgtggtataggtttatagtcgtatttttaggtggaaacataggtaaaaaggtcaaacaataaata

SEQ ID NO: 5379 - DNA, 485 bp, Homo Sapiens
tagcaagtacgtctttgtcttaatgatctaaggctggtgtagaaacaaagggcctaatgagaaccaatcatcatggaagtcagttgcgggggcagcccataaggaaagggaaagtgagtggggttgggcataggctgagtgaggtggcctgaatgacacctcttagaggactgtgaagtacagcacagcccgactgcagggagggatgcacccatcatttacccatgggagcatctgtaggaccatctctctcccacttcttctcccctcccccaccgcatctggccagatggactgtcctacagcaatcgtttccatctgtcaccctcttccctctcctttcataccagtcactatcttgggtaacaaatttatacaggacagtggtacagaaatacatctttgctctgagaatacagcaaatattaacttaaattattataactgaacaaataataaaacctgaattttaatatcttcaaaaa

SEQ ID NO: 5380 - DNA, 450 bp, Homo Sapiens
  misc_feature (378)..(378): n is a, c, g, or t
  misc_feature (435)..(435): n is a, c, g, or t
tcagacgctgaactatgcggtgctgacttatgtcttcatagagctcaggttgaaggggcctgcaggtgtataggtcaaatattagtgacttgtttggttgcattgttagtgacaaacatgctgtgtggggaccagcatcctggaatttacaaaatagaaactggcagatgaccggcaggccttccagcatcctgagctctccctaaaaccctctctggatataaccgggactctcgcacggcatctgccatcccccagctggaaggctgacaagagcagattcccacatggctaacagttgctccacctcagcttcctggggaaacacaaagcctggagcccactccatgagaagtgagagcaacaattcactgcggngccttccagcctcccagccttcagagaaactccattggagagtagcttgagtagatntgccgtgaatatcaa

SEQ ID NO: 5381 - DNA, 449 bp, Homo Sapiens
gctggacccgtagacgctgaactatgcggactgtggactgctgctgatcatggaggttttggatactggcccctcttaaagaacttcaggatataaatcaactgtaccactaaatatactggttatttcaactaaatatacatacataaatattgcaacatgattttctagatgactaatgttctggcagactcttaatctcattgtggagcagtaccaaagagcctgcagactacctaagttgatttatatggtgttttaaaatgaatgggctatactccttattatatatttcacttgagcaacctagttctcagccacatgctgcctaaatgactttttaaagtccaaggtgggtgcaaggcagcagttgtgatgttcccaggctatggtgaaactatataccagccataacagaaaccacaactattttaatactcattcacaac

SEQ ID NO: 5382 - DNA, 647 bp, Homo Sapiens
cctcaaatatactgggcacacagcaagccctacctgtaatgtggtaggtctcactcctatacagaacatggcatgatacaaattctaaaaagaagatgtctggataagcactcttgattgactgtctgattagaggtacttttaatggaataggcagaaaatgcaaatatctaatgaacatgctggagaggttcaccatcggcaagcatttcattttcttttcttcaaaaattaattacagagtgtggctgcgtttctgtggattcagtgtttctaattctttcttcaattagtcctttaattttcttcccaaggagacacatggatatacaacacgtaacacagtgacattttcttgtcactgaaagaaatttcaaagttcattttcaaattcaaagaaaaggaaggctggagtggattggaaaagaggctacaggctaagaacttttaagagccctagagagagtggggtgctggtgtcactgttatttcatagattttccttgtccacagccattttcaagactcatatttcagggccttagatggtttgtctcatatcactgctgtctgtagcaacaaccactctgtagaaggctcccagggaaagaccataagtctaccttgttttgttgttgttttgaaca

SEQ ID NO: 5383 - DNA, 381 bp, Homo Sapiens
actatcgactcgcacccgtcagacgctgaactatgtgcagagaggtgattataatattctctgatggttgcttgtatttctgtggggtcagtggtgatatcccctttatcatttctgattgtgttggattcttctctcttttcttctctattagtctagttagcagtctattaatttttttcaaaaaaccagctcctggatttgttaatttttgaaagattttttgtgtctctgtctccttgagttctgctctgatcttatttcttgtattctgctagctttggggtttgtttttgggtctctattttagttgtgatgttgttaacttgagatctttctagctttttcttgtaggcatttagtgctataaatttccctcta

SEQ ID NO: 5384 - DNA, 420 bp, Homo Sapiens
accctgatattctggtgaataaaactgcccaggtcttggtctcatagagcttacattgaacggaatataggaaacaacgggaaatgcacaaataaacaaagaatcaaaataattcagatagtgataaaaattatgaagaaaacaaaacctctgtaatgggataacatgatgggagatttcgcgagagaaggagatcagtcatgtgtgtctgctctagttagggtagacaggcaggtctctccaggaggtgatatttgagctgaatcctgtacgacaagaataatgcagccaagcaaaatgctagggaatccaacccgtgtgggttgctgatggggaaataaagaagcaaaggagggatgactggccccgaggtcatcctgttagttaaagcctggacccgaatgggggtctcctgtcact

SEQ ID NO: 5385 - DNA, 345 bp, Homo Sapiens
tagtcctttaaaagagattcaagtaaaaatccataaagactttaaaaataggaccaccttcttttcatgcctagctttacaaggattggaaggacggatctagtccctgttcttgcaggaaatacctgaccaggtgacatgcaataaaaatagtcactccttctcaattttaactcactatttatttataaagcatttgataaaaaatgcattttatggaggtacgttggttttaatgattgcttctaggtagcactttgaaacttttctcaacactagaaaatagtagcatgtctttggtctgttcaatacacatagttcagcgtctgacgggtccgacgatat

SEQ ID NO: 5386 - DNA, 278 bp, Homo Sapiens
ccatcttgatctgatcgctgggggatactcaaacctttagctcaccttgcttctcccctccacctgagctgcagcctggaaaaggaggcacccacaggtctaaacatggccctgctgtttgtttcctgaaaattccaataacaaaagcaacgagagcctctcactaccaggccttctctcactttgctataaaattagttcacccctctttcttagagtgttgaggtccctgccctccccacctccctccccagacatcaggggatcctgctagagtc

SEQ ID NO: 5387 - DNA, 537 bp, Homo Sapiens
gtcgtacccgtagacgctgaactatgtgtctgtttttataccagtacaatgctgttttggttactatatagctttgtcatataatttgaagtcagataatgtgattcctccacttttgttctttttttctcaggatagttttggctattctgtgtcttttgtggttccatatacattttaggttttgttttttctatttcggttaagaatgtcattggtatttttatagggattgcattgaatctgtaggttgctttaggtagtatggacattttaacaatattaattcttccaatccatgaacatagaatatctttccatttttttgtgtgtcctcttcaatttctctcatcaatgttttatagttttcattatagagatctttcacatattttgttctttggttaagttaatcctaggtttctttttagctattgtaagtgagattactttcttgatttctttttcagatagttcgctgttggcatatagaaatactactgatgtttacatgttgattttgtatcctgcaacttt

SEQ ID NO: 5388 - DNA, 508 bp, Homo Sapiens
  misc_feature (141)..(149): n is a, c, g, or t
tcagacgctgaactatgtgtacttggcaagaacaaagagggagagaggtggaaatgctgccatgggggcgcattgattggtctctagtacacagggctcctaccgcaaatggcctctaagtgacttcatcagttgctcatnnnnnnnnntcaccctctgctccaatcgtggaggaagaagtatggattggacctggtgagccacggtaagactgactgctaaactgtatgaatgatgaggggatttgcacgtataatcttaactgtacatcaaatgttaattttttattttatccactgtctttgaaaacctaactcttgactaagaactgactttcctgtacttgttgttgactctaagtaaacttccaattccacatagtccaaagatgatgtgctgagaaatctctcaaaggaaaaatgctaagaatacaggcagagttatgcggcaaattttgcagaattaacacaattgcacttgtgagtatgaagcacaaaacattttcatg

SEQ ID NO: 5389 - DNA, 530 bp, Homo Sapiens
gagagcttcatagtcccctcccccaatagatcatgccatttaccgtgatacttgttttttaagtgtacgtttgactttatgaatacacactacggcactcatatctcataagccctctattcataatacacttttacatgaatagctcgtcataaaaaaattaaattagtaaaattcatctggaaccttttctcagtttctgaaaaaagtgtaaggacttttagattaattttggagtactttccctgtaaccttaaaaagaaatgaaacctactaaccttcttacatgtctgtcttttaaaatgaatgttaaatgaagcctatccatgtctgtgactcatctttatcaataatcagcatgtatacagaatctaactggcaaagtaccttatacaaaggaactaagctgggtttcccaatgttgcttggcagggctggcattctggaccaggtaatttatttgttgtggatgctgtcctataccttgtttatacctaacctctacccacgagataccagtagcacccttc

SEQ ID NO: 5390 - DNA, 637 bp, Homo Sapiens
cgtccttcatcatacctaccatgacagggaaaacagaccaagaaatggtggcatctgtgtggccaatcatacctcaccgatcgatgtgatcatcttggccagcgatggctattatgccatggtgggtcaagtgcacgggggactcatgggtgtgattcagagagccatggtgaaggcctgcccacacgtctggtttgagcgctcggaagtgaaggatcgccacctggtggctaagagactgactgaacatgtgcaagataaaagcaagctgcctatcctcatcttcccagaaggaacctgcatcaataatacatcggtgatgatgttcaaaaagggaagttttgaaattggagccacagtttaccctgttgctatcaagtatgaccctcaatttggcgatgccttctggaacagcagcaaatacgggatggtgacgtacctgctgcgaatgatgaccagctgggccattgtctgcagcgtgtggtacctgcctcccatgactagagaggcagatgaagatgctgtccagtttgcgaatagggtgaaatctgccattgccaggcagggaggacttgtggacctgctgtgggatgggggcctgaagagggagaaggtgaaggacacgttcaaggaggag

SEQ ID NO: 5391 - DNA, 765 bp, Homo Sapiens
tacctaccaatttctctgtacatactttacgcacagcgtaacgatggtctcaaaatcacccatatagaaaagtgttctcaacgatttttcctacagaaaaatataggggcctgaatgccaaagcttggaagcccagtacagtgggagtgaaatgtgtgcggggcaaggagaagggcttttctttcctccacttttcaaaggcctgcagccactctgtgactacaagagccagtcctccgaccttttcacccagtgccaatttccaaaattcaacagctaaaaactgtaaaaccgggggtcatacggtgtgcagagtccacaaagccttgcaggtgaggtgaccacgcccacgtcacctggtcaggtgccatcgtcgtgagcctctggtgggccaggtgggacacagcacaccccagggggaggggatagaaacgctcattgaccaaaaaggagcagctgtgacctccacagctgtgtctgtcatgcttgcttcatctaatttctagttagtagctattaatatagcaaataataaatgcagtaataacagtataaagtcagaggaatgtatactgccttggccccagcgtacgaggaagcgtataaaacaccatatcacagattgtctgtcagtaatctgctgttcagccaagagagttcaaagggagcagtttctgcatgtagggaagttggaagacacaaccccacctccctgggagctcggactcgtggtcgacgatatcccggaaatccgagcgtaccagc

SEQ ID NO: 5392 - DNA, 625 bp, Homo Sapiens
catcatacctacctaaggactggacaaaagcagtgtcctttcttaaaccaagaatagattttctcaccaaaagccatggcttttggaaaacagtataattccagctttcctcaatgtccacagcttccagcaagaagggacacaatattgcagggggccatggaagggcggcttgaacaattctcttctagtctgcaaacagatgctcttacattggctaactgggtattagtgtgggtttatcctgaagagcagcatttgatgaactaccacagctgggaattaacagaaagggctgccccacacggaatggcaaagccagcatgcagtttgtattacatacgtccactctgaatctcttcattcttctctcatgcaggtgaggaacgagctgcagcaacggatgcacaactgacgactgagaggacatgaacacacacgtgaataagtgcatggcttctcagcagtggccatcaagacggtttcctatttgttttagtttttacccactaaacttgtcccagacaaaacagaaaattaaagatgtcacctaaaacaggtctttgggagcaattcgaagaactgtggagaataaaccaagaggtggtaggtatgatgaaggacg

SEQ ID NO: 5393 - DNA, 552 bp, Homo Sapiens
  misc_feature (504)..(505): n is a, c, g, or t
  misc_feature (522)..(523): n is a, c, g, or t
  misc_feature (539)..(539): n is a, c, g, or t
cgtccttcatcatacctacctctactgggtctcttgttttctctgaaagagaatttgctaacggaccagtacactttatgctagggaggagggtggtaactggaggaggaggagaaagccggggaggaacatcatattcttcacttccaaggtgaccattggaaaagaccttagctccttctaaaggcaaatcatggcgtctgtgtttccgcataagcactgggtcagagcccactctactgtgccttccattgacatttgaactcgctgtgattccaggttttggagagccctcccctaggagtcgacatcccacaagctgattagtcccaaacacatcccgagggcaccatgcttcaagaggcattggcgggtctctggaaggcacgctttccacatgatggatgtgtctactcagtctattgtctggtgggattggtggaggtctttcaggtggcggtggaggaggatctcttaagcggaggagcgttggtgcttgggagnntaggtttattcttgttnnttctcaccatgcaagngagaagactttgg

SEQ ID NO: 5394 - DNA, 821 bp, Homo Sapiens
  misc_feature (685)..(687): n is a, c, g, or t
  misc_feature (697)..(697): n is a, c, g, or t
  misc_feature (699)..(700): n is a, c, g, or t
  misc_feature (707)..(709): n is a, c, g, or t
gggcttctcctggattatgtgctacaaatgtgctttggctttagaaagggatggatgagaagacagacctgagaccaatctgggtagaagcaaaaagttgaaccttttaaagtgctgaacacaaatccaaattcgaatggttcaagcagccgtgaaatcgctcttcataaagtgggcttaattctctagtttaagttcttttgatggaatgaattaattaatgtgtcaggtggcttatttgtggatgccatgattgatgatgttcattttaagctcttacctatagtacaagtacatgatgctactgaatatttttccacttggaaactgtgagctggttgttgcattaaaacacacatacaaacaaaatcaaaaacactgcggactttcactcaagctggtctttcttccccagtgtaaggcaatcctgcctactaacaacaccaacaacaaaacactccatctgtgaagctgacgcagttaagggggctaggcagggcatttgtgccaactaagaatcaccagatacccaccataagtacctatcgcagttttgaagtcgtttctccccaactcccaactcctgaaggttgctgcctgcatatttactcttcattagtgctattttcctgtatgtcattgtgagcaagctgtgattaataaagaattggagttctgttgaccnnnacccctttcngnnaaaaagnnnaaaacttgtccgccgccctccgccctcgaggaagctttctaagacattccttttggggccgcgggccccggtatgttaagtggaacatgggtcataacctggttttcctagc

SEQ ID NO: 5395 - DNA, 1279 bp, Homo Sapiens
  misc_feature (394)..(394): n is a, c, g, or t
  misc_feature (600)..(612): n is a, c, g, or t
  misc_feature (1052)..(1060): n is a, c, g, or t
  misc_feature (1158)..(1209): n is a, c, g, or t
  misc_feature (1264)..(1264): n is a, c, g, or t
agatgccgacaaaaaaggaaagtctgggttcagtctttagagaagaaagctgaagacttgagttcattaaatggtcagctgcagtgaatatattgctcgtgaaaggtgccagattgacagctttggaaactgaaggactctaattatccacagaccagagtgaagtcaccctgctgagaaatgaagtggcacagctgaaacagcttcttctggctcataaagattgccctgtaaccgccatgcagaagaaatctggctatcatactgcctgataaagatgataagttcagaagacatttcagtgccgagttagtccacattacagaagctatacagcataagttcggtcagcacatccaatggagtcagttcaacctccaaggcagaagctgtngccacttcagtccctcacccagatggcggaccagagtacagagcctgctcctttcacagatcgttatggctccttcctcccagtcacagccctcaggaagttgattaaaaacctgcagtacaacagttttagatactcattagtgacttcaaagggaaatcaaggaaagaccagtttccatttatgcgaaatctgtggttgtaaannnnnnnnnnnnnacttgaaattaaatttggctctaaagctggtgtagcagcagttgatcagactgaaaaacggtttttagtctctggaaaaagactgattttgctttttttataaatattattagatttattaatttttctgtgctcaatgtgtaaattgtattataattcattgtgatttatttcacttttaatctgctggtgttttaataaatgggggtgttactgaatctttcttcccacttccatttcttttgaccaccccttaaccctcgactgggacggtagtagtattatcatttataccaaagtttgcatagtccctgttgactctgtaatgttaacggagtcataaaagcactaggcaagagacagatagaaatttgcttttaatcccttttcccttttatttttgcccattatgcaaaaggataaaaccctaaaggaacacnnnnnnnnnaagctgagcggaaaacatggttaaaaacataccagggcttttaatgcacattgggtatagctaaatccaaggccccttttataaatcaattttccctnnnnnnnnnnnnnnnnnnnnnnnnnnnnnnnnnnnnnnnnnnnnnnnnnnnnccggaaatcttccaaaaaagtgacttttaattttcttcagagcgccctcaaattncaaaaatttttacct

SEQ ID NO: 5396 - DNA, 871 bp, Homo Sapiens
ggggggttgggacttatcccccgggtggggattgccgtgataacccagttggcaaaaatgaaagggcgttttcttggaaggaggcagggcccgttttttccaagggaagcttggcctttttcaagcaagtcaaaggggttgtttggtcgggaagggaaaatggcccttggggttttttcctgcaggggcattatagggcggtttaggaacccggcaaggaaggtttaattatggattaaaccatatagtgggtggcataaatagggtttacttccgccgtagaaatttgggccaaaagggggggaagggatccaaaattgggcgggctgggggaacaaatcgggcccccagttatggggaaaggaacaatcagaggggaggtgaggacgggatagaagcgcagcaaggtagaaaaagaccaggataatttggaacccctttagtgggaggtaagaaaaagaagagaaagaacaacaacaacaaaaagagcaagttcaaatccaagggggagagctcctctggaacaaaactcctaccaaagagactaagagctaaggagagggcaagatccaggattccttcttgtgtttaagcaggagcaggcagaaaagcctaacaacccccgtctttcccatcggcagccccacgcccatcatcacacaaggccccaaggatgggaaagagaaaagctagaaggacccaggggcctcgggactacaggaagagtggaaagttacagactgtaaatagagtcgggtaggcttgtgcccttccttatttgtccggttctttcatttgctgcttctgtttaagctcaagggtcagtcaccatgaaatgaatttgcacctcggtttctctttaggctccacc

SEQ ID NO: 5397 - DNA, 1500 bp, Homo Sapiens
aagtttgaagccttgcccaagctttaatgtcatgctaaccagttaccttgttagagctgggaagccaccttttgctcaaaatgcagacttctgcctttgaaaacacaccacacctgattttaagtgcttaaaggacagaaaatgtcgttgctttaaattgttgctttgttcagagacatctggatttgctgtatccatacaagcaaaagcttttccaattccagaatcaacccacactaatttgttattgcctcgtactgtattggcccagctgtaatcaactcagcaggcttttggttgtaaattcaagtggaaattgagttggtcttatttgtgcccgttgatatctgagggctgtgaggaagatggccagtaggtcaaagggaatagtgttgaaaagctgaccagtactgggcaggtggccggctgtccctcaggcaccacaacgccgagccacggtaaggggcatgagccacatttgcagaatatagccagagtccttccagaacctcctgattcgcgccaggaggcatcccagggcacacaagtgtcaagggcctactcaggtgcttggcagagctctctgtgtgttattaacagaagaggctacggcttagagtggaaaggagcatgtgatggctagcggtgggcagcctgtgtactctgccaagtttgggtggtccaggtccccacgatttctgtgtggagggttgtccggcatctggccactaggggggccggtggttctcacacacacgcagcggggctccttagcacctggcttatacagcttcctggggacgccaagtccagtctctgctcacacctaccactcttctagggagcaccagagccggctgcccctggctgagctccactccgcgtttgcacggcgggaatgtctgcttctcttgcagctgtagtttgttggcctccaagcctctggtgatcgcagcttctacctgggtcagtgccggggtgggcagcccatcctctccgtaggaaccgccctgtcaccctcccaagcacacacataattcttctcatagaatgaaagccaattgtgaagtgtcagcatctcagcggctgacaggtcggatacgtcatccacgaggcctgcttcagaacagtccccggtcacgaaagctctggatgcgtctcggcctgcgaagccgctatagtgggacccaggctcgtagtgcctccggccggaggacacatcgtagacacggccgagcaacgccaagtacaggcccgggtcccctgggccgccgcggtagcgagacagctcctccggtatgaaaaggcgaaagccagcgcggggaccccaccagcccataagccgtgctgccattaccgctgctgcggctacagccaggcccaacaaaagcccacggcctccgcacctcaacatctatataggcccacccgctccgcacttccgaggttgccgcctctatctacagctaagatggccgagacgccgagcgtgacgtcatc

SEQ ID NO: 5398 - DNA, 360 bp, Homo Sapiens
  misc_feature (252)..(360): n is a, c, g, or t
ggtggagaggggcgacatgtttggcccccgccggcgggcgcgttgttttgtttttgggaagtgagagtcagagcgcttgtgttctatcactcagcggggtgtgtccggagttaagggaaataaaaagcgcgcgggttctgcttttgggtcgcgggcaaccgcggggcgccaccgcggagggtaggtaaagagaaaattctttcggggcggcggagcggggcgcacccccggaaataaacgcatataaaagtnnnnnnnnnnnnnnnnnnnnnnnnnnnnnnnnnnnnnnnnnnnnnnnnnnnnnnnnnnnnnnnnnnnnnnnnnnnnnnnnnnnnnnnnnnnnnnnnnnnnnnnnnnnnn

SEQ ID NO: 5399 - DNA, 772 bp, Homo Sapiens
gggtgaccaggtggcagctgaagtggcccgccagaaccggtacacgtgcgtggacgttggctgcggctgctctcaccggtcatgccgtgtcgtgacggaggagcatgttcccagaggctgccaccggaggatgcacgcaagctctccccgagcctcatgtgtttacccccgtacccggagccctcagagtgctcaatggaaggaccaccgaggcagaagccgcccgtgagcaggcgctaagcatcacgcgagccgtgcgctccctgcgggccgactacaacctcacccggatccggcctgactgtttcctggaagtggcggatgaggccacgggcgccctggcatcggcggtgtcgggctacgtgcaggccctggccagcgcaggtgtggtggctgttctggccctgggggctcccgccccccagggttgcgctgtggctctggcttctgatcgctgctccatccacctgcagcttcaggggctggtggaccctgcacgggagctgggcaagctgcaagccaagcgagttgaggcccagcggcaggcccagcgtctgcgggaacgccgtgctgcctcgggctatcctgtcaaggtgccgctcgaagtccaggaggcagatgaagccaagctccaacagacagaagcagagctcaggaaggtggatgaggccatcgccctattccagaagatgctgtgatccaccacccagcttcacccctcacccccagcggctcaccatggggatggcagcaataaaatattttcccacaa

SEQ ID NO: 5400 - DNA, 457 bp, Homo Sapiens
  misc_feature (151)..(186): n is a, c, g, or t
gcaaatcctcagagaaaaagattctggggttacttgaccttctctcctgttaagtgcagtagggcttcccctcttgactttcctggttatagctttccatcacagctccccacattctctcttgatgttgaaagcagtctctcaaaagacnnnnnnnnnnnnnnnnnnnnnnnnnnnnnnnnnnnnccttatgcaaatcatactcctgcccaagaaaatacagtagttccccttatctgagcagtatatgttctaagacccctagtagattcgcaaaccacagatagtaccaaactccattcatatatatgatgttttttcttcccttaaccccactcatatgtatctgtgataacgtttaatttataaattaggcacagtaagagattaatgacaataataaaatagaaaaattataacaatatgctgtaataaacttaatgtggtctttctcaaa

SEQ ID NO: 5401 - DNA, 1805 bp, Homo Sapiens
  misc_feature (18)..(18): n is a, c, g, or t
  misc_feature (917)..(1025): n is a, c, g, or t
  misc_feature (1335)..(1349): n is a, c, g, or t
  misc_feature (1786)..(1786): n is a, c, g, or t
tccccctggtatcccacncctactgactattctttctctcctaggagctgtcctggtgggccaggtccttgtatcatgccacggtcccaactacaggtcctagctgggggcctgggtgggcctgggctctgggccctgctgctctagccccagccaccagcctgtccctgttgtaaggaagccaggtcttctctcttcattcctcttaggagagtgccaaactcagggacccagcactgggctgggttgggagtagggtgtcccagtggggttggggtgagcaggctgctgggatcccatggcctgagcagagcatgtgggaactgttcagtggcctgtgaactgtcttccttgttctagccaggctgttcaagactgctctccatagcaaggttctagggctcttcgccttcagtgttgtggccctagctatgggcctaaattgggctctaggtctctgtccctggcgcttgaggctcagaagagcctctgtccagcccctcagtattaccatgtctccctctcaggggtagcagagacagggttgcttataggaagctggcaccactcagctcttcctgctactccagtttcctcagcctctgcaaggcactcagggtgggggacagcaggatcaagacaacccgttggagcccctgtgttccagaggacctgatgccaaggggtaatgggcccagcagtgcctctggagcccaggccccaacacagccccatggcctctgccagatggctttgaaaaaggtgatccaagcaggcccctttatctgtacatagtgactgagtggggggtgctggcaagtgtggcagctgcctctgggctgagcacagcttgacccctctagcccctgtaaatactggatcaatgaatgaataaaactctcctaagaatctcctgnnnnnnnnnnnnnnnnnnnnnnnnnnnnnnnnnnnnnnnnnnnnnnnnnnnnnnnnnnnnnnnnnnnnnnnnnnnnnnnnnnnnnnnnnnnnnnnnnnnnnnnnnnnnncccttgtgccccgccctcgcccctaaaaaaactttttaaaaccattcctttgggcgcgaggccccccttggggccccgaaccccgcccacaaatttttttccccaaaacaaatacccggccctgaacttccccccttgggtttccccaacaaaagtaaaacgcccctctgcggacaaacgcaagccttccttaacacaaaaatccccggggggggttctctccgcgggggtcaataatatgggcgcccttccctgccaaaacaccgcgtccccccgttccggaaaattctctgatccgcccacatggttnnnnnnnnnnnnnnngctgctttggtatcatcgcccgcccccccgaagaaaacccatgggtggggagaatacagctacgttatagcacgttattcttgttcgacgcgaaatactgccgccgcgctgctctctttaacaacaacccgccgttatccgcggcgagagaacagcgtgttggagacctcccctccgaacgcgacctagtcaccgcacgccaccgcctgtggtatgcgcccctccgccaacacaccacaactagtattttgcccgcaagaggcgaggcgcacaaacaccgcgcggcggcgcagaaagacacaactgtctctccatattgtgtgccggcgccctcgtctccataaataaaataccctcaggcggcacatagacaccacacccatagcgccgcctatgtccggctccaaccccacaaaaagtgaggcccgcctggctcnacaaagcgtgctttggggg

SEQ ID NO: 5402 - DNA, 500 bp, Homo Sapiens
gcggccgccgagcacccggtccatgtgcctgccctggccccacaccatgtagagcgtgtctcgggccttctggaagtagtgtgaatagttgcgcagcagcagcggcacgcttgtgtgtgagacgacacgcagggtgctgcgctggcccacatccgcctcaaagcccacggtgggcgcctggttcatgcggaacacgcactcggcactgtcgatctcagcacccaggcctgagcccagcatttggccggagctggacaccacggcacagctgcggcagggctcgcggaccagcggcttcccatctggcacactgctatatccactgaagtgcaggggtcccggcacagtgggcctggagcctgtggggaagtggtggtccaggcaggtggccaggcagaggggcaggccggcccagcagcacaggaggatgtagacggcagagaagaccacggagcacaggatgatgagcacgagccgacccggagccttcatgctgtcgc

SEQ ID NO: 5403 - DNA, 521 bp, Homo Sapiens
aagctccagcttctagtgcgtagggtcttgacgccgttaaacatcctacagtgcaaggcagcccccgaccacgaagagttgtcttgctcaaatatcaacagtgctgcagtgtagaaacttgatcgttggttttcttttaatgcaaaactctcataaaaacctttcacttttcctgtcattgattatatgcttgatacacccaaaaagaaaaggggaggggcaccaattcacctacactccagtggctccatcacctttaaaaatatttataaaatagttccaaaaatctgatatctgaaaagcaatccaagcctgtgtaaatgggaatcactgataagtatcatcatctgtatcagcttggcttggacatgaaaaattgattctctttatgtcactccttgcacctggacaaattcaatccccggtacttaagtcacactgccaagccctcggccctgactattgtcttgattgctgttcctttctggttcaaaataaaatcatttttgtggcaccaagaa

SEQ ID NO: 5404 - DNA, 1451 bp, Homo Sapiens
  misc_feature (113)..(122): n is a, c, g, or t
  misc_feature (148)..(208): n is a, c, g, or t
  misc_feature (223)..(304): n is a, c, g, or t
  misc_feature (308)..(317): n is a, c, g, or t
  misc_feature (343)..(356): n is a, c, g, or t
  misc_feature (363)..(486): n is a, c, g, or t
  misc_feature (1178)..(1293): n is a, c, g, or t
  misc_feature (1387)..(1400): n is a, c, g, or t
agggggccaaggtggggattccccgggggattcaggttctcccaccccgttggggagggttcccagtcggcggaaagttttaaaaaattccacccttctcccaataagggccnnnnnnnnnntaaatttaaattaggcccccctgggnnnnnnnnnnnnnnnnnnnnnnnnnnnnnnnnnnnnnnnnnnnnnnnnnnnnnnnnnnnnnggttcccccgggggnnnnnnnnnnnnnnnnnnnnnnnnnnnnnnnnnnnnnnnnnnnnnnnnnnnnnnnnnnnnnnnnnnnnnnnnnnnnnnnnnngggnnnnnnnnnnaaaaaaaggttttaaaaaattttttnnnnnnnnnnnnnnccccaannnnnnnnnnnnnnnnnnnnnnnnnnnnnnnnnnnnnnnnnnnnnnnnnnnnnnnnnnnnnnnnnnnnnnnnnnnnnnnnnnnnnnnnnnnnnnnnnnnnnnnnnnnnnnnnnnnnnnnnnnnnaactgctgccaccaccatgaaagagtggccaccacatctttattgcatactcaggtgaataacttattatacaatgaacactcctccattaggagaccatgcccacttacagaatgcagccgtaaatgcggtaaatctatttacagaggttggggtgcaagatgagagaagtatcagccccaggaatttgaagtgagaatgatctacaaattctcctgacaaggagcaaccgggcttgtgctagtgaggtctgaaagaattcctggcagagcgtagggggagattagatctcggaattgacagcaagtttggggacagtgcaagaagagaggggtgacctgtgaattggtgctggggagctgctgaggcccaatgtgaggcagcactagagagatgagtaaatttagggtgatctttagcctctcctacccaggcaagaagggttggggagcgggggtgccagcaagttggcttccagtgtagattcaggccagtgggctgagagaggcttttgctatttttgctcagatatgcaggtctgctctgggccacagagcctcacaaaacccactgtgagttagaggagcaggcccctagagctgtgtgagccagcgtgagctcagatgaccagacctttagtccatggaaaataacagcaagattaagggcctaggctgggagctgtggctcannnnnnnnnnnnnnnnnnnnnnnnnnnnnnnnnnnnnnnnnnnnnnnnnnnnnnnnnnnnnnnnnnnnnnnnnnnnnnnnnnnnnnnnnnnnnnnnnnnnnnnnnnnnnnnnnnnnagatcctgtttcaaaaaacaaacaaaaagagtaagggtctaaacttgagttgcctgagactcccacttaaaagaagtatccaaaggatgagacnnnnnnnnnnnnnntactacagcgcctctaagaactggagtcttactagcccacatcagcccccc

SEQ ID NO: 5405 - DNA, 714 bp, Homo Sapiens
ggggccctggatgccttcgacttggaccggatgaagcaggagatcctagaaggaggtggtgagagagctccacaaggtgaaggaggagatcatcgacgccatcaggcaggagctgagtgggatcagcaccacgtaaggggccggcctcgctgcgctgattcgtcgagcccatccggcgacagaggacagccagaagcccagccagccccagactccagtgcaccagagcacgcacaggagcctgggcgcgctgctgtgaaacgtcctgacctgtgatcacacatgacagtgaggaaaccaagtgcaactcctgggtttttttagattctgcctgacacggaacaccaggtctgctcgtcttttttgtgttttatatttgcttatttaaggtacatttctttgggtttctagagacgcccctaagtcacctgcttcattagacggtttccaggttttctcccaggtgacgctgttagcgcctcagctggcggtgacagccggcccagcgtggcgccaccacacaccgcagagctgtccaggcacagctccgtccccagcgctcatggtgttgaaactgtctgtcatgcaccacggtgtctgtgtccacacagtaataaacggtttactgtccgcaccctcgggctcaggccctcgcattggtccatcacgctccgggctggggatgccccttttcagagaagggcccgggaccac

SEQ ID NO: 5406 - DNA, 810 bp, Homo Sapiens
  misc_feature (196)..(300): n is a, c, g, or t
  misc_feature (583)..(742): n is a, c, g, or t
  misc_feature (755)..(770): n is a, c, g, or t
gtccagatgtttattgagcacctgtgttctgggtcctatttgggagccttgttaaccaccaagaccttcctaagccatattgtggtatacagacagatgcaaaaaaaagggctctctccctgtctgatctcatgcagcctgccttggagacaagactctcccagtgctgtgtgcttggagagaggaaagcacacannnnnnnnnnnnnnnnnnnnnnnnnnnnnnnnnnnnnnnnnnnnnnnnnnnnnnnnnnnnnnnnnnnnnnnnnnnnnnnnnnnnnnnnnnnnnnnnnnnnnnnnnggtgtgagcagcgtttccctgggggatgtgatgcagcccacttggggcctcatgcactcagcatctctttattagcaaacacttattgaacccctagtacatgccaggcactgttatgaagtcccggggatactttataacaaaagggacagaagcattcctgctcttgtgaagtttacattgactagatagtaaacaaaataaatgaaaatatgcagtgtgtcagtgctggtaaacccgtggagaaaataaagcaaggttggggtctggggttgggaattgnnnnnnnnnnnnnnnnnnnnnnnnnnnnnnnnnnnnnnnnnnnnnnnnnnnnnnnnnnnnnnnnnnnnnnnnnnnnnnnnnnnnnnnnnnnnnnnnnnnnnnnnnnnnnnnnnnnnnnnnnnnnnnnnnnnnnnnnnnnnnnnnnnnnnnnnnnnnnnnntccttaattttgnnnnnnnnnnnnnnnnaaaaaatttttaaaacccttttttgggggcccgccccccc

SEQ ID NO: 5407 - DNA, 476 bp, Homo Sapiens
caaccataccggaagtcaagcgacaagtggccacacgtttacgtgactacaacctggagttctgcaaagaagggaatatttacctggtctttgactaaaggtacctccccattctatgggtacattttattttggactatggggacttctaataccctttggtaaagaagagagtataaagaaaattcttgtcaaatttcactcaaaagtaatttcatgagaaatcaatgatttaaagcattatccaaattaaattatcatttgcagcaaactgtacaacagcaggaaggatatggaatggaacatgaggtatatatctttgcctttataattttaacatcttatattgaagattctgaaaacctatctttattagaggaaaatctcaatcttcagttttggccttctgtcaccagaatgataagtgcaatagttgtaaatctacttgacactgtaataaactgaactgaactttc

SEQ ID NO: 5408 - DNA, 926 bp, Homo Sapiens
cgacaggacagcaggcgggtctgatgacaacttaattgaaggtggaggaacaaaatttgtctgcaaacctggagccagaaacattaccgtcatattccacccattactaagatttattcaggagattgagcatgctctgggtcttggcccagccaaacagtgtcctcttcgagagtttctcaccgtgtacatcaaaaacatctttctcaatcaagtcttggctgagatcaacaaggagattgaaggagtcactaaaacatctgacccgtttgaagattctggccaacgcagacaccatgaaggtgctgggagtgcagcggcctctcctacagagcacaatcattgtggagaagacagttcaagacctcctgaacctgatgcatgacttgagtgcatattcagatcaattcctcaacatggtgtgcgtaaagctccaggagtacaaggacacctgcactgcagcttacaggggtattgtccagtcagaagaaaaacttgtcatcagtgcatcctgggcaaaagatgatgatatcagcagactcttgaaatctctaccaaactggatgaatatggctcaacccaaacagctgaggccaaaaagagaggaggaagaagatttcataagggcagcttttggcaaggagtctgaagttcttattgggaacctgggtgataaattaatccctccacaagacatccttcgtgacgtcagtgacctcaaagccttggccaacatgcatgaaagcctggaatggttggcaagtcgaacaaagtcagctttctccaatctttctacatcccagacgctttctcctgctcaagacagccacacgaacacggatctccccccagtgtcagagcagatcatgcagactctcagtgactgccaaatcgttccagatatggctgaccgcatgcttgcttga

SEQ ID NO: 5409 - DNA, 487 bp, Homo Sapiens
aacctgaaactgattagaaattgatcctgaacatcccagccttagtcaaccttccctttttcaaattgttatgcatggagattggaggattggggcatcttgaaagtgtcactgcagtatagcaatctcttctcaggtaatatagagataaagggaatataataaattgacctgttatttattatctttttcatacctaggacattccgaggcttaatatatttctgaagcctacagccctgataaacatcaatcccacgtcagtttccagcagtctcatctccccacacccttctgcaatgaaagctaatgtaaaagaaagaaatatgcactgcttaataagtcagaatacaatagaacttgtaaaatgtacctgcatataaggtagacattaggaagacttgaatctctctcttccccctgttctcctgagcattatggcaacagcattttcatgaaattagatctgttttatattttttcctga

SEQ ID NO: 5410 - DNA, 522 bp, Homo Sapiens
acggatgtgagaggatacgggtagactacagatgcagtggtgaagcatgtactagagggtcacgatcgtggagtaaactgggctgccttccaccccactatgccccttattgtatctggggcagatgatcgtcaagtgaagatctggcgcatgaatgaatcaaaggcatgggaggttgatacctgccggggccattacaacaatgtatcttgtgccgtcttccaccctcgccaagagttgatcctcagcaattctgaggactagagtattcgagtctgggatatgtctaagcggactggggttcagactttccgcagagaccatgatcgtttctgggtcctagctgctcaccctaaccttaacctctttgcagcaggccatgatggtggtatgattgtgtataagctggaacgggaacggccagcctatgctgttcatggcaatatgctacactatgtcaaggaccgattcttacgacagctggataacaacagctccaaagatatagctgtgatgcagttg

SEQ ID NO: 5411 - DNA, 732 bp, Homo Sapiens
  misc_feature (642)..(642): n is a, c, g, or t
gtccgctgccgtcgttgcccttctttcttgccaggtgagtgacttgcgcaatcaggtctacctggaggatggactggaccccttcccaggcgagggccgtgtggtgggcaggcagctgatgcacaaggccttggacagggtggaggagcacccaggctccaggatgactgctgagaaatttctgaacaggctccccaagtttgtgatccggcaaggcgaggtgattgacatccggggccccatcagggacaccttgcagaactgctgcccattgcctgcccggatccaggagattgtggtggagacgcccaccttggccgctgagcgagagaggagccaggagtcacccaacacgccggcacccccgctctccatgctgcgcatcaagtctgagaatggggaacaggccttcctactgatgatgcagcctgacaacaccattggggacgtgctgagctctgctagcgcaggccagggtcatggatgcctctgcctttgagatcttcagcacattcccgcccaccctctaccaggacgatacactcacgctgcaggctgcaggccttgtgcccaaaccagcactgctgctgcgggcacgccgagccccgaagtccagcctgaaattcagtcctggtcccttcntccgtcccggccccagtcccggtcccggtcccggccccagtccctgtcccgacccagtcccagcccccaataaagcacccgccccctcaa

SEQ ID NO: 5412 - DNA, 829 bp, Homo Sapiens
ctacaggatcaaacaatgctgagttcaaatactagcaaatttataacctctcttacggccttagttttgtcatctgaaaagtgatgataaataatgattatttcatacaatatcaagcagcattaagcgaaataacatgtgtaatgtgcccatatgcacgttacataaacagtacacacagtaatacaactgccagccctttctcaccctatctccataaccaaacactattcttccacgttttaatgtaagtataatcagaaaaaaactatttccttagattcccagagacaagaaatgaatgataaatggtcactcactcgtcccatcatctggttcaaagtggccagtgttgtcccacgtatagccgctgctattgccatagttatcatcagtataggctggctctgcataatcagctgggttaaaggttcccattccttgagcagaaaaccttcctcctcgcctaccagagccacctctgcctcggccacggccccttctgcctctttctgttcctcttccagaaggccctccactcttggtgccatccaatccattttcctgacctcgaaactctcgtccacggctggcacctctcccccgtcttggtggcccaccacgtcgccgactatagtctctgtcccggtctcgattttctttgccttcctcattggattccgtctggccaccatccttctggcctgagactcccttcttcttcccgaccatctcccaggaatgcgtgtctgggtttccttccagaagaacattgatagctctgttgacatctccattgcagtcatgcaaagcaatcacacattcatcc

SEQ ID NO: 5413 - DNA, 782 bp, Homo Sapiens
tttgtgaaattgcggcctttaatgtacattttaatgaaagggtgcattagtattgtacaggggtcttgtaaagtcatcaaaacttgctatgaactctaattgccatttgaagctactgattggcagtggctctactctaaaactgctttttagcaattgtatttttttcctgattatattttttaatgtactttgatgtttatgctgatgagttttttatgtacttttgggtgatgtttcagtcttatgtactcttctgacgtcagaaaagtaccactggttgtttgcagtcttattgtgtaatcagcctaccgcaggcttccatgtataataaagtaattaatattgtgcaagtgtaaaacacttctgttataaaagcagtgtttggaaaataagaaatattaaaaatggttacaaagtattagttaatttccttttcccactttcctccctttagctttagcagctaaagggtcaccaacttgtcattgcaagattcttagaaaatgtacttaatcttaaatacgctgagtactaaaaagtgtttatttcttatttcagtaagtgcggtaagttctattgagtacagagtacaagctgtaatcaaaggatggagaggacctttaccactgtatctcttaagctgtatgatttttctccagtttgttttatacaggttttgaatttctttaacttttattgtgtgtactgaatactgcatatgtattattctgattgtttgctctagtttactaccaataaaagtcctgttaatcacaaaa

SEQ ID NO: 5414 - DNA, 592 bp, Homo Sapiens
ctgcaggatctccctgtatattctgggatgggaaaagatttctcggatgcaacacccaaagcataaaagaacaaacgaataaactggatttcatcaaaatttaaaatgtcagctgtttaaaacataccattaaaagacaatcaactcttcatgtgacttttcagtcaatctgaatctcagggaaaactgtacaaagttccttctctagccccaatttcactgtccccttccaaagtggtgatactggtgatcaccccatagccacaagccacaccagccaccatggtggaaatgtgcaaaatccatgtgtgtccttccttcccaaatagccagatgataaattagtatgtcattaaacattatatatactgaaaatttctacagaccatcatcttcacttgcatgtgatttgaaaatgtgtatctcagaaattcagctctctagcttgtacaatacacatgaccagaaaacaggacacacaggatctaccttcttcctgtccagccaagtgactgcttatttaagagattcaaatgtaaccatgtttactttcatttaaaaaacacactgtaacaactgtaggaatgctgtg

SEQ ID NO: 5415 - DNA, 540 bp, Homo Sapiens
tcagaggtccccctggatatgtctggacaaagatgaagaaacagaagatgtcttagcttctaatgggtatgaatctgatgaacaagaaaagagtgcctatcaagagtatgacagtgacagtgatgttcctgaggaactcaaacgagactatgtggatgagcagacaggagatggtcctgtgaaaagtgcttctcgggaaactctaaaaagcaggaagaaatcagattacagtctaaataaagtgaatgcacctatcttaacaaatacaacattgaacgtcataagacttgttggaaaatatatgcagatgatgaacattcttaagccaattgcctttgatgttattcatttcatgtctcaactatttgattattacttgtatgcaatatatacctttttttggtcggaatgattcattggaatcaactggactcggccttagtagtagtagactaagaacaactctaaacagaatacagaaagccttattgatctagaagtttcagctgatcctactgccacactcacagcaccagcatg

SEQ ID NO: 5416 - DNA, 382 bp, Homo Sapiens
cgaccctgatattctggtgtatcctggactacaaatctcaggttgggatttcagccttagcattcaacaagttctttatctacatttagcaaggcatggggcggagtgctgggcacatgtgacagggctgtaattcttctgctctttcaatttcttataaatttcctgctcagaattataatgaaaagtccagaatcaggatgctagaaataaaatattttaggcagccctctgaaaatttatcctattcaaggctgttcccatgtttggcaatttaaaactctaagttaaacaaaaaattaagcatccctgtaatagggacaagaatgcagaaaaatagcctctgctctaatgaagtagatatgtacgatgttcatcagca

SEQ ID NO: 5417 - DNA, 827 bp, Homo Sapiens
atctgctttgtgatgacttcatagatactttagaggacatgaagaaactgaagaagaaaatacaacgtatactggaccagaagtttcagatccaatgagttccacctacatagaggaattgggtaaaagagaagtcacaattcctccaaaatatagggaactattggctaaaaaggaagggatcacagggcctcctgcagactcttcgaaacccatagggccagatgatgctatagacgccttgtcatctgacttcacctgtgggtcgcctacagctgctggaaagaaaactgaaaaagaggaatctacagaagttttaaaagctcagtcagcagggacagtcagaagtgctgctccaccccaagagaagaaaagaaaggtggagaaggatacaatgagtgatcaagcactcgaggctctgtcggcttcactgggcacccggcaagcagaacctgagctcgacctccgctcaattaaggaagtcgatgaggcaaaagctaaagaagaaaaactagagaagtgtggtgaggatgatgaaacaatcccatctgagtacagattaaaaccagccacggataaagatggaaaaccactattgccagagcccctatattaggccataaaacaagaattaatataattaaaaggatttaaaccataccaagtatattctctaactaggatggactcaaattaccaagccaccatataaggaaatttgaagaatccagtatgtagaaactgaataacacatgcgtaacccatccatgagtccaaggggatgtcagaaaattaaaacacagcaggccatcgcggtggctatacac

SEQ ID NO: 5418 - DNA, 689 bp, Homo Sapiens
cccgaccctaatatttctggtggtgatgtggctatgattgacaaatattctgtaaaatttctgcctgtctgcctctagaattctgcattatacaggcaaattttctttaaagctagagacttgtgctaaatttgcctgattttcatacagatatgctgtagtaatacagctaccttttcatttcatctttgtgctttggttaacaagcaggctcaagagactgctttgtgtaattaaataaattgacctaaacatgagctgtcaggtgaatacttaatatttccatgcagatacagaattccatattgtgttcagtaaatttcttttggttcttcacagtgaagaaagaatgtttctaacctaacatttgtagaaggatactggaaaattccttccaggaaggaaggaaggaagatgccattacttggtgtatttatgatggatgaccacaaagctattgttctaccagttattaattaccttctaagatcttcagttactgctttattaatgtcactgaaattctaaaaaccaggacattcttcccccgttcattttatgcttcatggttgaaatttttctgtcagtgagtggaaaataaccatgagatacatagactgtagcgcaaatggaactgttgaaagttccttagaaagccagtgctgtggcattggagatacggagagagt

SEQ ID NO: 5419 - DNA, 793 bp, Homo Sapiens
  misc_feature (101)..(101): n is a, c, g, or t
caatcacaatgtcgtccggctgaccaacgagaatctggaccttaaggacctggataacgctgaggaaaaggcagatgctctgaataaggagctgctgatgnccaaacagaagttgattgatgcagaagaagagaaaagccggctggaagaagagtctgctcaggtaaaagaaatgtgccgtcgggaactcgacaaggcagaatctgagattaaaaaaaacagttctatcattggtgacaataagcagattagttctcagttgagtgaaagattggagaagcagcagacagccaataaggtggaaattgagaaaattcggcaaaaagtggatgactgtgagcggtgccgggaatttttcaacaaagaagggcgtgtaaaaggcataagctcaaccaaggaggttttagatgaggacacggatgaagagaaagagacgctcaagaaccagctgagagaaatggagctagaactggcacagaccaaactccagctggtggaggccgagtgtaagatacaggacttggaacaccatttagggcttgccctcaatgaggtgcaggcagccaagaagacgtggtttaaccgaacactgagctccataaagacagcaaccggggttcaagggaaagagacttgctgagagcagctgccgcctcccgacaccttcagaaaacacgacaccttttgttgccttctttggccagatgtgtgattctgtgacttgtcccaggaccagaatgtacctaagtcagatccatagacgcatgttggtaggtatgatgaagacgtcaga

SEQ ID NO: 5420 - DNA, 775 bp, Homo Sapiens
tagagatcccccctgatatttctgggacagatggagagggaaacaacgtgccttcaggtgacttttccagagagtgggctgaagcccagcgcatgatgagggaactgcggaacaggaactttggaaagcacctcagagaagcagaagctgataaaagggagtcgcagctcttgctgaaccggataaggacctggcagaaaacccaccagggggagaacaatgggcttgctaacagtatccgggattctttaaatgaatacgaagccaaactcagtgaacttcgtgctcggctgcaggaggcagctgcccaagccaagcaggcaaatggcttgaaccaagaaaacgagagagctttgggagccattcagagacaagtgaaagaaataaattccctgcagagtgatttcaccaagtatctaaccactgcagactcatctttgttgcaaaccaacattgcgctgcagctgatggagaaaagccagaaggaatatgaaaaattagctgccagtttaaatgaagcaagacaagaactaagtgacaaagtaagagaactttccagatctgctggcaaaacatcccttgtggaggaggcagaaaagcacgcgcggtccttacaagagctggcaaagcagctggaagagatcaagagaaaagccagcggggatgagctggtgcgctgtgctgtggatgccgccaccgcctacgagaacatcctcaatgccatcaaagcggccgaggacgcagccaacagggctgccagtgcatctgaatctgc

SEQ ID NO: 5421 - DNA, 790 bp, Homo Sapiens
agcggaggagtaggttggcgaatccttgcgcattctgcaggtcaggagatggagcaggcgtagatgaaggcctgcgcgatgactgaaaggcaggcgtcgatgtggtctgtcttgtcgatgtcaaagacaaactgggggttctgcaggatgtcacccagaaccggagaggaaggctgttggtcttccagatgtgtagggtgtcggggtcggagattcccctcttctcagcctgctcctccaggaagtcgaaaaagtacttgacagccagtgggggcttgtcttcacggatactacagaatggccttgaacaggtcatccagaaacttctgcaacgtgcccttggtggagagcaggcgggtcaggtagatttccgggagcaccttcttgcgatggctctgccggtgagacttcttgggctccgccagctcgtccgtaggcagcaccaaatggaaatacttctctgtgtccaagtctttcactcggcccagtgtgttgtccttcttgtctatgagacgtcagtggcgcaggtgagcgcacgcttgcagggatcttgtaatgggccagcgtgttaagcttctggcggccgtcttccaccactgaggtgtcgtccaggtcccgaaggatgtagctctgtgtgctggaggcgaaccagctcaagtgtcgaccgtctctctgcacgcggccactgggagtaggcacattcttgcagaaggcctccaggatcttgtgccttgacctgtgtcagcgtgtcggtgtcccggacgcgtgggtcgacgatatcccggaaatc

SEQ ID NO: 5422 - DNA, 455 bp, Homo Sapiens
tgagccaggacgaagccaagacaatgtgactcccaagtagcaggagcagaggtcggtcacctgtggcattctgtttcattcccttttaaaattatgagactttataggcagtgtaaaacatcagcaggcagcgatgtgataggatgtgcgaaaaagctggtctgataccatggctataattacagagctttagttcaattaggattttgtaaatgagcaaatgacctttttttccagtgccccttgtaatagttaatatgagtccatgcaatcttgtcatgccattctcctgaaggtgttgatttctggtacacagccagcttagctttggctgctggaagcacagtaggtactgatgattacttcctggaaatcttgacaggcttattgtactgtgtaatggggaaaagttaaagtataatgtttggtgttaataaatgactaatgagaaaaaa

SEQ ID NO: 5423 - DNA, 194 bp, Homo Sapiens
gtcgtgaaaatgttatgttgttgctgatatgtactgtacagttaggcctgtacttaacatgtacagacttttcttgtcattatttcctgaacaatatagtataacaactatttacatagcatttgcattgtattagttatcataaatatctaggaatgatttaaagtatatggaggccagaatattagggtcgc

SEQ ID NO: 5424 - DNA, 395 bp, Homo Sapiens
cgtccttcatcatacctacccgtccttgtataacacatgtcttctccatctctgttgaatttttatttaatattaaaatactgggctagtttccaggtcttcaataacacggcatttctttcatgcatctgttgactgtgatgcctaatataactgtagatagagacacatttctataatttatatagttgttgtaagggggtagaaaatagaatttacagacctttaataatctgtgaacatagggtacctatttgatacttttagtagcctctaagaagtaaacaacaaagtcagtgacctgattctgactctcctactgatcccctgaaaataagcatccctgccaattaaatgtatttccatataaaatgtaaataacaataccacccggg

SEQ ID NO: 5425 - DNA, 325 bp, Homo Sapiens
tgtgtgagccactgtgcctggccctgcatatctatacttatgccagtactacacttgattactgtagctttatggtaaatatttggttactctagattctttgcatttccataaattttggtattaatagtgtcagtttctatcaaaaagcctgctggaatttcagttctgttgtattaaatatacagatcattagggagagaattgtcgtttaaaaaatattgagtcttctggtccttgaaaatggtgtatcttattattttttaaggttcgttagtttctctcagcagtgttttgtagttttcagggtaggtatgatgaagga

SEQ ID NO: 5426 - DNA, 149 bp, Homo Sapiens
tagctctctgtatctctaaattatctatctaatctatctaatgtcagtcaatggatctgtatctattgtctagttattaatcatctaatatgcttattatgtcatcaaatctatttatctattatttatatccgtcatcggtaggtatg

SEQ ID NO: 5427 - DNA, 524 bp, Homo Sapiens
cctgatctgctctccatcactctggattagtttttcttaccctaaaatttcacatacatcgaatcatacaatatatactcatttcttgtatgtcacgttagcataatgttttatgaggttcatccatggtgttgcatgtataatttctttttattgcaaagtggtattctgttgaatggatataccttaatttgtttatctgatcacccattggtggatatttgggttatcccagtatttaactattaagaatagagctattatgagcattttgagtaaatgtcttcgtggacacacagtcatttctctttggtaaatacctaggtgtgatattgctgagtcacatatatgttaagtgtatactttaggagaaactaccaaactgtattgccaaaacattttgaccattttatgcctccactagcagcacatgagagctttggttgctgcctgcccatcctccctgatacttggtattggcggcctttctaactttctagctatactcagatggtaggtatgat

SEQ ID NO: 5428 - DNA, 1594 bp, Homo Sapiens
  misc_feature (40)..(41): n is a, c, g, or t
  misc_feature (69)..(70): n is a, c, g, or t
  misc_feature (155)..(155): n is a, c, g, or t
  misc_feature (217)..(217): n is a, c, g, or t
  misc_feature (459)..(531): n is a, c, g, or t
  misc_feature (974)..(998): n is a, c, g, or t
  misc_feature (1069)..(1171): n is a, c, g, or t
  misc_feature (1178)..(1192): n is a, c, g, or t
  misc_feature (1261)..(1412): n is a, c, g, or t
  misc_feature (1426)..(1439): n is a, c, g, or t
  misc_feature (1462)..(1471): n is a, c, g, or t
  misc_feature (1522)..(1522): n is a, c, g, or t
  misc_feature (1526)..(1534): n is a, c, g, or t
aaatgcagacaaactgctatatcttctacccctgggaganngactgttcccaaataattgacagctgcnnggctaatggggacccaatttttggcctaatagacactatgtatttgttttcgaatacgtcagattggaccaagtgctcttcaganaatgtggctgcaagcaaggggctagaagttcacctcctgacagtattattaatactatgcanatatggaataggagaccatttgattttctaggctttgtggtagagaggtgaaggtatgagaattaatagcgtgtgaacaaagtaaagaacaggattccagaatgatcattaaatttgtttctatttattcttttttgcccccctagagattaagtccagaaatgtactttctggcacataaagaaatcttgaggactttgtttaaaccttccataaaaaaacaattttcggtttctcgggtnnnnnnnnnnnnnnnnnnnnnnnnnnnnnnnnnnnnnnnnnnnnnnnnnnnnnnnnnnnnnnnnnnnnnnnnnttctttctttgtgtattttattcaagatgagttggacccattgccagtgagtctgaatgtcactgacagccctgtgttgtgctcaggactcactctgccgctggtggaaactcatggcttctctctctctttgatcccataaagctacgagggggacgggagagggcagtgcaatgggaagtaaagagatattttccagtaggaaaagcaatgctttcttgtctttagactcaaatgcttagggaacgtttcatttctcattcatggggaaaggcagcctccttaaatgttttctgaagagcggtaaaatctagaagcttaagaatttacagttccttcaataaccatgatgacctgaagttcacctatcccattttagcatctacttgtttttcccatctcttcctttccaattttgcttatactgctgtaatatttttgtnnnnnnnnnnnnnnnnnnnnnnnnngaccagctaaaattttcgacttgactttttaacttaactcatgaattaattaaagcaaatgaaaaaattannnnnnnnnnnnnnnnnnnnnnnnnnnnnnnnnnnnnnnnnnnnnnnnnnnnnnnnnnnnnnnnnnnnnnnnnnnnnnnnnnnnnnnnnnnnnnnnnnnnnnntttgggnnnnnnnnnnnnnnnaaaaaattttttaaaaactttttttggggcgcgggcccccaaaggaaaagaaacggggccaaagttttnnnnnnnnnnnnnnnnnnnnnnnnnnnnnnnnnnnnnnnnnnnnnnnnnnnnnnnnnnnnnnnnnnnnnnnnnnnnnnnnnnnnnnnnnnnnnnnnnnnnnnnnnnnnnnnnnnnnnnnnnnnnnnnnnnnnnnnnnnnnnnnnnnnnnnnnaaataaaaaaatannnnnnnnnnnnnnggggaatttttattagaaagaannnnnnnnnnaaaattcctaaaaaccccttttccccccccaatggggaaaaccccctccanaaannnnnnnnntaaaaacacccgaaataccccccccggggggaacaaaaccccttttggcccccttggtgg

SEQ ID NO: 5429 - DNA, 795 bp, Homo Sapiens
ggatccacccagaagtcttggagctgctgcttgactatgcgtactcctcccgggtcatcatcaatgaagaaaatgcagaatcgctcctggaagctggtgacatgctggagtttcaagacatccgggatgcatgtgcagagttcctggaaaagaacctgcatcccaccaactgcctgggcatgctgctgctgtctgaagcacaccagtgcaccaagctgtacgaactatcttggagaatgtgtctcagcaacttccaaaccatcaggaagaatgaagatttcctccagctgccccaggacatggtagtgcaactcttgtccagtgaagagctggagacagaggatgaaaggcttgtgtacgagtctgcaattaactggatcagctatgacctgaagaagcgctattgctacctcccagaactgttgcagacagtaaggctggcacttctgccagccatctatctcatggagaatgtggccatggaggaactcatcaccaagcagagaaagagtaaggaaattgtggaagaggccatcaggtgcaaactgaaaatcctgcagaatgacggtgtggtaaccagcctctgtgcccgacctcggaaaactggccatgccctcttccttctgggaggacagacgttcatgtgtgacaagttgtatctggtagaccagaaggccaaagaaatcattcccaaggctgacattcccagcccaagaaaagagtttagtgcatgtgcgattggctgcaaagagtacattactggggtgggataccaggggtagatcctgtagatca

SEQ ID NO: 5430 - DNA, 1182 bp, Homo Sapiens
  misc_feature (958)..(958): n is a, c, g, or t
ccaaaggccagttcttgtgattgtaacggagatataccaaaaactttgtttttttaaagaggatccacctggttcatgaaccctccctcactgctctctgcacatcacggccacacagcacctgcagggaggctgtggggaggtgtggagcaggtgcaacaggcagctactctcctgggggccacacggcggagagaggattcgatgcagcatgacgatcccttcctcccaggcatgacctcttctcagaacacgggaactgacaacactgcgagtggcaactcagcaggtgggcagagaagcagaaaggggccctcagcaccactaggccagctctcagaatcagaagagcagcctccagggagggagcagggctacagggacagcctacgggcagtggagcttctggtttggcacatgggaaaggctggggcgcatgcgctgaaacatgacaccatcagggaagccagaaaggacaacatggacaaggccatcgatctgaacccccagccaaaatgggtgctctcggcttgctcaaaaagtgctgccagcagcgataggttggcaaattaaaagcaaacaaatagaggtcacggccacacaaaggcagtaactgcactcacaaggtggctcagcccaaagaggtctgaatctgaatatgccgcactgtccctgccccgggggagaaggggaaggctgggccctgggaactagagatgatggcattcctttcattccttcctgaggcggccctggaaggctgtgccctggtgactcctgtctcctaaaggagggcagggccggctgaaggatccaggcattgatgtctagttctgaggacacccaggacccgcaactacaagggccatctaaaacgtggcctggaggggatgggggcaggcgggcacaaaacttctgctcagctcactccagctccccacgtgctcatctgttcccnagatctggggctgcctagtgagccgttaaacgcctgggttccgcccagggctgccttccaccgggacgccgggcctgctgtggctggaccctgccgctgtggtggtcttctcaccaaggagcctggtctggctgcctggaataacctgcaggtcggtgttctcaggggactgtggcaggttctgggctcgggtagccaggagtgcattgaggtactgcagtcgc

SEQ ID NO: 5431 - DNA, 957 bp, Homo Sapiens
ggggctcaccaacccaggtcatatctaagcctgagagcaaggaagaacatgcgatatacacagcagacctagccatgggcacaagagcagcctccactgggaagtctaagagtccatgccagaccctggggggaagggctctgaaggagaacccagttgacttgcctgccacagagcaaaaggagtgagtggaacagagttgcttcttactaggagcacattctttgcctgccttcccttcatcctatcctctttgcttgctctcacctcaggaattgcttggattgctacatggaccccctgagactatcattattacctcctagggccaggaagccaggtaggtagtctgagtcaggattggatcaacagcctcctctcttggggactctcaagagcctgtgttcatctggaagtagtagtttgattctggtttccctcctacagtgtgtcctccgtctctgtgcagctccgtcattaccataggggacttggttttagactctgatgaggaagaaaatggccagggggaaggaaaggtgagtgggaaggagcagaaagctgggaaaggggatgggtagaacaagactgagaaatccacatgcttcagaattcagagggttcagggaatggtttcggatagtaggctctccctgctcccttctctacaggaatctctggaaaactatcagaagacaaagtttgacaccttgatacccactctctgtgaatacctacccccttctggccacggtgccatacctgtttcttcctgtgactgtagagacagttctagacctttgtgatagaactaaaatgctctctgtactctagtctcctgcctcctcagctctgcaagtagtttagtaggaatgaagtggaagtccaggcttggattgcctaactacactgctaaaaatatttgtaatccttaataattaaactttggatttgtta

SEQ ID NO: 5432 - DNA, 1472 bp, Homo Sapiens
  misc_feature (1198)..(1199): n is a, c, g, or t
  misc_feature (1204)..(1206): n is a, c, g, or t
  misc_feature (1260)..(1269): n is a, c, g, or t
  misc_feature (1375)..(1375): n is a, c, g, or t
ccgtccggaatttccgggatccctcaggaacccaaggttccagccctcctcccaaatcccagccacccctcccccaccagtttctcccctctaggggatggaggctgagagaccccagtaagaagaggatggtgagcagggcccccctcaggatgaggaaggctggccccctccaaactccaccactcggccttggcgatctgctcctccatcccctcctcctccagggacccgccacacagccctgggaccccgctcggcctccctgctctccctgcagactgaactccttctggacctggtggctgaagcccagtcccgccgcctggaggagcagagggccaccttctacaccccccaaaacccctcaagcctaccccctgccccactccgtcctctcgaggacagagaacagctttacagcactatcctcagtcaccagtgccagcggatggaagcccagcggtcagagcctcccctccctccaggggggcaagagctcctggagttgctgctgagagttcagggtgggggtcgaatggaggagcaaaggtcccggacccccacacacacctgctgagacttgagccccaaccagcccttccttgccactggtctcaaagctgggcagcccattgcatgccctcaactcttgcttggcaggggtaccagagactgaaagacacggcacaaatctcaatattcatctcccacatcaccttccctgggaactggacagggtgaaagtcctcaaactctgggaacaggcgagatggaacagggatttaactccccgcccacaggtccatgggagcttgaggcagtaagggggatcccaggcacccatctcaaggagtggctgggagtcttttccctaacttgtggggacaccaccagttgtcaagctactaggcagtagggtctgagggctcaggcctccacctgagaggttataacctgagagacagctctacccttcctcccagtaagaagggaaggtgggtgggcacctgagagattaagactattctcccagtcccactaccagcacccccgatccctgagactgaggggtttacgggctgtgaatggaccttcagccctgcccaccctccctccccactgctgctgagtctgtctgatgttttggttgtgtgaataaatataattcccctctagaaaataaaaaagcaaaganntgggnnncgctgggcgggccgcgctcgggccctcggaaagctttctaacaccgttcgcttnnnnnnnnnncccccaagggggaagcggaacgcggtcctagcgtgcgtcgtcggccggttctgggtccctgacgtggtcgcttcgcatcggtcgccctacggccagtgccggcgcncgggcgcacgcggacttggcgtgggccgcccggcaggtggcgttcgccgggcccgtttccccgagcccctcgccgccgccgggccagcgagcgctgt

SEQ ID NO: 5433 - DNA, 608 bp, Homo Sapiens
gcggccgcggccaatcggagccgctcttgctgcgacgcagcggtcggaagcggagcaaggtcgaggccgggttggcgccggagccggggccgcttggagctcgtgtggggtctccggtccagggcgcggcatgggcgtcctggccgcagcggcgcgctgcctggtccggggtgcggaccgaatgagcaagtggacgagcaagcggggcccgcgcagcttcaggggccgcaagggccggggcgccaagggcatcggcttcctcacctcgggctggaggttcgtgcagatcaaggagatggtcccggagttcgtcgtcccggatctgaccggcttcaagctcaagccctacgtgagctacctcgcccctgagagcgaggagacgcccctgacggccgcgcagctcttcagcgaagccgtggcgcctgccatcgaaaaggacttcaaggacggtaccttcgaccctgacaacctggaaaagtacggcttcgagcccacacaggagggaaagctcttccagctctaccccaggaacttcctgcgctagctgggcgggggaggggcggcctgccctcatctcatttctattaaacgcctttgccagctaaaaa

SEQ ID NO: 5434 - DNA, 495 bp, Homo Sapiens
gccgacctcgtggacgacaaggagtagccgcctaggggctgccggcccctctgcctcccccgcacctcgctcccttcccttccccgcacccggacttcgcagtcagcggttctcaacctctgccccgccccgccacgcgcgtccgccgccggtggcccgggcccgggctgcacccccgcatccccaagccagcggcaggaagtctcaggaactgccccagggccgaaagggcgccgctgcgagcgcctggctgacagccacagcggtggtgacggtgctgggagaccccgcgtgcgctttccccttgagatgtaaaccgggaacggggaaggggctgaggggagaaaggacatggccttccccgcgagtccatggccagtgactgtggcccgactcgaaaacaaccctcttctcaaaagggaccatcaccgccccgagcgtgcgcacacagaccggtcggaggcgagaactggtctctacagggcacagttcagc

SEQ ID NO: 5435 - DNA, 429 bp, Homo Sapiens
ttttttggaaaacgaggatccacatgtgtaaataaacgggaactacagctcaaaggcagtcatacacttgtcattcttgtttcttcctctcatgacatggaaaggcaggtagaaagatctcttgaaggttgctccgaagcccatgggagtgaatgttccggtggacttggggctctgctgacggaggccaggccacaaggggacaacgctggcaccaggcccagtcacctctgtaccactcgttagtagtctggttggtggccgccagatacaggacaaacaacaggtagccacccaggaggaagctcagaaccacgacaaagcccagcatgaagacaatccgtggaaaagtcaggaacaggtactgaataagaaagaccgtgtccataacatggaggtgtccaaggtcatcgatgtaagtctcctggt

SEQ ID NO: 5436 - DNA, 1125 bp, Homo Sapiens
  misc_feature (1019)..(1032): n is a, c, g, or t
aacgggaaccggcccacaccctcctgatgctcagagctcaactcctagtaccccttcagccacccctactccccaagattcaggcttcacccctcagcccactttgttaactcagttggctcagcagcaaaggtctctgagccaggcaatgcctgtaacaaccattcctctttccaccatggtaacatctataactccaggaaccacggccacccaggtcatggcaaactctgctggacttaacttcatcaatgtagtgggctctgtttgtggggcccaggctttgatgagtggttcaaaccccatgctgggctgtaacactggtgccataactcctgcaggaataaacctgagcggccttctaccctcaggaggtctgctaccaaatgcactgcccagtgcaatgcaggcagcttctcaagcaggtgttccatttggtttaaaaaatacttcaagtctcaggcccttaaatctactccagcttccaggtggttcacttatttttaacactctgcagcagcagcaacagcagctctcccagtttacaccacaacaacctcagcagcccacaacttgtagtcctcaacagccaggggagcagggttctgagcaaggttcaaccagtcaagaacaggccttatctgctcagcaagctgctgttattaaccttactggagtaggaagttttatgcagtcacaggcagctgtgttgtctcagcttggctctgccgagaacagacctgagcaaagccttcctcagcagagattccagctctcctctgcctttcaacagcagcagcaacagatacaacagttgcgattcttgcagcatcaaatggctatggcagcagcagcagcacaaacagctcagctacatcatcatcggcatacaggcagccagtcaaaaagtaaaatgaagagaggcacgccaaccactccaaaattttgagtcttgcattactttttgttccttttttaaaaacacaagagcactgaatcaaaagaattgagtttctacnnnnnnnnnnnnnnaatgtgtcagtattttacattgctagatgtacaaactttatacagaagcccaaccttatcctctttaaataaaaacagggaaatggtttaacc

SEQ ID NO: 5437 - DNA, 456 bp, Homo Sapiens
gtacagttgggagagtgcgttcctggagctcagtcctgcatttgttcacgtgcctcacagcaggcctttgtgcccttgaatctcaaacatggggatctgcttggtacccagagctctggtcattgtgtccaaccacacaccccaccccatccgtgtcctccatctcacccagaaccacagggtgcccactagtgtcagggcccaaagtgccagccttctcttctgccttacctagtctacctatttatttcctccactttttatcttaaaagtagctaagccatgctggtgcccatactccaagcaggctgcctcagctcagagaagtggtcagagagtagagcacagaacctgtgatgtggggacatttggttttcttgcagatcatttaatgaatcctcaaggactaatgaaataaatgctagactgctgaagatgagtacaagtggcaaaaaa

SEQ ID NO: 5438 - DNA, 1132 bp, Homo Sapiens
caactttgtctttttattagctgtgcaagaaaatacatgtctgctaaagttacacgatcttcgcacaaacagcaacctacacattagtctacaaaggggaacaaacccaaaattcctcagaagtctgagtccactgttgccttctttctggccatctggcagttacaatatagcacagaatgactatgcaagttaaatattcatcttagacatggacatttgctttgggactcctaaagtggagtcaaatttgatctctacagaaactctacaatgtagcagagcactgtgcgtacttattgactcccggacaagccgaaaccccgaatttgtcatttctatcagtttttatataaattgttcttacctacttattgatgcttacaatttggcaattataaggggcaaaattggagcaagtgttttgggtaaataactccttacaatatattaaaaatacttacaaacaattcttagaatcaaacacttacgtaaatacttttttaaaaaaataggtccaaaagactcagcccagatcggctttgaagttatatcaagatttaagtctacttcatgccaatgagctactcctcaacaggggctggttttgccatttgaggaatgacagccactatgttgtgtacacaagagagctggatggcatcgacagaatctttatcgtggttctgaattttggagaatcaacactgttaaatctacataatatgatttcgggccttcccgctaaaatgagaataaggttaagtaccaattctgccgacaaaggcagtaaagttgatacaagtggcatttttctggacaagggagagggactcatctttgaacacaacacgaagaatctccttcatcgccaaacagctttcagagatagatgctttgtttccaatcgagcatgctattccagtgtactgaacatactgtatacctcgtgttaggcacctttatgaagagatgaagacactggcatttcagtgggattgtaagcatttgtaatagcttcatgtacagcatgctgcttggtgaacaatcattaattcttcgatatttctgtagcttgaatgtaactgctttaagaaaggttctcaaatgttttgaaaaaaataaaatgttt

SEQ ID NO: 5439 - DNA, 506 bp, Homo Sapiens
  misc_feature (126)..(185): n is a, c, g, or t
  misc_feature (365)..(365): n is a, c, g, or t
  misc_feature (372)..(372): n is a, c, g, or t
aatagttatattttttaatagaggtacatcactatttaaatttttggaagcccatttgcacatctctaaaaccactgcaaaatgggtccatattggaataggtccaatatgggtccaattggaatnnnnnnnnnnnnnnnnnnnnnnnnnnnnnnnnnnnnnnnnnnnnnnnnnnnnnnnnnnnntggcctcacccaaggagctgctgcccacacggggctgctggacaaggtgcagagggatgtggcagggaaaggggaccagaagacaccagtgatctgctaaataaatgaaatggtgacgtcgcttccccagtggccctgcagagtgtggggcggcagtggctggcctttagggggcagcanggtgcangggaaagagcaggcctttgaatcacgagatgctgggttaaagtcctagttctgctgttcactagctgtgggccttggcaagcaacttcacttttctgagcttcaatttctgcttctgaaaaatggtgatgaccc

SEQ ID NO: 5440 - DNA, 1080 bp, Homo Sapiens
  misc_feature (687)..(687): n is a, c, g, or t
  misc_feature (896)..(897): n is a, c, g, or t
agttaatcgtcatatgaatgctgctggtaaccgaaatagggaagttttacagaaagaaaagtcaaccaaatcagagggaaaacatgaaggtgtctatggagaactggttgatgagaaagctctgaagcacataacggaaatgggcttcagtaaggaagcatcgaggcaagctcttatggataatggcaacaacttagaagcagcactgaacgtacttcttacaagcaataaacagaaacctgttatgggtcctcctctgagaggtagaggaaaaggcagggggcgaataagatctgaagatgaagaggacctgggaaatgcaaggccatcagcaccaagcacattatttgatttcttggaatctaaaatgggaactttgaatgtggaagaacctaaatcacagccacagcagcttcatcagggacaatacagatcatcaaatactgagcaaaatggagtaaaagataatcatctgagacatcctcctcgaaatgataccaggcagccaagaaatgaaaaaccgcctcgttttcaaagagactcccaaaattcaaagtcagttttagaaggcagtggattacctagaaatagaggttctgaaagaccaagtacttcttcagtatctgaagtatgggctgaagacagaatcaaatgtgatagaccgtattctagatatgacagaactanagatacttcatatcctttaggttctcagcatagtgatggtgcttttaaaaaagagataactctatgcaaagcagatcaggaaaaggtccctcctttgcagaggcaaaagaaatccacttcctcaaggatctgtagattataataatcaaaaacgtggaaaaagagaaagccaaacatctattccctgatatttttatgacagggaatcnncaacaataaataatgaagcctttcagtggtataaaaatttgaaaacatttctaatgtaaatactggattatcagaaatccagttccgaagtaataggtttccatggggggtccccaaatgggagaaataaaaaaatgcccactgaaaagggaagaacaattagggaccctatttaagcccggc

SEQ ID NO: 5441 - DNA, 443 bp, Homo Sapiens
cagtcccgccctgctgcctggactgtgcccagcgggatgtgggcccgagcaggccagagaggccgagggcctggggtctctgcggcagccacagcccgtggtgagtagcagccttagctgtcctggagataccggggcctcgtggagtctaggcaggctggggcactgtggctgtggccgtggccaggtgagaagccccattcgcgcaggaaagactggccacctgggaacccacgcctccacggagggacttgccggccacaggctgtgggctgcccaagaggactgtgcaggcagggctgcctgctgattggcagctccggatcaggcccggtgcctgcagacctggtgctcccctcgggcagggctgggtgccgcagccgcctgctggcttttctggcagctcctctgtatcagaaccaataaagtgcacttgttctcgg

SEQ ID NO: 5442 - DNA, 671 bp, Homo Sapiens
ttgaatttctgggtgagctctcagaggtgctcaggagagcattgctttgctctccagagttcagaggtgccctgagaggagactggtgggttcccagtgtttgttaagggaaagaaagagtggcccttgtcaaaacaacatgggatttcagagcataaagagaccttaagctccctcatgaagagcaggaaaacatactaaaaaatgcgctctttaaacgtctggctcttcctcaggctctgtaggacctttgagttcaggaatgcaggggctaataagctggaaatgtttgataattccaatatgaagtctgcagcccccagataagattttaggttgtgcaggtaaatgtcccattccattaataagcagccgagcatgtaacaggtgggagtttgggtatgagtgtgcatgagttgtgtgtgttagaaggatttctggcccacattcaatataaagtgccatctaaattgtaagtaatattttctctgcttatctagaggatgactctagttaccttgcttaagaaagaaggaaaaaactttcaaagacgtgttgtagaaggaacttgtctgactctgagatggctttgcaaaattttccatcaccttactatggtgtgattcatgctggcatttggattcaaaagccagggtttgtgtccagccaaa

SEQ ID NO: 5443 - DNA, 803 bp, Homo Sapiens
  misc_feature (112)..(122): n is a, c, g, or t
gggccgcataggctttttaaaggtgctttcacatagcacaggcattacccgtagtcgtgtcaaatagcagttggtgtcttcattttatgtatatttatcatataagtctgannnnnnnnnnnaagcgtcttgaatggttttctggagagacagcattggtaagtggcacatgacggtatcccagtcataagagggttgcatgattcctttgagtgtttgatttgaaaagcctagtcgtgtctctcaagagcatctcggacccagaacattctccagtagtgcattcagttcaacacagcaagtgcttcattgcatggaaaacactttgaagacaaaaaagaaatcttatttctttttttgtagccttcctgatatttacagtaataccattaactgttttatcgatagcaaaaaaggatactttttgcaatgttattagatgttctatagtgctacaaggaattgccttccgaatggaggttcatgtataatactcatttacaattcaatatataattacacaaataatttttaaatataatcaatagtaaagactgttctgtggatggtagtgtttaatacattttctattttgtacagtgatttcaggccttttgttttcttaaaatcagcagctgtttggcctaattcttagcattattttgtcctttgcgccagtacttttttgtgcacgctttttgtgatctgtgttaaaaacctgcattgccaacattgcagctcgaacttaaacttgttattcaaataaatatttaattttttaaattgctattgaaacttctaaa

SEQ ID NO: 5444 - DNA, 345 bp, Homo Sapiens
agtgacggagactctcatgatgcatgtgtatcttctttgatgttatgtgtctatacttgtaccatgtaagttggttctcagatcatacaatgcatcatgagagtagagattctaatgagtattgaatgtctcttacctgaagggctgttcaggagaaatggactatttaagtaacaataatctgaaacaagattctgaaagatgtgctctgtggaataatattgcacatattcctagaagctgggataaatcattcacacagaaaaaactggaaggatctagcaatttacttaaattctcctatggaattttaaaaagatggcctcatattgccttgttactatg

SEQ ID NO: 5445 - DNA, 797 bp, Homo Sapiens
gaaaggagtggctgagaatttaatactggtaaacactataaattgtaaatgtaagttgtaaatgaccttgtcactggagaggggagaaggaactggagtcagacgtcccagcagaaacagcagcggcaacatgcggtaggcacacctaggtgcaggctgggctacagggacagccaagctgagcaaggacaggtccccgcagcctagactggggcaccgcttcgttctcggtctcactccccgctgtgccgtgctttgcctgtgagacggcggcgctgggccttgctggtacgaggggcccttgggggctttttggagtcctgggcccgtcggggatgtttcctcttgacctttttgcggctgtgtgcatgtagtgatgctgtgagggaggagatccgctgagagagcagggggtctctggacttcctgggcaaggctttggttggtttctccgtggatgacgcctcctcctcagacctgtctccagaccctccctcaggtggggtcaggccgagcagccgggccccgagaggtccaggtcactgatggtggtcacggtgactgtgtggttggggtggcattctggaacgactccgtctttgctggcaccaaccgttcagctcatctggctcttcagagcttctctctctgcagcatcttcaagtttcctggtgggctcttccgaagttctctgttctcttaatcgtgctgaaatgtgcgggatcttaaagcgactgaggatcagttgactgcgtggtcatcagacccccggccgggagggaaagaagaaaaacgag

SEQ ID NO: 5446 - DNA, 766 bp, Homo Sapiens
tccgctcccattagtgacactttcctggggtctgcaggtctccggtccacttcatgcagacaggccctgtcccccactggggcccaaggcccaggctaaactacagcccagccatcccaccccaggccgtgaatgccttctccaggagggcaaccaaggatggtgccacatgtgagcacaagcaaaacccggagccaaggcgagtcctgctgggtgcacgtttatcccagccaccgcctaccagggcggccgcacaggacctgggcatcaatccagcagggctcccgactcactccctggagaccagctccccaaccacccggccctgatggcatcccgctgcggccaggtgtcctctcagccgaggtccttgtcactgcctagctgcgtccgcctgccacaccagctcacccgagatgtaggtggcctggacgtgaagggagtcgtcgagcaccacgaagtctgcgtcacaccaaagtccagggtccccttactcttctccagccccagcaactgggcggggtgcagggatgcagcctccagggccgactccatgctacagcctgtggcctgcaggaagtgccggacacagacgtccattggggctatgctgccactcagcgtcttggtgcctgccacgtaagccgtcaaaccgtccacttccacttcctgctgtcccagcgtgtgcccgccgttgcccagccccaaggcagggatggcatcggtgaccagcaccagcccctggcctcgtgccgaatttcgcgat

SEQ ID NO: 5447 - DNA, 332 bp, Homo Sapiens
ggcccattcccaaccttaaggtgccccgcccacgggccactagtacttctcgagctctgtacatgtccgcggtcgcgacgtacgcgtatcgatggcgccagctgcaggcggccgccatatgcatcctaggcctattaatattccggagtatacgtagccggctaacgttaacaaccggtacctctagaactatagctagcatgcgcaaatttaaagcgctgatatcgatcgcgcgcagatctgtcatgatgatcattgcaattggatccatatatagggccccgggttataatacctcaggtcgacgtcccatgccattcgattcgtatcat

SEQ ID NO: 5448 - DNA, 524 bp, Homo Sapiens
ccttcagcagtattgcagttgaagaatagagcacactgtggacagttcctaagcaactggaccacgcttcattatgaaaaactattatgacactggtggtgggcaggggagggcagcgcttaaatttttgttcaatacattcaggaggtcgagtgtctggtccaagatctcggtgcaaagaaatcctgtcacttgcgaaagcattaaagcagtgtttagcttccccacgttccttttccttttgctcttcaacacttaaattggttgtcttgaatgctttaccagaagcaccaggtgcatttgaatcctgaggtggacggtcaaggacaggcttcaattctgctgctgtataatatccttgcaaacaaggtctctcaccagcatcaatgttttgcctgacaggtgctcctatttgcatttttggcatggcatccttaatattgtttacagcttctagcattaaatccaacatcttgtttttgtttttcatgttcctttccagaaatatcaagggtgatcctcta

SEQ ID NO: 5449 - DNA, 349 bp, Homo Sapiens
gtgtgttgctttgcagcatttataaatagcctacgtctgcagtctcctctgataatatgttgcatatatatacctttgtttttaagttaccttaaatgggaagtgtgtcctcaaacatatagagaatatacgtagcacttcatttcccctccttcagtctctatgtgaacagacttgattggcaaaatcagagacagttggctcctttgagataagcagtcagttgattgcattcctaggaagtcgtctctgttgtggtttttaggcagttagtggaactgatagataggtctggtaagagttggagtttgttttataatgcacgttcccagcattctatggcgccgcc

SEQ ID NO: 5450 - DNA, 388 bp, Homo Sapiens
ctgttcagacgatccccttatatactggatcatgttagctgattgtcttccaattagaacattttagcctgtcagctgtcatctatagagcaatgattgtaacgtctatattgtacccttcaaggaaaatgacaataccggtatgaatagtcctccagcttctcctaaacattctcataaaggcatccacacttgtaatcaatatttggaacacatccaaacttagttggatgtgtcttctcaagttgatcctcaaatttggcttacaataaaactttatcaaattgtatctgcctcaatggccttatttttggtaaacaaaagtatcccatgaaaggcgcaatgtaaccatccccaaccaaatccctggagacacaccagagcagag

SEQ ID NO: 5451 - DNA, 156 bp, Homo Sapiens
gggggattccaggcgtgagccactgcgcccggccagaatggcattatatttaaatagttcataaagaagcacaaaagaatattatttcataacatgtaaaaattatataaaacgtaaatttccatgttgataaataaagctgtattggaacacggc

SEQ ID NO: 5452 - DNA, 538 bp, Homo Sapiens
  misc_feature (503)..(504): n is a, c, g, or t
tgattcagcggatctgtaataggtaatgacattctgaggaaacttcccagtctcctaataggactgaaccacatgacagtgattgttctgttgacttaggtatttccaaaggcactgaagatctctcccctcagaaaagtggtccagttggatctgttgtgaaatctcatagcataactaatatggagattggagggctaaaaatctatgatattcttagtgataatggacctcagcagccaagtacaaccgttaaaatcacatctgctgttgatggaaaaaatatagttaggagcaagtctgccacactgttgtatgatcaaccattgcaggtatttactggttcttcctcatcttctgatttaatatcaggaacaaaggcaatttttcaagtttgattcaaatcataatcccgaagagcccaaatattataagagggccccacaagtgggcccacaatctgcaccctcaaatatatggggtcctccacagtataatatccnnattaccggttaccagtggctggcagtcaaaagaa

SEQ ID NO: 5453 - DNA, 1529 bp, Homo Sapiens
  misc_feature (1136)..(1145): n is a, c, g, or t
  misc_feature (1339)..(1350): n is a, c, g, or t
gggcacaaagtgcctgatgtcaaaatgaagatagtaaaacaagggaggaagcagtggatggaccaggattaattcctttcatttcttagtaaattaaaacctgcagctggtggattgtgaacacacattcccgaagtaataagtgaggacgaatgcactgctctggaacataacccagtgctaactgggggtttcatttattcagtcaagcacatcttactcacatccagatttattttcctacagtgcaaacacaccagatgaaactttaaaatgttactttttgtaagcttatcataaatgagttgcagtaatttgtttgcttgtttgtttaaccacaaccactattttaatgatatactaaagataacactatttagttttttcagaaacatctgcattatatgtgtgttggttgtggattttgtttctaaaattggcttagtccaataaataaagaaaagcattaaggacttaaagcaacaataaccaaataaaaacttgataggatctttgaagtctatttaaatattcattccattacatctagactcaccaagaactacatgttatgatgttaagttgaagttgaaacatgatgttttgcattaaatttaagatatgcaaaattatgtagagaaaataaatgttatataccctataatctttcacctaattagtatttaattatatggatttgttttatattataaaagatgttttgattttgtcttttgatattgacaaaattgtttggatatccttatgttctcaagtctgtatctgcctcccctgccttatttcttatgttttgccacagttaacccattgtgcttctttgtaatcaaacagtttgtgggagaatgggcttattgaatgtctaacccatactccccggccggcaccctttatactcgtagtcccccgtttgccctgtgccgagcgactcccggccccctctgtattgtcggcccgctctcgggcccctcagaaaagccttttccaaaaccaattccctttgggggggcgaagggcccccaccaagggtaatcgcgccacccgggcccaataacctgggcctccccacgaggaacaccccggggttcaccgggacataatgggtctgtgggcacctnnnnnnnnnnaataccccaaaaaaaccgccctgcggggccgcggagaacgtggtagtaggtttttcctgaaaccaaaccaccccccacaaatcggggagttctctcttagacgcccttctttaaccggggcggattttatctcccgcgtggggtgtcccccaccgcgagacgcctgccaaataaatgacaatatttatcaccgnnnnnnnnnnnngtgccaacgctcctttggacaccccccgcggcttggcgacatccccttaatgacactcttcccgcgctgaacatcgcgtaaacccccctccccacaattgtcgctcaggacggcaaacttgtgcatccgccccccacggggttaccccaccgcccccgggtgagaccccctcggcccat

SEQ ID NO: 5454 - DNA, 986 bp, Homo Sapiens
  misc_feature (885)..(885): n is a, c, g, or t
ggggggggaagaggcgtggcggcgctgtgcgcgtgcacaaaagagagctgaggggcgggggcgctgcggcacagctggtttgagcaactgaactggaaacaagatgcaggaccccaacgcagacactgaatggaatgacatcttacgcaaaaagggtatcttaccccccaaggaaagtctgaaagaattggaagaggaggcagaagaggagcagcgcatcctccagcagtcagtggtgaaaacatatgaagatatgactttggaagagctggaggatcatgaagacgagtttaatgaggaggatgaacgtgctattgaaatgtacagacggcggagactggctgagtggaaagcaactaaactgaagaataaattcggagaagttttggagatctcagggaaggattatgttcaagaagttaccaaagctggcgagggcttgtgggtcatcttgcacctttacaaacaaggaattcccctctgtgccctgataaatcagcacctcagtggacttgccaggaagtttcctgatgtcaaatttatcaaagccatttcaacaacctgcatacccaattatcctgataggaatctgcccacgatatttgtttacctggaaggagatatcaaggctcagtttattggtcctctggtgtttggcggcatgaacctgacaagagatgagttggaatggaaactgtctgaatctggagcaatatgacagacctggaggaaaaccctaagaagccgattgaagacgggttgctggccctcagtggcggcgctctgtcctcatgaagaagggacagccaattccgaggggtgactgaggctacagcttctatcacatgccgaactttcttgtgacaaattgtctggattttttanaaaaggaaaaagcaagaatgaatccttgtggtttttagttttgtataaattatgtttcaaatctttacattttggaaataatcattgctggagattctgtt

SEQ ID NO: 5455 - DNA, 411 bp, Homo Sapiens
atttctcaagaaatttccagatgtctcatgctgcatagggcaggagcctgaaaagctaatttgagaagataataagtaggatttttgttttgttttgcattttgcagtacaaaggagaaatgattagaacttaggaagtgccagtgggttggtgaacatgccatcagtaaaagccctggaaacaaggtcatactagagattggttgtgccttgtcacaactgcaaacaatacctgagtggagtattcaaaaacttgcttagaaagaaaactctaggaacagatggcttcactgaagttattccaaatatttaagaaataataccaggcttttataaacttttctagaagaaaaaagatggaacttttccaattcagtttttgaggccagtacaaccttgataacaaaacct

SEQ ID NO: 5456 - DNA, 486 bp, Homo Sapiens
  misc_feature (159)..(170): n is a, c, g, or t
  misc_feature (373)..(373): n is a, c, g, or t
ggataggatgcttagtttgccactacacttcagaccaatgggacagtcatagatggtgtgacagtgtttaaacgcaacaaaaggctacatttccatggggccagcactgtcatgagcctcactaagctattttgaagatttttaagcactgataaattnnnnnnnnnnnnttagactccaccttaagtagtaaagtataacaggatttctgtatactgtgcaatcagttctttgaaaaaaaagtcaaaagatagagaatacaagaaaagtttttgggatataatttgaatgactgtgaaaacatatgacctttgataacgaactcatttgctcactccttgacagcaaagcccagtacgtacaattgtgttgnggtgtgggtggtctccaaggccacgctgctctctgaattgattttttgagttttgtttgtaagatgatcacagtcatgttacactgatctaaaagacatatatataacccttt

SEQ ID NO: 5457 - DNA, 735 bp, Homo Sapiens
  misc_feature (184)..(184): n is a, c, g, or t
  misc_feature (280)..(280): n is a, c, g, or t
cggcaccgaaaaatcaagagctgtccccaaggcaacacgttggaccatggcagctcgagagcagagctctattactccttggaacagaaacctgagctgaatttcaaagtgaagatgtattcctcctacagtcgatcacaaagactggctggagggcactgccgggggagcccgggcatctccnttctctccttcgtgaagactcaaaaagactccttgagggaggacgccccaccaactggctgcgttgctactctacgaagacacatcagcaccacanaggacatcgcggtggaggaagatctcagcagcactcccctattgaaagacctgctggagctcacaaggcgggagttccagagagaggacatagctctgaattaccgggacgctgagggggatctggttcggctgctgtcggatgaggacgtagcgctcatggtgcggcaggctcgtggcctcccctcccagaagcgcctcttcccctggaagctgcacatcacgcagaaggacaactacagggtctacaacacgatgccatgagctgacggtgtccctggagcagtgaggggacaccagcaaaaaccttcagctctcagaggagattgggaccaggaaaacctgggaggatgggcagacttcctgtctttgaggctaatggacccgtggggcttgtaatctgtctctttctactatttacatctgatttaaataaaccattccatctgaaagggg

SEQ ID NO: 5458 - DNA, 805 bp, Homo Sapiens
aatcagaggctgctgggaatttttggaaggtttttccaggaacgggtttaagcttgcctgcagggattcagaaaaagtttggggaaaagcattttgcaaaaaagcctaaaagggcagagtcttaactcattggctgtgtccctacccccatccccgggttaccacttgggatgacccccagttcccggacccaaaaaacaaacccttccaaagtcccttaattccctcacttggacttgggacccttcacaacccccctcacttggacttgagacccttcacaacccagcagcgctccgcctccaacttgacatcacactttctggaaacttccccgcatgtcccactttcccacacttggtgccctggagcacctcccggcctctacatgctgtacgttcccctgcgagcaccctcctcttggcctctggccaaccagtcccacccatctgtgggtaacaagggggtgtcggtgttcttttcagccttgctaaactgtctgaatcaaggatcacaaactacagcctgcaggccaaatccagcccacagcctgtgtttgtaaataaagttttattggaacaaagccacaccccttaatcgaagatgatctgtggctactttcacaccacaacagagtaccatggttctgacagagactaggagacacagtctaaatgacttctgacctggacctttactgaaaatcctgccaatcattctgttggcaagaatgatgtattacttttagcaataagaaacaagtaacctttgatctgaggacattactggatctaaaaaaacttgt

SEQ ID NO: 5459 - DNA, 806 bp, Homo Sapiens
gctcaatcctccttggacaagtactagcacccgccgtatgagccagtggcgaaggacgccttcacttcgccattggagctggatgacctcttaaggagcggctgaaggagctcatcttccaggagacagcacgcttcaggccgggagtgctggaggcccctagcccagacagacatctctgcaccctggggcctggacctgcctcatgcctgcccctctcccgacgagactgttagaaaatggacactgtgcccagcccggaccttggcagcccaggccggggtggagcatgggcctggccacctctctcctttgctgaggcctccagcttcaggcagccaaggccttctcctccccacccgccctccccacggggcctcgggacctcaggtggccccagttcaatctcccgctgctgctgctgcgcccttaccttccccagcgtcccagtctctggcagttctggaatggaagggttctggctgccccaacctgctgaagggcagaggtggagggtggggggcgctgagtagggactcagggccatgcctgcccccctcatctcattcaaaccccaccctagtttccctgaaggaacattccttagtctcaagggctagcatccctgaggagccaggccgggccgaatcccctccctgtcaaagctgtcacttcgcgtgccctcgctgcttctgtgtgtggtgagcagaagtggagctggggggcgtggagagcccggcgcccctgccacctccctgacccgtctaatatataaatatagagatgtgtctatggctgaaaaaaaa

SEQ ID NO: 5460 - DNA, 452 bp, Homo Sapiens
ctcgctccagtactcaggactccctcgtggagcccttggtgtgtcgcctgcaggttctttttttgaagaaagcagggagtgaacggccttgtgagacgactccaggagcaaagggagactctcacaagacccaagtcctcctagagcacaggaaagtgtcgcttcaggtcgaagaagggagagaaagcagctttccgcatctgcatggttgtctagtggctaggattcggtgctgaaagcgccacggcccgggttcgattcccggtcagggaattgttttgcactggccgccctcccgcagaaatcttcctttaccacgctgtcagccggcctgctccaagggccagatgtagaacagcctccgcagcgaggggcaaacccgggcaaaggagggcaagtcgtggtgggccacctctcacgtttatctccgtgtctgtcatccgcagaagcgg

SEQ ID NO: 5461 - DNA, 1442 bp, Homo Sapiens
  misc_feature (1283)..(1343): n is a, c, g, or t
  misc_feature (1396)..(1396): n is a, c, g, or t
ggaattcgatttcgaaaggaggagggtagtcgtaccatacatgaaacatggagatcttcgaaatttcattcgaaatgagactcataatccaactgtaaaagatcttattggctttggtcttcaagtagccaaaggcatgaaatatcttgcaagcaaaaagtttgtccacagagacttggctgcaagaaactgtatgctggatgaaaaattcacagtcaaggttgctgattttggtcttgccagagacatgtatgataaagaatactatagtgtacacaacaaaacaggtgcaaagctgccagtgaagtggatggctttggaaagtctgcaaactcaaaagtttaccaccaagtcagatgtgtggtcctttggcgtgctcctctgggagctgatgacaagaggagccccaccttatcctgacgtaaacacctttgatataactgtttacttgttgcaagggagaagactcctacaacccgaatactgcccagaccccttatatgaagtaatgctaaaatgctggcaccctaaagccgaaatgcgcccatccttttctgaactggtgtcccggatatcagcgatcttctctactttcattggggagcactatgtccatgtgaacgctacttatgtgaacgtaaaatgtgtcgctccgtatccttctctgttgtcatcagaagataacgctgatgatgaggtggacacacgaccagcctccttctgggagacatcatagtgctagtactatgtcaaagcaacagtccacactttgtccaatggttttttcactgcctgacctttaaaaggccatcgatattctttgctcttgccaaaattgcactattataggacttgtattgttatttaaattactggattctaaggaatttcttatctgacagagcatcagaaccagaggcttggtcccacaggccacggaccaatggcctgcagccgtgacaacactcctgtcatattggagtccaaaacttgaattctgggttgaattttttaaaaatcaggtaccacttgatttcatatgggaaattgaagcaggaaatattgagggcttcttgatcacagaaaactcagaagagatagtaatgctcaggacaggagcggcagccccagaacaggccactcatttagaattctagtgtttcaaaacacttttgtgtgttgtatggtcaataacatttttcattactgatggtgtcattcacccattaggtaaacattcccttttaaatgtttgtttgttttttgagacaggatctcactcnnnnnnnnnnnnnnnnnnnnnnnnnnnnnnnnnnnnnnnnnnnnnnnnnnnnnnnnnnnnngctcaagcctcccgaatagctgggactacaggcgcacaccaccatccccgggntaatttttgtatttttggaaaagacggggtttttgcatggtggcca

SEQ ID NO: 5462 - DNA, 1256 bp, Homo Sapiens
  misc_feature (66)..(66): n is a, c, g, or t
catagcagtgtcaaccgcgggtattaacgacggcagtactataacggtcctaagtacgaggctggnggcgaatcggcacgagggtaagaatggtgcctgtcctgctgtctctgctgctgcttctgggtcctgctgtcccccaggagaaccaagatggtcgttactctctgacctatatctacactgggctgtccaagcatgttgaagacgtccccgcgtttcaggcccttggctcactcaatgacctccagttctttagatacaacagtaaagacaggaagtctcagcccatgggactctggagacaggtggaaggaatggaggattggaagcaggacagccaacttcagaaggccagggaggacatctttatggagaccctgaaagacattgtggagtattacaacgacagtaacgggtctcacgtattgcagggaaggtttggttgtgagatcgagaataacagaagcagcggagcattctggaaatattactatgatggaaaggactacattgaattcaacaaagaaatcccagcctgggtccccttcgacccagcagcccagataaccaagcagaagtgggaggcagaaccagtctacgtgcagcgggccaaggcttacctggaggaggagtgccctgcgactctgcggaaatacctgaaatacagcaaaaatatcctggaccggcaagatcctccctctgtggtggtcaccagccaccaggccccaggagaaaagaagaaactgaagtgcctggcctacgacttctacccagggaaaattgatgtgcactggactcgggccggcgaggtgcaggagcctgagttacggggagatgttcttcacaatggaaatggcacttaccagtcctgggtggtggtggcagtgcccccgcaggacacagccccctactcctgccacgtgcagcacagcagcctggcccagcccctcgtggtgccctgggaggccagctaggaagcaagggttggaggcaatgtgggatctcagacccagtagctgcccttcctgcctgatgtgggagctgaaccacagaaatcacagtcaatggatccacaaggcctgaggagcagtgtggggggacagacaggaggtggatttggagaccgaagactgggatgcctgtcttgagtagacttggacccaaaaaatcatctcaccttgagcccacccccaccccattgtctaatctgtagaagctaataaataatcatccctccttgcctagcataaaaa

SEQ ID NO: 5463 - DNA, 670 bp, Homo Sapiens
  misc_feature (16)..(16): n is a, c, g, or t
gtctgtccgacggacncgttcataaggcacggcacatcgcaaatgaaccagtgttaataaaagctgttgctggaaacttgctttaggaaccagctcaagaaccttggagtccatattcacaaatattaataaatataagtccaagagctgtcagccctaatctgtaggagcagaacctctgattgaccaaaaggcatatgggtttaggttggttttttgatgtcatatgtctctgatggggctgcaagtgctacctcgcgcttgtacactgctgctgtggggctccgcgcctgccggtgaagagctgcagatgccgagaagccagcaaacacagggcccactggaaaaaaatagttttttcattagtatttctcgggaggacccaaaagttaaggtcagcttgttcactgtaatttctggaagaagttcactcagaccttcctgaattcagatcatctcagaagtctggagggaaatctggcgaaaccttcgtttgagggactgatgtgagtgtatgtccacctcactggtggcaccgagaaacttacttccttgtattaagtgcacttcttgtatttctaataagatgactttccagaaagtgagatttgttatgttctggcttttaaaaggtaaaatataaataaatttcataacttaatctaaaaaa

SEQ ID NO: 5464 - DNA, 617 bp, Homo Sapiens
  misc_feature (274)..(274): n is a, c, g, or t
atatgctggagaaagagttgagctgaagaagagaatactggatgttatactttctcatgagaagtttgagtggatacagtgttttggagtttctgttcttctaaattgaaactaaattccatttctgttttcctaacagggctggtggacgaagccattgataccaaatctctgttggatgcttcagaagaagcaattaaaaaagacctggacaagtgcaaggtagctatggccaacattcagcctcagatgctggttgctggggcaaccagtnattgctcgtcgggccaaccggatcctgctggtggctaagagggaggtggagaattccgaggatcccaagttccgtgaggctgtgaaagctgcctctgatgaattgagcaaaaccatctccccaatggtgatggatgcaaaagctgtggctggaaacatttccgaccctggactgcaaaagagcttcctggactcaggatatcggatcctgggagctgtggccaaggtcagagaagccttccaacctcaggagcctgacttcccgccgcctccaccagaccttgaacaactccgactaacagatgagcttgctcctcccaaaccacctctgcctgaaggtgagg

SEQ ID NO: 5465 - DNA, 325 bp, Homo Sapiens
gaggaggaagtgaccaagtttgaaggcggcagaaatggccacacagccaagaagagcccatgcaactcagtccaggattttactgggtcagtgacattggtggaagccttcatgcctcctcattccacagcacttcctcctatgttgaccttaaacactggcttcccactgatacagactgggatgagctgagggcagtctcatttactgtcaagagttgtatttttgtattgtcctttttgccaagtctacatgtgttgactctgtaatggatttatgtagcccacttcagtctgcaaataaagcaaagtaactggaaaaaaaa

SEQ ID NO: 5466 - DNA, 554 bp, Homo Sapiens
ctgaccaaaaatggagcccgctctgtggggaagccccgtctcccccacgagaaacggtcccacggtgcggatctcccccttcccttgtggggcacagctggcctgggcctccaatcctgcggagctttcctgggtgtggctttgacctcagaagtggctctggtttggcctcaggagtgtggcctggcccagcctgctgcagcctcctggggggcccttgatgccactaatcccccgaccccccgcatctgccaaactgcacagacacacgcattgtaaggccgcttgtggcctccagcgtgcactcttgtttacgtcattgtcatcttcaagaccagtcctttgtgattagttttgcttcgcgagccctggtgtggactgtggtctgtatgaatcgtgtgtaactgtggtgaggggcttgtcctgtatgtgagtctgtacccaggtggggtctgtgccctgcacaccgggcccctctgtatttatcgctgcctgaatgcaacagtaatttatatccaggacaaatacagtctgggcgtcactatcctaaaaaa

SEQ ID NO: 5467 - DNA, 771 bp, Homo Sapiens
  misc_feature (14)..(14): n is a, c, g, or t
gcctcttcctcggnccttcccatattggtggcagtggtgccacactgaacagagtggaggacatatgccatgcagctacacctaccggccctgggacgccggaggacagggcatgtcctcagtcagatacaacagcatttggggccatggtacctgcacacctaaaacactaggccacgcatctgatctgtagtcacatgactaagccaagaggaaggagcaagactcaagacatgattgatggatgttaaagtctagcctgatgagaggggaagtggtgggggagacatagccccaccatgaggacatacaactgggaaatactgaaacttgctgcctattgggtatgctgaggccccacagacttacagaagaagtggccctccatagacatgtgtagcatcaaaacacaaaggcccacacttcctgacggatgccagcttgggcactgctgtctactgaccccaacccttgatgatatgtatttattcatttgttattttaccagctatttattgagtgtcttttatgtaggctaaatgaacataggtctctggcctcacggagctcccagtcctaatcacattcaaggtcaccaggtacagttgtacaggttgtacactgcaggagagtgcctggcaaaaagatcaaatggggctgggacttctcattggccaacctgcctttccccagaaggagtgatttttctatcggcacaaaagcactatatggactggtaatggttacaggttcagagattacccagtgagg

SEQ ID NO: 5468 - DNA, 845 bp, Homo Sapiens
  misc_feature (78)..(78): n is a, c, g, or t
  misc_feature (80)..(133): n is a, c, g, or t
ctctctccatctttaatggggccccaggtgggcttggggcacgggtgtccttaaatacagcccccatgggcaaggcancnnnnnnnnnnnnnnnnnnnnnnnnnnnnnnnnnnnnnnnnnnnnnnnnnnnnnnacctcagctgcatcttgcaggtagcgcacgatcatgttggacagctgctccaccttggtgcttgctggcccacgtagtacacgatgggcagctggctccagtcgcctgtcggcaacgcagtcatcggcgccgccgaagtcgccccggtttatgctggttgtacagggccaggcaccttgctgtactgcgtgtccaggctccaaatgtaggggcagggcccgaggcagaagttggcatggtagcccttgggctcgtggatccacttccagccgaggtccttgcggaagtcaatgtacagctgccgcacgcagcagttcttctccgtggagctgaagcaatagttggtgtccagggctcggcggtgccgggagctttgcagatgctgggccctctccagcggggtggccatgagaagcaggaaaggccggttcatgccatgaatggtggccaggtcacctcggcggccggtagtgaacccgttgatgtccacttgcagtgtgttatccctgctgtcacaggagcagtgggcgctaaggcgaaagccctcaatttcccctccacggctcaaccactgccgcacaactccggtgacatcaaaagataaccactctggcgagtcgctgggtgccagcagccggttgctgaggtatcgccaggaattgttgctgtatttctggtacagctccacgtgctgctccacttttaacttgag

SEQ ID NO: 5469 - DNA, 793 bp, Homo Sapiens
ctgctgttcagaggatccccgcctgaagttgggtgctttatcccggacaactgccagtacccagatgaatgtacagagctctcgttcacatgccatttttaccattcatgtgtgtcaaaccagagtgtgtccccaaatagatgctgacaatgcaactgataataaaattatttctgaatcagcacagatgaatgaatttgaaaccctgactgcaaagttccatttggttgatctcgcaggatctgaaagactgaagcgtactggacctacaggcgaaagggcaaaagaaggcatttctatcaactgtggacttttggcacttggcaatgtaataacgtgccttgggagacaagagcaagagggccacacatgtcccctatagagattccaagctaacaagactactacaggattccctcgggggtaatagccaaacaatcatgatagcatgtgtcagcccttcagacagagactttatggaaacgttaaacaccctgaaatacgccaatcgagtctagaaatatcaagaataaggtgatggtcaatcaggacagagctagtcagcaaagtcaatgcacttcgtagtgcaatcacaccacttcagatggagttcatgcagctacaacacaggttaaagaatcacttcacgaacagggtgtggaaagcatcaattacctgtgtcatgagaatgctatgctacagactgaaaataataacctgcgtgttcgacttaaagccatgcacgatacggttgatgcattgaggtccagaattacacagctcgttcgtgatc

SEQ ID NO: 5470 - DNA, 645 bp, Homo Sapiens
  misc_feature (481)..(505): n is a, c, g, or t
atttctggtcaacattaggagtaagctccgactctctatcctgaaaattagtcatcaaaaggaacagttaagcattaaactgcctttctcgtaccatacttcaaggtaacaaactagtcctggaagatggaaagttcttcacagaagaattacagctcatcaatgtgaaacgaaagttagaaaagtgagccatggtttactgattgggaaaatagaggtaatatccactacttcagcaggtggagccaaggattaaagataagaaatgtcacaaatccagctagaccacattaagacctcaataaatatttacttttcctttctaactcgagtctggaagaatcgcactggcctcctcctcaccgcaggcacttgcattcatttataacacattctctgaaggcagaccctgcaggtggcaaaaagattcgacgtggagtaaatggaaacagagaccacggcaggaactgagctgcacagnnnnnnnnnnnnnnnnnnnnnnnnngagacggagcttcacacttgttgtgttttctttatctttagttgtggtggtggtggtaaaataaacaacataaaatttaccaacttccctgttttaaagtgcacaattcagtggcatttaggaatactccaatattatgc

SEQ ID NO: 5471 - DNA, 960 bp, Homo Sapiens
ctttcgggactaccgcgcccgccccgtacagaggcccaattggatgtggcctggccccttaggaggaagacgggcaccagcatgcgcgcagtggcagcgcagtctactctggatgctttagggttcctggtcaactcttggaagaaagccggggccgagaactgtacagcggtagctcatgggcatcctcacaggccctgaaaggggcaggaaatgaagtaaaactgcaaggtgtcgagatcttcgtatagtaccaagaagtggaggagggcctgcctctaccgcagagagagctgagtcccaggccccaaacctgctgggtgcttagcagatagaaacccacaaggcctggcctctagccagtcagagacacagccccacttctgatttctggccaaccacatgggttaagaatgtgcctaacagtactccctgcacatacataccaacaaagaattcaaattcacagccttgcgtggctgggaaagaggagtgtgctgaagcctggattattcatcctgggacctgattgacctatgccaggaaagctcggagcctgctaaagtgcccacaggaggaactgggcacacagctgagccaactttgcctctcaaatccacagcagtttcccctgcatttctactctagtccagagggaagaatgcaacccaagttacttttaaaaacaaagcgagcagcaggaaagcttaagaagcagaggcgcaccgggatgccagcctgccccaaaggccacgcgggggagcatcgatgcactgtcaccttatttagccttttccacaccgggggccagggatgggcccagcagccaagtgtaaccgtcaaaccgataattcagagaatcaaaatgagccccaatcacacaggctgattagacaaatcacaaattggcaagtagcaaccttagctgaccccactcacaagcattaatgccccaagcaa

SEQ ID NO: 5472 - DNA, 841 bp, Homo Sapiens
ccgtcccaagatatgcaggctcaatactaactgaaagtgttcaaagtgtcacatttgcacacacgaaaaaatttgagcagcatactacgtgggtgtgagaacctgatgaaaaataagattggaaaaaccccctacactgtgttccacttacatgatttaaatatatagttatctttcatataagtaaaaaggtaaactttagaacagcacagaaatacaaatgtatttagagttttacaaaatatattcaacccctcagacatgcacaattttttaactttggagttaccatacaagggaactagtttcccctccttcataatgaaagcaggaagccatgtgtacaaagtcattcatatgaaaagaataaacatccacagtccttgtctttgtccttgacaaatatttatggaatgccggaaattatggaaaaacaattccaatgttacgaagtccaaagaactggaatgagaaaactcctcacggcacattatgctgcatggaatgacaatcatcctcggggaattagggcagcatcttctaccacttttaaaggctaccacgagacggggtggaaatgccaaaaatggcacctcatctctgatcaaagattcagagcatgcaagtgttgatgccatgaagagtcccagccttctccccactaaaataccaggcaacgcttagcagctgctgtcctaacaggctactttctgcaactgctgacgcaggttagttcatgtggttaaaggtcagaacgctggccccttacagagctgaagtgctcccacactcatcactggctctggagggaaaagaccactacgctgtggtatgacaacag

SEQ ID NO: 5473 - DNA, 625 bp, Homo Sapiens
tctgtttagttaacgaaatcttcctcattgactgatgaaacttgctttgacctttcaaaatgtgaaatatctggactggattcatgctgactgcagtactgtttgaagtactgttgcctgggaaaaataccatcaccgccatctacatgatctactaattgtagatcttctggccactcctctgaatctaacaagggctgggtagactcggatcttgagaagacttggactgacggaacttggtgtctgtagccactgtgtaccacggtagaatactggacagtgctcgaagtgtattgtgaagattcatttacatcactgctagaaatgcttggcctagaagatgacatgcatgaagaccccccaataccactgctgtgtccttcagtattaattttttcctttttgaacaggtccaatgatttcagatcttctggaaaaggcttattgtcatttgcttctatttccacaacacttacatcagtgaaattgccatctgaatacatttgatcttccgaattaaaattgtgccttggaggagtgtgaggtgaccactgggcaatatgactctttgaaggatctggaacattaggccagatgtgtaaacaattaggtctcgcttatt

SEQ ID NO: 5474 - DNA, 1766 bp, Homo Sapiens
  misc_feature (349)..(349): n is a, c, g, or t
  misc_feature (949)..(949): n is a, c, g, or t
  misc_feature (1084)..(1084): n is a, c, g, or t
gctttagtgcgctcgccgtcggctctacctgcgtgcttagctccttctcgcctgatccttctgtctctcccaaccccggacacccggcttcgactggttatatcttcggtgttcttttcctctcttcttctttcgcggttcagcatgcaggaaaaagacgcctcctcacaaggtttcctgccacacttccaacatttcgccacgcaggcgatccatgtgggccaggatccagagcaatggacctccaggctgtagtgccccccatctcactgtccaccacgttcaagcaaggggcgcctggcagcactcgggtttgaatatagccgttctggaaatcccactaggaatngccttgaaaaagcagtggcagcactggatggggctaagtactgttggccttgcttcaggtttagcagccactgtaactattacccatcttttaaaagcaggagaccaaattatttgtatggatgatgtgtatggaggtacaaacaggtacttcaggcaagtggcatctgaatttggattaaagatttcttttgttgattgttccaaaatcaaattactagaggcagcaattacaccagaaaccaagcttgtttggatcgaaacccccacaaaccccacccagaaggtgattgacattgaaggctgtgcacatattgtccataagcatggagacattattttggtcgtggataacacttttatgtcaccatatttccagcgcccttttggctctgggagctgatattttctatgtattctgcaaccaaaatacattgaatgggccacagtgatgttgtaatgggcctggtgtctgtcaactcgtgaaagccttcataatagactttcgtttcttgcaaaaatctcttggagcagttccatcttcctattgattgttacctctgcaatcgaggtctgaagactctacatgtccgaatggaanagcatttcaaaaacggaatggcagttgcccagttcctggaatctaatccttgggtagaaaaggttatttatcctgggctgccctctcatccacaccatgagttggtgaagcgtcagtgtacaggttgtacagggnatggtcacctttaatatttaagggcactcttcagcatggctgagattttcctcaagaacctaaagctatttactctggccgagagcttgggaggattcgaaagccttgctgagcttccggcaatcatgactcatgcatcagttcttaagaatgacagagatgtccttggaattagtgacacactgattcgactttctgtgggcttagaggatgaggaagacctactggaagatctagatcaagctttgaaggcagcacaccgctccaagtggaagtcacagctagtattccagagctgctattagaagctgcttcctgtgaagatcaaatcgttcctgagtaattaaatggaccaacaagtgagccatttgcaaaattttcaagcggaaattgttaaggcacctcattatctttcataactgtaattttcttagggatcatctctgttaaaaagttttctgtatgtcatgttataattacaggtcaattctgttaatatacttttgtgttaattttgctctatgtttgcctctgaaggaggtgagatttgtgctactttgggagattatgttcttttaatcatgtctaagatttattttgatcatgtttataatataatggtaattcatttttgatgttttgtgaagaattgaaatttaaataatgcttcggaatcaagtgg

SEQ ID NO: 5475 - DNA, 1132 bp, Homo Sapiens
gataatttatgattttattgtctttcctttgtccggcctttaacatgtttctgtaatttaaataaaaatctatttactttctccattttagcaaatggtttctttacccaaataggttgcactatagtccccatatggttttctactgttccacaaccactatttcacaaagattgacaaaactttaataaaagttaaatttacagacatcttaagataacttgggaaatatgtagtaaaaaagaatcgagtccacaaattaagaatattttgctaatatgcccaacaccaatttcagcaaatccaatctacttaactcatatatttaatgtggtaatttttctaacaaaatttaatgggggtatgaatgatatatttatgcccttgacaaagatgacatgtgtgattttgttgtgactaagaaaggagagtatgatttctggtggttatgatatcactctggctcatcgaagctcacagaatatgtaaggttctgccacgtccaaagatgttaggcaaatgtaatagaaggcgcaccgggctgacacacgttttcatcatacaaatcttctggcagttcctcttcatctccatcaggaaaatatgtagggaatggtagatttttaccgagatccttatatgcaggcagtttagaatctttgacctttactaagcaatttttatgtccaggtacagagccatttacatagattatgttgtgctttgtgtttattctccacactttcagtccatattctgtcctgtatatgtttcccatttttccaggcattttagttccaggccagactctgccaatatcaccagttgcaacagctccaggtctcctgtgggttttcgtttgaccatggcgtaggcaggctgggccttgtaaatcccccatcttttcatgacaccttgaaaaacctttaccaaatagtattcggtctgtgacatccacatactggtcctggacgaaagttgagccagcataaagaggagtgcctggtttaattgccgcattatctgttattattaccggaattctaactggctgtttcggcggcatccagttcccggtgaaattccaactggatttccttagacaagtgaaacattttccccctaaacagtg

SEQ ID NO: 5476 - DNA, 869 bp, Homo Sapiens
  misc_feature (49)..(70): n is a, c, g, or t
  misc_feature (80)..(140): n is a, c, g, or t
  misc_feature (147)..(149): n is a, c, g, or t
  misc_feature (201)..(213): n is a, c, g, or t
ttttggtagtgttttgggggtatgggaaagagggggggaggtttttttnnnnnnnnnnnnnnnnnnnnnnaggttttttnnnnnnnnnnnnnnnnnnnnnnnnnnnnnnnnnnnnnnnnnnnnnnnnnnnnnnnnnnnnnttgtggnnntaggaaaatttgcattttaatgtcacattgaatttcagtacttttcaatccnnnnnnnnnnnnntaaactgagacatggtcatgagttcaggattatatatattacaatttgccttgttataatacatttgtggctttatgataaaaataactcagggacatatggaattcaagctgatttgcgtaactgtcacaagaaaaaaagcattaaatgcatttctgaaataagtattttcattaatttcagaatctcaaaacagcattagaccttgccttgtttaaaaaaaatttagttcaacactaagctagctaaataaccttcttgaaaggtttaaacacaattgatatagaaaatgctttccctctaatctcaactttacataaatggaacaggtgaggaaggaaaggtagacaatttctttagcagcatatatggctagatccatcaaccaccttaaactagaatgtccattattgaccccattaaaaagaactggggaaatatcaaaaattactgatttcataaaccaaaagacatcaattttagggttacagttagtaaaatatttttgagacacttcaaaaacttttaaccataaactagaagaatcatctcttcattgtaagaaagaaaggcctaacagaaagacatttaaactaaactgattttcaatcctcttagaacaaacaaaatgaaaaataatggttgattagctaagc

SEQ ID NO: 5477 - DNA, 949 bp, Homo Sapiens
gtagctcctgcctgctctccctgcgttgcctagggtaaagcctccagatttgccatactgagcccctcttcctagcatcaggcgatacatctgagttcaaatgtcttcccaggctcagggacctccattccttgagattgtcttggcatggcccagccctgcctcatgggatggacaatgcatggggtggtctttatttttccctttcaaataaaacactagtcaggtaccgttttatcccagtcgtactcttccaggtttggaagacccagagaggccaagatcccatccttaagccatagcgagcggtggtggtggatagcatcacaagaaacgagcctgaaaatcaggtccagccggtccaagcacatggcctcccatctgggagagcccactgtcccactcccacatgtctgggcacctgccctgggctgaggccaggctgctccaggggcctcctgcgccctcacctgccacagagcaacccaggttaaatacagcccatgcacaaagccacaggccaaagcctatggaattgtttttaatcatcaaatttaaccattttcataactggttcctggaggtgtgcagtgcccccttgcctcttcaaacctacagcttctctttgccatttgtggatttcacatcactccacacagaaacattacagcctggcatccccagtctttgccttcttccagctgcctcgacacagcactgtggcctgtccctattgcccaggcacgccatttccaagggcaggaaggggcagtgtcctgaagcccatcttttctgtgactgtcttaggtgatgtgtagccccctccacctttccactcaacaacctcccacccctgtcctgctgcatggtccggagtctgggacctactttgttttttgttatttatgaccttgtttaaagaaaataaatatctcccaacctttaaaaa

SEQ ID NO: 5478 - DNA, 619 bp, Homo Sapiens
aaaattgctagctgaaagttgggaaagtgcctgttgccaatgtacacccgatgtgaagctctagtggaataattttacgtctgtatgagacattttctgtgcaaatctattgttcgattgaaatgtaaatgaaattaaagatggtgtacaccccatcatgtaaaaagcaggcaccatctctaagatggatggaaggctcattgttaaggcatatactcagcttctatttaaaactataatttaaaataattctgtacaatgaaatggggaatatatatgggaataaattctattccatttatttcaatttgaatttccaaattgtaatgtttccctttgtgctataggaataggattaaatgggggaagactaggatttataaggcctgtatatggggggagggcagagatggaacaatgagggttgtgatgatagtgaatagcaaagagtgaattctgtgtgtttttgctgtagcactgaagtgaagagatattagctttggctgttcacaaaatagagcatcatgattttcagtgtttgagagaaaattgatggaaaaagtttgcagtacttgacatgtatttgcatgcacaaaataaaattatttgtccaccttaa

SEQ ID NO: 5479 - DNA, 929 bp, Homo Sapiens
ggggccgccgctcgcttgtgaaactggaaggctgccatggctagcccagccgccgcctcggtgcgaccaccgaggcccaagaaagagccgcagacgctcgtcatccccaagaatgcggcggaggagcagaagctcaagctggagcggctcatgaagaacccggacaaagcagttccaattccagagaaaatgagtgaatgggcacctcgacctcccccagaatttgtccgagatgtcatgggttcaagtgctggggccggcagtggagagttccacgtgtacagacatctgcgccggagagaatatcagcgacaggactacatggatgccatggctgagaagcaaaaattggatgcagagtttcagaaaagactggaaaagaataaaattgctgcagaggagcagaccgcaaagcgccggaagaagcgccagaagttaaaagagaagaaattactggcaaagaagatgaaacttgaacagaagaaacaagaaggacccggacagccccaaggagcaggggtccagcagctctgcggaggcatctggaacagaggaggaggaggaagtgcccagtttcaccatggggcgatgacaatgtttgccacagcctctgcctggaacctggctcgtgctgtgaccagaagggaaaggcggctgtttggctctttctcccccgcaaggacctgctgacccgctggatggagagcaaaggagacccctcccgagccgctcacagtcctgtatttggcaggtttgggagcctgaggggccatctccctgacactcagaggcactgccttgcagacaccatccgtgctcctggtaaagggggacagagagcctcaccttgccacatatttgaacagtgatgagtttggggctggtttctgggaagggaacgtttatttagtaaagagcagaacaccctt

SEQ ID NO: 5480 - DNA, 706 bp, Homo Sapiens
  misc_feature (58)..(128): n is a, c, g, or t
  misc_feature (140)..(140): n is a, c, g, or t
  misc_feature (142)..(142): n is a, c, g, or t
  misc_feature (147)..(148): n is a, c, g, or t
  misc_feature (151)..(161): n is a, c, g, or t
  misc_feature (305)..(305): n is a, c, g, or t
gggcgggaggaggaagagaagaacgacacggcggcgcagaggcgcgaacggaggaacnnnnnnnnnnnnnnnnnnnnnnnnnnnnnnnnnnnnnnnnnnnnnnnnnnnnnnnnnnnnnnnnnnnnnnnggaaaaaaaggnanagggnnagnnnnnnnnnnnacccaccaagtcacctcatacatacaaggaggaaggttcatttaaattaacaaaatgaagtaagcacactttggagggatgtgaccagcaggaattaagattaaaaaacggaaagcatttcatcaaaccaaaaactaacttctncacaggaagtccactagtaacaggtattaagaggccaacacattcatttacataatggctacagtttcatttcgtaacttttgctgtaataattatgcaccaattgctggtcagagactcagttggataaaacagagcagtgggctaaatccattctgctatattttcatctagttgatcagagcaaatatctacgatcctcttttggctggattgtggctgctcagatcgcacttccttggtgaaagcaatagagtgtcccagatgggcctgctccaaaacacgctcatctagaaagcagcacaccacggggggtgggggagaggttggggagtgcagcagcagcaaagattacaatttatcttgcaattttagtgatgtcacctatgcctcttctatgc

SEQ ID NO: 5481 - DNA, 765 bp, Homo Sapiens
  misc_feature (123)..(123): n is a, c, g, or t
  misc_feature (594)..(617): n is a, c, g, or t
tttagaatgaaatgtaaatttaatacaaatagtctgactatgtacaagagaaggtaaagttttcaattctcgtattatcagaaacatcataaagaaagcctagatttataacaccacttctanttcctatgtgcatctgaagtatgtacaataaaacaccaacacagctttcatgtgtcaataggggaagtgcaagcaagaatgacttgaagtatccaataaagcaatctctatagaccccaaaatcaggctaaaaactgcaaacagctgactgcatccttgccagttctcaaagaaaaatttcatcactaaaaaataggtgtcaaattcactgaaaaactaagttgggttctttcattaaacctgggaataatgtaacatcaagtatttactatttttgcaagagaaataaaattggcagttccatttttacattacttaagaaaaatttaagagtgtttgaagaactgggacaagacattccaaacctacgacctaaaaatgaagcaagggatacatactgtccttcagcacatttccccacctgatacagagaaatttaccattagaatattagctgtgtgtggcaaggcnnnnnnnnnnnnnnnnnnnnnnnnaatcagacactgtcccagtctgttgacaaggacaaaaaggctctgaataggtcaccatcttcaattctgaataaatttcatatttaagaattctcaaatgcttaaaatggtggtcttttcagctacccatcctaagaagtcaagtacc

SEQ ID NO: 5482 - DNA, 839 bp, Homo Sapiens
  misc_feature (771)..(784): n is a, c, g, or t
aaatgaactctgtcaaccgacccttgctgtcaactttaagagctctatccctacgggcatctaaactaatatcctgaaatgaatacatgttgacaacatattagtctttatttatataaactagttgtgtattttttcttttaccaaattatgaatgcctagcaccacttacaaaatcagttggccacaaagttacacaaaaactacaattagctttaaaatgttatagaaattcaagtttagaagttaacaaattaatacaatataacactgaatactgactaaccagtagtttagctttacataatttctaggcataacttttaagaactgatactttctgggtaatattccatgatatgccaattatacattcattaaaatttcagatgctacctgaattattcttatctcaatgacagaatttaaaaaaataagttcaaatactgaaaatctaagacattaacactggggcccttgtaatatagaaaagaagaaaaattgtacaatcttaactgtttaaaactcttaacgtttactgtagtaacagaatatgaatttgtaacataaccatatgaatttctcaagttatttcctactgatgcatgtctgaagttataaaaatctcttttaaacgaacctatactgaattactccaaaaataacagtgatattttagggccttgcaaatttattctagtgcatattttaagtacctaaagtacagcctgtgcactagcaggttactgaaaagaataagtgtggctttcnnnnnnnnnnnnnnacggaggcaggatctcgctctgtaatccaaagggaattaaagggcgcaaggtggg

SEQ ID NO: 5483 - DNA, 823 bp, Homo Sapiens
tagaacctcagctgttaaccaaggggaaatacatcagatctgcaacacagaaatgctctgcctgaaatttccaccatgcctaggactcaccccatttatccaggtctttctggatctgtttaatcaataagccctataatcacttgctaaacactgggcttcatcacccagggataaaaacagagatcattgtcttggacctcctgcatcagcctattcaaaattatctctctctctagctttccacaaatcctaaaattcctgtcccaagccacccaaattctcagatcttttctggaacaaggcagaatataaaataaatatacattgagtggcatgggctatggtctccaaagatccttcaaaaatacatcaagccagcttcagttcactcactttacttagaacagagatataagggcctgggatgcatttattttatcaataccaatttttgtggccatggcagacattgctaatcaatcacagcactatttcctattaagcccactgatttcttcacaatccttctcaaattacaattccaaagagccgccactcaacagttcagatgaacccaacagtcagatgagagaaatgaaccctacttcctatctctatcttagaaagcaaaaacaaacaggagtttccagggagaatgggaaagccagggggcataaaaggtacagtcaggggaaatatagatctaggcagagtgccttagtcagggaccacgggcgctgaatctgcagtgccaacaccaaactgacacatctccaggtgtacctccaaccctagccttctcccacagctgcctacaaca

SEQ ID NO: 5484 - DNA, 1092 bp, Homo Sapiens
  misc_feature (43)..(43): n is a, c, g, or t
  misc_feature (817)..(830): n is a, c, g, or t
  misc_feature (840)..(840): n is a, c, g, or t
  misc_feature (979)..(979): n is a, c, g, or t
  misc_feature (1004)..(1004): n is a, c, g, or t
atacatgatctcgaaaatagtgtgatttagattctgccttggntgagctctgagggctacatttacctgtcagtttggggattttagtgcagattttttttaaaaaaattaaactctggtaagtactcaggaggctgagaacacaggccccttctctccccgatcctctgtatgcaggctgacttaagcccctttatgtttggctagtgccacaacaaaacagccccaaacagattgccatgagcatgctagcctggcttggtgtttgacgataaaatcagactggtaagtgcagtcagtgttcaggaaagaatctccaggctcttctcccatgacctggttttaaaatcagcattcatacagctgcttaccatctctctgtcctctgcagatgacccggtcctaggcagggaccaaaattccttgtcagctgaggaagtcctgaagaaacatcctgaagatgatgactgcactgccatcgtgggcagatgcagcttccatctacctgagggctgaaggggaaaacctttcacacacgtgaggaaggcgcagctctgtggaaaggtcactagaatggcagcggcagcaaatagggctccaatgcacgtttgcagttaactgggtccaaggagagcatggccctccacggcaagtttgctctatagaataaagtcctgagcttgtttttatcacagttagacagagaatggtctcttgtttctcagttatccagggaagaacagtgtatattctctgtagatgagtgttgtctaatgtagtgattaatctctgctagtgttaggaaagctccactacnnnnnnnnnnnnnncggttgcatngcgtgcgcatgtgcacatactgcagtcttgactttccaattacaaaatgcctaagtcaggtcacattgtcttcttccagccagtttctaaggcaggcaatggaaacaggagccgatgccaaatggtctagaggcagaangggctgcatgctttgcagggccagncccaaggctgccttccagagctgcactttctctggggacagtaaactctcaccgcagctgccggccccctgtgcttgccatgcccctc

SEQ ID NO: 5485 - DNA, 613 bp, Homo Sapiens
gggagagattcagtgacatcaaagagagggagatagattcatgaagaggctgaaatactcaaaggtgagtagaaagggaagaagcagagaacaaatacaagccaacagagattaatactgaaatagaaaatcacaaacagcaagagatgctgaggcacgcaggggaggagagagagaatagcccaagagaggcagaaaggaaatgcagaacatgagaaactgtgacgataaacaagtagaaacagcagaaaggaggccagactcagcaaaaaaggtgaaatttaaaacgaacgagaaggggaaggggtaacaaataatcacagttcacaaagagaaaagagaggtaggcagagaaaggagacggtagacagaacaagaaaccggacaaaaagcacacagcatgtgacccaaaaaggagacatgaaataaagcgtgaaagaagagccacatctaggagagcaaagagaaatagcaacaaaatgaaaaatgagagatatgtctaagacaagacacagaccactcttgtgaacaaaaagagacaatgaggcaaaggcacacacgaaagacattagcaagagaaacatggcaatgggtaagacacacttcagatcga

SEQ ID NO: 5486 - DNA, 546 bp, Homo Sapiens
aatggtttgagttcatcttcttcatgccctgcattgatccacctgtccttcatgatttgctaaaaaaggtaaactgttcattagcagagtaaaatgaaatattctgataaccgtaatatttaccaaaatttattttcaacatttcattgactatcgttcaaagcataaactccaaaaatattttttaatgtttccattcttgcttaaaaagccgcaggatatatccagtatggcatacaaatcaagccaagatctaaggtcactctaaagactctccaaagttactgcttgtttccacctacatgattacctctagagtgccgcgtttaattggatttagcaccaggaaacgtttgagaaggttttcacagtctgtagacatgtagaagggaattctgtatttccctcttaatactctctctctcagttcctttggagaggtacacgaggaaagaaaacgagtaagtcaacctttaggtttagttaaccaaacacaaccaaaaaccccctgaaaccccccgatacgccgaccggtgatcctctaga

SEQ ID NO: 5487 - DNA, 512 bp, Homo Sapiens
  misc_feature (89)..(89): n is a, c, g, or t
aagccacttgaagacagatgtacggagcagaagctgtccacagcaatgcgaataactaaatggaaagagaaggtacagattcagagacnaaaaatccggtctgactttaagaatctccagtgtttcctacatgaggaagagaagtcttatctctggaggctggagaaagaagaaccacagactctgagtagactgagggactatgaggctggtctggggctgaagagcaatgaactcaagagccacatcctggaactggaggaaaaatgtcagggctcagcccagaaattgctgcagaatgtgaatgacactttgagcaggagttgggctgtgaagctggaaacatcagaggctgtctccttggaacttcatactatgtgcaatgtttccaagctttacttcgatgtgaagaaaatgttaaggagtcatcaagttagtgtgactctggatccagatacagctcatcacgaactaattctctctgaggaccggagagaattagttcgtgatga

SEQ ID NO: 5488 - DNA, 293 bp, Homo Sapiens
tctttaacatcttctttcctatgccctctctgtgggatccctactgctggtttctgccttctccatgctgagaacaaaatcacctattcactgcttatgcagtcggaagctccagaagaacaaagagcccaattaccagaaccacattaagtctccattgttttgccttgggatttgagaagagaattagagaggtgaggatctggtatttcctggactaaattccccttggggaagacgaagggatgctgcagttccaaaagagaagagctcttccagagtcatctacctga

SEQ ID NO: 5489 - DNA, 864 bp, Homo Sapiens
ctccagaagggcttggtatatgaagacatactgcatatcggtttgcaccatctggcagcgctgtgcccggatccggctcacaaagccatacacgtccaccttccgttctgtatgcatcatgtccagcatggcatcaatgacgtcaaaggtacctgtacgccctacacctgcactgcagtggaccacgatggcccctgcatactgagggttacaggccttcaccttcttgaggaacttgagcatgccgatcggggtaaaaggcaccccaaagtctggccagctggtaaagtggaactgagtgatgaggcgctgtggctttctgttggtcatgtcgcccacactgctggatgcagaacttccgtactgtgtagtccaccaggacagtcacatcctctacagacacccgaatattcccatagctccagctgccttggtcatggccagtactgggcagcacttgcactcctttctctccttcaggtctggtaaccatgacgatggtggctgtgttttgttccaagatcatccgccagaaatcattcaccgtttcttcttttggtccttgtgcagcaatgaatttgttcttttcttagtagccgttgatgaatgaagcatagatgtaatcagaatctggaaccccttcaaccggtgtcaggtggactctagagtggtcataaggcaagatgtttacatatcgatttttttccttgttttcctccttggaagcagcctcacaggtggcctggataggacatgcagggagagcgttgaattcctccctgaagagcttatggtcgtctgccattctccggttaatttcctcttccagcttgtccacgggcaggggtgggtatttcctcgtgc

SEQ ID NO: 5490 - DNA, 529 bp, Homo Sapiens
ctggatctttctggtacatggatgtacggagagtaggtgtccgaacattctacagcctgatcttgtcaactcgggaatcaaatacccggagtacaggatctttatcatcatcatcatgacacattatttagttgtcaatgaaagatgcaaacatctgggtctccaggaatcttgagaggaagggcaggtagggctcaggctgatctgacagaaaagatgctttatcaaagtttggcatttgctccctgtaggtaaaccaggattccttatcctggctgggttggatgacaaacacctcataatctgcaaacatctgagtgaaacgattggcaaaaacttcccggatctgaatgtttagctggtaaatcctgagttcttcttcatcacactgaactttgagatccttattgctgctggggtcttcacgcacttccaacttttccaggctcaccccagttctcttgaccaaggcttgcagccgggcaatagtttcattctccttaagaagctcgtaggaatgcacagggga

SEQ ID NO: 5491 - DNA, 815 bp, Homo Sapiens
acttttaatcattttcaactaaaatattttggataatactgccttatatttaggcagtatatattaaagattttcacatgcatgattgtactgtcgatgaccctgctgtatactactgatctgattatgaagtggttggcagtaatctcttctttcgtggtattcctgtcatctttgtgcatcacagtcagctttgtattcctagcttgtaagctacttgaggataggggcatgtctgaatctatttaatctcttgcacctgtttggcaaattgatgttttaagtatttaaataactaaagctccctctacagtacatactcactcctgatttatgaattggcaaaattcaactttttttccttgaatattcttaaagtgagatgaattccaaaggagagtgttctgtgtgtggccttcattgagtggttttctgttaccagaaagctcttggtggccttcctcttccctggtgtcaaggctgactgttataggaaatgggaggggagagggccgtttctgccacgcattgtcctaggttcttaacattatttaatccttataatgcaatgttatcctcattttacagatgaaacctgagaccaaagaacatgtaacacataaagtacattgcagagttaggatgtgaacccaactctgattctgaacctaatgctctcactctttcattcagaggttcagtcagttctttgtaggctgtagatccagagaacctgccgtagccaacaataaagttgttagtttttaaaacatctatgtggtaagttggtctggcacttaaaaatgtattgtttc

SEQ ID NO: 5492 - DNA, 894 bp, Homo Sapiens
  misc_feature (634)..(641): n is a, c, g, or t
  misc_feature (645)..(652): n is a, c, g, or t
  misc_feature (654)..(656): n is a, c, g, or t
  misc_feature (658)..(658): n is a, c, g, or t
  misc_feature (666)..(666): n is a, c, g, or t
  misc_feature (668)..(668): n is a, c, g, or t
  misc_feature (672)..(675): n is a, c, g, or t
  misc_feature (682)..(684): n is a, c, g, or t
  misc_feature (706)..(706): n is a, c, g, or t
  misc_feature (711)..(713): n is a, c, g, or t
  misc_feature (718)..(719): n is a, c, g, or t
  misc_feature (728)..(731): n is a, c, g, or t
  misc_feature (749)..(779): n is a, c, g, or t
aatatggtctggtatagttcatattcatggctgaaacttgaccacactattgctgattgtatggttttcacctggacaccgtgtagaatgcttgattacttgtactcttcttatgctaatatgctctgggctggagaaatgaaatcctcaagccatcaggatttgctatttaagtggcttgacaactgggccaccaaagaacttgaacttcaccttttaggatttgagctgttctggaacacattgctgcactttggaaagtcaaaatcaagtgccagtggcgccctttccatagagaatttgcccagctttgctttaaaagatgtcttgttttttatatacacataatcaataggtccaatctgctctcaaggccttggtcctggtgggattccttcaccaattactttaattaaaaatggctgcaactgtaagaacccttgtctgatatatttgcaactatgctcccatttacaaatgtaccttctaatgctcagttgccaggttccaatgcaaaggtggcgtggactccctttgtgtgggtggggtttgtgggtagtggtgaaggaccgatatcagaaaaatgccttcaagtgtactaatttattaataaacattaggtggtttgttacannnnnnnnaaannnnnnnnannnanaaaaaaantnatannnnaaattannncctcccaaaaatttattttaanaaatnnnttttnnaatttgttnnnnccccctcggccccccctnnnnnnnnnnnnnnnnnnnnnnnnnnnnnnnggaaccccggggcccccaaaggggaaaggggaaacatggggcccaaagggggttctccccgggagaaaaccccgggggagtggagatgagggctcggggaaattccccccccttt

SEQ ID NO: 5493 - DNA, 1691 bp, Homo Sapiens
  misc_feature (541)..(560): n is a, c, g, or t
  misc_feature (1182)..(1182): n is a, c, g, or t
  misc_feature (1239)..(1239): n is a, c, g, or t
  misc_feature (1391)..(1391): n is a, c, g, or t
  misc_feature (1519)..(1519): n is a, c, g, or t
  misc_feature (1581)..(1625): n is a, c, g, or t
gggttaaaccccccccgcaccgcagacccaacaacgcaaaataacgccccccaccgagtgcggcattcccgggatcggcggtggcggctgcggcaacagcggggccgatgtgtagttggtgactgcctctccagatgctgaggtgcctgtatcattggcacaggccagtgctgaaccgtacgtggagtaggctgtgccttccgaagcaggatctattcacaatgaaagtgcagtctcccgaattccagtcacttttcacagaacgactgaagagtctgacagaattatttgtcaaagagaatcacgaattaagaataaccaggacgagcagcgagggatttattaggaggagtaaagcctcacgatatatattttggccccgctgctacccctactcaaatcgaaggagatgtcgaccgccctacggggacccccacgcgagatttcgtccgcacattttggccggaactcccgatccgccagccgcccgcgcccgccgctataccgtcgcccgcgacgacccccccaatccctcgcctannnnnnnnnnnnnnnnnnnnggtcgtgcgtggtgtggctcatgaacaacgcccgccggaaaacaatgtggatggtgaggccacaacgcgcctcgtgcgctgtgaactctcctcgcgccacggccgccaaagaagcgccgcccggggcccaaaaccgccaacaacccgcacgcgccggcgcggcagcgaatgccccgcaacccaaattactaagccgattcaaagatcggcgcctccaaaaaaagccaatgcgacacagcgcgcaacgtggaacgaccttcaaggttggcgcaatcagccacgcgccgggcgccaggccatcaccgaggcgccaaacgccgccgccggccagcgtcgcaccctcaacgcgggaggggagcaataccctgcggacacggcgtcgcgttctctctcgccacagctgagtggttgtgcgctgagctgacctattacctacttccggacgccccccggatgtgaaacgtcgcccccgcccaacataccctggcgggcaatacctcggggcgtccgcccgccgaataatagagaggccgcccgtcggccacccgacgggccggggggaaagaggttaaaaaatcccgctcctttaaccgcccgtcgaacagtaaagggctcccaatancactacccccggaacctcccccgggggccacagcagcggggcctgacaccacggccnccggcccaccccgccccgcgctcgaatgtgacgggcgcagtcaaggacgaggaccacacacgtctgctgcgcaaaggtgcgaattcgttgggactgatggaggatcgcagcactcctgaccgagactacggccgccaatcgccgtcacagtnggttttatacttcctcttaacccacaccggattcccatccaacgcgggtacgatttgtcaggggtaatgcttgtgacgctttaactagtgctccgaaatcggatataacataaccccgcacaggcatnatttcgcgttgctgctccggattgccaacaactatcaacagatgttccctgccaaccaacannnnnnnnnnnnnnnnnnnnnnnnnnnnnnnnnnnnnnnnnnnnngactccaaagaggttgcccgcgtccaagccgccgcggcgagggtggggacacctcccccctcagcg

SEQ ID NO: 5494 - DNA, 1206 bp, Homo Sapiens
  misc_feature (551)..(551): n is a, c, g, or t
ggggccaacggccatgtcccctttaaggatatgcctgccacccagatgctgctagagaaactgaacggcacagtgccctgcctgttggataccagcaccatccccgctgaggagctgaccatgagcccttcgcgctcagtggccaactctggcctgagtgacagcctgaccaccagcaccccccggccctccaacggtgactcgccctcccacccctaccaccgaaccttctccccccacttccaccactttgtggaccagtgccttcagcgcaacccggatgccagatcaagcgacgtgcctcagaggctttgcccgaattgcttcgtcctgtcacccccatcaccaattttgagggcagccagtctcaggaccacagtggaatctttggcctggtaacaaacctggaagagctggaggtggacgattgggagttctgagcctctgcaaactgtgcgcattctccagccagggatgcagaggccacccagaggccccttcctgagggccgcccacattcccgccctccctgggaagacttgggtagaaanggacattcttccaggaaagttgactgctgactgattgggaaagaaaatcctggagagatacttcactgctccaaggcttttgagacacaagggaatctcaacaaccagggatcaggagggtccaaagccgacattcccagtcctgtgagctcaggtgacctcctccgcagaagagagatgctgctctggccctgggagctgaattccaagcccagggtttggctccttaaaccagaggaccgccacctcttcccagtgcttgcgaccagcctcattctatttaactttgctctcagatgcctcagatgctataggtcagtgaaagggcaagtagtaagctgcctgcctcccttccctcagacctctccctcataattccagagaagggcatttctgtctttttaagcacagactaaggctgggaacagtccatccttatccctcttctggcttgggccctgacacctaagtctttcccacggtttatgtgtgtgcctcattcctttcccaccaagaatccatcttagcgcctcctgccagctgccctggtgctttctccaagggccatcagtgtcttgcctagcttgagggcttaagtccttatgctgtgttagtttcgttgtcagaacaaattaaaattttcagagacaaaaaa

SEQ ID NO: 5495 - DNA, 1057 bp, Homo Sapiens
  misc_feature (702)..(702): n is a, c, g, or t
  misc_feature (708)..(708): n is a, c, g, or t
cgctggccacatggagagctgaagcttaatctcccagctggagattgccgacagaagaaggagagtgaggctgtggagtggcagcagaaggcccagatggtacaggaagacttggagaagagccgtgctgagctgaagacttgcatgagtacacctcatgtggcagagcctgcttgaagaatgagcaggatgagcaggatgagaatggggcagaggctagtgctgacctacgggctgatgctaatggccaaggaccgcagtgagtgaggaacgtaccactgaggcagagaacgaatgagcgtgtgcagaagcacctgaaggccctcacttcggagctgcccaatgccagagatgagtccaagaagactgccaatgacatgatccatgcttgagaacatgcgactgggccgagacaaatacaagaccctgcgccagatccggcagggcaacaccaagcagcgcattgacgaatttgagtctatgtaatgggcacccagcctctagggacccctcctccctttttccttgtccccacactcctacacctaactcacctaactcatactgtgctggagccactaactagagcagccctggagtcatgccaagcatttaatgtagccatggggaccaaacctagcccccttagcccccacccacttccctgggcaaatgaatggctcactatggtgccaatggaancctccntttctctccccggtccattgaatctggatggctagaatatcctactttctccagcctaaaaggtacttttccactttggattttgcaaatgccccctaaccctttactggttgtccctatggggaatccaagtgggggaataagggttgggaaccctagtttcccccttctttttccccttaaacactggtctttttttccaggggccccgagaaatttaacccccggttggaaaatggttttttgccgggccttaaggggaaatggacaccagggaccccttggggaaattcctttcccccccgggaaggtgcccacccgggccccctaaaaatttttgcccccccca

SEQ ID NO: 5496 - DNA, 806 bp, Homo Sapiens
  misc_feature (159)..(168): n is a, c, g, or t
  misc_feature (301)..(364): n is a, c, g, or t
ggggcagtcacagacacttgagcacacgcgtacacccagacatcttcgggctgctattggattgactttgaaggttctgtgtgggtcgccgtggctgcatgtttgaatcaggtggagaagcacttcaacgctggacgaagtaaagattattgttgttannnnnnnnnnctctctctctctctcttaagaaaggaaaatatcccaaggactaatctgatcgggtcttccttcatgaacgaatgcaggaatttgggaactgagctgtgcaagcgctgaagaaggagatttgtttggaggaaannnnnnnnnnnnnnnnnnnnnnnnnnnnnnnnnnnnnnnnnnnnnnnnnnnnnnnnnnnnnnnncggggactatggggagaaaaaagattcagattacgaggattatggatgaacgtaacagacaggtgacatttacaaagaggaaatttgggttgatgaagaaggcttatgagctgagcgtgctgtgtgactgtgagattgcgctgatcatcttcaacagcaccaacaagctgttccagtatgccagccctgacatggacaaagtgcttctcaagtacacggagtacaacgacccgcatgagagccggacaaactcagacatcgtggagacgttgagaaagaagggcccttaatggctgtgaacagccaaaccccggatgcggaccaattccgtaggtcaccagccctgaatctgaggacaagtacgggaaaattaacgaaagaatttgatccaatgatcagcagggcaaagaattgggggccttgttcccctcccccactttca

SEQ ID NO: 5497 - DNA, 771 bp, Homo Sapiens
  misc_feature (485)..(491): n is a, c, g, or t
  misc_feature (493)..(508): n is a, c, g, or t
  misc_feature (510)..(510): n is a, c, g, or t
  misc_feature (513)..(513): n is a, c, g, or t
  misc_feature (515)..(585): n is a, c, g, or t
  misc_feature (590)..(591): n is a, c, g, or t
  misc_feature (593)..(594): n is a, c, g, or t
  misc_feature (599)..(601): n is a, c, g, or t
  misc_feature (603)..(613): n is a, c, g, or t
  misc_feature (618)..(618): n is a, c, g, or t
  misc_feature (622)..(636): n is a, c, g, or t
ggggttagaattgcaattttaagaccagaaaaatttgaagtctgatcagagatttacaactgttcattatagtggtgccttaggcaatctttccaaagtaaattcagggccccattgctacttatgccatatttggacatacttttttttcttcaattttgtaaacttcctggaaagctgtcttcactaagtatcccctagtctctatatatgtggttagtagtcatggaaatgacacataaagtacgccagaagtttgatggaacgtgttagaaactgttttgtgcttttatggatgtcatacttgacaatacatgtgtaagttactaatatatgaattgatgctaaatatatcttacatttgaattccttttggataaagttatttcttgatgtgacacagtagtgtgttttcatttttattctttacatgtgaccaaaacaatagaaaagttaaaaataaaatatagtgttttaggtggccnnnnnnnannnnnnnnnnnnnnnncnccncnnnnnnnnnnnnnnnnnnnnnnnnnnnnnnnnnnnnnnnnnnnnnnnnnnnnnnnnnnnnnnnnnnnnnnncccanncnnccccnnncnnnnnnnnnnnttggncggnnnnnnnnnnnnnnnaaaaaatttttctcacaccctttcttcggggcgggcggggccccacagaaagaaaagaaaaaaccggccaatccccgtgttcccaaaagaaaaacccccggggccaaaaacaagggcgtgtgtgacctcccccac

SEQ ID NO: 5498 - DNA, 776 bp, Homo Sapiens
  misc_feature (211)..(211): n is a, c, g, or t
ggggggcgacagcggcgcgcttcgccgggccggtactccaggtccgacccgcgaacccctctgggatccccgccgctctgtctacaacccagagcactttcatttggacccgtggatacccattgaacagatgcttgaaacctgcaagtaatcttcagatcctagcagaaccataggcctttcctttgtgttgggaggatatagcctgccntatatgctgtggaaatgaacggggagcagcagcttgatgcagatgccggctctggtatggaagaggtagaattaagctgggaagattatctagaagaaacagggtccacagcagttccctatgggtcttttaaacatgtggacacacgtttgcaaaatggatttgctcctgggatgaagctggaggtggctgtgagaacagatcctgagacctactgggttgccaccgttatcactacctgtgagcagttgctccttctccgctatgatggctatggggaggatcggagagcagatttctggtgtgacatcaggaaaggctgatctctaccccattgggtggtgtgagcagaataagaaagacccttgaaagccccagaaggcatcaaagataaaagtatctgactgggatgagtttctgcggtagaccctgataggagcatgtaatcctcctggtccgctgctagaagggctcccgtattgggagggaatcctttagaactcattgcctccaggatccaaactagaatgtcaagcttttccaggaattcttttaaacccctggg

SEQ ID NO: 5499 - DNA, 1440 bp, Homo Sapiens
  misc_feature (143)..(151): n is a, c, g, or t
  misc_feature (634)..(634): n is a, c, g, or t
  misc_feature (662)..(662): n is a, c, g, or t
  misc_feature (843)..(854): n is a, c, g, or t
ttactagaaatatttggttcttttaatcagctattcatggtgtaataaaataaaattaagtggcacctaatttaacatttaaaatagttcattaaaagataatctacaaaacaatgttatgcctaattgtcaaaataacaccnnnnnnnnncaagaaaggagaaataaaggcataatcaaaattatggctaacaacgtgggttcattttgacacttacagatgattctgtaggcatatcggcaggcacgatgttgaaaaccaatccactagatttaaaattaatggtaagataaaaaagaaaagatacacatttcagaggtaatgtttgaaattaaagaaaaatatccaccatatattacaacagatcttttaatgactatttttaacataaagattgttgttttgggaaacatctattctctttgaacatttcactaaattttcaatgtattaaataactgacagaaataagttctgtgttctgtacaaattaaaggtcccatgaatacataaccccctcccagccccaccaaagctcaattttgcatggtttcagcagaaaatagacagcccaaaatttaaacagaattcatagcatttacaaaagtttacagaaccccctatgttttcatncatctgtttctaacaacaaagattacanatgacagaactgaatgatccagaatgtaaaaatatttgtgcaaaactgcattaattgttcttaccatctaataggggtaaaacttaagaacacgcaatgacaataatgaagaaaaactacattaaaagtaattctacttttgatatcaaacaacatggattatactattactaaacattgnnnnnnnnnnnncgtggcaccatgagagcagcaggagcaacaaatgatttggcaattccagctaaagaaagctgacactggaatatgccaaagttaatctccacagtaggcatccatctgaaaagactggaaacaactgtagggcttcaaacttacttcagtgtctttattcttgaatttgcaggtcataaatgaaatatttaagaaagtcttttcccctccctctcaaggagtgtttcttgcattactggcaatcattaaaagagttgaatcatagattctctggatttaccaacaccaatccacttaactggaatttgaagctcatcttcaataaatcgaacatagttttgtgcattaacaggtagttctttaaacgcccttgcatttgatatgtctgtgttccatcctgggagagtcttatattgaacttcaactttatttaagacttcttggtttgctgggatatgaggtatgatttcaccatctaacttgtaagcaactccaactttgatttccgtaaacatgtccaaaatatccaacttggtaagtgccaacgcagtaaatccattgatcatatgagcatatttgagcaaaa

SEQ ID NO: 5500 - DNA, 1043 bp, Homo Sapiens
  misc_feature (955)..(963): n is a, c, g, or t
ggggaggttgtctgaaggccgaggccaagatggcggtgctgtcagctcctggcctgcgcggcttccggatccttggtctgcgctccagcgtgggcccggctgtgcaggcacgaggtgtccatcagagcgtggccaccgatggcccaagcagcacccagcctgccctgccaaaggccagagccgtggctcccaaacccagcagccggggcgagtatgtggtggccaagctggatgacctcgtcaactgggcccgccggagttctctgtggcccatgaccttcggcctggcctgctgcgccgtggagatgatgcacatggcagcaccccgctacgacatggaccgctttggcgtggtcttccgcgccagcccgcgccagtccgacgtcatgatcgtggccggcacactcaccaacaagatggccccagcgcttcgcaaggtctacgaccagatgccggagccgcgctacgtggtctccatggggagctgcgccaacggaggaggctactaccactattcctactcggtggtgaggggctgcgaccgcatcgtgcccgtggacatctacatcccaggctgcccacctacgggccgaggccctgctctacggcatcctgcagctgcagaggaagatcaagcgggagcggaggctgcaaatctggtaccgcaggtagcgccgccgccgcagccgccggagcctgtcgcccgtcctgtccccaacctgcttggggccccgggaagttgtcaaataaacctgccctccggctgccgccaaaatgcccgcaggtcaaacaaaactataccctgtcggccggcctcggccccccaagaaacctttctaaaaccattcttttgggccgcccgggcccccaaaaggtaagtgaaccatgggccaataggcctgttttccctagaaaaaccccctgggccatcgaaaaagggggctttgggaatttnnnnnnnnnaaataaaaaaagccggcccgcggacgggccaaaacccgtagcccgctcttctggaaaacaaaaacttccctggacaggac

SEQ ID NO: 5501 - DNA, 488 bp, Homo Sapiens
tcagaggatccccctgatattctggttagttacaagatttgacatgaaaattattagataccatttaaaaattttatgtgttatgtgtttattctgtgagaatgttaccttactgttgtaatagtgcatacatttttctgctttcatggcctctgtattttcacaaaacaccaaaaacagcatttaattatattatcatgagtgtgtttctggacacaaacttctgcagtagaatgacctaacatgtcgttttcattgcagtcattataggattgaaatacgttcaaaataacctctctaggaaagttttctgctagaatttctcccctctattcattataatattctttgtttttaaagccagtcaaatataatagtcttaataagatcagaaactctccaggagagtgagtctaccctcacgtccttgtaggatgatcttgattatagtcttattataggactataactgtattctcaacatttca

SEQ ID NO: 5502 - DNA, 586 bp, Homo Sapiens
ctctagcggatccccctgatattctggaggagagagtgggcttagaaaaagtttatttttataagccctggagatcttgattgacttatttaggccaacagtaagtttgcagttaagaaatctagtgcctggttaaggtattatgtcaagaaatattgtgtcctttttaagaggttattgtcagtgtagtctgcacggattggaacacacctggaaaagtatattcattttggctcctttctttaaatggaacaaactaagtggagcggctaaagggagccagcatggtcacaggctatatagtgcgaagatgaccagcccgaggagaaggaacttgtggaaatgtgacagccagctgtcaatatgggaaaggatattgtcgggagtagtggtcaaagagcagaatttattagaaagcacacttcacttaggtcaacagaggggagaactttctctttgcattttccctcagtgaatgggcctctttacagagtggcagagactggggaacagtgtttctttgttgggagaaaaattagatggcaggagctctaaggtctttctgcctgtgagactgaattgaccc

SEQ ID NO: 5503 - DNA, 625 bp, Homo Sapiens
cattctgttcatatatcgatctagccccaggggcaccctcaatttctctgtcctgccttaaatacacaagggtagagcataccgctccctcacactatggaaattatatcaatagttatcagactgaaaaacttctgagctttatacctcttctggccaaaggctcccccatgcccaagatactggcctgaacacctaatccctgctcacagggggtggcaaaacatggcagttgaattgtctgcttagcaccttctgtctgtactattcctcctgacatcactgggtatccctgccatttgggccctctgaccatcactagagagatccttggcttctggtccataggggatggcaatctggcccacaggcctatctctgaagaccattcagactctgctctgtgaaaggagagtggtgccaagtcatctccacaggagtcagtgtttcttaagtttgctttcttttctaaaaactagtttctactacacaagcaatgcatgagcacattctcttagttagaaaagccagtcttagccttaacttggaaataccctttaacttcccccatggagtctgggccctatcccactccagaaatatccagggggaccctctagaatag

SEQ ID NO: 5504 - DNA, 768 bp, Homo Sapiens
  misc_feature (39)..(39): n is a, c, g, or t
ctgtggcgttctagaggatcccacctggatatttctggntggacgggaaatgtgtgccctgatcacctgcccggtgcctgcctgtggcaaccccaccattcaccccggacagtgctgcccatcatgtgcagatgactttgtggtgcagaagccagagctcagtactccctccatttgccacgcccctggaggagaatactttgtggaaggagaaacgtggaacattgactcctgtactcagtgcacctgccacagcggacgggtgctgtgtgagacagaggtgtgcccaccgctgctccgccagaacccctcacgcacccaggattcctgctgcccacagtgtacagatcaaccttttcggccttccttgtcccgcaataacggcgtacctaattactgcaaaaatgatgaaggggatatattcctggcagctgagtcctggaagcctgacgtttgtaccagctgcatctgcattgatagcgtaattagctgtttctctgagtcctgcccttctgcatcctgtgaaagacctgtcttgagaaaaggccagtgatgtccctactgcatagaagacacaattccaaagaaggtggtgtgccacttcagtgggaaggcctatgccgacgaggagcggtgggacccttgacagctgcacccactgctactgcctgcagggccagaccctctgctcgaccgtcagctgcccccctctgcctgtgttagcccatcaacgtggaaggaagttgctgcccatgcgtccatgtaagg

SEQ ID NO: 5505 - DNA, 676 bp, Homo Sapiens
  misc_feature (90)..(116): n is a, c, g, or t
aggcaaagctctacttaacacactttaataactaacaagaatctttattatcaactatctagttaggattcatatttcccaattctctcnnnnnnnnnnnnnnnnnnnnnnnnnnnccatcttaatctattttttttaatctggatgactaattaatttggaattatcattcttaattcacctctgttagcctcccccaacccatccctaagctgatagggattgctcaacaagttctaaaatgttctgagtactttgaatttagtaagaggaaaataaaactcactggagttattaataaacaagttctgcactgaaagggtgccatgttgcccagagaatgacccaggtaagggaaagacaccaggggattggaagagatggacagggttctgaaaaaactgaaaatgaattctagaaagcagcatttgagagggaaaagagaagtgatcagcatttaggaatatgaactgtctggagctagagaaacagcctgggaaaagagcaaagggctagagcaggaaagagaaaagagaatgagactagcggtggtttggatattatttgtaaccaaagtcaaaggacgggagatctagagtccagccaacaaagaacttgctcctataaaaaccaaatggaccccacccttcacttgacgtagaggtcctttcctcca

SEQ ID NO: 5506 - DNA, 531 bp, Homo Sapiens
tactgggcacagtcatcatgcactacatgcggcagaggacccaggaccatggtgagaacgtgcgcttgaggcctgtgagttctggctgacgctggccgagcagcgcatctgcaaggaagtcctggcctcccatctggtccagttgatccccatcttggtgaatgggatgaagtactcggaaatagacatcatcctgctcaagggggatgtggaggaggatgaggctgtccccgagagtgagcaggacatcaagccacgcttccacaagtcacgcacggtcacactgccccacgaggctgagcggcctgatggctccgaggacgcggaggatgacgatgatgatgatgctctgtccgactggaatttgaggaagtgctcagcggctgcactggacgtcctcgccaatgtcttccgggaggaactgctgccccacctactcccactactcaaaggcctcctcttccaccccgagtgggtggtcaaggagtcgggcatccatggtgctgggcgccattgctgagggctgcatgc

SEQ ID NO: 5507 - DNA, 531 bp, Homo Sapiens
tgatattctggggctcactggggggaagaacagactgattatttactataaatccttcaaattcatcttcttttcccatctgcctggctatagctttcatgctggggtagagaacgtcagtttcatagagctctgaaaaccgtttgtggagagagacagagttgatatcctggccttgcagcttgagtcggccccagtgctcctttaacacttccagctgcttccacagtatcagaaatgatctcagcaaagcaaaggacatcaccgcatcgcacaggccctccagcagctcagaggtctttgggctgcttcggaactgacttctgaatcctggcactttggaccaatctggctgtgtatttttgcccagtgtggctcgctgtctttggggggcctccatggtcacatgatagctactcagaacatcttccagtagcagttgcacacccaccagttctccatgagccaccttgcggtcacggtcactcagcccacagaggcacagctgcatattatattctagggtatctg

SEQ ID NO: 5508 - DNA, 730 bp, Homo Sapiens
gttacagagtcttatctattagcagcacagtggtagccaagggtctctgtctgcaagacaggaaaatgaagctactgaagcccctgttgctcccacctgcctgcaggatggctactgattttacaaaggccttctgggagccaatccagggctcacctgggagagtgggtaacagaatggcaggaaccatgtacaaaccccatgagaagtgcccgactgagggaagtcagcttcccataggtgagggggctgttgccattatgggctcagaatctaaatcttactgatccctagtagtaagacaattgccaagaaattgtcctagcaggtactacccaagtgttacaggctctgcataggtcctcaaacactttacaggacacgaaccatcaaattcaaaagagtagtgtttgttctatcagttctgaatgtccacagggagaggcaactagatttatgtggaaaaagtgctgtttgaaggaactgtgtcatatttcgaagtgaaatgactttgggaaccagaacatttctgcagatgtctgaatatcaagaacctatctctaaaaggcatttatcaggaaatgtacgctcactccaagtgctttttaaaaattcaacatatggcaatgttttaatttttgtgctttcaagaggtaactaaatcgataggaagctgagggaagatcattccttatggactttcttgtttgggtgcagacactatcccgtc

SEQ ID NO: 5509 - DNA, 533 bp, Homo Sapiens
atgcagggcagttatcatgccagggcatatatcaatgcctacagatattgctacttggatatctctactctggatatctcatgtcatgcgtccaaaactgaaactagtctcaatccctttattcctgttatataaatagcaagccataactgaaagccataaaccaggatctcatcatcaacttcttcctctcttatctcagaatcaagatagttatcaagtaagatctttaaaatttcttgaattagcttctcctttatgcccactgtcactaccatcttagttcatgatgttatcttcagcctagattatggcaatagcttactaatgattatccctccatcctaatgataaagtggtcttttaaaaatgttactcccctgcttgaaatctatgatagtttttaagataattccaactcctaagtacatacggtgctttatgatctgggtgcccatctagtttcatcttctgtctcttctatagaacatgttctctactgcacataaaatattatatggataacatatctt

SEQ ID NO: 5510 - DNA, 854 bp, Homo Sapiens
  misc_feature (537)..(551): n is a, c, g, or t
gggaggtgatgactgaacttcagggtgaacttggtttttggacaagtacaaacaatttcaactgatattcccaaaaagcattcagaagctaggctttaactttgtagtctactagcacagtgcttgctggaggctttggcataggctgcaaaccaatttgggctcagagggaatatcagtgatccatgctgtttggaaaaacactgagctcagttacacttgaattttacagtacagaagcactgggattttatgtgcctttttgtacctttttcagattggaattagttttctgtttaaggctttaatggtactgatttctgaaacgataagtaaaagacaaaatattttgtggtgggagcagtaagttaaaccatgatatgcttcaacacgcttttgttacattgcgtttgcttttattaaaatacaaaattaaaccaaccaaaaaactcatggagcgattttattatcttgggggatgagaccatgagattggaaaatggaccttaattctagttttagaccttacctttggcnnnnnnnnnnnnnnncccctaaaattcttaaaacttacctcccctgggttgcaaataaaagggagttttcctaatcccccaatttggaacgaaaaattgcaatttttttcataaaacctaccaatggtttcaaccccattttcgggacctaaaccccactgttaccacctttttcaaatctccggagattttttcccccatttccctcggcacaaaataagcattgcgggacccttcaagggtctctattcggcccccacttctcataggcacaaattggccaaacaacttcttcaaaacatggcgggacgcgcttta

SEQ ID NO: 5511 - DNA, 1093 bp, Homo Sapiens
ggtaaagagaaaatatcacgggccgctttccacaatgcagttgctgtagtcatctacaataataaatccaaagaggagccagttaccatgactcatccaggcactggagatattattgctgtcatgataacagaattgaggggtaaggatattttgagttatctggagaaaaacatctctgtacaaatgacaatagctgttggaactcgaatgccaccgaagaacttcagccgtggctctctagtcttcgtgtcaatatcctttattgttttgatgattatttcttcagcatggctcatattctacttcattcagaagatcaggtacacaaatgcacgcgacaggaaccagcgccgtctcggagatgcagccaagaaagccatcagtaaattgacaaccaggacagtaaagaaaggtgacaaggaaactgacccacactttgatcattgtggcagtctgcatagagagctataagcagaatgatgtcgtccgaattctcccctgcaagcatgttttccacaaatcctgcgtggatccctggcttagtgaacattgtacctgtcctatgtgcaaacttaatatattgaaggccctgggaattgtgccgaatttgccatgtactgataacgtagcattcgatatggaaaggctcaccagaacccaagctgttaaccgaagatcagccctcggcgacctcgccggcgacaactcccttggccttgagccacttcgaacttcggggatctcacctcttcctcaggatggggagctcactccgagaacaggagaaatcaacattgcagtaacaaaagaatggtttattattgccagttttggcctcctcagtgccctcacactctgctacatgatcatcagagccacagctagcttgaatgctaatgaggtagaatggttttgaagaagaaaaaacctgctttctgactgattttgccttgaaggaaaaaagaacctatttttgtgcatcatttaccaatcatgccacacaagcatttatttttagtacattttattttttcataaaattgctaatgccaaagctttgtattaaaagaaataaataataaaataaaaa

SEQ ID NO: 5512 - DNA, 1371 bp, Homo Sapiens
gggcatgtgagcctaacactatcctgtaattcattttctcaggctatgtgtaaatgtagaaccctaatttttctataaaaaaacaaactaactaactgtgtaaagaaagaaaaagggaagtaccaatgggtttttccaccttatttttacctttgatctacccttgcagatttaacctgtcttcttccctcccattattctcattttccttttacctttctccaccatccagagccacaaaagcaaaccttctacctcctacctacttttctctgggacaaggataaaggaatatgattttccagagccccagagccagctcatcttccaggtgctgaaaccactttccaaataaactaaagcctggatttgatattacaaattttgggaaatcttagaataaagaacgagaacaaggaagtcattggctactataattaagaaaggtaggattcagatgcttaccgatgatgcagtacttgatagaagaaaacagtctgggaggatagcgctcatttttcagttaccctttaaggagtccctttgtctttgggaaagtagcagaatggtccgcttctttcccatgagtggaaaatgtggcttgtccaactctcctccaggttgcatttcagtttctttccaaaacttattacctcccctaatcctgagactttggaaaaggtggaaggaagaactgttgctttatctccccctccctgcatgtgtcaacattgtgatgtcagtatttactaatctacattcagtggctgtacaaataacagctgtagtaagaagagattcaggatgctagaggtgaatatttgggtcatttacatgtacactacatagcaagttgatactcatgttgcatgttcttttaaattagtgattttgtgtcttaagtctttaacttccaatacttcatcatgtatgtaaccttccatgtttgcttctgataaatggaaatgtaggttcactgccacttcatgagatatctctgctcacgcttccaagttgttctcaatgacattagccaaagttgggtttgccattcatcccctaggcatggtaaatcttgtgttgttccctgctgtcctccgtattacgtgaccggcaaataaatctcatagcagttaatataaaacatctttggaggatgggagagaacaggagggaagatgggaaacaaaatagagaattcttaagattttgtttaaaccaaatgtttcatgtagaatgcaaaatgttggcacgtcaaaaatatgaatgtgtagacaactgtagttgtgctcagtttgtagtgatgggaagtgtattttactctgatcaaataaataatgcaaaaatactcaaaaaagaaaattacgaaga

SEQ ID NO: 5513 - DNA, 737 bp, Homo Sapiens
gcgatctggcagagatatagattggacaaggcaccttattgcatcagacagttgggcaggaagaatacaaggtgaaatttgacaacaaaggaaagagtctactgtcggggaaccatattgcctatgactaccaccctcctgctgacaagctgtatgtgggcagtcgggtggtcgccaaatacaaagatgggaatcaggtctggctctatgctggcattgtagctgagacaccaaacgtcaaaaacaagctcaggtttctcattttctttgatgatggctatgcttcctatgtcacacagtcggaactgtatcccatttgccggccactgaaaaagacttgggaggacatagaagacatctcctgccgtgacttcatagaggagtatgtcactgcctaccccaaccgccccatggtactgctcaagagtggccagcttatcaagactgagtgggaaggcacgtggtggaagtcccgagttgaggaggtggatggcagcctagtcaggatcctcttcctggtactgttcttctctacaattttggaggcagaggttggtggggggggaacttaagaagcagtaatgaggatggttttatagctattccatagccttcctctttcttatcctcgtatgtgttctcactgtttttggtcaaattttactttgccctttttgttgttcctctgcaggtcattgttgaaaataaattatctgaattataacttccccacactt

SEQ ID NO: 5514 - DNA, 1250 bp, Homo Sapiens
  misc_feature (224)..(232): n is a, c, g, or t
  misc_feature (510)..(510): n is a, c, g, or t
  misc_feature (723)..(723): n is a, c, g, or t
  misc_feature (1212)..(1212): n is a, c, g, or t
  misc_feature (1227)..(1227): n is a, c, g, or t
atcgagctcgctacccgtcagacgctgaactatgtgaactgcagattctttgcgctacatatatccaaaacttaagacagatgtgctggtgctgagctgtgatctgataacagacgttgccttacatgaggttgtggacctgtttagagcttatgatgcatcacttgctatgttgatgagaaaaggccaagatagcatagaacctgttcccggtcaaaaggggnnnnnnnnngcagtggagcagcgtgacttcattggagtggacagcacaggaaagaggctgctcttcatggctaatgaagcagacttggatgaagagctggtcattaagggatccatcctacagaagcatcctagaatacgtttccacacgggtcttgtggatgcccacctctactgtttgaaaaaatacatcgtggatttcctaatggaaaatgggtcaataacttctatccggagtgaactgattccatatttagtgagaaaacagttttcctcagcttcctcacnacagggacaagaagaaaaagaggaggatctaaagaaaaaggagctgaagtccttagatatctacagttttataaaagaagccaatacactgaacctggctccctatgatgcctgctggaatgcctgtcgaggagacaggtgggaaagacttgtccagatcacaggtgcgcctgctatgtccacatcatgaaaagaggggctctgctctcgagntgagcacactgggactctacatggaagcaaacagacaggtgcccaaattgctgtctgctctctgtccagaagaaccaccagtccattcgtcagcccagattgtcagcaaacacctggttggagttgacagcctcattgggccagagacacagattggagagaagtcatccattaagcgctcagtcattggctcatcctgtctcataaaagatagagtgactattaccaattgccttctcatgaactcagtcactgtggaggaaggaagcaatatccaaggcagtgtcatctgcaacaatgctgtgatcgagaagggtgcagacatcaaggactgcttgattggaagtggccagaggattgaagccaaagctaaacgagtgaatgaggtgatcgtggggaatgaccagctcatggagatctgagttctgagcaagtcagactccttcctttggaagcccttctttattgggaataaataccgggttaaanaggtgggccgccaanatttgtggcctcggtgccgaatt

SEQ ID NO: 5515 - DNA, 836 bp, Homo Sapiens
tggacggtctgaaagggagtgttcgggtttcgctggggcctcgcggctccagagcccagcatggcttcctcgcgagcctcttccacgcaggcaaccaaaactaaagcacccgacgacttagttgctccggtcgtgaagaaaccacacatctattatggaagtttggaagagaaggagagggagcgtctggccaaaggagagtctgggattttggggaaagacggacttaaagcagggatcgaagctggaaatattaatataacctctggagaagtgtttgaaattgaagagcatatcagcgagcgacaggcagaagtattggctgagtttgagagaaggaagcgagcccggcagatcaatgtttccacagatgactcagaggtcaaagcttgccttagagccttgggggaacccatcacactttttggagagggtcctgctgaaagaagagaaaggttaagaaatatcctctcagttgtcggtactgatgccttgaaaaagaccaaaaaggatgatgagaagtctaagaagtccaaagaagagtatcagcaaacctggtatcatgaaggaccaaatagcttgaaggtggcaaaactatggatttgctaataatccgttgcccagggcaatgaaacgcttgggaagaagcccgactcccataaaggagattccttgaaaacaaaccagggacctccccagaaggcaaagaggttggcccaaggtcttctcccgggccttttggaaccaaattttttggcgcgacccaaaatatgtggggggaaggaaactcgggcgccctaatcctcccccataagtggggggaacctctttcgaaa

SEQ ID NO: 5516 - DNA, 852 bp, Homo Sapiens
ctaccacccagacacccaaacagccgtggcccagaggtcctggccaaatatgggggcctgcctaggttggtggaacagtgctccttatgtaaactgagccctttgtttaaaaaacaattccaaatgtgaaactagaatgagagggaagagataacatggcatgcagcacacacggctgctccagttcatggcctcccaggggtgctggggatgcatccaaagtggttgtctgagacagagttggaaaccctcaccaactggcctcttcaccttccacattatcccgctgccaccggctgccctgtctcactgcagattcaggaccagcttgggctgcgtgcgttctgccttgccagtcagccgaggatgtagttgttgctgccgtcgtcccaccacctcagggaccagagggctaggttggcactgcggccctcaccaggtcctgggctcggacccaactcctggacctttccagcctgtatcaggctgtggccacacgagaggacagcgcgagctcaggagagatttcgtgacaatgtacgcctttccctcagaattcagggaagagactgtcgcctgccttcctccgttgttgcgtgagaacccgtgtgccccttcccaccatatccaccctcgctccatctttgaactcaaacacgaggaactaactgcaccctggtcctctccccagtccccagttcaccctccatccctcaccttcctccactctaagggatatcaacactgcccagcacaggggccctgaatttatgtggtttttatacattttttaataagatgcactttatgtcattttttaataaagtctgaagaattactgtttaaaaaaaa

SEQ ID NO: 5517 - DNA, 894 bp, Homo Sapiens
  misc_feature (877)..(877): n is a, c, g, or t
caatgatatactgggattatcggtgggagcctcctcaccaaaccttaattgtctcgtgtaacaaaacatgtagagctggttacatgcacttaggaggtgtgtattactcattattttcttttatcaattttatgtgagccggctaagaaagtctcgttagtttctactcattgtttacgttgaatttcaaatagttaagggaccaataaggaaacagctttggtgtgacctgaaaaacttcatgagcaagggtcacatggtggttaatgtcagtgctttcttcatttccaatcttcattatagagcgaagggtggaacaaagcggaaaaagatatcccatcaaaattatatagcccatcaaaagcaagttattcgccgaagtatgcgacatagaaaagttcgtggtgagaaagcacttctcgtttctgctaatcagacgttaaaagaattgaaaattcagatcatgcatgcattttcagtggctccttttgaccagaatttgtcaattgatggaaagattttaagtgatgactgtgccaccctaggcacccttggcgtcattcctgaatctgtcattttattgaaggctgatgaaccaattgcagattatgctgcaatggatgatgtcatgcaagtttgtatgccagaagaagggtttaaaggtactggtcttcttggacattaatctttgaatacttgctgactgctaagaaatgaccagaggggaagaggagtttgacatgttagggcattaaagcaaaggtggatttaagaattaaaccattacatgccccttccaaaaggcagaaatccattcaaacgtgactgtcccaaatgccttatgtcaaataaagcagattgcactgatggactagangtggccgggatcctcta

SEQ ID NO: 5518 - DNA, 755 bp, Homo Sapiens
  misc_feature (44)..(44): n is a, c, g, or t
gactgctgacagacatgttacatcactcgcgatgttgttgttcntctactggttcccgggccatatcaccagtcacaatatgatcagaagtcaccattaactctgtggcatgttgaggctggttcatttctacttcagttaaagccgaagtggaatgctgctcatcagagttggtatctttcaaaggatcactacacagtggctcaaggagatgtttattgttgaagtcacttgaggaaactggtatgacatgcctttccagaggattcgatgctatcttagcaccagaatcgttaggactgactggtggcgaattcccacccttggctgatgctttaataataatagtatttagcttctcatgccaaccatctacaaactcctgcacaccagctttggaagtcttagaatacatgaactcggaaagccgtttcatcttctcttgtgttgaaaagataggtgtggaaactctactgacatatgaaacattcttttgcttcaaaatctcttctatcttcctagaaaagagattgtactctcctaacactgtcctctctgtggtttcgctcactgcaggcggctctgcctctgctgctggcacacactgctcctccacctgacctgtcaacacgtcatcctcagtggtgccctttagtgtgtctgtaaatggagaggatggaaactggtaatcagaacttctctgtctatttattacccgggggtcgttaggaaaggcctcccatagatcgttacag

SEQ ID NO: 5519 - DNA, 509 bp, Homo Sapiens
ccatatctgtgacagagtgggaaatgcaaggatgagtcaaggttcattgaggacaaacttgtcaaatagagtcaggctctttaaaaaagacactatagaagcttcatagagatctcttcgccaatttacccattcatatcctctatctttcaccttcctgtaatctttaactgtgttcaaaactctatgaattattatcttcatggcattgttaacaattaatggggaatacagaataaaaaaacttttcagtttgggtaagtgacaaaataggatacagaactaaatatatgagaatatgtcagtgtgtctcaaactttaatgtgaatcatccaatgatcttgacaaaatgcaaattctgattcaacagatctggaatggggcctgagattctacttttctaaaaaccttcttggagatgcccacgctgccgtttcacagaacgcccatcttgagtagcatcagtatatgttagtttatatacagatcatattcagaaaatatacaga

SEQ ID NO: 5520 - DNA, 758 bp, Homo Sapiens
  misc_feature (581)..(581): n is a, c, g, or t
  misc_feature (600)..(600): n is a, c, g, or t
  misc_feature (614)..(614): n is a, c, g, or t
  misc_feature (643)..(643): n is a, c, g, or t
gtttgctcctaaagcatttactgtatactaggtaggcaataaaattccctctcagtatatctgcatgataaaatatgttcattcacttggcctgtttttgacatctacccctatatttaattgttaaagcctttttccttttaattgtgaattttaagtaaagtgtgtatcaggccaacttaattttatggttccctccccccttttaaatcagttcctgaatgttccaatgtttcgaaatgtctctctgaagtgcctcactgagattgctggtgtgagtgtaagccatatgaagaacaatttgtaacactacttactctgacaatgatgcaactaaagcagatgcttcctttaaatacccatattcgacttgcgtactcaaatggaaaagatgatgaacagaacttcattcaaaatctcagtttgtttctctgcacctttcttaaggaacatgatcaacttatagaaaaaagattaaatctcagggaaactcttatggaggcccttcattatatgttgttggtatctgaagtagaagaaactgaaatctttaaaatttgtcttgaatactggaatcattntggctgctgaactctatangagagagtccattnctctacatctgcctctgccgttgctttcntggaagtcaacattttgatgttcctcccaggagacagctatatttgcccatgttattcaaggtccgtttattaatggttagtcgaatggctaaaccagagaagtaaaagcgttga

SEQ ID NO: 5521 - DNA, 534 bp, Homo Sapiens
aagaaatgcaagtctaggcacacgattgccagacagcaacagagttcaagagtccaacttgacactcttctgaaccagatgtggtttcttgagaaagaacttggacagtaacattagtccaaaagggccaaggaagaaacaccaactgttaataaggaagaaaaccatcaagaactagaacagttaagacaattttttttctactctactttgaagctgaattatagcttgaatagtaaaagattacacagttgatctgtgggtaggacccctctcttccctgaccaacctccccaatccagatccggtaatgttggagtacagatagtgctggctcaatttctttgaagtagaatgaccatttcttcatgtgtggccatgcctccttttaataatgaggtataatctgatgctaacaatgcctgttccttcctgggttatggggctgatgaacggtgtaggcagaaaacaattcaactttctgataagaatcacacacacacaaaaattattggcactgaaaaacaaacactt

SEQ ID NO: 5522 - DNA, 861 bp, Homo Sapiens
tcccccgttatagcaccgtggtacagggcataagggaggaggaagtaagttaccaacttgcatttaacaaacaagaacttcgtaaagtcattaaggagtaccctggaaaggaagtaaaaaaaggtctagataacctctacaagaaagttgataaacatttatgtgaagaagagaacttacttcaggtggtgtggcactccatgcaagatgaatttatacgccagtataagcactttgaaggtttgatagctcgctgttatcctggatctggtgttacaatggaattcactattcaggacattctggattattgttccagcattgcacagtcccactaaaccttgtgaaagaagaaaagataactgaatgaagcatttgagtataacagacactataccaaaataccaagcaaactgttttgagaacccagacttaaaattttatgtattattaaatgttagataaatgggtagtaccatactacaaatatttaaatgcaaaattaccaacctatatagcagttttatttgccctataggttgcatactaacttaagcattcatgtcaccataaaatgcctttagcatttctcaatgactggatgggaaattttcctttattgcctagctgcttgtgtttgagtggttgtcctatgagcaatgcatttggagttcttcagctttcactacttctctgttgcttgctaatcatgtaactactaaaatactgtacaaaattgttttttcacactaacaaatgtgtatatggagaagagggctcatgtgatgatcatttgtgaacttagatttttgaggattatgtgactagtaataaatgtgaaataaattttcaaaaaagttg

SEQ ID NO: 5523 - DNA, 386 bp, Homo Sapiens
gatagtctgtccgccgaatacagagcagactccgtctcaaaaataataatataataactagcactaacatgatgctacaatttttactggttaccaagttaaaatttctgagaaaggcttttaataaagttttccagacaagttataggtgaggtaacaaagagtccagaagtcccctgggtcagtttgatacctcgtgcctctggacttcaatttgcttatctgcaaaacaggaaatttgatcccttccaagtgtcaccagagtttttaaagataaaaatggaattcagatgcgaacttaatacagtgagcactagagggcagtagctggttaataagtacagcaattaagacaaatgcaggaaatgacagaaaaggcttttctt

SEQ ID NO: 5524 - DNA, 560 bp, Homo Sapiens
tattgtgagaaggttggagaacagcccacattgcagctaaaagagcagaagatcatggatctgtatggccaacccgagcccgtgaaacccttccttttctaccgtgccaagactggtaggacctccacccttgagtctgtggccttcccggactggttcattgcctcctccaagagagaccagcccatcattctgacttcagaacttgggaagtcatacaacactgcctttgaattaaatataaatgactgaactcagcctagaggtggcagcttggtctttgtcttaaagtttctggttcccaatgtgttttcgtctacattttcttagtgtcattttcacgctggtgctgagacaggagcaaggctgctgttatcatctcattttataatgaagaagaagcaattacttcatagcaactgaagaacaggatgtggcctcagaagcaggagagctgggtggtataaggctgtcctctcaagctggtgctgtgtaggccacaaggcatctgcatgagtgactttaagactcaaagaccaaacacatttcaactcaggggt

SEQ ID NO: 5525 - DNA, 843 bp, Homo Sapiens
  misc_feature (317)..(329): n is a, c, g, or t
ggccatcattctgtgtagaagcttaaatatgtaatgtaaccaaactccagtattaaaaatctctcatgttgttttctttatacaaagcaagataacggcatataacactgccattacatggcaaaatgtttgctaccttagtttaaaaaacaatctcaaacaaaagacttgcttcaaggtgtttttaaatagcagtgattcagaattttttttaatgaaagtataattgcactaaccttcttcctgctgctctgattctgcatttgtggtacttgtgactacgttttttcaaatatagatagatttaagctgctaannnnnnnnnnnnnagtaatcactactatatcatgtcttttactctgtttataatatcaagtattttcttaaagatatagatattaaaccttgtgctcatgcaacttagagtaacatatacagacaaatgattgcatgaggccatgtttatatgtgtgactaataaggcttgtcatgattaacataatccaggtatgtcatttctgaagagaatagtcatcaaatttatatctcgaagattttaattaaggaattgcttattgttgagcttagcaaattaataacactatttctgtcactaattattttgaagccttttagtactaaaattttaacctgtgttctaagtagaaactgatttaacccaagtaatgcagctttgaatggatttcaccattcgttggctttggctattttttacaaaccagcattggattggaagcaagatctttggtttttacctaaggaaagggtaagcattttggctattgggtaaaagagaaaaaataacccttaaattccccaata

SEQ ID NO: 5526 - DNA, 975 bp, Homo Sapiens
  misc_feature (677)..(677): n is a, c, g, or t
  misc_feature (842)..(842): n is a, c, g, or t
aattatccagtctagtttggatctgtaccagcactcattcggctacaaaagttcttattattgatgctgttcaacctggcaacatcctagacagtttcactgtttgcaactctcatgttctgtgcattgcaagtgtgccaggtgcacgagaaacagactaccctgcaggagaagatctttcagaatctggtcaggtagacaaagcatctttatgtggaagtatgacaagcaacagctcagcagagacagacagcctgttaggaaggcatcacagtggttggttgttctgcagaaggtgtgacgggagctgccacttcccctagtacaaatggtgcttctccagtgatggataaaccaccagaaatggaagcagaaaatagtgaggttgatgaaaatgttccaacagcagaagaaagcaactgaagctacagaagggaatgcggggtcagctgaagacacagttggacatctcccaaactggcgtctacacagagcatgtctttacagatcctttgggagttcagatcccagaagacctctccccagtgtatcagtcgagcaatgactcagatgcatataaagatcaaatatcagtactgccaaatgaacaagacttggtgagagaagaagcccagaaaatgagtagtcttttaccaactatgtggcttggagctcanaatggctgtttgtatgtccattcatctgtagcccagtggaggaaatgtctccattccattaaacttaaagattcgattctcagtattgtacacgtgaagggaatcgtgttagtagccctggctgacggcacccttgcaatctttcccaaaggagtggatgggcantggggatttgtcaaactatcacctcttaagaccttggacggcctcatcattccatccgttgcatgactggggtactgaacaaagcctggtgggggctataggaaacaaaatctatgtgggggcaacccaaggg

SEQ ID NO: 5527 - DNA, 526 bp, Homo Sapiens
ggatctgaggtgagttgggggtatctatattaggggtagggtattacagaagataattggcttgatgtcctagaagttctttgatccagaggtgggtgcagctgaaagtaaacagaatggattgccagttacatgtatgcctgcccagttccctttttatttgcagaagctgtgagttttgttcacaattaggttcctaggagcaaaacctcaaggattgatttattgttttcaactccaaggcacactgttaataaacgagcagggtgttttctctcttcctttctaatatatggagtttcgaagaataaaatatgagagcaatatttaaattctcaggaattgacttatactcttgagaatgaattcagtttcaatcaagtttacattatgttgcttaaaaaaatagaaattattctttatcttgcaaagaattgaaaccccatgaaatgacttatgggggatggtgagctgtgactgctttgctgaccattttggatgtcattgtaaataaaggtttctattt

SEQ ID NO: 5528 - DNA, 1569 bp, Homo Sapiens
cggctaggtgcgaggctgggtggttgaatcggcacgagggtgcgcagtgcgcggtgctggccgtcgcggacgccgctccgggcagccgagcctctgtgggagccggggccgcggcggcgcgggtgctccgggccgaggccgcgtgtaatgttcaagctcagaaatgccttatgtggatcgtcagaatcgcatttgtggttttctagacattgaagaaaatgaaaacagtgggaaatttcttcgaaggtacttcatactggataccagagaagatagtttcgtgtggtacatggataatccacagaacctaccttctggatcatcacgtgttggagccattaagcttacctacatttcaaaggttagcgatgctactaagctaaggccaaaggcggagttctgttatgttatgaatgcaggaatgaggaagtacttcctacaagccaatgatcagcaggacctagtggaatgggtaaatgtgttaaacaaagctataaaaattacagtaccaaagcagtcagactcacagcctaattctgataacctaagtcgccatggtgaatgtgggaaaaagcaagtgtcttacagaactgatattgttggtggcgtacccatcattactcccactcagaaagaagaagtaaatgaatgtggtgaaagtattgacagaaataatctgaaacggtcacaaagccatcttccttactttactcctaaaccacctcaagatagtgcggttatcaaagctggatattgtgtaaaacaaggagcagtgatgaaaaactggaagagaagatattttcaattggatgaaaacacaataggctacttcaaatctgaactggaaaaggaacctcttcgcgtaataccacttaaagaggttcataaagtccaggaatgtaagcaaagcgacataatgatgagggacaacctctttgaaattgtaacaacgtctcgaactttctatgtgcaggctgatagccctgaagagatgcacagttggattaaagcagtctctggcgccattgtagcacagcggggtcccggcagatctgcgtcttctgagcatccccccggtccttcagaatccaaacacgctttccgtcctaccaacgcagccgccgccacctcacatttcacagcctctcgcagcaactcttttggtctcaacctttaccatggagaagcgaggattttacgagtctcttgccaaggtcaaagccagggaacttcaagggccagactgtcttctcaaagagaaccagctttccaaagtgactgaacaagctctggtaagacctcaaagtaaaaatggcccccaagaaaaaagattgggacctaataaaacttggacgatgcgagcccttccggtcagtgacgtgtgaggcagaagcgcacggagcctgcctgcctctgccgtcctcagtttcctttcatgaggcttctagccaaagatgataaagggggaaatggtttttagtgcgtatattatactgcctcttaggtgtactctttataagctggtaaaccaacaatctagggagtggcccaactaaatataatttcttt

SEQ ID NO: 5529 - DNA, 825 bp, Homo Sapiens
cggccccacctcacccagtgcccggcgtccccccgccctgggaggtgcgccccggctgcgacggccaaagctgaacggcgccaccaggagcggccgcgcgtgcagagtccggagccaccggcacccgagcgtgccctgtcccctgccgagcctccgggccctggaggcacgagaagcgctgcgcctgatggagggcagccaggacgaagtcattggaacaggaccagctctccgagcacagatggtcctcagcaggtcccaggaaggccggggcacgcgggggcccctggagcgactggccgaggccccttcccctgcgcccaccccgtcgcccacccctgtggaagacctcggcccccagaccagcacctccccgggacgcctgtcaccggactttgctgaggagttgaggtccctggaaccatctcccagccctggcccgcaggaggaggatggagaagtggctctggtgcttctgggcaggccctcacccggcgctgtgggccctgaagatgtggcactgtgcagcagccgccgccccgtaaggcctgggcgccgtggcctgggccctgtgccctcctagaggagcaggcacctcccccagacttggggtgggggccctgccagctccagcaccacccttgccccaagtcttttaacctgggtgttagcattttaaagagaccccacaggagttctggcctgtgactaactaactgccccaccccagccgagacctcggcgagactgtaactagtgatgtttgtacaaccaaagactctattttgtggtttaaggagaataaagttgactacattttaaaaa

SEQ ID NO: 5530 - DNA, 822 bp, Homo Sapiens
cgggagtcggtgtccgggaaaggcgagggcctcccacgtagaagttcatgtgtgctttcccccgggggacctccaggtagtgagagggccacttgggaccccaagactacgctgcactgggaggacagtttgccccgtgtggcctgaaacacccttcacttttgtccatctcagacctggccacgtggagcaccagtgtatggtttgtgaagaagtccttgggggtcttcgtgctcagggtcatcagcgacatgtcctgcaggtcttcgctgtcaagcacttcatcatcctcgcagtccatggcagaagattcgagattgtctctgtcacagttcaccagcaggatggcaccctgtccacaagggccccaggtccaggtcctctgatctttcacagctctggttggcttcactttgccggtgcgggtgatgtctgcgcacagggagatttccaccgcggtgaggtagagtagagctttgactggtggagtcttgggtccgtagtatgaaatctgaaccttctggtcgcctgtgctaccactggccgctttcatcgtcagggtcacctctaccccagggtccaggggccatgtggaggaacctgtggatttcttcttggctggagggctgtgggcaatatccacgaccacccctggggaggcgttgatgctgaaggacgtgcagtcctcaggggcagagctgcagatgtcaagctgagtcaaggtgcccagcacacacacggcatgggtgggctgctctggggtcacacggatcaatgtcccctgggccatcgtcgggctagctcgtccctctggctgtaccc

SEQ ID NO: 5531 - DNA, 616 bp, Homo Sapiens
aatgatagttttcataatggtaaaatggagagatactggtcaagtttctcagggaagtattcatctcacaaagcggacttgtccacttttagctggggcaatcttcgcatttcatacctgcacttgctcttaccacaagaagtcccctccccccaggtgattttcctccaagacacgaggacagaagcattgccagtggcttgaagtgacagcagtgggcaggaggtaccagagctgcacaaggagcagtgtctgcttctcactatctttgaaaggatacctcgagacctcgatgaaaaaacagatcctaaaataagccacattttgtcttttatgcctcaagacacttaacattaagttatataatcttatgccagagatgaaagaaactagatcacgtgtttagaatagcagtacacatctcaagtagctttcaagcaggataaataagtcaaaatactggccaccctgagagaaataaagaatagacaaagcactaagtttaaagatttttctccttgtgctattccatctaaaacaaaagctcagtacatgcaaggaactctgtggaatatatagcagcatgtgaagaccgatgaaaactcagacactgtcc

SEQ ID NO: 5532 - DNA, 717 bp, Homo Sapiens
cagctggtgggccttgaggtggtgttaaagtaactggattcgtaacaaaaatagaacggggatcctggttaatagttgcatttggtaccatggagtaaaaagaacctctgggctgcattcgatgagaaactcgaggtgctggtacagctaactgaggtaaattactggtgtcctgattatcagcagcaaccattctgggtgatgtcaaagtcaatggagcaggttctgagttagatgcaaaaggcattgacataggacttaaatcagacacactggatggctgtgcctcctcttgtgtgttactggaactaggagtgggactactggatgggtgagtttctggagctcccggggtgttgctggcagaactactgcaactgtttgcagtcgaagatcggctacataggtttgccatgggctggtcctgtgtggacactttctctttggtgggtggcaccgcagagaaagactccatcttttgtgaagaaagctgtgcttgagaagtacttgccggtagaaatgtggtgggagcttgcccgctagtgataggtgccgaggagacagaaggccgggaactaccagtgcttgtcacagaagaaatcactgttgctggaggacttgtcttaggcacaccggccaaccactgctttctgactgatgaaggagtccgggtattagtgacacaccgttgctgactggccgcactaccgaagagac

SEQ ID NO: 5533 - DNA, 701 bp, Homo Sapiens
ttctggaagatcagttgaaaaatcttaagattaggaccaacagaatacaaagattcattcagaatacatgtaatggaagtggaacacaaggtaaagttttgcagacaattccatgaaaaaacatcagcgcttcaggaggaggctgacagtatacagcgcaatgaactattacttaatcaagaagtaaataaaggtgttaaagaggagatctataatcttaaagacagactcaccgctattaagtgttgcatcttacaggtattgaaacttaaaaaagtgtttgactatattggactaaactgggattttttcacaacttgaccaattacaaacccaagtatttgaaaaataaagtggaacccactcaataaggtgagactctgtaagcagagatgaagcttgatgttcttaatgaatagtgtcagtgtagaaagaacatgagtggtaataaaaaattacagcttacaaaagggcctagaaaaatgaggcaggccagacgagtggaaatagaacacaacagtttaaagtgctttgagaccctcagttaaacagtacacgtgaatacaaaataatgttaaggccattcatggagaagatatacttaagcaagacatacctggcttgcttatagagaagaggtaagagatggattttcaattcggcatgcagcagtagggttaaggctcccgggagtcctcagg

SEQ ID NO: 5534 - DNA, 517 bp, Homo Sapiens
gctcatgaagtttgaggaatttgtgtacagctggcgcaaataactaaacaccatcaacaagaatgaaaactagcacctcgaatctttccaaaggtgaagaaacacatttcctttccagcttaaacatggcaaatacttaagcaatgcttagtgttggtgtgaggctggctaggacggaagaaataatactgaacctggccaggagagaaggagcagtaatctgctctaaaataaaagcacaaagcactctaagctcaatatattctttcttaatcatttagctaacactcaatcttgattttggtgccaattccccttcagctcatttcaagacacattagcaatgacaagtatgtaacttagaactcttagaatttctcaagagaatggatgtagaggaaaaaaaaccaacccagaatttaaacacttaacccagtaacttgcatgcatacattatgtttaataatatttttagtgacaactgcagagcaaacatacaagcttttcttccctccga

SEQ ID NO: 5535 - DNA, 1123 bp, Homo Sapiens
tgtgacgcggccggcgtccaatgatggcgtgcggcggcggctcccggaaggccgcggcggcgtccggctgctaaggcgggccccactgcggctggcatgcggacaggccggacctacggccggaggacgggcggcagccgcctctgctgcggaccggggtctgggccgtgcggcgtgcagcggcgccaggggatgctcttgctgggcctggctctcccttctcaacttagggcggcggcgggcccgcgcccctggctcccgggccatggcgctgagggagctcaaagtgtgtctgctcgggaatacaggtgtaggtaaatcgagtattgtgtggcggtttgtggaagacagttttgatccaaacatcaacccaacaataggggcattcttttatgaccaagactgtccagtaccaaaatgagctacataaattcctaatctgggatacagctggacaagaacgatttcgtgccttagcaccaatgtactatcgagggtcggctgcagctataatcgtttatgatatcacaaaagaagagacattttcaacattaaagaattgggtgaaagagcttcgacaggcatggcccacctaatattgtaggttgccattgcaggaacattaaatgtgatcttatcgatgtaagagaagtcatggcagaggagatgcaaaggactacgccgactcaattcatgcaatttttgtagagaaccagcgcaaaaaaacggcgattaaaccatacagttgacgtctttatacgaacattaagtcgaacgaattccatccattgacgccaacttgcatcttggcgggaagggcttcaactccgaagacaggcttcagaagcaaagcggagcttgttggtgaccggaaccttaagacctcttcaagactgtgattgaatcaacagaactgcggggtcctgagaaattttacacagaagcgctggtggggtccctgcgccaccgagatttcaacctaacccgcgcttggaagacttctaccggtcacaagggattccacgagattgtgccagtgtctgtttctcaaacacagtagtaacgtatattattacgggtgtgataaacactctatattccgaacaaaccttctagtgctgac

SEQ ID NO: 5536 - DNA, 621 bp, Homo Sapiens
cggccgtcgtgaagctgaggtcaaaggggttcattcagatcaattagggggcttaggattttagtttacaacttacttcaccatctctagggtgtgtctttatttatgtggtccagaatgtctacatgtggccaactaaaaatagatgactataagaaagggaaagttgctttaaggacgaccccagtatctggcacactctggcaactgaagtccagagctgaagcataaaaccaaaggaaacaaaaagcagtctcagagcatatgagaaatcaaagagtttcttatatactgcagatagcaattttaaaaatcagtatttttaagctcagagcattggatgccaacaacccatagttcctgcacaaagacatggaaaaatccagccacaggatctgtcttgagcaataaggcatacatcatatataactgcagtgatactgatggaggctgatttttttcaaacaaactgggcagtgttagtatgtgtaaaggaagtgcagaagcactgactacagatgtggccacattctatagagtagatgtgttgtatactaagttcaatctctgagcatccatccatgcaaacttgacactgaatataaccaggtagtatatgac

SEQ ID NO: 5537 - DNA, 1240 bp, Homo Sapiens
cagactcggactataaagcttgtgatgatgtcaagtcccagtgcactaccttggatgtggaagagtcatcttgggatgactgcgagcccagcagcttagatactaaagtaaacccaggaggtggaatcactgctacaaaacctgttacctcaggggagcagaagcctattcctgcttagctttcactcactgaagagtctatgccttggaaatcaagcttaccccgaaagattagccttgtacaaaggggggatgacgcagaccaaatcgagccgccaaaagtgtcatcacaagaaaggccccttaaggttccatcagaacttggtttaggagaggaattcaccattcaagtaaaaaagaagccagtaaaagatcctgagatggattggtttgctgatatgatcccagaaattaagccttctgctgcttttcttatattacctgaactgaggacagaaatggtcccaaaaaaggatgatgtctccccagtgatgcagttttcctcaaaatttgctgcagcagaaattactgagggagaggctgaaggctgggaagaagaaggggagctgaactgggaagataataactggtgacaatagatgtgagttaaactttaggaaaaaggattcccttttttaaaaaaaatcaatacctcaaaagcaggctttgggacaagaaaaccccaaagtggcctgcttttcccatcccaggagctcattatccagtctgtgccaactgaagtaggagactgactgtgagtgctggctaaaagccctgggtggtgaggctcacagtactgtttccaggaggaagagcctttgtgcatttgactgaggccagtttctatgaagagcaagtagctgaggagaggtcgaatttactgctttttccaggacaattctggaagtaaagaaaatgtaattcaagctgggtagcttaattttgtgccattcttttctttaacataagagtaagctctattatgaaatacaactttaaaaaattttagctataaattatataaatgattttaaattgctgaggtttccttaggcagcttatttatttgtttacagttagactatctgagtaaatggttctttgtggacctaggcagttcctgactgttccacatgtagtacattgtaccaaagttcttaataagaatattccccacaatcctgttctctaaatgtcacataaagattattttcactagattcaactttaaaaaacacac

SEQ ID NO: 5538 - DNA, 734 bp, Homo Sapiens
aaggtacactaacaaaaagaaaaatggtgactgatacccagtgctggcagtctcgtttaaactatgtgcaggaacagcaaaggaaatccagcaaatctggcacagtcattatcaaccctggccatgcagcaaaatcaccagacgaaaattttcaaaaataacacgtggccaggccccagaccaaactactgaataacaatctccaggctttcacctgctagactggcaaaaatccaaaagtaaccactctggagaaacaggcattcctagacagtactggtgggatacagaatggtacaattctcatgaaatttcacagtagttaacaaattaaacatagttatactttttaacccaggaatcccatatttaggagtccagtgagaagatacagcccacaaataccaaacagcatgtgcccccggacctttccctgtaatcatgagcctgcctatccagagggtactggttggataagctccctacatctgtccaacagagaaccacgcagcccactagaggagcgagggtcagacaactgactaagatgccttctgtgtaaataaaacagggaagggaaaaatgaagacacgtttttgcttatttaggggaaaaaaagactgaaaggataagctagtaaaatggattccctaaggggttggaatggcctggaaagggatgatgagtgacgctttcctgaataatctttttagattgcttgacctcagccttca

SEQ ID NO: 5539 - DNA, 893 bp, Homo Sapiens
gtaagcttctgtgtgatgacgcacgtccgagactgttccatctcattcctcgcaaatatgagctcttctgatcaattctaaatatttgattgattttaattctgaaagaaaatttgtgaggatttaagcttaggggattttatttttataaataccagattatggttagacttaataaatcactgttaaatttaaagatgacagttaccttggaaagttcactaatacttcgctccaaggcgtctgtaaaagaagatatctttattggagcaatgttcatgtgactgggaatgacagaagaatgggagatgagtagggacccctcaagcacagctgtcactcagaaattttaaatttgaaaaagaaatcgattttcatctgtatgccgtcaaggaaggaattcagttacagggcatctgtaacttaaatattgtaagaataactcatatggaagttcaagctatttttatactataatagagttatttaattttaatttgttgaattattagttaccactgtcatttcttcagctatggatatgtggctgatgttggggagacggacctcagtgtgttttatattgtctggtgttaagatgataaattactttgtgattacaagcaaattttctatttgacaaagcccttggtggagtccaaatgatttttctgtaccatattgttctcttacacatacgtatgttaggaatataggcacactttcaaagagaatgttctcttacacatacgtatgttaggaaaatagacacattttcaaagggaatgttctcttacatatgttaggaaaataggcacactttcaaagagaggtatagggctttttacctgccttcgaaatcacttttaataaaagttgtaatgataaatcat

SEQ ID NO: 5540 - DNA, 614 bp, Homo Sapiens
  misc_feature (367)..(407): n is a, c, g, or t
cgactctagagatcccctgaggctgaaggtccaattataaaataaaatcgacaaataagaacctctgtcccctagttttactcaagccttaccgctattccacccatttcaggcttccagggagtaagacaccaaccttaaaatactgcttttagtgcctctggggatggaggaagccaggcagaactggtgggatcctcactctactaataatgctccaaacagagggtctttcctcctgtccttagggcatgaggtttagtgtctacacggcccagagcctggagatggatagtaacaagtagacttggagggacacaaggcaatcagtgatgaaaaaaaagagacggagaattgaggaagacannnnnnnnnnnnnnnnnnnnnnnnnnnnnnnnnnnnnnnnntaacactttaccatgattagggagacctcacctccatcactaatccctgggaagagtatgaaaatggggagaagaaagggtaagaaatcaacctcagcggttgaacaagggtcaccgagctatactagtcaagaagcagcttctatgtaactgacctgaggggataaatacgggaagattccaccatctccccttgaccttcagctt

SEQ ID NO: 5541 - DNA, 399 bp, Homo Sapiens
ttactcagtgaccatcactacgaatgtcttacattgaagcacagactgcagagcacttgttaacttagtcctcctgcataatgcactcgtgaaaagtagtgcttgctaggtgtttgaagattttatgatccgtgtgcttgggctcgttgagttatttgtaaaataaacatttagtttgagttgatgcagtaagttttttggactagtagtatccaggtccctactctactgaaaatataatcttcactatctccccttaagtcagaggagatgtagcatttagaacaccttgagacatgacattgtaaaatagcttgttgtatgttcctgaagctatcttgggctctgttaaagctactaattgtctcagtgtaagttttaaataaacatagttcggga

SEQ ID NO: 5542 - DNA, 480 bp, Homo Sapiens
  misc_feature (73)..(86): n is a, c, g, or t
  misc_feature (96)..(99): n is a, c, g, or t
  misc_feature (101)..(243): n is a, c, g, or t
ggaaccccatttggccccttttccttttccttcggggcccgcgcgccccaaaaatgtttttgaaaattttttnnnnnnnnnnnnnncgcaccaaannnntnnnnnnnnnnnnnnnnnnnnnnnnnnnnnnnnnnnnnnnnnnnnnnnnnnnnnnnnnnnnnnnnnnnnnnnnnnnnnnnnnnnnnnnnnnnnnnnnnnnnnnnnnnnnnnnnnnnnnnnnnnnnnnnnnnnnnnnnnnnnnnnaagattttcaaattatttttattagggaatgttataatttcatagcagctgttaggatacacaaacatatatatacaattttctaaacaagtaaataaaagcagtttagtatatctgcctgaattcatattattcaaaatcttaccaaaatatttattataaaaatcagtaaaattgtttaacacatttataaaagttgctgggtatgtatacataaacattttaagcttgctttac

SEQ ID NO: 5543 - DNA, 1120 bp, Homo Sapiens
acggctagtcgaggcgggtgttaatcggcacgagggccatggcagattcctccgggcagcagggcaaaggccggcgtgtgcagccccagtggtcccctcctgctgggacccagccatgcagactccacctttacaacagcctcaccaggaacaaggaagtgttcatacctcaagatgggaaaaaggtgacgtggtattgctgtgggccaaccgtctatgacgcatctcacatggggcacgccaggtcctacatctcttttgatatcttgagaagagtgttgaaggattacttcaaatttgatgtcttttattgcatgaacattacggatattgatgacaagatcatcaagagggcccggcagaaccacctgttcgagcagtatcgggagaagaggcctgaagcggcacagctcttggaggatgttcaggccgccctgaagccattttcagtaaaattaaatgagaccacggatcccgataaaaagcagatgctcgaacggattcagcacgcagtgcagcttgccacagagccacttgagaaagctgtgcagtccagactcacgggagaggaagtcaacagctgtgtggaggtgttgctggaagaagccaaggatttgctctctgactggctggattctacacttggctgtgatgtcactgacaattccatcttctcaaagctgcccaagttctgggagggggacttccacagagacatggaagctctgaatggtctccctccagatgtcttaacccgggttagtgagtatgtgccagaaattgtgaactttgtccagaagattggtggacaacggttacggctatgtcctccaatggggcctgcctacttttgataccaccggaggtttggctcctagcggagaagcccttcctatggggaaacctggtgccctggagggccggtttggaaaatacaaaaagccccctttccaaaaaggggggaaagggggaccttgtgagcattcttcttggaaaaacccgcccttgaatgagaaaaaaccgcttttcccccccaacggaaatttttgccctttatggggaaaagggccccttctaaaaccccccgggaaaaaacaccggtccctggtggccccggggt

SEQ ID NO: 5544 - DNA, 536 bp, Homo Sapiens
cagcaagtaagaattttcgtgggttcctgtggcccttcaggttatataaagcaattggtaagagcatatgaacacggggccagctagcaggattttcacatcaaatgagaagtctgattttgaataatatcatcaataagaaggagtttgggattttggcaaagaccaaatactttcaaatgttgaagatgcatgcaatgaataccaacaatatcactgagctagtgaactatttggcaaatgacttaagtttagatgaagcttcagtcttgataactgaatattcaaagcactgcgggaaacctgtgcctccagacactgctccctgtgaaattctgaagatgtttcttagtggattatcgtaaatcactgaacctttttttcaagaaggacaagaattttggagtctgctattaatggaccatatttattacagtttttaaattgtacaatctctgtattatagctatttgtctaacattaccccacatgtaataaataaaacaatatgagcataattgccccataaagaactc

SEQ ID NO: 5545 - DNA, 933 bp, Homo Sapiens
tcacctctttgttagctatggatgcatggtgcttccttgctcgatatgggactgctgaactgtgtgcacaccatgtcaccatagtggctcatctgataaagtcatgccctggagaatgttatcaactcatcaacctatcaatactgttgaagcgtctctttttcttcatggcaccaccccatcagctggagtttatccagaaattttccccaaaagaagcagaaaatctgcctctgtggcaacatatttccttccaggcgttacctcctgagcttagggaacaaactgtccatgaggtcaccacagtaggcactgcagaatgcaggaaatggctgagcaggagtcgtactttgggagaactagaatctctgaacacagtactgtctgctttgcttgcagtatgtaattctgctggtgaagctttggatacaggaaaacaaactgcaattatcgaagttgtgagtcagctttgggcttttttaaacattaaacaggtagcagatcaaccttatgttcaacagacattcagccttttacttccactgttgggatttttcattcaaactctagatcctaaactgatacttcaggcagtaactttgcagacctcgctacttaaattagagcttcctgactatgttcgtttggcaatgttggattttgtatcttctttaggaaaactttttatacctgaagctatccaggacagaattctgcccaacctgtcctgtatggttgccttactgctagctgacaggagattggctgctaaaaacacataccttggaggcgtttactccgcttcgcttgagggaaccaatcatgaagaaatagttccccaggggtctccagtttcggaacaaacttagaaccaaggtggttatccttttccgggaaaaaaacggggcttctggtaaaggaaaactgaaaccg

SEQ ID NO: 5546 - DNA, 645 bp, Homo Sapiens
tataagcagaaaaaaactttatttctatcaaattgaaaagtatgaaccttcaagcaagataatcaacataatcaataatacaattaacagttaggatagcatatacagatcagactggaggtttagatacttggaagcacatacaccaaaattaagagggccagcaactgtcccaccgaggaaaagcactctgactcatcataaacacacgacttctgggaaacttgagctgacatttcacaggacagtaaaccaaagagacaggttgtcattgggttatagaactgatctgagcttgagagggatcacagtgaaatgccattgtaactcaacaatttccccagagatctgttcatctcaaaaacaggaatatataaaaatcagtagtacaaattctcataaaactagaaaagccctttaagccctaatatccttggagcttacataaagactgagttttcatttttcttccctttagtcttccctaaattaaatacaaaatagtttgttatttaggacatttctgactatatagccaaagctttaaaatgaagacaagaataatttttataaaatgaattagacacatatcaaccctagggggaatcttcaaggtggtctgctcctttgaaaagctttaaaccc

SEQ ID NO: 5547 - DNA, 1753 bp, Homo Sapiens
  misc_feature (92)..(92): n is a, c, g, or t
  misc_feature (127)..(127): n is a, c, g, or t
  misc_feature (1300)..(1312): n is a, c, g, or t
  misc_feature (1387)..(1578): n is a, c, g, or t
  misc_feature (1581)..(1581): n is a, c, g, or t
  misc_feature (1588)..(1588): n is a, c, g, or t
  misc_feature (1638)..(1638): n is a, c, g, or t
  misc_feature (1696)..(1696): n is a, c, g, or t
gaccggtggcggcatccaagcgccccagcagacccccatcatgggcagccagagctccaaggctccccggggcgacgtgaccgccgaggagnagcaggcgcttcccccgcgaaggccaacggcaggnagaatggcacgtgaaaagcaagtggagacttatcccccaagggtgaaggggagtcgccccctgtgaacggaacagatgaggcagccggggccactggcgactgccatcgagccagcaccccctagccagggtgctgaggccaagggggaggtcccccccaaggagacccccaagaagaagaagaaattctctttcaagaagcctttcaaattgagcggcctgtccttcaagagaaatcggaaggagggtgggggtgattcttctgcctcctcacccacagaggaagagcaggagcagggggagatcggtgcctgcagcgacgagggcactgctcaggaagggaaggccgcagccacccctgagagccaggaaccccaggccaagggggcagaggctagtgcagcctcagaagaagaggcagggccccaggctacagagccatccactccctcggggccggagagtggccctacaccagccagcgctgagcagaatgagtagctaggtaggggcaggtgggtgatctctaagctgcaaaaactgtgctgtccttgtgaggtcactgcctggacctggtgccctggctgccttcctgtgcccagaaaggaaggggctattgcctcctcccagccacgttccctttcctcctctccctcctgtggattctcccatcagccatctggttctcctcttaaggccagttgaagatggtcccttacagcttcccaagttaggttagtgatgtgaaatgctcctgtccctggccctacctccttccctgtccccacccctgcataaggcagttgttggttttcttccccaattcttttccaagtaggttttgtttaccctactccccaaatccctgagccagaagtggggtgcttatactcccaaaccttgagtgtccagccttcccctgttgtttttagtctcttgtgctgtgcctagtggcacctgggctggggaggacactgccccgtctaggtttttataaatgtcttactcaagttcaaacctccagcctgtgaatcaactgtgtctcttttttgacttggtaagcaagtattaggctttggggtggggggaggtctgtaatgtgaaacaacttcttgtctttttttctcccactgttgtaaataacttttaatggccaaaccccagatttgtacnnnnnnnnnnnnnctaactgctaaaaccattctcttccacctggttttactgtaacatttggaaaaggaataaatgtcgtccctttannnnnnnnnnnnnnnnnnnnnnnnnnnnnnnnnnnnnnnnnnnnnnnnnnnnnnnnnnnnnnnnnnnnnnnnnnnnnnnnnnnnnnnnnnnnnnnnnnnnnnnnnnnnnnnnnnnnnnnnnnnnnnnnnnnnnnnnnnnnnnnnnnnnnnnnnnnnnnnnnnnnnnnnnnnnnnnnnnnnnnnnnnnnnnnnttntgcggtnctctccatttattaaaaacaaaaatgcgtaaacggcgcgtccccaaccanacccggagagaaaaaataaagagggaaaccccaaacaaaataaataggctcccccggnccccggagtctttctaaaaacaaacccaccgcgggcacccaaagaccactttgtgtg

SEQ ID NO: 5548 - DNA, 1998 bp, Homo Sapiens
  misc_feature (1784)..(1799): n is a, c, g, or t
  misc_feature (1827)..(1835): n is a, c, g, or t
aggctggattcctagggccgcggcgcttcccggcatgctccgctgcaggcccgcgcccgcgcccggactttgccatcggcggggcagtcgcgggatgcgcccgggagccacagcctgaggccctcaggtctctgcaggtgtcgtggaggaacctagcacctgccatcctcttccccaatttgccacttccagcagctttagcccatgaggaggatgtgaccgggactgagtcaggagccctctggaagcatggagactgtggtgattgttgccataggtgtgctggccaccatctttctggcttcgtttgcagccttggtgctggtttgcaggcagcgctactgccggccgcgagacctgctgcagcgctatgattctaagcccattgtggacctcattggtgccatggagacccagtctgagccctctgagttagaactggacgatgtcgttatcaccaacccccacattgaggccattctggagaatgaagactggatcgaagatgcctcgggtctcatgtcccactgcattgccatcttgaagatttgtcacactctgacagagaagcttgttgccatgacaatgggctctggggccaagatgaagacttcagccagtgtcagcgacatcattgtggtggccaagcggatcagccccagggtggatgatgttgtgaagtcgatgtaccctccgttggaccccaaactcctggacgcacggacgactgccctgctcctgtctgtcagtcacctggtgctggtgacaaggaatgcctgccatctgacgggaggcctggacctggattgaccaatctctgtcggctgctgaggagcatttgggaagtcctttcgagaaggcagccctagcttctgagccagataaaggcctcccaagccctgaaggcttcctgcaggagcagtctgcaatttagtgcctacaggccagcagctagccatgaaagcccctgccgccatccctggatggctcaacttagccttctactttttcctatagagttagttgttctccatggctggagagttcagctgtgtgtgcatagtaaagcaggagatccccgtcagtttatgcctcttttgcagttgcaaactgtggctggtgagtggcagtctaatactacagttaggggagatgccattcactctctgcaagaggagtattgaaaactggtggactgtcagctttatttagctcacctagtgttttcaagaaaattgagccaccgtctaagaaatcaagaggtttcacattaaaattagaatttctggcctctctcgatcggtcagaatgtgtggcaattctgatctgcattttcagaagaggacaatcaattgaaactaagtaggggtttcttcttttggcaagacttgtactctctcacctggcctgtttcatttatttgtattatctgcctggtccctgaggcgtctgggtctctcctctcccttgcaggtttgggtttgaagctgaggaactacaaagttgatgatttcttttttatctttatgcctgcaattttacctagctaccactaggtggatagtaaatttatacttatgtttccaaaaaccaatcctttccccctcaacactaacctcccctcacaccccccccatctttcgtcccagatggtgcgttcccccaccctccggccctcctatatcccatcactttaccatccccccaccgccccccacacatcgcaaaaatcccatcctccccccacaaccacgtacgcccaccaaaacttccctccttgcggnnnnnnnnnnnnnnnnaacaacatctcttaaaccacctttcgtnnnnnnnnncccaccctaataaaacactcccagtacctccccctattttctcccaaataaatacccgcccggccaccaaactttgtgcctccctcccaacaacataccaacccgcccctctgaggcacccccgctcgtttcaataaacacagccctcgcggttgcgcccccc

SEQ ID NO: 5549 - DNA, 901 bp, Homo Sapiens
  misc_feature (466)..(474): n is a, c, g, or t
cggcactgaggtagaactgagagatcctctaccgcagtcgtttgaggaggcggaactgaagttttttcttaattatcatgtgacgggttctggatttaatggggggaaaagggcggaaaaggacaaggatccaaactggcgaatttgctgatcttcgcgtccctctccgctttccggccggcagcgctgccagggtatatttccttttttccgatcctgcaacagcctctttaaactgtttaaatgagaatgtccttggctcagagagtactactcacctggcttttcacactactcttcttgatcatgttggtgttgaaactggatgagaaagcaccttggaactggttcctcatattcattccagtctggatatttgatactatccttcttgtcctgctgattgtgaaaatggctgggcggtgtaagtctggctttgaccctcgacatggatcacacaatattnnnnnnnnngcctggtacctcattgcaatgttacttaaattagccttctgcctcgcactctgtgctaaactggaacagtttactaccatgaatctatcctatgtcttcattcctttatgggccttgctggctggggctttaacagaactcggatataatgtcttttttgtgagagactgacttctaagtacatcatctcctttctattgctgttcaacaagttaccattaaagtgttctgaatctgtcaagcttcaagaataccagagaactgagggaaaataccaaatgtagttttatactacttccataaaacaagattggtgaatcacggacttctagtcaacctacagcttaattattcagcatttgagttattgagatccttattatctctatgtaaataaagtttgttttggacctcatttttctacatg

SEQ ID NO: 5550 - DNA, 444 bp, Homo Sapiens
  misc_feature (321)..(377): n is a, c, g, or t
aaaagtaaagcatgagaatttgaagcctgtgaaattttatttatacaaaagaataaaaagttatttaaaaagaactgatttaaacttatgtttttccatttttcctgttccttgaacatgaatctactaccaactcagaaagatttaagataggtaattactaaacactctttacctccccttgcaaaaaacagaggcaagtttcccattttacttatgataaaccagattattatcagttatgaatattggcaactgcatgaaagagatgatcagatatgtcagcaggaaagtatgagctgtacaaaggcattacaaaannnnnnnnnnnnnnnnnnnnnnnnnnnnnnnnnnnnnnnnnnnnnnnnnnnnnnnnnatataagaaaatgccagatatttacagcctccatctgaaatgtgacttgtgttctactttcagcata

SEQ ID NO: 5551 - DNA, 759 bp, Homo Sapiens
ggcaaagggaacagtgaattagccagctagaatcttcctggtccctttttgaggcagtagcaggtaaggaaagggctgattttcatcaaaaccaagacctttctgcagggatgatagtggaataataatgtgggattagcccgctagcattaggagcagttgggaagttacctggtagatcaagcattacacacaaaaaatcaagttgatcagagtatgggttctccatatagcaatacttcagtgagattaagtataaacagtttttggcaaaaaacaacacagtctactctttctgcttacaaagacaaagccttacaaactcactatgaaggtaaagggaggacagcttgcttctttgcccagacatttacaaagttgtttttaaaacacactcataagtaagtttggcaagttgtttaaaaaatgtctctttgttttgtacagttctgttagatgttgttatattttaaaagtttaatttaaaaaatttaatttgtccttcctaagaaggataaatatataaaaaagccactggaatgaaaacttcctatatgctatgctgttgtcttattattatatagaaaaataactttagaaaaatattgaagacattgtattaccacttgtgattcaaacaattttgtggttaaaactggattttaaatttaaaaatcaataaaaatttcaaatgtttattaccttcctcggtgccataattttgactttatcttcaaataaaatccttcattaattgtg

SEQ ID NO: 5552 - DNA, 599 bp, Homo Sapiens
  misc_feature (25)..(25): n is a, c, g, or t
tcaaggaaatgtctgacctcaatanatatagccctcctcctcagtctcctgaactgtatgtggcagctagtaagcactttcaacaggcaaaaatgatattggaaaatattcctaacccggaccatgaggttaatagaattttaaaggttgccaaacccaactttgtggttatgaagttattggcaggaggacacaaaaaggaatctaaagttcctcctgaatttgatttctctgctcataaatattttcctgttgtgaaacttgtttgagagagactggggaggtggccataaaggggcagagtcttctttcagacccaactcttagagggcacatcaccaggctccacatcacgggaagtgagatggatttcttgggtaacaactcattataaggaatacttttagtttgacagccttatatgacatgaatgaaaactgctgttttaaagtggtttattatgttccatggaagaaactggtcttattgaatgcattgatgaacgttatatggttttattacagatttaatcacaaatcattttttatgaatgattgagtgaaaatagtgtttataaaggttaataaatttcttgacaa

SEQ ID NO: 5553 - DNA, 1849 bp, Homo Sapiens
  misc_feature (476)..(491): n is a, c, g, or t
  misc_feature (720)..(737): n is a, c, g, or t
  misc_feature (924)..(924): n is a, c, g, or t
  misc_feature (931)..(931): n is a, c, g, or t
  misc_feature (1083)..(1083): n is a, c, g, or t
  misc_feature (1180)..(1180): n is a, c, g, or t
  misc_feature (1256)..(1256): n is a, c, g, or t
  misc_feature (1315)..(1315): n is a, c, g, or t
  misc_feature (1338)..(1338): n is a, c, g, or t
  misc_feature (1602)..(1602): n is a, c, g, or t
  misc_feature (1612)..(1612): n is a, c, g, or t
  misc_feature (1774)..(1774): n is a, c, g, or t
gggttttcagagcttccctggtgattgtgataagcctggtttggaaaccattgctggagaactttgtaaagatacagagacccagaccttttgtatttacatttaaatacaaatacaaatcctgggtttctatatgttctgttagcttttcaggtgattctgctacacagacgttgaaaaccactgccctaagaaagagatcagaggccacatatcagagagaaaagggaccaaaacttcggtggtttgtagtgtgtcgttttaatgccaattattttaacttgcacagtcttctgaaaccttgtattaatagttctcttttgtaataccattttcaggtagggttttgatcactatgattctgaagataatagtgaaatagtgaatttcattgatatgaagagataattgattttcattcattggtttgaacacctgcaaaatcacaaataaatgagaactaagtcttgtattcnnnnnnnnnnnnnnnncaaacagaaaaaccaaccatttttgtccaccacaaacgcaaaagaacaagcacgaacaaacaaggaaaagaacacctcccccctccccgagcccggaggcgaacatctagaatttgtcacgttcggccggcggcccccacgaagccggcagaaaaccccttaaaagacggtaacccgccacacaacaggaacgagcgagccgacccccatcaaacctttcacccgtgannnnnnnnnnnnnnnnnntctagtataccccacctcccataaagcaaaccgagatcacaatgaattcccgccccaacgaactaatcgcaccgacgacggttctagacagacgggaccatgcgaggggcgagcaccgacaggcggcccaaccgcgcccgcgacccgccggccgccctacgcggcccgccgcgcacactcaccgctnctacagngttatagcatcgcgcgacgtggcccgcggccgtgcctgtgtcgggcggaggacaactgtgtgtcgggagaacatgtcgtgtgtgagaggtgtcgtactcgctgcacgcacacgctctccacgtcacactcgcacgcctaatgtacgcgcgcnctccctgcctcagaacagatatatgatcgtacgtgcattctatgctacaccatatcgcggtgtctgcggcgcgctatcctctgccgctgtcgacgcnacatctcacagtatagcgtactccttcccgtcgacgactacgatgacctgctatgctcgcacgtcagagcgtactnaacggctgctgaatcctcacgccgcccctcacatcgcacacagcgtaggtatcataaanctcagtctgtgatagtgtgacgntcaggattgtgagatatgtatacgggttgagccgacgttacatcgaggacgaggtgtcgacggaccatcatcgtccgctactgtcgtggctatccggctgcctccggaatatataactatacgctatctgtctcgctgcacatcagaccgacgtcgacacctgaggacgccgcaagcacggctctcgttcaccgatctcgagatgtccccgctgcacaccactccagcccgccagtacagcgacgctgcgcaggacgcgtgtcncgagtggtgntcatcgatgtgcagatcacccacagatcataccacgatatgccccatcatctgatgcgcctaacagtcaccatactaaagctgtgtcaccgaggaatatagatgcaggagtatagatggacgcctagtatgttgcctatgccatagcgcggagaacgagtancacgcccagcggcctgatcgcagcaccataagactggatatgtctagaaatctggaagacatgccatcgccctgg

SEQ ID NO: 5554 - DNA, 735 bp, Homo Sapiens
  misc_feature (55)..(91): n is a, c, g, or t
ggctcccaaactcagcctcccaggtagctgtggctccaggcgaactactgtatannnnnnnnnnnnnnnnnnnnnnnnnnnnnnnnnnnnnggtcttatagtcctgggctcaagcctcccagagtgctgggattacaggcatgggtcaccgcaccaagcccgcatttatattttgagttaccaaaatgatcatcatctgtgaagcatcatggtagcttccaagcatttgcggcccactggccagtgcatccaaaacacattcaggaaacccgagagttgtaagttgcacatgtgtggcctacagtgacttccatgtagtaacagggctgagcaaggcaggctctccaccagacttaaagcattcaaccactctgcccccaggccgacactgacatgtgttcactgtcgctgccacagctggccacctgtgttcagtctccatgaaggattcaccttctgctctcactgacatctccttggctacacaaatgtgcaggtgtctcttgtcaaagctaatttttcttttctaaataaacatcctttaattgggggagaacgaacagagcggagaggaaaaattgtcgggccgcctcggcccctcgaaaaaacttcccaaaaccatttccgtttgggggccgcggggccacggtaggtaaaggtgaaattgggccctaggctggtttccctaggggaaacccggggccatggaacagagggcttgggaattcccccccc

SEQ ID NO: 5555 - DNA, 878 bp, Homo Sapiens
cagatgaaagggtaataaatggatgtaatcaagttgaaaactttatcaaccacagttcctctgtttcctgtcttcaagaaatgtcttccagtgtcaaaacctccatttttaataggaatgattttgatgattcttcatttctcccacaagaacagaaagtacaccttagagaaaaaccttatgaatgtaatgagcatagcaaagtctttagagtatcttccagccttactaaacatcaagtaatccatactgtagagaaaccttacaaatgtaattcatgcggcaaggtctttagtcgcaattcgcaccttgcagaacattgtagaattcatactggagagaaaccttacaaatgtaatgtctgtggcaaggtttttagttacaattcaaactttgcacgacatcaaagaattcataccagagagaagccgtatgaatgtaatgaatgtggtaaagtcttcagtaataattcttaccttgcacgacatcaaagaattcatgctgaagagaaaccttacaaatgtaatgaatgtggtaaaggcttcagtcataagtcatctctagcaaatcattggagaatttatactggagagaagccttacaaatgtgatgaatgtggcaaggcctttagtcgcatttcatacctagcacaacattggacaattcatatggggatagaaactacaaatgcaacaaatgcgtcaaagaatttagtgtgcactcaagccttactacccatcttttattccatactgcaaagaatttttgcaaatgtaaagaatatgacaagggtcttcaaacacaagtttttctaataactcataaaagatttatactgggagagacttcaccattattataaaatgtggtggaaaagc

SEQ ID NO: 5556 - DNA, 1398 bp, Homo Sapiens
  misc_feature (113)..(124): n is a, c, g, or t
  misc_feature (1118)..(1270): n is a, c, g, or t
tccgcatgggtccgtgaatacgtcgccgcacagggctacatcggccggtgggtgggcatgctgtggtgccccggcccagatcgcctttcacgccaccccgttggccaaggagnnnnnnnnnnnnaaccacggtacccatgcatggtaggttgccagaagcctacaacccttttttcccagagacttgccctcaaactgaagtcacttgcctttcaaatgtacccccattcccagagaacttctcacagccaataaatgactgataaaggctttcacaggttccttctgagagcacccccaacaataaaccaagtgcattcagatccctgtctcgagctctgctgcagacctgacctgagagaactctccaccttgatttgcagccagaacctcccattccaaccacagacagcctgctttgcaccaaattccttacttacccagcccatccttccctattacagtaactggtaactccatctttcctgctattcaggccaaaaaccttaatgtcatcattaactcttccttctcttacactccacattcaaactctcagcaaatcctattggctcttttcaaaataaatctagatatttgaccactgctgttgctgtggcccaggcccaagcctggaaccttgcagtagcttcctaacaggtcttccctcttccttctgcccttgtccactaaagtttttcacaatatggcagctagaatgacccttgcaaaatataaatcaatcaaggcactcctctgttcaaaccctccagtggttcccatctcacttagcagaagccaaggccctccaccacctgtcctctccagccgcctctccttccattctacccctgcccacgactctgcttggtctccctgctctttcctgaccacgtagagcaagttctcactttggggcagtgcacatcctgttcctctgcctggaatgccttgtccaggatccacttccctaacgtctctgctcaacgtcacattcccagtgaggccccatttaaaactgcagcctcatctccaggatttcttactccctcccctgctttatttttctccacagcaactatcactacatgataccttgtatatatttattcctatgnnnnnnnnnnnnnnnnnnnnnnnnnnnnnnnnnnnnnnnnnnnnnnnnnnnnnnnnnnnnnnnnnnnnnnnnnnnnnnnnnnnnnnnnnnnnnnnnnnnnnnnnnnnnnnnnnnnnnnnnnnnnnnnnnnnnnnnnnnnnnnnnnnnnnnnnnactagacagctctggctttcttccttttccaactcggagacttataactaagcattgtcctcaaatgggatcggccaaccgttgtaattttggagatgcaaagtggggcaaaagccacatttctgcac

SEQ ID NO: 5557 - DNA, 934 bp, Homo Sapiens
gggcagtgcgcaggcgcagtcccggctcctggcggcgtgttcctcttttcctcggttcccagtgttctggcaggtaaggaacgccggctcttcgcctctcagcgcggcttgtcctttgttccggacgcccgctcctcagccctgcggctcctggggtcgctgctgcatcccgcacgcctccaccggctgcagacccatggccgagcgcggggaactcgacttgaccggcgccaaacagaacacaggagtgtggctagtcaaggttcctaaatatttgtcacagcaatgggctaaagcctctggaagaggtgaagttgggaaactgcggattgccaagactcaaggaaggactgaggtgtcatttactttgaatgaggatcttgcaaatattcatgatattggtggaaaaccagcttcagtcagtgctcctagagaacatccatttgtcttgcaaagtgttggaggacagacattaacagtatttactgagagctcatcagataagctgtcattggaaggaatagtggtacaaagagctgaatgccgaccagctgccagtgaaaactacatgcgattaaaaagattgcaaatagaagagtcttccaaaccagtgaggctatcacaacagctggacaaagttgtaacaaccaattacaaacctgttgctaatcatcaatacaatatcgaatatgaaaggaaaaagaaagaagacggaaagcgagctcgagctgataaacaacatgttttagacatgctattttcagcctttgagaaacatcaatactataatccttaaggacttggtggacatcacaaaacaacctgtggtgtacctgaaggaaatcttaaaagaaattggtgttcagaatgtaaaagggatccacaaaaacacatggagctgcagccagagtacagacacttgcatccagagggt

SEQ ID NO: 5558 - DNA, 1043 bp, Homo Sapiens
  misc_feature (737)..(863): n is a, c, g, or t
ggctcctttcatttttggatggtgacagcatttttcccctctgtgctggatacagacttctcccaggatcctctctttgggagcgaagccagaggatccctacagcactcaagcttcatggtggaattaatttctgccagctctttgttgtctgtctccttaaatccttttcctggtgtgcttattatcccttttgcagtgagtacagtttattaagttgtcagccctttaatattggggaaacttaatgagtataaatagcagggagcacattgtaacagcacagtgttttgtttttttcacccggttgctgtatgagaatggctttcaatcctttgtttctatgcctacagacagaaagcaagatgtctaatattagacatacaagttgctgcctgttataacggtggaattatacctttgtgcatgcctagaatgtttgttgttttaattagctgcaatatatacggcctgtgtacacagaatttaatcacttcggcaggttgaacaactccatgtagataagagcaagtgtaggcaaaggtttagaaaatggacataaagtcaaagaatgatggcaggtaggatgaaggagagatacttaggaaatcctaaaagaggcggcaagaaggtacctccctgtgtaactcaccttcccccatgacagtgagtaagagacacacacaggctatgagggtacacccctagctgaatgttctgtgttgtttccttagacnnnnnnnnnnnnnnnnnnnnnnnnnnnnnnnnnnnnnnnnnnnnnnnnnnnnnnnnnnnnnnnnnnnnnnnnnnnnnnnnnnnnnnnnnnnnnnnnnnnnnnnnnnnnnnnnnnnnnnnnnnnnnnnctactacacagtgcagacacagaacatatcatcactgcagatagttctactggacaatgttacgctagaataaacaccaaggcagtcagttaaggcagctatggtttggaaaggcatacggacagagtctgcttagaagagatccaagttgttaataaaattgatcatgttaataaaaaa

SEQ ID NO: 5559 - DNA, 566 bp, Homo Sapiens
ggggcaccactgatgcctcccaaccttgctctgggagaccaatgcctgaaccagggtttgtttaccttctgagctgcagagatggggcttctggaatttaaggtaacaggatgaggcaggggtatcttgatcatccggaatggggcaaatactgctgttgtggcatggtggtacccaccccaatgggaggggcactcttggacagagcccagacctttgtgccctggagggagccaacccaccctgacacggagacactggcagaatagaccagagacagaaggtgctctcatggtatccagcctggatgccaagcccaagtcctggtggatagcagaggccagctgtttgggaaaagggcaggatgctctgaggcctggcagccacatttccatgtgtctttttaccaataaacggcttctcttctgaggcttggacagtgtgtgtgtacacacaggcatgaaaaaggtggagaggggtctctgcgcgcaaaactcagactgtaaattttgtgtggttcccttgctctctgagcccattaaataaagaagttatcttggcgtaaa

SEQ ID NO: 5560 - DNA, 874 bp, Homo Sapiens
gggctttttccagtggttatcgcggcgcccacgggcctctgatctctgagtcttctccaacccacagacggtttttgttgctctggttccaggaccttctccacaactaggccattttccctgccaggtgtcctttttgacctcttgacctctgactcaaaggtcagctcaaaggttccgaactcgggcctgggatgtgagggggtactgaacctaagttatccgaatctttagccctgggtccctaagtcgcatccttaaggcacctcactctagatctgagccttcatatcccaaactcactcatgagtgtccacatccagccccaaagaatgagttaactcctactaactctccacctaagactcccgaggtaacccaaccggtaccacagatccggttccggatttaaggaccccaccctgttaacccgtcaggtgccttatgacttgagtcagcctcgcaattcctgctcccgtggtttcaaatattagccctgggccttttcacacccactgctcagtccccagattctggaactcagctcttaaaccttttgaaatcccccatccctgaaaaccggttctccgcttggaggatcctttccctcccccgcttttttggaaccttctcaaaaccctcccgggaagaccccgttttgatttcccgctacctgaatgatagtaaccctggtgggccccccctggcccttcgagaaagacttttctaaaaccatttctttgggggggccggggccccataggggtaaggagaacgtggggtccaaagatggtgtgcccaggggacaaacctgtgccactgaatcaacgggccgtgagcattcgctcccacataaaaacccccctggccgggt

SEQ ID NO: 5561 - DNA, 864 bp, Homo Sapiens
ggaaatgaaagggtgtggtttccatcaatctgatgctgcccatcgcttgcactggggtctttgtggatcgggcaggagttttcagtgtgttgggtgttgctccttcctatgtgtcttttgaatctgaggctgacatttgcttggaaggccagacccttgctccatcagagagggcagtggcaaaggccagtgaggcagctgtgagttggacagggttcaggtgagatggtgttgtcatttgtgcttagtgttggtggtgctcagggtggataacacgggtcgttctgcagcccgcttcagcacaaataggcagcttaaggcctggctcacaggctgtggggttgatctggctctgcagaggccctaggcagcttgttgaactgctgtctgttgatgacgtgtgtgcaaagcaggctctagcaaccatgatcactgtccttgccttcctggttctttctctcggttggttgcccagggcttgcaagatcgccagtgaatttttccctttggggaacatcgccttgttttgtccctaaagtgaacttgtggcttatggccagtgctgcttggtggtctgccttcctttttaagggaatttcccttcccccaaagaaaaagggctgcattttgccttaatcaaaagaaggtgcaaattttaagggaaatttcctatggaggcggccctgttaattcgcgcagcccacgtggtccctggattccaaggcttcccgccccacgcttttggcgctgacccccactccatctttggatcccccctcattgcgatttcgcggccaaaagcacatccttaagcggtgcaaacaacaggaaggtgaaccttccccctaaccttgagaacagcgg

SEQ ID NO: 5562 - DNA, 900 bp, Homo Sapiens
  misc_feature (453)..(453): n is a, c, g, or t
  misc_feature (535)..(535): n is a, c, g, or t
  misc_feature (755)..(755): n is a, c, g, or t
gaagagagcttgcttgctactgaaaaagtgatcagttccctgggaaagtctagagattctgataagaaagttgtagctgacctcatgaaccagatccaggagctaagatcatcggtctgtgagaaaacagaaactatagacaccctgaaacaagaactgaaggacataaattgcaaatacaactctgctttggttgacagagaagagagcagagtgttgatcaagaagcaggaagtggatattctggatctgaaagaaacccttaggctgagaatactttctgaggacatagagagggatatgctctgtgaggacctggctcatgccactgagcagctgaacatgctcacagaggcctcaaaaaaacactcgggggctgctgcagtctgcccaggaagaactgaccaagaaggaagccctgattcaggaacttcagcacaagctaaaccaaanagaaagaggaagtagaacagaagaagaatgagatataacttcaaaatgaagcaactagaacatgtgatggattctgctgctngaggatccccagagtcctaagacaccacctcactttcaaacacatttggcaaaactcctggaaacacaagaacaagagatagaagatggaagaagcctctaagacttctttggaaccaccttgtaacaaagctaaatgaagacagagaaagtcaaaatgcttgaaatcctcccaaatgaagggaccagttggcctggaaatgaaaaaccctacgcctggnaaagctcgccatttaattaaagaaaaacctggctccctggcaggtccaacttgaaatggtattttaaaggaccaaagggaaaaacgggggttccgaattccttcccgaaaaatccaacagcctgtgaaaatggtacccgaaaaaa

SEQ ID NO: 5563 - DNA, 593 bp, Homo Sapiens
gggggatgtcctaaaatgaaagctgctcaaagtcacagaacaaccgagggacaaaggagattggatgactgggaagcgctggcccggaacagcccctgcaactgtggggcctgcacacagcccttccacagttggcactgcaggtgcaggccaaccctttaaagaataaacaaggaagtcagctctttcactttttacaagttggcaaaaacagacttccggggaattttgatgttttcccgtgttgtagagcttccagggtttaataaaactggttaaaaattgagtctttccctgaagtaagtgctctttccagatgaaaactactcttttggttttgtttgaaagtaagaaagggaggggtaactttgctcttttaataattatgttcagcctatgatgaagtatttgattattagacagcaatgtcactaataagttttaagttgtccaaagttaattgtaaacatcatcagtacagtactcttagttacagtaaagcaattgttgcaagatgaatggctaatattttggtgcagtgtttgatgttcaaaacaaaatgttacaacaataaacgaacataacataaaccc

SEQ ID NO: 5564 - DNA, 537 bp, Homo Sapiens
taagaatcaaagcaactgacacaataaattttattgtttccataataataggctctggacaaagacaatggagacaatgacaacacatttaaactcctataacaaattaatctgttacaaatttccagtggctcaacatattaaaatgcaaaacatataaagaaaaaaacaagaaatataaatattcagatttttgcagtacaatgaaatgtcttttaaaaaaagtttgttgtaattgtgtatgtaattctgacagtaattcaaaacacaaaatcacacattttccctaacttcccatgttctggatctggggactgcaatattacagaaatatgcaaaaataagtttagtgctcagagataaataattttccttatttcaatgcatcaatgcgcaaaaatttcaattcaaaaaagccaaccactgctatatgcagataaataaaacatttgacaacacttttataatcaaacccaacattatacaaaaaatgtgtggcacatgcacatacgtgtgcatatgtgtatgcaatgccta

SEQ ID NO: 5565 - DNA, 558 bp, Homo Sapiens
ggacaccaaactgttgatggtatttaaatgtgacttcaagttagtatttctgtatatattatagattactggtttgtttttagatatgtaagtctgttctaatctacagttcacatatcgacagttactctggtaataatagaatgttagtgatgatcacttggtggatgttgattaagtgcctgtgttttgtttcctcctctggataccaaataggtgtatgctacttttttggtgaacttatttcttggaagatttggctatgctattcagggtttttattcttatgtttttcttctaaatttaagtagcatcctgctgctaccatattaaagctaaaatttaacttttgctgaagaatcagctaattcaggtaatccaaatatttgtggaaaaacatctggataatttattgaacacattagtattgtgttagctttgatcattcccatttcataggtttttattgtggaatagtcaacttaatatagattcactttcaatttgcatgtataaagtaatactcaataaaatttttttcatttatttttcaaaaaa

SEQ ID NO: 5566 - DNA, 1174 bp, Homo Sapiens
  misc_feature (26)..(26): n is a, c, g, or t
  misc_feature (1085)..(1111): n is a, c, g, or t
  misc_feature (1113)..(1113): n is a, c, g, or t
agcaggctggtacggtccgaggctangatcggggaaagaccgcttccggtgcttccgtcgctccttgccgggcataatggccgcgcagcgacccctgcgggtcctgtgcctggcgggcttccggcagagcgagcggggcttccgtgagaagaccggggcgctgaggaaggcgctgcggggtcgcgccgagctcgtgtgcctcagcggcccgcacccggtccccgaccccccgggccccgagggcgccagatcagacttcgggtcctgccctccggaggagcagcctcgaggctggtggttttcagagcaggaggccgacgttttctccgcattggaagagcccgccgtctgcaggggcctggaggaatcactggggatggtggcacaggcactgaacaggctggggccttttgacggccttcttggtttcagccaaggggctgcgctagcagcccttgtgtgtgccctgggccaggcaggcgatccccgcttccccttgccacggtttatcctcttggtgtctggtttctgtccccggggcattgggttcaaggaatccatcctgcaaaggcccttgtcattgccttcgctccatgttttttggggacactgacaaagtcatcccctctcaggagagtgtgcaactggccagccaatttcccggagccatcaccctcacccactctggtggccacttcattccagcagctgcaccccagcgtcaggcctacctcaagttcttggaccagtttgcagagtgaaagatcaagaaatgtctctgctcctacatccagctcctctaggggcagcctccgtcatccatgccctcccaggaccctccactcactgctgtgagtgcgcctcagcagaaccagttaagagacaactatcaattcttgagacccaaattataagggccctgccctgtactgaagaaaaggggagcacaaggccttaatggacattgacttgtgaaaacgcaaacatgaatatggttggagagccctggattaggagggtgacatggggaaggcagaggctggcaccatggtgactgccacataataaagtggtgattttggaannnnnnnnnnnnnnnnnnnnnnnnnnncntgtcgggccgccctcggcccctcgaagaagcttttcctaaaccaattccgttttggcgccg

SEQ ID NO: 5567 - DNA, 481 bp, Homo Sapiens
  misc_feature (24)..(24): n is a, c, g, or t
attgagtagcatataatatcagantaaattatctgtaattttccacaacccagattgtatgtgttttatgtgtgtttaaataaatatgttagatacacgtgtatacatacacccatatacaacagatccaagactggctgacttcatttgaaatggttgaatctgctgtgtaataaagtggttcaaccatgattaggaactgaaatttagtagaagagggaaaaggagttaatgtaacaaattattttagctacaaaccccggtaatagagcacttgggggatgggatggggtgggttggtgagacaatcagaatggtaaattgattaaatgctcctaaccctgtaattttgtgcatagagcaccctatgctgtggaaataactgttcttagatttcattgtaactggactgttcaggttgcccagagggaaagaacattcctaattctaataaaataaacttttattttgttattccacc

SEQ ID NO: 5568 - DNA, 1364 bp, Homo Sapiens
ttcatcatccccgacggacgggagggaggaaggtggcaagatggtgttggaaagcactatggtgtgtgtggacaacagtgagtatatgcggaatggagacttcttacccaccaggctgcaggcccagcaggatgctgtcaacatagtttgtcattcaaagacccgcagcaaccctgagaacaacgtgggccttatcacactggctaatgactgtgaagtgctgaccacactcaccccagacactggccgtatcctgtccaagctacatactgtccaacccaagggcaagatcaccttctgcacgggcatccgcgtggcccatctggctctgaagcaccgacaaggcaagaatcacaagatgcgcatcattgcctttgtgggaagcccagtggaggacaatgagaaggatctggtgaaactggctaaacgcctcaagaaggagaaagtaaatgttgacattatcaattttggggaagaggaggtgaacacagaaaagctgacagcctttgtaaacacgttgaatggcaaagatggaaccggttctcatctggtgacagtgcctcctgggcccagtttggctgatgctctcatcagttctccgattttggctggtgaaggtggtgccatgctgggtcttggtgccagtgactttgaatttggagtagatcccagtgctgatcctgagctggccttggcccttcgtgtatctatggaagagcagcggcagcggcaggaggaggaggcccggcgggcagctgcagcttctgctgctgaggccgggattgctacgactgggactgaagactcagacgatgccctgctgaagatgaccatcagccagcaagagtttggccgcactgggcttcctgacctaagcagtatgactgaggaagagcagattgcttatgccatgcagatgtccctgcagggagcagagtttggccaggcggaatcagcagacattgatgccagctcagctatggacacatccgagccagccaaggaggaggatgattacgacgtgatgcaggaccccgagttccttcagagtgtcctagagaacctcccaggtgtggatcccaacaatgaagccattcgaaatgctatgggctccctggcctcccaggccaccaaggacggcaagaaggacaagaaggaggaagacaagaagtgagactggagggaaagggtagctgagtctgcttaggggactgcatgggaagcacggaatatagggttagatgtgtgttatctgtaaccattacagcctaaataaagcttggccttgccatatgcaatgcatatggcaaggccaaggtcagatagatgaccacgtgacgaaatagtaaaagctacctatagat

SEQ ID NO: 5569 - DNA, 617 bp, Homo Sapiens
catatagaaaaaaaggaggatttttctgcattgtaaaataatcagtatggtttatatgttgaatttgacatttgtgtgtaatttcatggtggcctagtgttgtggtgcttctggtaatggtaatagaagctcaactatttttttgtggatttcagtttttatcatcagaagtcctagacagtgacatttcttaatggtgggagtccagctcatgcatttctgattatacaaaacagtttgcagtaggttatttgtcatttcagttttttactgaaatttgagctaaacatttttacatgtaaatacttgtatttaccaaagatttaaatcagttgattaattaattaactcaaatactgtgaactatctctaaaacactagaaaaaagaaatgttagtatctcaattacaccaactgtgcaaatgaactttgataaaatagaaataatctacattggcctttgtgaaatctggggaagagctttaggattctagtagatggatactgaatactcaggcccacttaaattattaatgtatacattgtgtttttgtctttatgctatgtacagagaaatgtgataattttttataataaatattttttatgatgataaa

SEQ ID NO: 5570 - DNA, 652 bp, Homo Sapiens
  misc_feature (468)..(479): n is a, c, g, or t
ttttcttcccttcaaatagaagattcagcgaacttgaaagaaaaatcatctgtgagttccttcaggttctcactcatagtcatgatccttcagagggaatatgcactggcgagtttaaagtaagggctatgatatttgatggtcccaaagtacggcagctgcaaaaagtagtggaaggaaattgtctacgtgtcttggaaaaattagttaggaatttggatgggtaaaaggtacccttgccttactccatcttattttcttagccccctttgagtgttttaactggtttcatgtcctagtaggaagtgcattctccatcctcatcctctgccctcccaggaagtcagtgattgtctttttgggcttcccctccaaaggaccttctgcagtggaagtgccacatccagttcttttcttttgttgctgctgtgtttagataattgaagagatctttgtgccacacaggannnnnnnnnnnngtaagaaaaacctatagatgaaaaattactaatgaaactgtgtgtacgtgtctgtgcgtgcaacataaaaatacagtagcacctaaggagcttgaatcttggttcctgtaaaatttcaaattgatgtggtattaataccaacatcacccaagcgtgattacaaaaactttgtc

SEQ ID NO: 5571 - DNA, 2270 bp, Homo Sapiens
  misc_feature (1288)..(1296): n is a, c, g, or t
  misc_feature (1584)..(1596): n is a, c, g, or t
  misc_feature (1623)..(1639): n is a, c, g, or t
  misc_feature (1677)..(1692): n is a, c, g, or t
  misc_feature (1760)..(1760): n is a, c, g, or t
  misc_feature (1982)..(1982): n is a, c, g, or t
  misc_feature (2210)..(2210): n is a, c, g, or t
tttcacatgaaatgagtcttatttagctgggcacagtaaaatcaaatgaccagacgatgatggtaaaaacagcaaaaggagaaagcaaaagccaggcagggactctccagaggctcttttttaaatcttggggaaatcatacccactgaggaatagaggccagggcagatcaggcctgcgtggattgtgggtcagctagggaagcagaaggaggaagacgctggaatcattgtcaggactgagaatatggtgtgagttgcttttgagggtggccatgtgagcaccttggccagattaatctctttcccccctccatgatggtggcaggggcaggagctgacttcgtgatgctgggtggcatgctggctgggcacagtgagtcaggtggtgagctcatcgagagggatggcaagaagtacaagctcttctatggaatgagttctgaaatggccatgaagaagtatgctgggggcgtggctgagtacagagcctcagagggaaagacagtggaagttccttttaaaggagatgtggaacataccatccgagacatcctaggagggatccgctctacgtgtacctatgtgggagcagctaagctcaaagagttgagcaggagaactaccttcatccgagtcacccagcaggtgaatccaatcttcagtgaggcgtgctagacctgagcagttctaccctcccaaggcaccagtactctaccatggggcatcccaagtggggtcctcacccatcccagctactgcagctctgtattactttgtcatttcctgttgtctcactcctgagggctcctgcagtaactctgtacttctctatctgcacacacaaaatgcccaaggcactcactggggaggaagcaaggaagcaaacagtctgagaaaatgatgcaagaaaatcaaatgggaatctggggacccaacacaacatcctgaagattattaaaaggaaaagatgctgattggtacataaatcttttacatggccttggtctagaggaggcaggcttttagaatcatgttttgttaatccgcttcactaaattggaccttcacatatctaaaaagctctgaagtgtttgtatatttgaaatacctcaataaagagagagctcattgactgtaaaacccagcaaccaacaccacggcccaccgagccgacaagccgaaaaaataacctcccggccacgcccgcccctctccaaaacaaacggggcggctcctctaaaagaaaacccctccggggggcccaaaaaaacccagccacaccccannnnnnnnngaccaaaagcgggggcccccaaacagaggagaacccaaattataaaaaaacagaaaccccgtgtgccgcctcccttttttaaacaacacccccttggactgttggggaaaaaagtgtctcaaagatttcgggggggaacattttttttgaaaaagagaaaaaccactccgatgttcttttgtgggggcggggggcgacaccatactacatctgcgggcgcaaaaaacgtctatcacctatgacagacagagaattatatcatatataggcaggggtttcttttcggannnnnnnnnnnnnataatttcgtattttttcaccccctcnnnnnnnnnnnnnnnnnatagaaactgccggggtgtgtcacaaaagaaaaacgcnnnnnnnnnnnnnnnntgcccaaacaaacaactaatgaaaaacgcaccacgggattgtaccagatatacaaagataagtatctngtccttggcggaccgcccacgccactttctagtaccatgtaaaaaagcacatacttctggtgacgcggccctaatacgaacagggtagacggagggccgaaccccagacaccattgtcatcttttacaaggaggacacgacaaacatcttttcttctttttatccccaatccctatcgtggggtggcatgtaatagagccgggggacgggattatgtttttnccaccaaaataccttgtattctttcggccgcgcacccttccatttctcttcctttagaggcataattattcccccaccgaggcgacacccccccgcgcagggggggcgcatgtgttctttatattgagaaggagggccggccaccttaatagttggttaaggcctactacacaaaacacaaaagaattgggggcggccctcacccgggagcaaggacatcctctactntaacgtcgccgcccccttccatatcatcaccaacatactttgctgccaaggaaaagggga

SEQ ID NO: 5572 - DNA, 846 bp, Homo Sapiens
  misc_feature (775)..(793): n is a, c, g, or t
  misc_feature (795)..(799): n is a, c, g, or t
accgtggccagaaagaacgggttcctgacggaccaattaaacgaatttcgggaaaaagttgaatccggttcaaagggaccaaaaaattctttcccccgtaattttccaggggttattcttgatctttgaccgagccacctagtacgatgcgaaaactgatgggaccagtgtataaacaccatggtataagaactgtatagagaggctgcagcagatcttcctacagcatcaccaaataatccagcagtacatggtgaccctggagaaccttctcttcactgctgaattagaccctcatatcttggccgtgttccagcagttctgtgccctgcaggcctaagggtcatcttttcctcatgtcaaggttttttttgatatcttaaaataatttgtcttatttatagatggtttgaatgcttgctttcttgtagtatcctttcacttcttaaaggaaacaaaggggaagaggacagtgaatgaacatggcattacttttaattgccctgaaaagcaaatacttcctaacggcagtaatgtgactatgaccatgatatattatatatgtgacagatacaaattctctgtgatcagtttgttattttttttctccttaaggcacaaaataattggtttgaggtatgtgaaacactagaggtcaaccttacatagtatatagaactgatgggtttacccagctacccagtagcataacttttcacagctcggggatgaattaacatggctgaaataaaactaaaagtatggttttccaaannnnnnnnnnnnnnnnnnnannnnnaaaacatggtcgggcccgcctcgggcccctcgaagaaagcttttccc

SEQ ID NO: 5573 - DNA, 631 bp, Homo Sapiens
gagtcagtgtcctgttggtcctagcccatttgcagcaccctgccacttggagtggacccctcctactcttcttagcgcctaccctcatacctatctccctcctcccatctcctaggggactggcgccaaatggtctctccctgccaattttggtatcttctctggcctctccagtcctgcttactcctctatttttaaagtgccaaacaaatccccttcctctttctcaaagcacagtaatgtggcactgagccctacccagcacctcagtgaagggggcctgcttgctctttattttggtcccggatcctggggtggggcagaaatattttctgggctggggtaggaggaaggttgttgcagccatctactgctgctgtaccctaggaatatggggacatggacatggtgtcccatgcccagatgataaacactgagctgccaaaacatttttttaaatacacccgaggagcccaagggggaagggcaatgcctacccccagcgttatttttggggagggagggctgtgcatagggacatattctttagaatctattttattaactgacctgttttgggacctgttacccaaataaaagatgtttctagacaaaaaaagaagatgaatag

SEQ ID NO: 5574 - DNA, 635 bp, Homo Sapiens
  misc_feature (369)..(501): n is a, c, g, or t
  misc_feature (512)..(526): n is a, c, g, or t
acgtgaggcagaagaatatgacagatgtcagcttctccctgtgtcagatgatatgtccttgaagctggcaggggattcccagtccagggaatatccctacatgatttttgtcattcatgggtcctccctgggcctgacaacgggagtggtgggtgggtgagaacaggttctgagagggggcttctaggaaggccccagccctagtcctaggcgacttgaataaagtgggaggtcaaacatgggccttcggcattgggtttctagggaatatggctcagtagggcctgccccttcaagggcagcaagaacgaagcaggatgttgtcactcccgtctgaataaagctccatgagctgggttggaaagctgnnnnnnnnnnnnnnnnnnnnnnnnnnnnnnnnnnnnnnnnnnnnnnnnnnnnnnnnnnnnnnnnnnnnnnnnnnnnnnnnnnnnnnnnnnnnnnnnnnnnnnnnnnnnnnnnnnnnnnnnnnnnnnnnnnnnnccttggctggnnnnnnnnnnnnnnnaaaaaatttttcaaaacctttttttggggcgcgggccccaaagggaagggaaacggggccaaactgtttcccaagaaaacccggccaaggaaaagggttggaatccccc

SEQ ID NO: 5575 - DNA, 1269 bp, Homo Sapiens
  misc_feature (1024)..(1029): n is a, c, g, or t
  misc_feature (1031)..(1031): n is a, c, g, or t
  misc_feature (1033)..(1033): n is a, c, g, or t
  misc_feature (1037)..(1037): n is a, c, g, or t
  misc_feature (1172)..(1172): n is a, c, g, or t
accacggtgacctatcccctgcagacggtacagtcaattctgaggtttgggcgtcatagactaacccagaaaacagaacattgggaagtcttcggaatattctctatcttcttcaccaacgagtaagacgttttggaataatgggactctacaaaggccttgaagccaaactgctgcagacagtcctcactgctgctctcatgttccttgtttatgagaaactgacagctgccaccttcacagttatggggctgaagcgtgcacaccaacactgagacgccttcccatgaaaaattccgaagatgctcaagagggaggtttcctcctgagtgaagagaagtgattctcccttgactctggctcctgccaccacaaatgttaccctcattggcttgaaaagcatccaagggtgcacagggagtatggccaactggacctgttgtcaccttaattgtcatgctggctggttggattttggggtggcagttggactaatgtgaaaaaaacattgctgaaaacctaaaaatgaaagtttgtgagtgtttattggttttcttaagagaaatggactattttgctctcatgtgtaatgttttctatttaaatctttcttaaatataccagctgttctctttccctgaactctcccccaggttctaggacaaatttaataacatgtaattctcctcaaatacttttgtatgtctcagtgttggtgttttcctccctaaaactaacattagggctgtgccacgggcatgactttatttttgttgggcttttttttccctgcttaaggagaggtgtcttttttggatatgagctatttattttgtgaaatgaaaattgttcacccaaatgattctcttataaactatttgtaaatgtcacttattcattagtgtttgacataatttttagaatatttattttgaatcaatcctttcattacgaaagacttgaagttttgtgtccatccttacaagccctggtcaagtcaagtcccaataaatggtcagccccnnnnnngnanatcncacctaagctaccactacatcgcaaactggcgcgcgcgccccccaggcatacggtgttggcgcttcgccacccccacccacccacctctgcgctccccgcccctacgaccccaaactctcaccggaacatgtggngctaagtgtgttggggggccccctcgtggcccctccacaaaagaaatttttttaaaaacaacctcttttctgtgtgtgggcggcgcgcccggcaccc

SEQ ID NO: 5576 - DNA, 975 bp, Homo Sapiens
  misc_feature (19)..(19): n is a, c, g, or t
  misc_feature (791)..(791): n is a, c, g, or t
  misc_feature (814)..(853): n is a, c, g, or t
  misc_feature (891)..(900): n is a, c, g, or t
  misc_feature (922)..(923): n is a, c, g, or t
gccgaggagagcggcgcgncgtgcgcgggcacgaggcgtagtggtctcccctaaggctgaggcggcggcgggcgtgcgaggctgttgtgctcccggctctcgtgtttcccctcctgagcgggtggaggaggcccaagcggtgctgggcgcgctcccccttcctttccctccggcgtcctctcccggccctctcgcgctgcactgtctctccgacgcaagactgtcccggcccggatatggctcgtggacagcagaaaattcagtctcagcagaaaaatgccaaaaagcaagctggacaaaagaagaaacaaggacatgaccaaaaggctgctgccaaagctgccttaatatatacctgcactgtctgtaggacacaaatgccagaccctaagaccttcaagcagcactttgagagcaagcatcctaagactccacttcctccagaattagctgatgttcaggcataaggttgtttacaggtgaattcatgacacctttgactcttctactgtctcagaccttaggtaacatacctgcagctgcttttctaacaaactgttgatcagcaaaaataaaggggctacagaaacactcatttttatgctgttccctcttgggcttcatgcaaagacaattctgtgtaaatgtacagttgactctgatttggaaatatgaaaatcagtccatccttgttataaaaaatttttttacaattgtaattatattgatgttcatattgtgtaaaataactcatttaataaaatagtactttgatttacgacatccccggngaggggacgcagagcaacggcannnnnnnnnnnnnnnnnnnnnnnnnnnnnnnnnnnnnnnnagactgtggaggagccggaaaggctggacccaccaggnnnnnnnnnnacatcgagcagccccgaggcanncgactgacgcgccggtgaccccgggggggaggatggggaggggtcgggtcgg

SEQ ID NO: 5577 - DNA, 1329 bp, Homo Sapiens
  misc_feature (944)..(944): n is a, c, g, or t
  misc_feature (963)..(963): n is a, c, g, or t
  misc_feature (1065)..(1065): n is a, c, g, or t
  misc_feature (1112)..(1112): n is a, c, g, or t
  misc_feature (1114)..(1114): n is a, c, g, or t
  misc_feature (1121)..(1121): n is a, c, g, or t
  misc_feature (1177)..(1177): n is a, c, g, or t
  misc_feature (1242)..(1242): n is a, c, g, or t
  misc_feature (1280)..(1280): n is a, c, g, or t
ttctgagtggggaaagggactaaggtggtctgaggaccccacagagtcacgaagattgagagcctgataaaggtcctgcgggcaggacaggacctcccaaccaagccctccagcaaggattcagagtgcccctccggcctcgccatgaggctcttcctgtcgctcccggtcctggtggtggttctgtcgatcgtcttggaaggcccagccccagcccaggggaccccagacgtctccagtgccttggataagctgaaggagtttggaaacacactggaggacaaggctcgggaactcatcagccgcatcaaacagagtgaactttctgccaagatgcgggagtggttttcagagacatttcagaaagtgaaggagaaactcaagattgactcatgaggacctgaagggtgacatcccaggaggggcctctgaaatttcccacaccccagcgcctgtgctgaggactccctccatgtggccccaggtgccaccaataaaaatcctacagaaacgacaacaaaacaccacagagaaagacctggcgaacgcaggcaaccggcaaagccaacccaagaccgcaacgaaaagcggcgagggctgacagcgagggagaacaagaaagaaaggcagccgctcgggtgccccgcccccgcgcgtagagaagaacactggcaagcagccctaacgccacggggccggtggggccgccaatcgaacaaccgagaaaccccgggagccacgcacccgggttcgacaccgagcgagacaaccgcgccgtctcttgggaacaccgccgacgtgccacgcccgacgctcggaccgcacatacagaaacaagacacccgggcaccacaggacgcgaccgatacactaacgaagagcgcgcgtagggcggtacaaccacaacacgcgccaccgcgcgacggcaacagagaagatagccnctcccagaccaaccggcgntccgtctgacaccaccggcccgcactcgccactcaacgtccacacgccgccgcgggcacatatccctacacgggccgcccgacgctgacattcatagtcagnctgacaggcgtacgacgtctggcggcggcggccgctcccacacgcgncnactcaanaactatcggaggcgacagagaacaagctgggggtcagggcgatagcatctccgcgnccgcacagtggcagactacctacccacaacacacggaccactgagtctgtacccaggtcatatcnacccgacatacaacgacgccactcattcgagtaaccgnagatcaacgctacggcaccagcgcaatcacgcgtcgaatacagtgctca

SEQ ID NO: 5578 - DNA, 1293 bp, Homo Sapiens
  misc_feature (20)..(20): n is a, c, g, or t
  misc_feature (90)..(90): n is a, c, g, or t
  misc_feature (180)..(180): n is a, c, g, or t
  misc_feature (266)..(266): n is a, c, g, or t
  misc_feature (310)..(310): n is a, c, g, or t
  misc_feature (349)..(349): n is a, c, g, or t
  misc_feature (356)..(356): n is a, c, g, or t
  misc_feature (389)..(389): n is a, c, g, or t
  misc_feature (393)..(393): n is a, c, g, or t
  misc_feature (400)..(408): n is a, c, g, or t
  misc_feature (416)..(416): n is a, c, g, or t
  misc_feature (419)..(420): n is a, c, g, or t
  misc_feature (484)..(518): n is a, c, g, or t
  misc_feature (525)..(528): n is a, c, g, or t
  misc_feature (541)..(543): n is a, c, g, or t
  misc_feature (549)..(560): n is a, c, g, or t
  misc_feature (584)..(635): n is a, c, g, or t
  misc_feature (643)..(651): n is a, c, g, or t
  misc_feature (668)..(731): n is a, c, g, or t
  misc_feature (808)..(852): n is a, c, g, or t
  misc_feature (859)..(859): n is a, c, g, or t
  misc_feature (888)..(905): n is a, c, g, or t
tgagatttgccctcgtcttngctcgtgccctgcccgcgcgccggcgtccgtcggccgcgcggcgtgttcggtcgagtggggggggcgcgngaggcagtgatgcttatgtccctttctcctcttgagggcgaggacacataagggtgggaagcggtccctctccttctccctaaacccacnacagacagggggtggcgcgggcacgaacggcagcgaccgagcgtgtttttctctgtttttcccagcagccggaggccagccacgcncattctccccctctccacccgcacgcggtgggtgtgggggaggntaataataaaaataaactatctcttcccttggcctcgtngcacagngatccaaaacacagaaaaacgcgcctccggcgnggtnttctccnnnnnnnnncctatganggnngggcgccgggcgccgccccgctggccgttgtttaaactacctccccgccccccggtggtaaaannnnnnnnnnnnnnnnnnnnnnnnnnnnnnnnnnntgcgcgnnnncccgttcgtaggnnngctggnnnnnnnnnnnnagggggggaaaaaggaggcagaannnnnnnnnnnnnnnnnnnnnnnnnnnnnnnnnnnnnnnnnnnnnnnnnnnnaccccccnnnnnnnnnattaagaaatctcgcannnnnnnnnnnnnnnnnnnnnnnnnnnnnnnnnnnnnnnnnnnnnnnnnnnnnnnnnnnnnnnntggccgtgggtggcggggccccttttagttccagctactcaagagaggctggggccaggagaatgccatgaacctgnnnnnnnnnnnnnnnnnnnnnnnnnnnnnnnnnnnnnnnnnnnnnccatgcnctggcgtgacagagtgagactctgtctcnnnnnnnnnnnnnnnnnngattgatttcgtcaaactgttatcaaaggttggccctctagccaactcaggaaggcgccatcctcttcccattatctccccttcctccaattctcctcctccccttggcccctagccttggaggtaaaaagtatgtactagttcttgggcgtacctactctgggtgggtggagatctgggtcttcctccccaaacgtggatgttagcaacgagatcacagaaggggtgtagacaccctgagacattggaagtaatatgatcctctccccacctggatactgggaaagataccacagcgcgggtatacgtttcctacgtagttgcgagtaatatcattcttttcctttctggatattagggagaatatcacaggggtgctgtgcaattc

SEQ ID NO: 5579 - DNA, 684 bp, Homo Sapiens
gggaaaatgatgttaacagcttaaaagatcaacttgaagatttgaaaaaaagaaatcaaaactctcaaatatccactgagaaagtgaatcaactccagagacaactggatgaaaccaatgctttactgcgaacagagtctgatactgcagcccggttaaggaaaacccaggcagaaagttcaaaacagattcagcagctggaatctaacaatagagatctacaagataaaaactgcctgctggagactgccaagttaaaacttgaaaaggaatttatcaatcttcagtcagctctagaatctgaaaggagggatcgaacccatggatcagagataattaatgatttacaaggtagaatatgtggcctagaagaagatttaaagaacggcaaaatcttactagcgaaagtagaactggagaagagacaacttcaggagagatttactgatttggaaaaggaaaaaagcaacatggaaatagatatgacataccaactaaaagttatacagcagagcctagaacaagaagtagctgaacataaggccacaaaggcacgactagcagataaaaataagatctatgagtccactcgaagaagcccaatcagaagccactgaaagaaatggagaagaagctcttggaggaaagaactttaaaacagaaagtggatatctgaatggttta

SEQ ID NO: 5580 - DNA, 783 bp, Homo Sapiens
  misc_feature (477)..(497): n is a, c, g, or t
  misc_feature (719)..(719): n is a, c, g, or t
gggactaaggaccgagcaccaaataaccaaggaaaaggaagcgagttaaggacgtactcgtcttggtgagagcgtgagctgctgagatttgggagtctgcgctaggcccgcttggagttctgagccgatggaagagttcactcatgtttgcacccgcggtgatgcgtgcttttcgcaagaacaagactctcggctatggagtccccatgttgttgctgattgttggaggttcttttggtcttcgtgagttttctcaaatccgatatgatgctgtgaagagtaaaatggatcctgagcttgaaaaaaaactgaaagagaataaaatatctttagagtcggaatatgagaaaatcaaagactccaagtttgatgactggaagaatattcgaggacccaggccttgggaagatcctgacctcctccaaggaagaaatccagaaagccttaagactaagacaacttgactctgctgattcnnnnnnnnnnnnnnnnnnnnnaaataaaaatactattaactggacttcctaatatatacttctatcaagtggaaaggaaattccaggcccatggaaacttggatatgggtaatttgatgacaaataatcttcactaaaggtcatgtacaggtttttatacttcccagctattccatctgtggatgaaagtaacaatgttggccacgtatattttacacctcgaaataaaaaatgtgaatactngtccaaaaacagagtcacgtattccactctccaattacccacatattcctttggcaatagccat

SEQ ID NO: 5581 - DNA, 1296 bp, Homo Sapiens
  misc_feature (1031)..(1053): n is a, c, g, or t
gggcggggggcggacgctggggccgagggtagcttgagcgcggcggcggcgttgttcagtcagagcgagaacattccagaggtcgcccagctccggcgctgacgggtgtggaccgcggacgtcgctgggacagcccctccccgctgctcggcggcggcacctggcccggccgctcctcgctgcgcttcgcctccgcctcctcggactcggactcgggtttatatcgcgcctcacttcatcccagtcccgggcgagcagcgttgggtttatgtctttatttgacgaaaacgagctgttgcgcagccattggtacctgtattggggaaacatagcatacaagcaagaagcttacagcctcagtggcgaaaattttttcatgtcagagaccgagaactcttgcagtcgtttatgtcatcccttcttctccagacagaagataccaaaaagttgcaatcaaagatctcttcatcttattgataaagccactaataagccaaaatgtctgtcaatgtcaaccgcagcgtgtcagaccagttctatcgctacaagatgccccgtctgattgccaaggttgagggcaaaggcaatggaatcaagacagttatagtcaacatggttgacgttgcaaaggcgcttaatcggcctccaacgtatcccaccaaatattttggttgtgagctgggagcacagacccagtttgatgttaagaatgaccgttacattgtcaatggatctcatgaggcgaataagctgcaagacatgttggatggattcattaaaaaatttgttctctgtcctgaatgtgagaatcctgaaacagatttgcatgtcaatccaaagaagcaaacaataggtaattcttgtaaagcctgtggctatcgaggcatgcttgacacacatcataaactctgcacattcattctcaaaaacccacctgagaatagtgacagtggtacaggaaagaaagaaacagaacagaaaaacagaaagggcaaagacaaggaaaatggctccgtatccagcagtgagannnnnnnnnnnnnnnnnnnnnnnaatgaaattaatcctcctccacatacaagggaagaagaggaggatgatgactggggagaagatacaagtgaggaagctcaaaggcgtcgaatggatgaaatcagtgaccatgcaagagttctgacactcagtgatgatatgaaaagaccacttgaggagagggtcaatatcctctttgatttggtcaagaaccagacagacagagggtgtaattgattcatctgacaaagaaatcgttgctga

SEQ ID NO: 5582 - DNA, 936 bp, Homo Sapiens
tttttgcgagagctttaatggcacaaaatgtttatagctacaagttatacatgtattgtaaactgtatataacgatacaaagtgctaactaaaatagatgaagaatgcataatcactttggctcagttaattccaataatttccacaacgggttcatgaaaaaacttatctgactggctaaagtcttcaatttctcatttttttagaatagtaaatatttttactgcaatcacggggaacttgttgcactttccaatgtgcaagtttgtgcagttttgctcttgattctatttacaaacatcttgagccagttttcatcaaacatatgaaaaatgaagcctgcctttttgtccccaaattgtaaacaggtgtaaagctttttaaacattaacctcacaatttcaactattaattgttgaattctcctttccaaaccacaatgttttcgttcaacacaaatctgggtgtagcagtaaaacgttcatcccatgtgttagggctacagatacatactacatgctctcataataaattctactgtgatgatgtattcacgttttaagtaattttccataatttcactgatgctttaagaaaaagggcaacactatgtttctttttaacgctgaaagaaatcataaatatacccagtttcagtggcaccactgatagaactgctgctgaacttggaaagagcacaatgcactagctgtaagaagtcactttcaggtaaagtgtaattttacttttcccccctgtaataccaattgtaatagaaattgcatactgtagcagtttagctagtcagttctcctaactttccagtctttccaattttattcaggcttttcaaaaatcagtgagccatcagatttactttcttcccaaagaaattcaaatatgaacacttgaaataaataggttatagaaggcacc

SEQ ID NO: 5583 - DNA, 1975 bp, Homo Sapiens
tcaaagataactatcacgggtctaattgtagcgaggactgggtggcgaattcggcacgaggctgagatgtggttctgcgcgtgtgcggactggctgtctgttaactccgcggtcagttcccggactggtggctggtctgcagggttgacctgcgcaatgcagaggctgcaggtagtgctgggccacctgaggggtccggccgattccggctggatgccgcaggccgcgccttgcctgagcggtgccccgcaggcctcggccgcggacgtggtggtggtgcacgggcggcgcacggccatctgccgggcgggccgcggcggcttcaaggacaccacccccgacgagcttctctcggcagtcatgaccgcggttctcaaggacgtgaatctgaggccggaacagctgggggacatctgtgtcggaaatgtgctgcagcctggggccggggcaatcatggcccgaatcgcccagtttctgagtgacatcccggagactgtgcctttgtccactgtcaatagacagtgttcgtcggggctacaggcagtggccagcatagcaggtggcatcagaaatgggtcttatgacattggcatggcctgtggggtggagtccatgtccctggctgacagagggaaccctggaaatattacttcgcgcttgatggagaaggacaaggccagagattgcctgattcctatggggataacctctgagaatgtggctgagcggtttggcatttcacgggagaagcaggatacctttgccctggcttcccagcagaaggcagcaagagcccagagcaagggctgtttccaagctgagattgtgcctgtgaccaccacggtccatgatgacaagggcaccaagaggagcatcactgtgacccaggatgagggtatccgccccagcaccaccatggagggcctggccaaactgaagccggccttcaagaaagatggttctaccacagctggtgagactggtccggggtaggggtatgagaaagcaggccatggccaagctgagatgctgcactctgaccaccacggtccatgatgacaaggccccaaagaggagcatcactgtgacccaggatgagggtatccgccccagcaccaccatggagggcctggccaaactgaagcctgccttcaagaaagatggttctaccacagctggaaactctagccaggtgagtgatggggcagctgccatcctgctggcccggaggtccaaggcagaagagttgggccttcccatccttggggtcctgaggtcttatgcagtggttggggtcccacctgacatcatgggcattggacctgcctatgccatcccagtagctttgcaaaaagcagggctgacagtgagtgacgtggacatcttcgagatcaatgaggcctttgcaagccaggctgcctactgtgtggagaagctacgactcccccctgagaaggtgaaccccctggggggtgcagtggccttagggcacccactgggctgcactggggcacgacaggtcatcacgctgctcaatgagctgaagcgccgtgggaagagggcatacggagtggtgtccatgtgcatcgggactggaatgggagccgctgccgtctttgaataccctgggaactgagtgaggtcccaggctggaggcgctacgcagacagtcctgctgctctagcagcaaggcagtaacaccacaaaagcaaaaccacatgggaaaactcagcactggtggtggtggcagtggacagatcaaggcacttcaactcatttggaaaatgtgaacactgatgacatggtataggagtgggtggggtgttgagccacccatcagaccctctttagctgtgcaagataaaagcagcctgggtcacccaggccacaaggccatggttaattcttaaggcaaggcaaatccatggatgagaagtgcaatgggcatagtaaaagtgcatgaatttatcttaaa

SEQ ID NO: 5584 - DNA, 1032 bp, Homo Sapiens
  misc_feature (409)..(452): n is a, c, g, or t
gcaccccctcatggaggaattgccttagggttagacagactgatatgccttgtcactggatctccaagcatcagagatgtcatagccttcccaaagtccttccggggacatgacctcatgagcaataccccagattctgtccctcctgaggaactgaagccctatcatatccgagtctccaagccaacagactccaaagcagaaagagctcattgaatcatgcataccatgcagaaagttgagcttttaggttttgtcctctttgcttccccaaggctaaagtcagatctagagttctgccacaggtctaacaatcaagtctttagatggaaggaatccaggcaacattcttcaccacaacgaagaaacagataaaagatacccaattttgacttgatttcatgcatcnnnnnnnnnnnnnnnnnnnnnnnnnnnnnnnnnnnnnnnnnnnnacttaggtgtgaaagatggttctttgttgaaataatatagtggtttagtgttttcaaatcatgtttctcatacccagatagtagattattcacttaggacagaggtaatcaaattatgtgtgaaatgtaggaaaatgcttgcccctgtaaactagtgagttgatggagcatttgctccatcatcctcatcaagagaatcatataaattaagctttataatgacatttcaaccatcaacataatatagtgaggagtagcataatattttttaataatgcagaaaacatcactgaaatgagagtcacaaatttttcttcagtgtttcagcctgagtaagttacataaacctcgcttagcctcccttcctgctaatgtgtaaaatacatacttgccctggctacctcaccgggctgttattgctggaatcagaggagataacatatatggaagataaagtgaataaaagtactttgaaaaactataaagcattccacaaatatgagatgatggtattatccatccataaataggtagatatatctctattttataggtttcagattaaacaaaactgatatcg

SEQ ID NO: 5585 - DNA, 691 bp, Homo Sapiens
  misc_feature (484)..(512): n is a, c, g, or t
cgagctaggtatagtgaccgtgaactttctaacgcataatattctgtgatacagccattccgtacatgtgtgaagtcctgcataactttcgaactttgttaaatgttggcactaggagtcatcagatctaggcttcatcattttccagtgagaagcagagacccaaagggcctgttacttgtgcttggtcaggggactgtctgtcatgcctggaggctcttcggcacacttccccatctttcccttctgccactgtggcttcaagcacctctgttcatagagcgtctctgaaattgagtctcggtcatgacttatcccgaagtagagcaatgtgtttcctctcattgtagtttcaggactttgtcagtacaagctctgccctaggcttgttactttatactcatatcctgaaaagatgtgatttcatctatgaaggggtaaaatattggtttgtatttaattgtttgaaataaaagtgatcccnnnnnnnnnnnnnnnnnnnnnnnnnnnnnacatgtcggccgcctcggcctctagaatggtcgtgaggtgagtgggcatctgtccagcctggaagaggggcactaggtgactccctcccctgctgttgtaaatactgtaattatcggagaatttaaattattctcatttgtaactgcgtttccgggtcgcgcccaagtcatttggtact

SEQ ID NO: 5586 - DNA, 398 bp, Homo Sapiens
gggcagtggtatcaacgcagagtgtccattacggccgggcactgcgataggaatcatgtctggtcgcggcaaaggcggaaaaggcttggggaagggtggtgctaagcgccatcgtaaggtgctccgggataacatccagggcattacaaaaccggctatccgccgtttggctcggcgcggtggcgtcaagcgcatttccggtcttatctatgaggagactcgaggtgtgcttaaggttttcttagagaacgttattcgagacgccgtcacctatacggagcacgccaagcgcaaaactgtcacagccatggatgtagtatatgccctaaaacgtcaggggcgcactctgtatggcttcggcggctgaatctaagaatacgcggtctcctgagaacttc

SEQ ID NO: 5587 - DNA, 522 bp, Homo Sapiens
  misc_feature (249)..(372): n is a, c, g, or t
gggatcgtgcgtcagagtgagcccggatggggcggcgggcttcgggagcgcccgggctgatccgagccgagcgggccgtatctccttgtcggcgccgctgattcccggctctgcggaggcctctaggcagccgcgcagcttccgtgtttgctgcgcccgcactgcgatttacaaccctgaagaatctccctatccctattttgtccccctgcagtaataaatcccattatggagatctcgaaactttannnnnnnnnnnnnnnnnnnnnnnnnnnnnnnnnnnnnnnnnnnnnnnnnnnnnnnnnnnnnnnnnnnnnnnnnnnnnnnnnnnnnnnnnnnnnnnnnnnnnnnnnnnnnnnnnnnnnnnnnnnnttttggggcccccctcgccccctaaaaaagttttcaaaaccctttcttttgggggcccgggcgccccaagggttaagggaaacggggcccaaagctggtttcccaaaggaaaacccggggcaaggaacaagggcttggaaatcccccccc

SEQ ID NO: 5588 - DNA, 337 bp, Homo Sapiens
  misc_feature (282)..(282): n is a, c, g, or t
aagttccaggatccatgtgcaggatatgcaggtttgttacatagggaaacgtgtgcctcggtggtttgctgcacctatcaacacatcacctcggtattaagtccagcatgtattagctatttttcctcatgttctcccacccccccccacagccccctggtaaattaatttcttattctccttaatattccatacacattcagattccttctcccctacaaaaatatttgctatttttgcccttgctatttctcatacttagatcaatcatacactaaattntattttttccataaactatttttaaaaccttttaaaagcggggcgggcaaccaac

SEQ ID NO: 5589 - DNA, 838 bp, Homo Sapiens
ctgcaggaggagccactgtttttcctgaagttggagctagtgtttggcccaaaaaaggaactgctgttttctggtataatctgtttgccagtggagaaggagattatagtacacggcatgcagcctgtccagtgctagttggcaacaaatgggtatccaataaatggctccatgaacgtggacaagaatttcgaagaccttgtacgttgtcagaattggaatgacaaacaggcttccctttttctcctattgttgtactcttatgtgtctgatatacacatttcctagtcttaactttcaggagtttacaattgactaacactccatgatggattcagtcatgaacctcatcccatgtttcatctgtggacaattgcttactttgtgggttcttttaaaagtaacacgaaatcatcatattgcataaaaccttaaagttctgttggtatcacagaagacaaggcagagtttaaagtgaggaattttatatttaaagaactttttggttggataaaaacataatttgagcatccagttttagtatttcactacatctcagttggtgggtgttaagctagaatgggctgtgtgataggaaacaaatgccttacagatgtgcctaggtgttctgtttacctagtgtcttactctgttttctggatctgaagactagtaataaactaggacactaactgggttccatgtgattgccctttcatatgatcttctaagttgatttttttcctcccaagtcttttttaaagaaagtatactgtattttaccaaccccctctcttttcttttagctcctctgtggtgaattaaacgtacttgagcc

SEQ ID NO: 5590 - DNA, 311 bp, Homo Sapiens
  misc_feature (140)..(243): n is a, c, g, or t
  misc_feature (254)..(268): n is a, c, g, or t
taaataaggatggataaattgtagcgtatgcaccattcattatgctaagacattttaaagtaattatgagaaacgctctactaatgatttgtttttatttgtatttttctgcttattagacaaatatatactcattttannnnnnnnnnnnnnnnnnnnnnnnnnnnnnnnnnnnnnnnnnnnnnnnnnnnnnnnnnnnnnnnnnnnnnnnnnnnnnnnnnnnnnnnnnnnnnnnnnnnnnnnccttggtgggnnnnnnnnnnnnnnnaaaaaattttttaaacacttttttgggggcggggccccccaag

SEQ ID NO: 5591 - DNA, 506 bp, Homo Sapiens
agcatttggggttgggttggccctactccagcctggagctccctgagggagcctgcactccctgctcccaatccccgctactggtgcagggatgcagcctggagctggcgtccttgttctgggcctgctgctgccgccaccccaggaggccccaggcctgtcctgaattgacatcagtgcttccctgaactgccctcccccacccctggcattatcccaggaaacttatgttttctagaagctaagcagctgctgggactcagggactggtgcaggtaggctgagtggcagctcagtcctagaaggtctctgaagatctggactgaggaccctgctactccccaagccagagcccatcagccaggcctgctgtgagccacctgcctgtggagtgctgagctcaaccaaaggctggcaagctctgggcctcatttaagggattctgatgagccgatgggccctggaggcagcccattaaagcatctggctcgtttttggaaaaaaaa

SEQ ID NO: 5592 - DNA, 988 bp, Homo Sapiens
  misc_feature (872)..(898): n is a, c, g, or t
gggacccctacagagcttgagagccacagacgcctggattctccggcctcccctcaccgcacagttctggccacagctcccgctcctgtgctggcacttctgtgcgtcgcagagcaggggaacaggagctcagcccccatcaccgtggagccaaagtgtttgctatcatccctttctgcggccttcgaccagcccaggctcggcgaccacccagtggcacagaaccgaggagctgccattaccccccatagggggcagtgtcttgttcctgccagcctcagtgtcttgcttctgccagctccttcccctaggagggaagggtggggtggaactgggcacatgccagcaccacttctagcttccttcgctatcccccaccccctgaccctccagctcctcctggccctctcacgtgcccacttctgctgggcctttagccctagaacctgcaggtggtgggggcggctaccaagaaggaacagaggtctctggggaggagtctgggtggtccagccctgatgattggccccacctcctgctgccccataaccctctcttcatttcggctttttcatttaccctcatttagagccatttgcagagatttagaaagatttacagtaacgaatggattcctatataaagattatttttatactttttgcagcaaaaggaaattgtaatatttgtacagtgttcaagtgaataaaaaccatgcctaagggtggtacgggccttggcggcccgccggggtgggcgccgactcccgcccccgccgaatgcggctccccccccgattttagctagcgcggcccccttgtgcggggggccccgcggccctttgagaaagcttttctagagagatttgtgtnnnnnnnnnnnnnnnnnnnnnnnnnnnctaacgtggacccggggccccggaatcgggccctcggcaacaggagcgttgtgggccacagaacaaacgggtctgtgtttttccgccccc

SEQ ID NO: 5593 - DNA, 603 bp, Homo Sapiens
  misc_feature (533)..(551): n is a, c, g, or t
ggataatcagacaggtttaaaagttgtgcatgtatgtatacagttgcaagtctggacaaatgtatagaataaaccttttatttaagttgtgattacctgctgcatgaaaagtgcatgggggaccctgtgcatctgtgcatttggcaaaatgtcttaacaaatcagatcagatgttcatcctaacatgacagtattccatttctggacatgacgtctgtggtttaagctttgtgaaagaatgtgctttgattcgaagggtcttaaagaatttttttaatcgtcaaccacttttaaacataaagaattcacacaactactttcatgaattttttaatcccattgcaaacattattccaagagtatcccagtattagcaatactggaatataggcacattaccattcatagtaagaattctggtgtttacacaaccaaatttgatgcgatctgctcagtaatataatttgccatttttattagaaatttaatttcttcatgtgatgtcatgaaactgtacatactgcagtgtgaannnnnnnnnnnnnnnnnnnaatcttttagtgtttacttcctgcagtgaatttgaataaatgagaaaaaatg

SEQ ID NO: 5594 - DNA, 727 bp, Homo Sapiens
  misc_feature (609)..(659): n is a, c, g, or t
aaaaggacagggagatccaaaaaaaagtaatctaggtccctcaagagacagaaacctcatgatcacaaagccacttatgatactaacgggcaaaatgaagagacaaaatctgtagataaaatcccttgtaaggatcgtgagaagcatgtatagaagcaaggaacaataaagagtcaagtggcaataaactactttatatacttaacccaccagagacacaggttgaaaaagagcaaattactgggcaaattgacaagagtactgtcaagcctaaaccccagttaagtcattcctctagactttcctctgacttaactagagaaactgatgaagctgcttttgaaccagactataatgaaagtgacagtgaaagtaatgtttctgtaaaagaagaggaatcttcaggaaacatttctaaggacctgaaagataaaatagtggagaaagcaaaagagagcctggacacagcagcagttgtccaggtgggcataagcaggaatcagagccacagcagccccagcgtcagccccagcagaagccacagtccttctggaagccagacccgaagccacagtagcagtgccagctcagcagaaagtcaggacagcnnnnnnnnnnnnnnnnnnnnnnnnnnnnnnnnnnnnnnnnnnnnnnnnnnncataagaagcataagaaacatgcaggcactgaagtggaattggaaaaaagccaaaaacacaaacacaa

SEQ ID NO: 5595 - DNA, 1467 bp, Homo Sapiens
gcggccgccgccgtgccgcttccaccacagtttgaagaaaacaggtctgaaacaaggtcttacccccagctgcttctgaacacagtgactgccagatctccaaacatcaagtccagctttgtccgccaacctgtctgacatgtcgggacccgtgccaagcagggccagagtttacacagatgttaatacacacagacctcgagaatactgggattacgagtcacatgtggtggaatggggaaatcaagatgactaccagctggttcgaaaattaggccgaggtaaatacagtgaagtatttgaagccatcaacatcacaaataatgaaaaagttgttgttaaaattctcaagccagtaaaaaagaagaaaattaagcgtgaaataaagattttggagaatttgagaggaggtcccaacatcatcacactggcagacattgtaaaagaccctgtgtcacgaacccccgccttggtttttgaactacgtaaacaacacagtacttcaagcaattgtaccagacgttaacagactatgatattcgattttacatgttatgagattctgaaggccctggattattgtcacagcatgggaattatgcacagagatgtcaagccccataatgtcatgattgatcatgagcacagaaagctacgactaatagactggggtttggctgagttttatcatcctggccaagaatataatgtccgagttgcttcccgatacttcaaaggtcctgagctacttgtagactatcagatgtacgattatagtttggatatgtggagtttgggttgtatgctggcaagtatgatctttcggaaggagccatttttccatggacatgacaattatgatcagttggtgaggatagccaaggttctggggacagaagatttatatgactatattgacaaatacaacattgaattagatccacgtttcaatgatatcttgggcagacactctcgaaagcgatgggaacgctttgtccacagtgaaaatcagcaccttgtcagccctgaggccttggatttcctggacaaactgctgcgatatgaccaccagtcacggcttactgcaagagaggcaatggagcacccctatttctacactgttgtgaaggaccaggctcgaatgggttcattctagcatgccagggggcagtacgcccgtcagcagcgccaatatgatgtcagggatttcttcagtgccaaccccttcaccccttggacctctgggcaggctcaccagtgattgctgctgccaaccccctttgggatgcctggtctcagctgcctggcgctcagcagtaacggccctatctgtctcctgatgcctgagcagaggtgggggagtccaccctctccttgatgtcagttgcgcctggcggggaggggtgaaacacttcagaagcaccgtgtctgaaccgttgcttgtggatttatagtagttcagtcata

SEQ ID NO: 5596 - DNA, 1011 bp, Homo Sapiens
  misc_feature (614)..(772): n is a, c, g, or t
  misc_feature (782)..(794): n is a, c, g, or t
  misc_feature (820)..(828): n is a, c, g, or t
  misc_feature (866)..(927): n is a, c, g, or t
accaaagatgtacttgagaccgtcgacgtttcatgaaagtattttgcacaggcattgaaactgaacatcagacatatgagagctttgtttggacttaatatgccggcaagtcatattgcttctaatccaaaagcaagtgcaaaaacgaaaaaggacaacatgaaatatgctagttgggcagctagtcaaataaacagagcttatcagtttgcaggtcgaagtaagaaggaaaccaaatattctcttaaggctgtcgaagacatgttggaaacattgcagatcacccagtcttaaggtttcaaaaactctttgacattagatttcacaactgcacaattgaacttattggcctgtaacttatttactaaatgctcagtgctatttatatactacagtaattttctgttaagaaggcagttgtaaagaatgtgtttatataaacctaaaaatgccttttactgctaagtggggagatgggggaaatccatggaagagagatttaagacttattgattgtacatcagtctcttcatatcacatatacatgtatatatataaaactctaatgtagtataaccttgttaaataaaccatgatgatttattaaacttgcnnnnnnnnnnnnnnnnnnnnnnnnnnnnnnnnnnnnnnnnnnnnnnnnnnnnnnnnnnnnnnnnnnnnnnnnnnnnnnnnnnnnnnnnnnnnnnnnnnnnnnnnnnnnnnnnnnnnnnnnnnnnnnnnnnnnnnnnnnnnnnnnnnnnnnnnnnnnnnncttggggggnnnnnnnnnnnnnaaaaaattttttaaaacctttttttnnnnnnnnnccccccaaagaaaagggaacggggccaaatctttcccnnnnnnnnnnnnnnnnnnnnnnnnnnnnnnnnnnnnnnnnnnnnnnnnnnnnnnnnnnnnnnccgagggtttttaaaaaacaccaaaagggatttctgggggttttttcggggaacctttaaaaaggggggccccaagggggcctc

SEQ ID NO: 5597 - DNA, 896 bp, Homo Sapiens
  misc_feature (136)..(136): n is a, c, g, or t
  misc_feature (196)..(196): n is a, c, g, or t
  misc_feature (875)..(875): n is a, c, g, or t
aggactctaaaggatcacttgacgttgataagcccttgagttcttcatctcagcaccaagagggagccctgtgttcaataaggccaccctttaagaatcaaatgataaaaggagggcccaagaagccacttgctcncgacccagattgtacagaagcccatggatttcagaaaattatctacattcagagaaagtnttaagaaaagagtgataggacaagaccacgacttttcagaatccagtgaggaggaggcgcccgcagaagcctcaagcggggcactgagaagcaagcatggtgagaaggctcctgtgacttctagaagtacatctacttggagaatacccagcaggaagagacgtttcagcagtagtgacttttcagacctgagtaatggagaagtagcttcaggaaacctgcagctcatccctaagaagagggtcaggtaaagaagattaggatgccaagacttggcctgcagaatgtcaggaatgtgaattaaaagctgctgtttccagacgctttttattctgagcaccttcactaccttgtatccagttcatctgggaactcctttttgcattttagaaaatggaaagaggcaggaaattatgataaactcatgtttaacagaaagagtttcactgactaaatgtatgtaattatattttgttgttgtagaagaaataaatagcaaatttgtggtattcttttttttaaacctgctctcattcctattaacactaagatcttagatttttatagtgataaatgggttgacatcattgtcgtttgtaattgtaaagcctcaaaagacaactgttcctactatgtaattatagacagaaataacaacttctgagtctatcatcattanggccagagatctgatacatgt

SEQ ID NO: 5598 - DNA, 805 bp, Homo Sapiens
tttcagaatgtgatgattcatttatcagtccagaaatcccaagtacaaaacttcaagatacaagaaggatcaaattatatcatatatatgattcaatttaaaaattcttagcccccttatatcatattatctagattataatagtaaaaaatcaagttacattcatatgaaactttcataaaaagaaatcaaatccagttttatgaaattttatagtacaattactttctagtgggtcttttcttaggtcacagtatttataattccatttacatctttataatttttaaaattagaaaacaaaaggatgtcaatagaaatctaaattttcacttgcaaaactcccttcagtttccaggccagtaacacatggtgatgtcgacttgtcctccagacatggacggctaccaaagaatccccagttcacggagcatgcaggcctctactcattaggaacgctttttggtttggctcacgtttcaagaaattgtggagcatgtccatgccgtccagagatcccccaggtttcaggattaggtttctgtatttcattccaacctccggattcattatcccttcttttttaaaacagctgtaaaacatatccatggaaaatacttcactccaaagatatccataatattggccatcgtatccccctgccaaatgtccaaaggtagctggcatatttgtgcctggagtagctgcaactcctaatatttctgagcagtatttggcatattcacttgcagcatccagcgatgtgttggtatgaagagactgatcaactttgctcaaaacaatc

SEQ ID NO: 5599 - DNA, 740 bp, Homo Sapiens
  misc_feature (665)..(667): n is a, c, g, or t
  misc_feature (669)..(669): n is a, c, g, or t
  misc_feature (671)..(671): n is a, c, g, or t
  misc_feature (674)..(675): n is a, c, g, or t
  misc_feature (677)..(677): n is a, c, g, or t
  misc_feature (679)..(680): n is a, c, g, or t
  misc_feature (682)..(684): n is a, c, g, or t
  misc_feature (686)..(691): n is a, c, g, or t
ggttctaagacttactctaagatcttagattctctgtgtctaagattctagatcagatgctccaagattctagatgattaaataagattctaacggtctgttctgtttcaaggcactctagattccattggtccaagattccggatcctaagcatctaagttataagactctcacactcagttgtgactaactagacaccaaagttctaataatttctaatgttggacacctttaggttctttgctgcattctgcctctctaggaccatggttaagagtccaagaatccacatttctaaaatcttatagttctaggcactgtagttctaagactcaaatgttctaagtttctaagattctaaaggtccacaggtctagactattaggtgcaatttcaaggttctaaccctatactgtagtattctttggggtgcccctctccttcttagctatcattgcttcctcctccccaactgtgggggtgtgcccccttcaagcctgtgcaatgcattagggatgcctcctttcccgcaggggatggacgatctcccacctttcgggccatgttgcccccgtgagccaatccctcaccttctgagtacagagtgtggactctggtgcctccagaggggctcaggtcacataaaactttgtatatcaacccnnnananaannanannannnannnnnnacatgtcgggccgcctcggcccctcgaggagctttctaaaccatttctt

SEQ ID NO: 5600 - DNA, 526 bp, Homo Sapiens
tttttttagatgttttaggactttaatgttctttacatattcaacataaaatactgacaatagataaacaataggggaaagacttttcagcaaagtatcactctcgtagtcatacattacaaagaaaacagtagagaacaaaggatagggtaatttaacagaaatgtttagtttaatggcataattgaaaaacaaccaaccaatcaactttctcttctacctatggaaagaatggtaaaaatgaatcaagaacttctaggtctttttcataaaacagcttaaaaagaggaaggcgaagactggggagggggtacaactcttgctaatggaatgctataatgcacaaggtcaaggatttaataaattctaaaagtgtctacatatatcagtgataactgtattattagaaatataaatgtatagaaatataaagtatatggtattaaaaacagaccttgctaatataaacatatgtaaggatggcaccttgcccgaagtacaagcttaaaatcggtctaagtgtggc

SEQ ID NO: 5601 - DNA, 905 bp, Homo Sapiens
ggggatgggctctgaggcggcgcagctgctggaggctgccgacttcgtggctcgcaagcaccggcagcagcggcggaaggaccccgagtggaccccctacatcaaccaccccatcggtgtggcacggatcctgacccacgaggcgggaatcactgacattgtggtgttacaggcggccctgctccatgacacggtggaggacacagacaccaccctggatgaggtggagctacactttggggcacaagtgcggcgcctggtggaggaggtaacagatgacaagactctgcccaagctggagagaaagaggctgcaggtggagcaagcgccccacagtagccccggggccaaactggtgaagctggcagacaagctgtacaatctgagggacctgaatcgctgcaccccagagggatggtcagaacatcgagtccaggaatacttcgagtgggcagcgcaggtggtgaaggggcttcagggaacaaaccggcaactggaagaggctctaaagcatctgttcaagcagcgggggctgacaatctgatcagtgcttgaagctatccagaggcacaactccagcctcgttcaggccggacaggattcatacgccatcttttctgtgtctcctgagctccctccatccttcccagatattagaggccaaaaaaagacttgcattttttctcagtctgaaggtctcctgctaactaagctgagccccgcgtggtgggaatcagatgtacccatccatttctgatgcactcaccgcctctccccaagtcttgggtctgtttgctattttgcatggtgggatctctggcccctcagggacttgagattatttaagtactagttcctaacacgttctggaaaataaaaataactctgggttaaggtttaaagaa

SEQ ID NO: 5602 - DNA, 1403 bp, Homo Sapiens
  misc_feature (809)..(866): n is a, c, g, or t
  misc_feature (877)..(877): n is a, c, g, or t
ggggagggcgggactggactcggcttgggcgtgagatggcggcggcagcggtgagcagcgccaagcggagcctgcggggagagctgaagcagcgtctgcgggcgatgagtgccgaggagcggctacgccagtcccgcgtactgagccagaaggtgattgcccacagtgagtatcaaaagtccaaaagaatttccatctttctgagcatgcaagatgaaattgagacagaagagatcatcaaggacattttccaacgaggcaaaatctgcttcatccctcggtaccggttccagagcaatcacatggatatggtgagaatagaatcaccagaggaaatttctttacttcccaaaacatcctggaatatccctcagcctggtgagggtgatgttcgggaggaggccttgtccacagggggacttgatctcatcttcatgccaggccttgggtttgacaaacatggcaaccgactggggaggggcaagggctactatgatgcctatctgaagcgctgtttgcagcatcaggaagtgaagccctacaccctggcgttggctttcaaagaacagatttgcctccaggtcccagtgaatgaaaacgacatgaaggtagatgaagtcctttacgaagactcgtcaacagcttaaatctggattactacagccaaataatcagtgttttatatgagagtaaagcaaagtatgtgtatttttcccttgtcaaaaattagttgaaattgttcattaatgtgaatacagactgcattttaaaattgtaattatgaaataccttatataaaaccatctttnnnnnnnnnnnnnnnnnnnnnnnnnnnnnnnnnnnnnnnnnnnnnnnnnnnnnnnnnncaacacccaanaccctgtgtcggccgcctccggcccttggaaaagctttctaaaccattcgttttgggggcgccgggccccagtagggtaaggggaaccatggtccattacctggtttcccataggaagatcccggggccatggaactagggggcttgggatttcctcaccacaataaaaaaaacgcccccgggggggcaaccccgaaggcggtctcttgaaacaaaaatcccaaaatgggaggtctctgggagggcccttatacgtgggatcctaactccaaccagggagggcccaaagccgggagctctcaaaattacaaaattataacgccccccggccccttggccaactcttattcgaagagaaacgggtggggaaattccaattaaacccaattcctgcccgcaacctgggaaagccccatccacacaaacggggaattgaatagaacccttgaaattccgcccaaggggggaaattacaaccaccccttgggaccgcccctgtggggaaataaaacatattggcccccct

SEQ ID NO: 5603 - DNA, 880 bp, Homo Sapiens
ggatggattgtgttggcggcaatggcaagattcccttgctgagaacatgcagatgaataaccttatagctgggatgcagagaggagaaagttctgtaggtaataagtgcactgtattccctctgagctacttcctgggcatagttacatgtatggccagtgtgtgtacttgagccatcaggctcagacacttgttgaatatacctctcattgcattagtttgtaattgtgctagtgctgggtgctgagctcagctgcccggatgacctttccagactgaaggacatactcccctaacagctgggagtgctgctggctggccatttacttccagcccttatgaggagtttcccctgctgaagagccctgcctgccccagatcatacccccttcctgcctgtaacccttaccggctccatatggggtacaaagggctggcctcctcaccccaacttgggaaaccctctggggccatcccagctccagagccccttgtggggtcagtgagacctcattgtggccacattacagcccagtgcctctccctgacaagcctgtacccagccggctcagcccacagcactgtcctatgaaccttcctgcacgccattctccacctcagtatctgctttcggggaacccaacctgcgacagtgcttctgtgtgttttcagtcctgcaggtttgaactctgactttggagacttttccagttatctcgtggaatgacagattgtgcctgtatgatatcaggcacaattaatgcaaattaggcagacctatttattctagatgtgaatttgctatttattttaaatgttgattttatgtgttatgtgactctgaacttattgccaaataaaagtttgaattgtaaaaaaa

SEQ ID NO: 5604 - DNA, 383 bp, Homo Sapiens
ggattgggaatgtggtgaagacgatgcagtttgagccgtctaccatggtgtacgacgcctgccgcatcattcgtgagcggatcccagaggccccagctggtcctcccagcgactttgggctctttctgtcagatgatgaccccaaaaagggtatatggctggaggctgggaaagctttggactactacatgctccgaaatggggacactatggagtacaggaagaaacagagacccctgaagatccgtatgctggatggaactgtgaagacgatcatggtggatgactctaagactgtcactgacatgctcatgaccatctgtgcccgcattggcatcaccaatcatgatgaatattcattggttcgagagctgatggaagag

SEQ ID NO: 5605 - DNA, 497 bp, Homo Sapiens
gggcaatgggaaggctccatactgcagggtgcgaaggggccggcgccgctgccgagttacgagtcggcgaaagcggcgggaagttcgtactgggcagaacgcgacgggtctgcggcttaggtgaaaatgcctcgtgtaaaagcagctcaagctggaagacagagctctgcaaagagacatcttgcagaacaatttgcagttggagagataataactgacatggcaaaaaaggaatggaaagtaggattacccattggccaaggaggctttggctgtatatatcttgctgatatgaattcttcagagtcagttggcagtgatgcaccttgtgttgtaaaagtggaacccagtgacaatggacctctttttactgaattaaagttctaccaacgagctgcaaaaccagagcaaattcagaaatggattcgtacccgtaagctgaagtacctgggtgttcctaagtattgggggtctggtctacatgacaaaaatggaaa

SEQ ID NO: 5606 - DNA, 821 bp, Homo Sapiens
  misc_feature (693)..(701): n is a, c, g, or t
cacctggaaatcactgtttaaggggtgggctagtgtgtttgtgtttccattctaagattgagtctggcagtccctgttttttttgcatgggggtaactgctcttggattttttttaattgcagtatttgtgtgattgcaataataaagtttggtttggtttttacagtcatgcgcagggacgatccttgttctctgctgtaaactgtaaaaagtttatggagacttaaagtcttgatgttgtgaagcagaggttattttgtggaaagattaaaaggattttgttggtacctggttttgtgttgtgtatatatacatgaggttgaacagtgaaaggaaagttcagtagtgatgttagaagggtaactatgacaaagatacttttgagataacatttaaaagtactttatattttacataatagcatgtttcattttgattaaaagctaccaaaggaattttgatcatggcataagtgtttaaagcaatattttctggaatataccaagtttatataatttgattttgtgctaaattattaagagtctctttttgaaacatgcgggtttgaaatatgacaccttgtgggtttccatattaaaatcctcactctttaattgtcatttctatctttgaaaattttcatttatgagttccatgatatgtggtctaagaaagaccaaacagatttctannnnnnnnncttataagttcgttgtgtctagagattgttaatattgtaatttaatgtagacttactttgaataaaattagtttaattggccttaaaattacattaataaaactttgtgatatgcaaaaa

SEQ ID NO: 5607 - DNA, 1227 bp, Homo Sapiens
  misc_feature (76)..(80): n is a, c, g, or t
  misc_feature (82)..(84): n is a, c, g, or t
  misc_feature (88)..(90): n is a, c, g, or t
  misc_feature (94)..(95): n is a, c, g, or t
  misc_feature (99)..(103): n is a, c, g, or t
  misc_feature (401)..(416): n is a, c, g, or t
gggcccacaaaagcgaaatggtgtttttaagaaaagcttttttgggaggggcccgagggccgcccccaacatggtnnnnntnnntttnnntgtnntgtnnnnntttttggccaggtccaccttttttattttaataaaatcagaatatgcacagcacatgcagtgctagcatctaaactaatacaataagcaattactaaagctacagtgacttgaggttcaatctttacattcagcaagtttaaatccttacatgatttttgaaaccttattaactgaaaatattgcttgctgataaaacttgctcaaatgctattgctgaatgtacaagtcactgattatgccaatacaacaaagataaccacatgtttgaggattgcaatgtgccagacattcactgnnnnnnnnnnnnnnnncacacaactaaacaaaatccacacaacaaacatctgagaatctggacacttcacatcagtgttttgaagtgtttcattaatatcttaagacaagtgtatcaaaaccttggcatgatttaatttcaagtcgacaattttgtcttaaataacatcagaaaattacagctacactgccaacgccgggtctgcttaatttgactcaagagtttaacatgacttaaacattaaaagctcacactaccccaaaatatataatttcacgcatacggtgacattcaacattcaagtgccagtgtttttgtactgtcttttggtcaagtttctttaaactttcaaagaatcacttttaggcttacaaaaataaatatttgtcaaaatgttcaataaatattacacaaaactagcagcaaaaagtatctagaaatctgtcgtgtgcaaatagttttcttcccaactatcattcccatggtcccaaataaattttagaatctagtcccatcccctccctagacaagctgcgttcaacaatctccaagagacaaagtaagattggaagtttaaggacacgcacacaagacatatatataaaattctctgaatgtgcaataaaagaagtactttgtaaaaagttatgggcaaaatgtacaagggcctaaacctagactaattgaaatagcaccataacaaatgacctcaatactgtcaagtgcacctacttaataaaagttttagaacaaggcacaatacacttgaaaatctattgcactttaggaaatttttgccgtcttcctatgccactgtaaaaagatgg

SEQ ID NO: 5608 - DNA, 568 bp, Homo Sapiens
  misc_feature (485)..(496): n is a, c, g, or t
ggggcactctgccggcaacgccgaggcgcttctgcatctgtgggccgagcattcttcaggtcatctgaaccttctgagaaaacatggtcaacgtcttgaaaggagtgcttatagaatgtgatcctgccatgaagcagtttctgctgtacttggatgagtccaatgccctggggaagaagttcatcattcaagacattgatgacactcacgtctttgtaatagcagaattggttaatgtcctccaggagcgagtgggtgaattaatggaccaaaatgctttttcccttacccagaaatgaaaatactcaatatggaccatttaggaattataagcagcaactgtgaaagacttgccactcaatatcttaggtgactgattagacatagagggttgttttaggagcatgccacgggaaagactgagggatcatgatcatttgttcagaaaaaaagcccctgaactgattttgttaccatagaatttnnnnnnnnnnnngctttaacagttggctgtaatttggcttttattatcctttattaaaatacaaatgtcaatgcttaaaaaaaa

SEQ ID NO: 5609 - DNA, 928 bp, Homo Sapiens
  misc_feature (54)..(54): n is a, c, g, or t
  misc_feature (787)..(787): n is a, c, g, or t
ctcaacacgacctactacatcacccagttactggggaaccatgaattcgcagcncctgaaatcatcatcgggaaccatgtctccttgacctcggatacgtggagtgttggagtgctcacatacgtacttcttagtggcgtgtcccccttcctggatgacagtgtggaagagacctgcctgaacatttgccgcttagactttagcttcccagatgactactttaaaggagtgagccagaaggccaaggagttcgtgtgcttcctcctgcaggaggaccccgccaagcgtccctcggctgcgctggccctccaggagcagtggctgcaggccggcaacggcagaagcacgggcgtcctcgacacgtccagactgacttccttcattgagcggcgcaaacaccagaatgatgttcgacctatccgtagcattaaaaactttctgcagagcaggcttctgcctagagtttgacctatccagaagttctttctcattctctttcacctgccaatcagctgttaatctgaattttcaagagaaaacaagcaaacataactgatcagctgccggtatgttcatcgtgtgaaattgcattccaagtgagctgtgctcagcagtgcttggacacagagctgcaagctgcgctggggtggaggaccgtcacttacactctgcccaaggcagaggtcgcattgctgtatcacagtattttattcaggtttctgcaaaaaattaaaaagataactttttttaaacaaacatgaaatagaatttttgcaaaatttaacgnttttcaaagatttattccaagggaaaacaaaaatggccctatggttcaacccaactgggtgtttaaatggaaccaagggatacctggtggcggtcctctgggggggaaagaacgccacccttaagggtgggcgggggccac

SEQ ID NO: 5610 - DNA, 370 bp, Homo Sapiens
tgtagttgtttgagcaaacacaaagaaactttgtgttttgaagacaatcagaatgattacctttctacctctaactaatcaggtattgattgacaactttttggcattataaataaagtaaaatagatctctgcattccaaaatatgttttttagtttatttatatcctgaagaaatggtaagttttcactggaactgattacagtaaacaataatatgtccccttagtctttctgacatttttatatagattgagattgaaaaaccgtgcatttggggcagtggtattatggtcatttcgttgctattttctgttttaataaaatcctagaactagtagcaaccgagtaaagattgagtttgcaagata

SEQ ID NO: 5611 - DNA, 1633 bp, Homo Sapiens
  misc_feature (126)..(126): n is a, c, g, or t
  misc_feature (168)..(168): n is a, c, g, or t
  misc_feature (396)..(396): n is a, c, g, or t
  misc_feature (399)..(399): n is a, c, g, or t
  misc_feature (627)..(640): n is a, c, g, or t
  misc_feature (1049)..(1120): n is a, c, g, or t
  misc_feature (1276)..(1300): n is a, c, g, or t
  misc_feature (1424)..(1436): n is a, c, g, or t
tgggatgagatgcaccacaaggttaagatcgagaaggaaatgggaatgtgcaacacacaaaattctttggaacactggaacctgactattttaaggacatgcaccactatttaggaaaactcaganaattgttataagaagagagacccattgaattttggcatccangatgggagcacaggtttctctagtagattagcagctacacaagatctgccttttattcatcagtcttctgaattaggtgacttagatacctggcaggaaaataccaatgcatgggaagaagaagaagatgcagcctggcaagcagaagaagttctgagacagcagaaactagcagacagagaaaagagagcagccgaacaacaaaggaagaaaatggaaaaggaagcncancggctaatgaagaaggaacaaaacaaaattggtgtgaaactttcataacacatgttcaaattttatcatgccagtaggagaaatctcagctccacaacccaagcaacatttgtatggatttaagagtattttaagaagacatactgcttgattttaatacattgatcaggccatccaggacaccacgattctcccaaagtaccttgaactcttagtgattgagactcnnnnnnnnnnnnnngacttgagacaatgttttcttcaacatgctccaaatataagacatttgtttgctgtacagaaagtatcacaaatggaatatatcagtacctctcaagctagtgtttctagctaaataaatgggtgtatataattttatggtggaaaagaactgtactgtctgttatgatttccttcaatgtgcataatgataaaataaataattttaatattcttttgtttccatggttacctgacctaaattagataaattgtagggctttagctttcttatttttgtcaaaagttggtgttgacatacattccctctaatttgaactggtattgtttacgtttgatacaacattaaggaatttgatgattttcatttcatgaaaatgacattaaatgcaataattttacttatcctnnnnnnnnnnnnnnnnnnnnnnnnnnnnnnnnnnnnnnnnnnnnnnnnnnnnnnnnnnnnnnnnnnnnnnnntaaacacaaaaatttgtcggcccgccttcggcccccaaaaaattttccaaaacatttcgtttgggcgggccgggccacataaggcaaaggtgcccctgggcccttaccgcgttcccaaggaaaaccctgggaattgtgacaaggggctttgaattnnnnnnnnnnnnnnnnnnnnnnnnngcgggccaaacccgaagggcctgtgaaacaaaacccaaattgggagtctcttaaggcccctttccttggatccttttcaccccgggaattccaaaaagcgaggctccctatccccaaattatannnnnnnnnnnnnttggaccacttttttccaagagaacgtggtttgatattctccttttagcgtctcctccccccgaaactgtggtaaaccccctccccaccaacagggtacatggacgcaaaccctgaaaattcgcccaagcggacttttcacacacccctttggctcaccccctgtccggcattaaaataactccggccgccgttggg

SEQ ID NO: 5612 - DNA, 411 bp, Homo Sapiens
  misc_feature (216)..(251): n is a, c, g, or t
agtctaaattttttcatcctcctatgcatcataagcatgtttgtaatattttcaaaaatagttcttgatgctacaggaatttcaagcctgtggtgaatgttagtatttaccatagggagtgaagtggagttatggtttcattcaatagagtattgctgattatacttgagtggaatcctttcctcacgtactcccacagacgtctgggcctggaannnnnnnnnnnnnnnnnnnnnnnnnnnnnnnnnnnnagaaaaacaccacttttattatgtacaataaaatatttcattagcttgaattgtatagatttttaaaaattcaatgaaagcatgttgtttaatttctttttaaaatcactgttgggctttgaaagcattgagaatataatatgaaattatgacaaaaaaa

SEQ ID NO: 5613 - DNA, 1185 bp, Homo Sapiens
  misc_feature (145)..(145): n is a, c, g, or t
  misc_feature (147)..(155): n is a, c, g, or t
  misc_feature (157)..(165): n is a, c, g, or t
  misc_feature (167)..(167): n is a, c, g, or t
  misc_feature (169)..(176): n is a, c, g, or t
  misc_feature (267)..(336): n is a, c, g, or t
  misc_feature (375)..(401): n is a, c, g, or t
ctagttccatggacccagggatctcccctagggaaaaccagcctatgaccccatgtttccactttaccctactgggggcccgggcgcgcccaaaccgaaatggtctaggaaaagcttctccgaggggccgagggcggccgaccangnnnnnnnnntnnnnnnnnntntnnnnnnnngcaattagaaatttatttttcaagtaaaatctgtattgcagttcaggaaattttatttaaacacatttgctcaagtcaaatgtaattatannnnnnnnnnnnnnnnnnnnnnnnnnnnnnnnnnnnnnnnnnnnnnnnnnnnnnnnnnnnnnnnnnnnnnatcaagcctgtagtgtgctgtgactgcacctgtgaacannnnnnnnnnnnnnnnnnnnnnnnnnnggcaagaccctgcttctttcagaagtctgagctctttcaaatctcgacaaacagtgtagaaaactccaagaagaatgttaatgtaggcagcatagaaatcagctgaatactctggaggatgatcatgggacaggatcttttgaaggtttgcctatgctgtaatcagggaaatataagacaaacggctcaaagcatccagtatttggacgaaacttttcccaaacaatttcactgagaaagagaacagtcacatttctgtcagccaattcttgtaatctaagaaatccaggcaaaagatttgcttccatatctcttagatactctgctttatctagaacaatatatacagtctgatctttaagattttcagctgtggttacttgtttaaacaagcgaacaaagtcattaaatgtttcacaggttatttcagtagaacatccatcctctgaagaactaagatgattcaatttgtttaaaatttgttccaaaagcagcctcaatgtaaagcattcaacacaattcacaaacacatgtgggagctctaaagttttcaacaacgtttgtgttacataggtctttccactagcagtatgtccataaataaaaatggatggaaagctgaaatgatgtctctctccaaacaaggactgcaagatggacacttgagactcgcgacaaagcaccacgttttccaagtggggcattctggcaggcaccaccgcagaggccagtgcagccagcccacaggacccttgcacaagacggagcctctcccgagtctccc

SEQ ID NO: 5614 - DNA, 550 bp, Homo Sapiens
ctgaggagacaggtgtacctcaaacgagactccagtaaagagctgagcaagcttacggccgcccttcctcgtgccttggagtatctgaagcaggaggtggaagagcgtttcaatgagagtggtgatccaagctgcgtgattatgcagaactgggctaggattgaggctcgactgtgcaataacatgcagaaagctcgggaactctgggatagcatcatgaccagaggaaatgccaagtacgccaacatgtggctagagtattacaacctggaaagagctcatggtgacacccagcactgccggaaggctctgcaccgggccgtccagtgcaccagtgactacccagagcacgtctgcgaagtgttactcaccatggagaggacagaaggttctttagaagattgggatatagctgttcagaaaactgaaacccgattagctcgtgtcaatgagcagagaatgaaggctgcagagaaggaagcagcccttgtgcagcaagaagaagaaaaggctgaacaacggaaaagagctcgggctgagaagaaagcga

SEQ ID NO: 5615 - DNA, 829 bp, Homo Sapiens
  misc_feature (578)..(578): n is a, c, g, or t
  misc_feature (758)..(758): n is a, c, g, or t
gggggatgactgggggatcccggcaagtaacatgactaaaaagaagcgggagaatctgggcgtcgctctagagatcgatgggctagaggagaagctgtcccagtgtcggagagacctggaggccgtgaactccagactccacagccgggagctgagcccagaggccaggaggtccctggagaaggagaaaaacagcctaatgaacaaagcctccaactacgagaaggaactgaagtttcttcggcaagagaaccggaagaacatgctgctctctgtggccatctttatcctcctgacgctcgtctatgcctactggaccatgtgagcctggcacttccccacaaccagcacaggcttccacttggccccttggtcaggatcaagcaggcacttcaagcctcaataggaccaaggtgctggggtgttcccctcccaacctagtgttcaagcatggcttcctggcggcccaggccttgcctccctggcctgctggggggttccgggtctccagaaggacatggtgctggtccctcccttagcccaagggagaggcaataaagaacacaaagccaaattantttataaaaaacccctaaattaaaaaatgtcggccggcctcggcccctcgagaaacttttctagaaccattcgttttgggcggcgggcccccgtagggaaaggggaacctgggccatagctggtttcctaggaaaatcccgggccatgaacaagggcttgggattcctccccaaataaanaaaccccccggggggcaaaccgaggggttttgaaaaaaattccaaatgggagttctggagggcccttaacg

SEQ ID NO: 5616 - DNA, 642 bp, Homo Sapiens
  misc_feature (325)..(336): n is a, c, g, or t
gatactcaagatctttactgatttaactataacagcaaccattgatgagaatttaattttttccttaatttccaaacatctgctggtttggaagaatagttaaaatacaaaaacaactgatcatggaatcacacaggactgcctcaaggactgcgtggtaccctctgctatccatccacacacagtgaaatggatgggagggatgagggaacaacacatcatgggagacaaagggaagaccaaggaaagtgctggcagtctccgcttttccattcagaatggatggaactgggccgttagtggcactaagacagggcagggctannnnnnnnnnnnaaataaaatattttaaagatgcataaaatggacaccttagcacgtgagtgtcctttgggctcttcaagacaccttctttaaggtttacccctggagtagcagagggtctcctcacccaggtggaaagagatgggctccatctgcagatgaaggaaaggcactggcgcacagcactcagcaatgtagatacaggcaccaggtaggagcaggatggcttacccagcaacctgcctcttagctccctgctagtgttcttccctcctccccagtttccagttaaaagtacccttggcctgggctttaaaa

SEQ ID NO: 5617 - DNA, 750 bp, Homo Sapiens
gggtaaatctaatttgaatacatctggcaagacaacttcaagtacagatggacccaaattccctggagataaaagttcaacaacacaaaataataaccagcagaaaaaagggatccaggtgttacctgatggtcgggttactaacattcctcaagggatggtgacggaccaatttggaatgattggcctgttaacatttatcagggcagcagagacagacccaggaatggtacatcttgcattaggaagtgacttaacaacattaggcctcaatctgaactctcctgaaaatctctaccccaaatttgcgtcaccctgggcatcttcaccttgtcgacctcaagacatagacttccatgttccatctgagtacttaacgaacattcacattagggataagctggctgcaataaaacttggccgatatggtgaagaccttctcttctatctctattacatgaatggaggagacgtattacaacttttagctgcagtggagctttttaaccgtgattggagataccacaaagaagaacgagtatggattaccagggcaccaggcatggagccaacaatgaaaaccaatacctatgagaggggaacatattacttctttgactgtcttaactggaggaaagtagctaaggagttccatctggaatatgacaaattagaagaacggcctcacctgccatccaccttcaactacaaccctgctcagcaagccttctaaaaaaaggaagaaaatgt

SEQ ID NO: 5618 - DNA, 659 bp, Homo Sapiens
  misc_feature (69)..(69): n is a, c, g, or t
  misc_feature (99)..(99): n is a, c, g, or t
  misc_feature (548)..(556): n is a, c, g, or t
agactgcaagcatccatactgctcatcagaatgggcacagcagcatagcatcactagtacccacagaanccagacctctgaccttagtagcaacatccnaatggcacccagattgcagttcagcttggagaacagcccatctctggaagaagccatcagaatagcgtctagaatccaacaaggagaaacgccagggttggatgattaatcctcagaacaatggagcaataaagcagaaggagtctttcatcttctggcagcagaaatccatgaagcccgggcccaggaaaattagaagttttccattcctgatacactgtacacatttttatgcgagagtggagaacattttattcttgacacttttgtgtatataacccttggaatagattctcagagtgattcattgtgtacaaggaagtatgaaattagggcaatacagtaaattttcatgttactcttttatcagatcacaaactcctagagtctacatgcaagactagtaaagtcttatggagtcttatgatggatttttaacttcccgtggnnnnnnnnntaaaggctgtatctaaaatatcaaaggttctatatgtcacacaatcgtaattccaaaagccattatggataataaagggtgtaaagccttcagatatttcccc

SEQ ID NO: 5619 - DNA, 966 bp, Homo Sapiens
tcgcccacatacagcaacgccacaaggcattagtgacatatagaacacagtatgtaaaaaaaagcaggctggtaccggtccggaattcccgaggatatcgtcgacccacgcgtcagaagccccggaagtacttgtaagcctgagcagtgggctgcttaggaagagaaggtcagagttcgcgggggcagaggcattcttgccgctggcccagtcactatgtagtggaggggcagacaccctcccgcaaattctggaaggttcttagtctcgactagggcagtagccccaggactcctagtcgccggcttcaggtcactgccggctgaacggagctgccgtcgccatgtttggctgcttggtggcggggaggctggtgcaaacagctgcacagcaagtggcagaggataaatttgtttttgacttacctgattatgaaagtatcaaccatgttgtggtttttatgctgggaacaatcccatttcctgagggaatgggaggatctgtctacttttcttatcctgattcaaatggaatgccagtatggcaactcctaggatttgtcacgaatgggaagccaagtgccatcttcaaaatttcaggtcttaaatctggagaaggaagccaacatccttttggagccatgaatattgtccgaactccatctgttgctcagattggaatttcagtggaattattagacagtatggctcagcagactcctgtaggtaatgctgctgtatcctcagttgactcattcactcagttcacacaaaagatgttggacaatttctacaattttgcttcatcatttgctgtctctcaggcccagatgacaccaagccccatctgaaatgttcattcccggcaaatgtgggttctgaaatggtatgaaaaactttcaaagaacgactagcacagaaccctctcttttggaaaacataatttgaataaaataatttttaatgg

SEQ ID NO: 5620 - DNA, 477 bp, Homo Sapiens
  misc_feature (282)..(318): n is a, c, g, or t
gggacaccatatgtgtcctgttccagtgcgcgggtctgtggagagccgggtgcgagcggcggcagcacgaggggaaaagagctgagcggagaccaaagtcagccgggagacagtgggtctgtgagagaccgaatagaggggctggggccacgagcgccattgacaagcaatggggaagaaacagaaaaacaagagcgaagacagcaccaaggatgacattgatcttgatgccttggctgcagaaatagaaggagctggtgctgccaaagaacaggagcctcnnnnnnnnnnnnnnnnnnnnnnnnnnnnnnnnnnnnngcaggactttgatgaagatgatatcctgaaagaactggaagaattgtctttggaagctcaaggcatcaaagctgacagagaaactgttgcagtgaagccaacagaaaacaatgaagaggaattcacctcaaaagataaaaaaaagaaaggacagaaggg

SEQ ID NO: 5621 - DNA, 674 bp, Homo Sapiens
cggatcggttgcagtcctggtagctggggttgcaaaagccacatttcccaatatgtggaagtatttctgtatcaacaaatgccagtcaccctgggttggtatgcagtctatacaagtcctgacagctccacaccaagacatattactggaaggtctccatgagagttgaggcagtcagagcataaagacagaaccacacttaccaccccagacgaggcactcactgcatgccaggcaccaggacacacatgtcatggacattatttagtgttatccccataaatgcccatgagatgggggctgttattcgcattttgcagataaggaggctgatgtttaacatgactaagggcttgtccaaggttctacagctagcaaagtagcaaagttgggattctaacccaggtttgcctgatttcaaaacctaagctctcttcacttgcccagacggaggcagaggagctcccagctgtattccatctttgctgagaaagcatgaaggagatgctgtgaacctggcacaggcacacaaggtcaagccacagggatcggtgaaacagcagtgaggccaggtggtaaagatgtacccctcgtcctccgaccagcctcaccgcagtgccaacagatgacagtctaagtacagtaagaccacttttggctcaggtcaaaagctt

SEQ ID NO: 5622 - DNA, 448 bp, Homo Sapiens
tctctcgggagtatttagccttaccggatggtcccggctgattcacgcagaattcctcgtgctccgcgctactcaggataccactacgcttcggttaccttagaataccgggctatcaccgtctatggcacgactttccagtcgtttcttctcaataactgtcttgcgagagcgtggtcctacaaccccacacatgccgtaacatgggtggtttgggctaatccccgttcgctcgccactactaggggaatcattatttattttcttttcctgcaggtactaagatgtttcagttccctgcgttagcctccaaccaagtttggatgacattccttcagaatgccgcgttgtcccattcggaaatcttcggatcaatggtcatttgcacctacccgaagcttatcgcagcttatcacgtccttcatcgcctccgaatccagtgcatcat

SEQ ID NO: 5623 - DNA, 578 bp, Homo Sapiens
  misc_feature (545)..(545): n is a, c, g, or t
acacggcaggaaattcgttaaaagtaacgtttgtagaagatactagtggaggaggagagacttttgagaaagcctgtgtgtgtttgtgacactcttgtgaccgtgccaagaaaacgtaagcaaatatcaagcctccaaatcctaatgcaacaagtcctgaatcccttgcaggtatgtcctggatgatgaatacacaagctcagtaggctccaaatttccagtccggtggtccccaccggaagtcctgatgtatagcaagttcagcagcaaatctgacatttgggcttttggggttttgatgtgggaaatttactccctggggaagatgccatatgagagatttactaacagtgagactgctgaacacattgcccaaggcctacgtctctacaggcctcatctggcttcagagaaggtatataccatcatgtacagttgctggcatgagaaagcagatgagcgtcccactttcaaaattcttctgagcaatattctagatgtcatggatgaagaatccctgagctcgccaaataagcctttttggntctaacttctcttctccacaagccccaatttta

SEQ ID NO: 5624 - DNA, 466 bp, Homo Sapiens
cggcgtgtgccctctggtttagtgagtgtaatagagtccctggcacctttctttgcaaatgaggctaacagaccagactgcagcaagttatcagattcctcaatcagatgcactaggagtgaggagcccagggatggagggggttcctgaagtattgcagttggctgtagtagctgagttcttttccatgttaccgaaacagtagccagttacagtttactcaggaaaacggtagatcaattcagccatggtagtgctggttggcagggattggtaacggagagaactgctcatcagccaaaactcaagccttgccttttaggaggccaccagcagagggacttgggcctccttgtctggtacttgtgtacatgccggtgacctgaggactccactcacactggcgagcaaaaagggagcagtgattctctattctctccccacccactgccctttgttaccaaca

SEQ ID NO: 5625 - DNA, 371 bp, Homo Sapiens
atgatcctaagctgccctcaatcacaactctgtgacagaatgatgataaatgtggcttgaccaacatgttctgagctaaaaatgttaacgtgcagcccatttttaattccatgcattatagagcactgtttctaaataggtcacccaaaagtgtggctgaaatgatctcaaaatagacatggccctgcttttctggcccttgtgtcatttccagatgtgagcctgatctaaacatcccaactctattacctcttggattggttacctgcaccactgttgctaagcaggccgacagaaagctcctctgtttcactgaagttcaagaaggacatgccgtcaccaggctggcgggaattgctgtgcctgcagag

SEQ ID NO: 5626 - DNA, 581 bp, Homo Sapiens
  misc_feature (124)..(124): n is a, c, g, or t
  misc_feature (172)..(172): n is a, c, g, or t
  misc_feature (175)..(176): n is a, c, g, or t
  misc_feature (370)..(370): n is a, c, g, or t
  misc_feature (439)..(439): n is a, c, g, or t
  misc_feature (457)..(457): n is a, c, g, or t
  misc_feature (530)..(530): n is a, c, g, or t
  misc_feature (536)..(536): n is a, c, g, or t
  misc_feature (549)..(549): n is a, c, g, or t
gcgtccataagaacgtagcccggagccttctgatggagcgtgatgccttgaagccccaactcgcccctgaccgagcggctcatccgaagcagctaccgtccacctcatgcagtgagcagcctgncgcctccaccctgcagaacctcagtggtggcgtactgcgtcagtcagntgnncaccgggttagggtcaggagacggccagagcatgtttgttagggctgttagagggtgatcttcagttttacaggaagtgggtcacgggttaattttaaatgtgattccgaatctcctttcagtcctcgagaagggccaatgagcattcttcagcagtcacagccagtgtgagtgctgctctttccacctgcttnaaattctgtttcccaggggaatgtgctactgctggtggttcaaagttggaaggcaggcagaggtggggntgattctgctgggacagncttccagaagcagctcccccactgctgtcccgtcccacaggctgccttggatgactttatctttcttatatcngaagcntgtgctatgtgtntgtccatttaagtaggacgggtagggatgctc

SEQ ID NO: 5627 - DNA, 294 bp, Homo Sapiens
agaggacccctgttgaggtggtggcaggcaataacagtgtgacaccaggcaactgttttcttctgtgtatgggtatttattcaacatctgctttctgctaagctccatggaaggcacagaggaaacacagcagagtccatgccttagagacttcgtacctgatgaattgagtggtatcaggacaatgctatttaatgtttgatccatcccttctctaagcacatctcagatttctgtgctacctgatttaaccctttcagttcatagaacccagaaggagtaaggtgaaaagat

SEQ ID NO: 5628 - DNA, 211 bp, Homo Sapiens
ggctcggtcctgcttagcgagagaggagaagagggggagggagagaaataggtaaatagagaaggtaggaagggagagggatggaggcaagggaggcaagaaagcaagcaagtgagccttgctaacttagaaaaatatcagtggcctttaactgacagggaatagtgcaaagttaacctttggcccctataaaacattggatactgacttt

SEQ ID NO: 5629 - DNA, 580 bp, Homo Sapiens
ttgtggcaggagaaatccaatggctaggacgacaatcagcacgatgacgccaccaataagcccagcaatctgtgtcctccctcctgtgctcgcctgaactactgatctggagaggacagaactcccagcaaatcctctgaatactccacagactatgttacccagtcccaaggctattaactcctgattgccatcaagtggataatcgtatttgagggaatagacgctggcaactgaaaaggccactgcaaatgcaaccattgcgatgccgaagcaatctcctacggtgttttggaaagtctccacgtcaggtgtaatagggggctgaaatccaggattcatgtccccaaccacagccactttaaacctgtttttaaagtcacagccgtaggatacacctgctgcaatcacggtcataatgaattcgattggaatgggcactggaagtttgtctttgaagcgctgattcatttctttaacaatggatacaaccaaaaggacaatcagagctgtcaccaggtctgcaatattagtcttctctatttgtgagaatacagagtatagtacttgaaacttgaaa

SEQ ID NO: 5630 - DNA, 616 bp, Homo Sapiens
atgagcagggcaatcccgatgccaatgagtggaagttaatggtgatcattgaagaggggcactatcaccacaaacacggagcatatgcagaacacgatggggaaaaacacgctcagcttgagaggccggggccgcttgggctccttccagcggaggtagagctgtccaacaacagacaggcccacgaagaaccagtagctgaagctgaagtagttgataagctggaaaccatcctccacgatgaggtagatgagtgccatggtgcaattgaacagtaaagcagggataggtgtaaaacgctcaatgtggatcatggacagaaggtccggtaggtggccctcccgggagcccacgaagaacaacctagaaggatgaaaaatgtgtcagcaggatcctttactccttttactcagccatactcactcctcacttggacaaactcagctcagagcccccgaggaaagcaggatgcagcctcccaggagcatcccaggtccttagtgcatcaccagtccaacctccctgctccccccttccctacagattttcactccctcttcatccccgggcacctcaccactacccagatgccccacccaccatcacccagataccc

SEQ ID NO: 5631 - DNA, 632 bp, Homo Sapiens
taatataggattaaataattcccacaaggttcaaggagtagttccagttccagagaggccacctgaacctcgagccatggatgaccctgcgtctgccttcatcagtgacagtggtgctgctgctgctcagtgtcccatggctacagctgtccagccaggcctgcctgagaaagtgcgggacggtgcccgggtcccgctgctgcacctgcgcgccgagtctgtccctgcgcatccctgtggctttcctgcaccactgccccccaccaggacgatggagagtaagatgattgctgccatacactccagcagtgcagatgccaccagcagttcaaattatcattcctttgtcactgcttcatccacctctgtggacgatgcattgcctgtaccacttcctgtcccacaacctaagcatgcttctcagaaaacagtttactcctcctttgctaggcccgatgtcaccactgaaccctttggtccagataactgtttgcatttcaatatgactccaaactggcagtaccgtccccagagtgtacctccccatcacaataaattggagcagcaccaagtgtatggtgccaggtcagagccaccagcctccatgggtcttcgttataacacatatgtgg

SEQ ID NO: 5632 - DNA, 679 bp, Homo Sapiens
taggcaggatgcatggctcttactatccaggaaggcctctgcccatcttactcagcgcttcagtcagaacagggctgggctctgtatcctgatacagctgggactctgcaaggtgtgccccatgctttccttcaatgtagatatgccttttacctcccattagagtgcttccgaggctacttagggtgccttaggaaaaggtatcgttattgttattccattagtctgtaaccttctagattttagctgaatgaaactctaaaccacttaaaacacactgcgctcagtagcatacaaaatcgctctgtgcttagaggcgtctgcaaagtggtgggcgtgctgccccagtggctgtcactctggctgctgcccttatgtctccttcaagggtacatggaagagagatgagggacacatgcctaaggtcggcttctaccacattcctatcccactttctcagccggcttcctactttttcactgcctctgaaatagacacagacctgccagtcctggaaggcctcaagcctctggaaaagcgaagatcacttttccccaaagatgttaattccaaacttgtttatgttcctccttggaatgacagcttataaaaatatgtgcactattaagagatgaagcctgagggtgaaggacaacatagtacttgacaggcacagaat

SEQ ID NO: 5633 - DNA, 480 bp, Homo Sapiens
atcgagcagatgatcactctcatgctccaagccaccctgatgctccggctccaggtagaccttttccctttaaggttcaggtccaggagctctatgataatgtgtgaatgaggtgagcgctgactccatgtgagtattttaaggcttggagtcaaagaattaacctaacatgcccaggcagagtccatgtgtcaatggcccgtctccagtttgttctaatttctcaccacgtgtctgtagatataggaccgcagaccttcgctttatcatcataatcacatctaatgtccatcctaacttacgatacatattctgtgcatggaaacagtccctgtatttaacaatacctacacataaaaacaatccagctgttacaatcttgttatggccacaaaacattaatgatcttctttagaccaagcaaatgtttttgtaccataatggtcgtgcaccaaattcacagccagaatccccaagatc

SEQ ID NO: 5634 - DNA, 223 bp, Homo Sapiens
cacctattgtgcagaagatcacctcatcgtgcagaagatcacctatcgtgcagaagatcaccttatcgtgcagaagatcacctcatcgtgcagaagatcacctatcgtgcagaagatcacctcatcgtgcagaagatcaccttatcgtgcagaagatcacctcatcgtgcagaagatcacctcgaaagtggctttaacatatctgaacacacaatagctaaga

SEQ ID NO: 5635 - DNA, 624 bp, Homo Sapiens
ctcatggccgactcttgaggataaaactaatgttcggacccaccagagaccctcgggggcctaaggtgggcagcctggggcttccggcacatcctagggagaaaaaaactgccaaatcaagcaaaatccggtctctggccgattacagaactgaagattcaaatgcggggaattctggaggaaatgtcccggctcccgattctaccaagggttccctgaagcagaacagaagcagtgcggcgtccgttgtgtctgagatcagcctgtcccccgacactgacgaccgtctggagaacacctccctggctggagacagcgtgtctgaggtggatggaaatgacagcgacagctcatcgtacagcagcgcctccacccgagggacctatggcattctgtcgaagacagtgggcacgcaggacaccccctatatggtcaacggccaggagattcctgcggataccctgggccagttcccctccattaaggacgtcctccaggccgcagccgctgagcaccaagaccaggggcaggaggtcaacggggaggtgcggagtccgagagacagcatctgcagcagcgtgtccttggagagctctgcagcagaaacacaggaggtgatctata

SEQ ID NO: 5636 - DNA, 910 bp, Homo Sapiens
  misc_feature (381)..(381): n is a, c, g, or t
ttgactccagaggattcccaggcaaaagctctactcatcagcatttgaacccaatgatcttccctggtagggctctatttctttaggtgaccaaccagaccctaagtgaggagttgactacattgcactccttccatcctggaaaggccagaggttcatcttcacagggataggcacctattccataggtgggttttcctgtcctgctctcagaccctcagccagcaccactctctgggggctgttgatattcctgatccacaggcttggcactgctctccgtgcagtatcttcgtgggggaccccacttgacagcgaaggaggtgcagtgtggccatgctgtgggacccactggtcctatcaccatctgcaccaaccaangggctgctggacataaagaatgttgaaaagagcttctataggcacagctcaacgccagcttgcaggaagcactctgcgggtgggagggtgccatctttcaggacatggtgcattttaaaaatcaaagacatctctacagttctgtaatctcagtaggaagaacacgtgggtccagataccaaggggtggaagtggatgtggctccatatcccattccttcaactcacctgtcgtgggattttgcacttctctcccaaaaccacactctgcagggtagaaggtcctggattctaaaggagggtacccttaaaaggggacaaatgagtgcccattgaactacacattacagctgccacaggggaattggacagtatgtgtccagagaccagcgggtgagaagaggagtcccctcctctccaggcacaggtaatagatcctgatccccaggaggaggcatggctgctgtcacacaatgagggtaggaggagttcgtgtggaacccagggatccccttgggggcctcctggtt

SEQ ID NO: 5637 - DNA, 253 bp, Homo Sapiens
tagttgcttggtctctgaaacttaagagtacttggttgtactgtatttggttgtcaaggtaagttactagattaggacttagagacagtgtatttattgggaagcacgatgcttgtttaggtggctagacttcttatatttgtttttaggctaactgattttggaagaatctttctaaaatgtaaccctggtcatgtaagcaccttgcttaaaagtattccttaggtccaggagatgatcttgtgcggaccga

SEQ ID NO: 5638 - DNA, 325 bp, Homo Sapiens
acctccaggtccgcccaggagactgatggcagtttctgcttacagtgctctctcactcaaagttggggtagaagaagccacaatcatggtcttccccatgacaaaggtatattatttaaactaaatagtcatccagagcaatgaggaaagcaatggtacatttccatagaaaactatagcataatagaacccctctcctcaagaacgatatccttctccacagatgaactaactagaaataatgagttttcggcaataccactatctttagcttttgacttcttccttgttagacatggggattatacaccaatatttcccaacc

SEQ ID NO: 5639 - DNA, 968 bp, Homo Sapiens
  misc_feature (738)..(739): n is a, c, g, or t
  misc_feature (744)..(753): n is a, c, g, or t
acacaggacaggctcttttgggactcccagggtggcggctacttctgcagtgaggctgagctggaggctgacctgccactgcgtctgaaggacgaccaggatgcgaccacgagcccagcgccaattccgtgtcagcccacaacctgctccggctgcatggcttcacgggccacaaggactggatggacaagtgtgtgtgcctattgaccgccttttccgagcgcatgcgtcgtgtcccggtggcgttgcccgagatggtccgcgccctctcagcccagcagcagaccctcaagcagatcgtgatctgtggagaccgtcaggccaaggacaccaaggccctggtgcagtgcgtccactctgtctacattcctaacaaggtgctgattctggctgatggggacccctcgagcttcctgtcccgccagctgcctttcctgagtaccctccgacggttggaagaccaggccactgcatatgtgtgtgagaatcaagcctgctcagtgcccatcactgatccctgcgaattacgaaaactactacatccatgactgccccaacccccttggggtggggcagaaggtgaagcatcccaactgactagagactcaggccctgcagggccctatagaacctgtggccatccctgagcaccctgccaccaggtgacctcggccatactcactgccccccttgggcacccactcaccctagaataaacttaacagtgtcccggtggtnnccctnnnnnnnnnnacccaaatttgatcctctcaccctgtggaacgtgacccccgcctttgaccaaaaaaccttgtccggccgccttcggccctaaaaaaattttctaaaacaatttcctttgggcgcccggggcccccgtcgaggaaaggtgaccggtggctcatgccgggtttcccaaagaaaaaacccgggctcatgaacataagggttttggaattttccccccc

SEQ ID NO: 5640 - DNA, 451 bp, Homo Sapiens
  misc_feature (268)..(268): n is a, c, g, or t
atggtgtgcaggttgcttgctttcccacattctctcatttgcttgaaggcagcctaacaaaagggagtccccaaagagctccatgagagcttaagaaaattcatctcctgaggacaaagagaacaaagatctgtcctgtggtcacactgttgaggctctgtcttcacagctgatgttctcctagtggaggtacagctgaagaacattcagccccagcacgagaagatacagagcaacttggaaaccccaaagggagacacacccttanacactgccgtgctgtgctgtgccgtgtcctgaaggaggagagagccctatctcctcctggttttgttgctgacattgcagctgatcatgccttgactccttcatctctaacagaggaagaactgtattatcaaaccttatggtctaccccatgaataaataaaatatttgttcaagcacaaaa

SEQ ID NO: 5641 - DNA, 1386 bp, Homo Sapiens
  misc_feature (940)..(1050): n is a, c, g, or t
  misc_feature (1057)..(1073): n is a, c, g, or t
  misc_feature (1098)..(1108): n is a, c, g, or t
  misc_feature (1131)..(1223): n is a, c, g, or t
  misc_feature (1227)..(1277): n is a, c, g, or t
  misc_feature (1293)..(1302): n is a, c, g, or t
agagtccccattcaaggcagtcaagttaagacactaacttggccctttcctgatggaaatatttcctccatagcagaagttgtgttctgacaagactgagagagttacatgttgggaaaaaaaagaagcattaacttagtagaactgaaccaggagcattaagttctgaaattttgaatcatctctgaaatgaagcaggtgtagcctgccctctcatcaatccgtctgggtgccagaactcaaggttcagtggacacatccccctgttagagaccctcatgggctaggacttttcatctaggatagattcaagacctttacctcagaattatgtaaactgtgattgtgttttagaaaaattattatttgctaaaaccatttaagtctttgtatatgtgtaaatgatcacaaaaatgtattttataaaatgttctgtacaataaagttacacctcaaagtgtactcttggaatggattctttcctgtaaagtcttatctgcgactctgtctcgggaatgttttgtctgttgccgtcagccgaactttgttatggagggagcagcctcacacaagcagaaacactcctgtggatggtattgtagcatgtattgtttattttagtcaatagaccctctccttataaatggtgtttagtcttcctgttgcatttcatgggcctgggggtttcctagcagaggatattggagcccctttttgtgacattaccaattacatctttgtccacgtttaatactttgttttggaaaatttaaatgctgcagatttgtgtagagttctaataccaaagacagaagtaaatgttttccatatactttgtcttgcctgtatgcagccctcgtgtaatacggtgaattagagtggtatttcactttgtattattttgtaaatatgtcaatataataaatagtgactaaattgnnnnnnnnnnnnnnnnnnnnnnnnnnnnnnnnnnnnnnnnnnnnnnnnnnnnnnnnnnnnnnnnnnnnnnnnnnnnnnnnnnnnnnnnnnnnnnnnnnnnnnnnnnnnnnnctttggnnnnnnnnnnnnnnnnnaaaaattttttaaaacctttttttnnnnnnnnnnnccccaaaggaaaaggaaatgggnnnnnnnnnnnnnnnnnnnnnnnnnnnnnnnnnnnnnnnnnnnnnnnnnnnnnnnnnnnnnnnnnnnnnnnnnnnnnnnnnnnnnnnnnnnnntccnnnnnnnnnnnnnnnnnnnnnnnnnnnnnnnnnnnnnnnnnnnnnnnnnnnttctattttaatttannnnnnnnnnggcccctttttgaaaaatgggtggttttctttaaaattttcgcccaaggggaacccctcccaaacgggttgtgaaaccttaatc

SEQ ID NO: 5642 - DNA, 778 bp, Homo Sapiens
ctgctccgcccctctctgcggagttaaaacaaaacaaatggattctcaagtgctaccccaaaaagaaatggtaaagtcgagatagcaagtattataaagaaacaccttgtattttttatatacatctcttatccactgtgacttttcttttaaactgggctctgtgattccagagtttagaatgtagaaatgaaatgcttagctttaccttttcttggggggtgtggaccctgccagaaatgtaattacgtatgctcaagtgcattaattgaaggcactgtgcacaccattggactgctgaccacagttaaacatttccagtaaaatttcgtaactggtcacagctcattcataatcactgtattttttgaccctgataaagacaattattttgatggtgttctggtactgtaattggtatcctttaaattatttaaaacttttgggtgtggggcaggcagagagggatggtgtccagagatacatcacactttacatcctatcttactgtcctctgtttttcttaccctccttacatcctttttgttaaaaataaaaagcattgtagctgttggtttgtgttgtattttaacaaagaatgaatgattacagtgtgcatcatttagaaacctttcaaatgttaccttcttgaattgccctagaaaagaacaaaattagttgactacccaaccaaacctttcagttgatatttgctttttgtgtttatttatatgtaactaagtctattaatataataaaaatgaatatacctgcagca

SEQ ID NO: 5643 - DNA, 493 bp, Homo Sapiens
ctgctgtgttttttgtgaaagcatgtagactgtgccagaggccagacccacgggctcatgcacccctgagccagcagggcatcttggaaaaggaactcttggttcgatacctggagcagaggaggggaaagtccagggctatagggtgtgatgaagtcacccctttctgtcccactacatctgggactgactttccgagcctccagtccaaagccggcttgatttccgtgaactctggtgctcctgcatctcatgagtgtgccccatgggtcccctcccctctcagcatttccttgtcccgtctggacctggggagtggttaggcagcaagctttggtttatggttttcattcattggtgaagtaaattaggcagtgctaaagcctgtgggtttggtccttgaacaagatgtgggccttgcaagatgggagagtaaaccttgaagggctttattaaagaaataaaaaagaacttttgtatcttttaaaaaaaa

SEQ ID NO: 5644 - DNA, 1437 bp, Homo Sapiens
cgtcgcggaacgatgttacatctccaaggaaattgtaatgggataatcagagaaaacccagactacaggtgggatgcattctagcgtaaagagccataggggagaaaaattactgtcttgatgggcattatcgacatgctgcaatcatataggttaatgaagaagttagaacattcctggaaagctcttgtttatgatggggacactgtttctgttcatagaccaagcttttatgcagacagatttcttaagttcatgaattccagagttttcaagaaaattcaagctttgaaggcttcaccgtctaagaaacggtgcaattcaatcgccgccctaaaggccacttcacaggagattgtgtcctcaattagccaggaatggaaggatgagaagcgggatttgctgactgaaggacaaagttttagcagccttgatgaagaagccctgggatcccgacacaggccagacctggtccctagcactccatcactgtttgaagctgcttccttggcaaacacaatttcatcttcttccttatacgtcaatgagcactatccacacgacaggcctacactctattcaaacagcaaagggttaccttccagttcaacatttaccttggaagaggggaccatctacttgaccgctgagcccaacactctggaagtgcaggatgacaatgcttctgtgcttgacgtctatttataagtgaaaatggtgatcacctaagcacatggatgagacgtgagcacagttatggcagagaagtttctccgcaccagaattatccacagcaacttggctgagccccactacacacagagaaatcatcaacctgacttaagagttttcaagatgtcaacttcaggctgatcagcagatgggatgtgaaaaatactaccctattctatcatttgctgttgcttgctgaactgtgaagaactgcatgaactatatttaagctgctttctgtaccattgccaatcacctttttggagttggaagtgctattttcctatggacttttgcattatttcattgtgcatgcatccagtgattatacataagcaacatatgtaatctgcttatatatttttaaaaatccatccacacacatggtaaattaagtataaattcttttgcaaaattatagttcatgtcattgaaagtttaaattggtttcatttaaagatcaatatactaggtctgccttcactttatagaaaactagcttctataaagattttttcactgtttactagtgaaatgagaaaagcaaagctatttataaaaggccttatgtcgtgtacatacattgtctttgaaatatttgtgatctagtttattgcttgtaaaagagaaattatataatttatttagtaaatactactgtaaactatagttttgtgagagaaataaaatattttgttctcaaaa

SEQ ID NO: 5645 - DNA, 423 bp, Homo Sapiens
tggttaaattaataactggtcccataagtcagggtcaagccacatttataacccattcgggccggccatgaagggttctgactcgacattggtatttaaatgctgttactttcccaatgcttagtagcacttgagactttatttccatcgacaaaaaccaagaaggccacagaagtagcctaacagtcctccctggtcatactcgtttcaaacaggtctgcctgtctagacatattcaggcaggaggttgcttgctgctatcttgaaaaccactggaagattcagcttcttggggacctcagagcccatattcatatggaagcccacccatataagcctcacagagcaaatcacagcaatgttgaagttgttattttcaagtgcttatttcacgacattaaaaagggagactctttccttgtg

SEQ ID NO: 5646 - DNA, 580 bp, Homo Sapiens
cagaagatcacctcatagcagtaactttaagagggcattgtgcaatagttagttgttttcttgttcagctattttaaaggctgctttaacttgtttgtttgtctttgtatataactacttctaatctaatcactagagttattatattctgttatgtttgaccagaattatatgacaagaactggtgacagtttagtgcctctgcccattgtccatgatttacactaattgtgagcagtcttcttatgtgtcagctcattatttttgaaacatttgcctttaggctgttctttgaggtatcaatgaagtgattgaatttcaataccttaattcagtgcacataatactaatgtaacagcagatgaaaattgataaaacccaaaagagagtcatctaaatttgtagttcctatttctgtgggtttgcctggccatggttggagagggaatggtgtttgatggtaaacacagggtgtttggggatcaaggagcctagattctctccctggatctgtcactaacttgctgcgtgacctgaacacgtcactttacctctctgtgcctcagttttcccatgcatg

SEQ ID NO: 5647 - DNA, 420 bp, Homo Sapiens
tatcgtccagaagatcacctcagctaacccagtaagccctggaggccacctccatgaatagttgggtatttaaagaccttttactaccaaataaagacaaaaacagcgagtaacagtgagctttattttcatgtcaccgctctaggttcattcacctgttgccaacaacatgagggagtttctccacagcccgtgattcctgaattgtccaacaaatcaacagtcaccaatacattgacttaaggagtaaacaagcagcttttctctacacaccaccgggcaccccaggaaggcgcactccctgctccacccccgcctcttggtgcctgtatccagcagaaggacccagcaggaggctgaatccaagcactgctctcaggccactctatcctcatccctggatcctccagggaacaagat

SEQ ID NO: 5648 - DNA, 636 bp, Homo Sapiens
tccttctcactgagagcatctccttctccaggctcatccatgtcacctttacgcttcgtgtagatgctcctgagcattctgcagagacttcttggctgcttccagcttcttgatgttgtgggaggtgtcctccttggctttgatgtactgaggccgcttcgggttcaatgctgagtccttctccgtggatctccttctcaatctgcgtgcggctcccgcatcagtttgcccagctgcttcttcttctccttcaggtcatcctccaacgtcaaatctctgccctgactctgactctcttcttccatccgttctgtcaaactcctgccgagccttctccactgacagcatctccttctccagctcatccatgtcacctttacgcttcttgtagtgcttctgagcattctgcagagacttcttggctgcttccagcttcttgattttgtgggaggtgtcctccttggctttgatgtactgaggccgcttgctggttcaattctgagtccttctccttgatctccttctcaatctgctgctgctcccgcatcattttgcccagctccgtcgtcttctccttcagttcatccattcacctggtccatacgcttcgtgtccgttctcgatctccgtgttcgg

SEQ ID NO: 5649 - DNA, 327 bp, Homo Sapiens
cagaagatcaccgtttctagtagcagacctaagatttcaatccagttctcacctctgaaccactagctattcccagatttattaaacaccatctggaggcacctaagtatagtggcaaagtatatttggctagcaaattattacaaaaatacatagatggacaaacacacataattaagctaaacaaggaaagctcacatgaagcgttaacctgaaaaacacagaagagtaaacagtaaaatatgttgtcaccaaaggtagctgagactaaaaagttaactgtatataagaaccttcaaaagtactaaaaatgtactttgaatctgt

SEQ ID NO: 5650 - DNA, 534 bp, Homo Sapiens
agaagatcacctccctcttgtaggtgtatcatttctactagcaaagaaagaagccgtgagacttcctgtcctcctctcgtaggtgtatcatttctactagcaaagaaagaagccgtgagacttcctgtcctcctctcgtaggtgtatcatttctactagcaaagaaagaagccgtgagacttcctgtcctcctctcgtaagtgtatcatttctactagcaaaggaatgcagtcaggtgtgcacacactgaaagggcttctgaagtgttcaccccaagacgaactccaggcctgaatccatcaagagcgacagtgggcatgcccaggtccctcagggcccattcacacctgtgcctgcttctggtttggcacaggactccccagtaccatccagcaacccccagtcctgcgtgggactctcacgtgctgcatgtgcactgttaaagcagacaccacgacactccgccttcggcccacctgatccactgctcacggttgatcttcacacccgttgcccgcagcgaggtgatgcctc

SEQ ID NO: 5651 - DNA, 717 bp, Homo Sapiens
gtcgttcaactgccggccggtgccccacctgctgccggactcctcagagtagctgtccccacactctgacagcacatgctctgaatatgggcttattctgacagtacaccacatacatatgcagcctgagctcgtgtttgatgaatagctgagccagacaatcaggatctttcagacacctgttgtagctcttgcaagaaatagtactcggtgccactcatagataatgctggatattcccaaacacaatcctgtcatgtgactcgaagactctcggggaccccctgaagcagacatgtgtggccatataaccctccacaatcttgccccaagtcgtccacgtacaatattctctgtattctaccagttcactcaggacatacatactcctttccagagccttcttcttctgtacctcctcactctcaggggcttgggacaaagtctcctcttcaggtggctgcgtctaatctccagggccctccaacagtgtggtcagcaaggtcagttccggcagctcctctcctgtggctagagctggctccaacatccagttctcatatggtcctgcctgaccactgtctgcctcagtttccacactgagacaatgtttggaatgatccaaccatctcctcaggccactgacgggccctggggggcctggggaacaggggccagagctgaggccagagctggggccagagaggggcggagcag

SEQ ID NO: 5652 - DNA, 812 bp, Homo Sapiens
ccgaagatccacacacaagacaaatacgtgttcaaatacatcattctctgaagcctctgcaccactctacacgctgctccttctgactagaatgccctcctgcccctccttccacttgtcaaactcccaatcaccctttaaaaccagattgaattattttcttctgtgaagctttccctgacaccccgggaaagaataatgtttccacagtgttttgtcatttactccataaaagaaacaaaaacatgtatttttaaaagtatctgttatctctaatagcttgtaaacatcttgaggaaagagactaagttttgcttctttttcccccaaagagaactttattaaaacatttaccatctctttagagagaggttttaccatctctttagaaagctccagaatctacaaccaggaataagtgttaatgggatagaaccaatgagagaacagcatatgatagtgaaatgtactttattattaatacgaattcagtgggctcacagaatgaacctttttgccaaacggggggaaagcattttctgtaaagtatctttagaaaaatatgtataatttgaaaaatggttatccaaatttaacatttgtcatataaaaggctcataaaacgtgtgtggctgtgtttttcaaaattgtggggtcaattggtcacattatgcctagacattttggttttgtttttggggttaataatggttgtggttttataaaaaaaggaaatttggaaattttgtccctgttattaatacacctgtcattactaataaaagtggtttgttgatatgctaaataggttg

SEQ ID NO: 5653 - DNA, 172 bp, Homo Sapiens
caacaaggtctagtttcaacattgttctgtggatacatccatttggccatgtgagcaaatttctagtaaatgaggcacaactggataggaatatcagaataactttcaaaataacaaaggttagaaaagtacgcatttaactcatacagatattcacagaaaatgccgaagg

SEQ ID NO: 5654 - DNA, 449 bp, Homo Sapiens
ttcctgagccaatgctcttctcattagagcttccaggtttagcaaaatcaaaatacatcaataataggataccctgctacatgtgaatccaggtaaacaatgaataatgttttagtacgtctcccaaattgggcatctgatattttatctggcaaccctattttcaatagcccccccatacacacacatgcacacacccttttctgaaataacactaacaaaaccacacacagaaatctcctaatctgtggtcctgttgacatttacatggcatccgttcaccaagtgcctgctctgagtccctggccctgaacaacagcccccagactccaccccattccatcctcctgctaagtctggaagctcccaagagctggccccagggccccatctgggctctgctgggagagagaggaagggggaagaggggccctgcctggctccacact

SEQ ID NO: 5655 - DNA, 735 bp, Homo Sapiens
gctgtccatgaaacaagccctaaccattgaactccaaaaggaagtcagggagaaagaagacttcatcttcacttgcaattccaggatagaaaaaggtctgccactcaataaggaaattgagaaagaatggttgaagagtccttcgagatgaagaaatgcacgccttggccatcgctgaaaagtctcaggagttcttggaagcagataatcgccagctgcccaatggtgtttacacaactgcagagcagcgtccgaatgcctacatcccagaagcagatgccactcttcctttgccaaaaccttatggtgctttggctccttttaaacccagtgaacctggagccaatatgaggcacataaggaaacctgttataaagccagttgaaatctgaatatgtgaacaaatccaggcctctcaaggaaaagacttcaaccaggcttccttgtacccacaggtgaaaaatgtgagcataatacttctaatattattgataagtaaggtaaccacaattagtcagcaacagagtacaacagggtttctatttacccaccaactactatacctttcatgacgttgaatgggacatagaactgtcctacatttatgtcaaagtatatatttgaatcgcttatattttctttttcactctttatattgagtacattccagaaatttgtagtaggcaaggtgctataaaaatgcactaaaaataaatctgttctcaatgaaaaaaa

SEQ ID NO: 5656 - DNA, 460 bp, Homo Sapiens
  misc_feature (39)..(39): n is a, c, g, or t
tactcgggcgctcccagaaggagcccacctctcagtgcntcacttccccctgcctccccagcctccgcagatgaggttcctgccccttcctcctcgtaaccaaaaccctcactgctcccaggacggtcttatttataaaccagatacatgttcttagtctggtcccagaccaaggagctggtcagacggccctttctaatcctacatgttgagcttatgtaaaaaatgttgtttcctcctgtttttggttcctttcttacccacaaaccattactacttgaaacttaaaaaactcgccaagtgtaaaggctaaagagaagcagtttgacggaccttgtgatttgtactgtttgctgcggagctatttaaagattttggaataaatatacaaaactacggttgtgaaataaaaacttaaattgtatattttgaaaaataaaacactgaaaagaaacccccc

SEQ ID NO: 5657 - DNA, 825 bp, Homo Sapiens
  misc_feature (53)..(88): n is a, c, g, or t
gcacgagttttcaccacatagttttaacttgactttcaagataattttcaggnnnnnnnnnnnnnnnnnnnnnnnnnnnnnnnnnnnngtgggagaggggagggatgcctgggaagtggttaacaacttttttcaagtcactttactaaacaaacttttgtaaatagaccttaccttctattttcgagtttcatttatattttgcagtgtagccagcctcatcaaagagctgacttactcatttgacttttgcactgactgtattatctgggtatctgctgtgtctgcacttcatggtaaacgggatctaaaatgcctggtggcttttcacaaaaagcagattttcttcatgtactgtgatgtctgatgcaatgcatcctagaacaaactggccatttgctagtttactctaaagactaaacatagtcttggtgtgtgtggtcttactcatcttctagtacctttaaggacaaatcctaaggacttggacacttgcaataaagaaattttattttaaacccaagcctccctggattgataatatatacacatttgtcagcatttccggtcgtggtgagaggcagctgtttgagctccaatgtgtgcagctttgaactagggctggggttgtgggtgcctcttctgaaaggtctaaccattattggataactggcttttttcttcctctttggaatgtaacaataaaaataatttttgaaacatccatcagtgtatctatctatgtctcctagttttttcctcctccctcttttgctgtataatgagattgaagatataaagacattttgtaccctgtaaaaaaaa

SEQ ID NO: 5658 - DNA, 644 bp, Homo Sapiens
gcggccgcctggccgacagtcaagtgcgctctcctcccgctggaatccacggcgacactgggcccagcttccctcagcgtgcgggtgctgtggaaggagctctgatgccaggaggacctggaagccctgttctgagtgacgggctgcaggggcaccagcggcctgacctgcccgacagtgagccctgccgtcaggtagttctccttctccaagaggttgcccatgctgcggctggtccctggcctggggtacgtgagcagggccgggttggcagggatgctgtcaaaaacggtgtcgctaacagagccatgctggtactgtctgtggtatgtgtcaaagtggcgctgcctgcttgtggtgccagcacggctgacccccacgatctcggaacgagcatatctcggtggcactaggagggcggcccgcctgctttcttggtggtgcagggtgtgcccagcctggcttctctggctgtactggtaatcgctgtgcgtgtagtgagccctctccgggctgctgtcaggagaaatctccagtctcctcagaggatgcctcaaggacctttcttccacggacttctgggagctgtactgtgctgtttctcttccccagcgaccctcataagtggcagttgtgccagcctt

SEQ ID NO: 5659 - DNA, 451 bp, Homo Sapiens
ccagcccctttgccatagcctgattttggggaggaggaaggggcgatttgagggagaaggggagaaagcttatggctgggtctggtttcttcccttcccaaagggtcttactgttccagggtggccccagggcaggcaggggccacactatgcctgcgccctggtaaaggtgacccctgccatttaccagcagccctggcatgttcctgccccacaggaatagaatggagggagctccagaaactttccatcccaaaggcagtctccgtggttgaagcagactggatttttgctctgcccctgaccccttgtccctctttgagggaggggagctatgctaggactccaacctcagggactcgggtggcctgcgctagcttcttttgatactgaaaacttttaaggtgggagggtggcaagggatgtgcttaataaatcaattccaagcccc

SEQ ID NO: 5660 - DNA, 812 bp, Homo Sapiens
gggattgtcttccaggaaacagctccctcagtttggaatcagctctcccgctgcggccgcagtagccggagccggagccgcagccaccggtgccttcctttcccgccgccgcccagccgccgtccggcctccctcgggcccgagcgcagaccaggctccagccgcgcggcgccggcagcctcgcgctccctctcgggtctctctcgggcctcgggcaccgcgtcctgtggggcggccgcctgcctgcccgcccgcccgcagccccttcgctgcgcggcccctgggcggccgctgccatgggcaccgacagccgcgcggccaaggcgctcctggcgcgggcccgcaccctgcacctgcagacggggaacctgctgaactggggccgcctgcggaagaagtgcccgtccacgcacagcgaggagcttcatgattgtatccaaaaaaccttgaatgaatggagttcccaaatcaacccagatttggtcagggagtttccagatgtcttggaatgcactgtatctcatgcagtagaaaagataaatcctgatgaaagagaagaaatgaaagtttctgcaaaactgttcattggagaatcaaactcttcatcatcaactagaagtgcagttgacatggcctgttcagtccttggagttgcacagctggattctgtgatcattgcttcacctcctattgaagatggagttaatctttccttggagcatttacagccttactgggaggaattagaaaacttagttcagagcaaaaagattgttgccataagtacctcctgtttatacaaaacacacatg

SEQ ID NO: 5661 - DNA, 568 bp, Homo Sapiens
cacttcacctccttctgcagtcagactgaaatataaaaaaggtggtggtggtggtgaaggggctggtggagatgtaggaaccgatctgctatttttaatttcctgtgaggatagagacttgcagttagactcaaagaagtactgtactttcccaggttgactaagaaatgccagtggtggaggtgggtgtttgggaaaggcagggccctgaaatggcctgtccctagggctctccaagcactagccttcccagcttcccgccgccccccccatctcttcctgtctaacttggggaaggggcctgggctgtgaggacagggcccccacaggggatggtttcacgagtgtagtcccggaggccttccctttacagctctcctccagccctgggcacatagcataggctggggacacaggatcctggcctgagaattgaggggaggtggccagcccgcagaggtggggtgctggggctgcatgatttttgccctgcgtcccttctctttggggctcctttcccctctcatacataaaatcgctttcaaattaaaatcgctgttttctggaa

SEQ ID NO: 5662 - DNA, 487 bp, Homo Sapiens
tatggattgggtatcaaaatggaatgccagtccagatgtgcctagacacgatatttgagctgaggactctcacgataatgcaagttcatccaacgtgaagataccataagcttgttctctgaaccagagaaatgaaagtcagttttaagaggctgatagatcttggccctgttaaggcatccacttcacagttctgaaggctgagtcagccccactccacagttaggccaaaaattagattttaaaacttcatctgtctgtcccagttaactgttaaataaggcctcatcctccactgaagagtatggattgaaggattgtgaactatgtttagtgtgattgtgaacttggtgcctaatgttccatgtctgaagtttgccccagtgctacacgtttggagtatacctatgtgtgtgctttgccactgaagtaagattttgcctgtatggtactgttatgtttgttaataaagtgcactgccaccccc

SEQ ID NO: 5663 - DNA, 437 bp, Homo Sapiens
tgtcatcccggtgctctcttatctgaatcccgcagccgcctaccttcccgtcctcgccgatgctgtacacggtgttctcatcatagcttgaactccacagagttagacctccccgtagtgggccctccagctcatcgcgcacttcatgctgctgcatgtctgaggcaatgagacacggccactcacatcctggccagggctctgcagaaggaatctgcctgcagcaggaggccccctcaccctctactcaggctgacagctgttctggaagccaagggcaggcacccaggacccaatgagcgccataaagctgcccctgcccaagaggtcaggctgcttctaagcctcagaggcagcttctttcaccaggtcagaagtgaggctcaggagttcctggggggagctcacctgggagccctaagtctaggaagacactg

SEQ ID NO: 5664 - DNA, 330 bp, Homo Sapiens
gagtgatctagaggatcccaaaatggctatacctgagaaggtgacctttgtgttgggaaatgaaagctgagagagatgtcgtcagatggaagagaggaggtattccagatgaatggaaaagcatttgggacacaccaaagaacgacaggggcaagttttataagtttgtactcttaatattcatggcacagagtaggtattttctcaatgaatgaataaaatgggatttcacattgcaaaaatgtcattgtcttcattatttaaagtcctgttagggtagcaatataattaatcattcatggttggccctaagctggaaatagaccttgt

SEQ ID NO: 5665 - DNA, 287 bp, Homo Sapiens
ggaagtaatggccatatgtgcttaaaaatttatcagacagtataaaaagaaatctaccattacccctcaagcccatcgcactcttcaaaggaagacattttctgcatgtttttgcttttggttcttttggtggttagtcctgtgaatgtaagtaatcatcttctggttttagatctatccgctttagtgttaatgcttcacagtgaaataaacaggtcctttgcgctgctctattacctttccagttttcctccttcagggtttgtgtttgtaaaatttatatatat

SEQ ID NO: 5666 - DNA, 448 bp, Homo Sapiens
agctcagaggatcccgagtggtcagtgtcttccaggcttggtgatcccaaagtgctaggcattataggtgtggtcccatttaagtctttaatccatcttgagttgacttttgtgtatggtgagagacacgggcccagtttcattctttagcatgtggggatttatttctgggttccctattctgttccattggtctatgtgtctgtttttagcccatattatgttttggttactacagccttgttatatatatatgtatcaaggtgactgtgaaggtaactaatatggaaacattttttattgttgtaaaatatatgtacataaaatttaccattttagccattttgtaatgtcattactcattgcagcctcctgggctcaagcaattctcccacctcagcctccggagtagctgggactgcaggcagggcaccaccatgcctagcaa

SEQ ID NO: 5667 - DNA, 213 bp, Homo Sapiens
tacttagaggatccgagtggtagtgtttctgagagtcagggtctaggtgctggagtgcgcacggaggccgatgtagaggaggaggccctgaggaggaagctggaggagctgaccagcaacgtcagtgaccaggagacctcgtccgaggaggaggaggccaaggacgaaaaggcagagcccaacagggacaaatcagttgggcctctagcgtca

SEQ ID NO: 5668 - DNA, 565 bp, Homo Sapiens
acacctccaaacacagactcagaaatcaggaaagccacaaatgcatacaatctctttaaatgaaatcaccaatgtattctagaggggttgttagtaagtagagccaaatgcaaagaaccgttctacttttctctctctgtgcacacatgtagatttcctgatagcaggttccttaaagcagggcacaacctatttgtattaaccccagaggccttgtatgacttctgtcctggggaaggttgtcacaagctgataagggctgccctggctagacaagatctttgctacctacctgctgtgtggcctcaaacaaagcattccctccttgagaactcattttcttcatcttggcaaattaaagacttggagctctggttctctatgacggtagctggccaggacggtagcggggatagagtgagggaagaacagaagtagaggtgtgtgagtcgcggcaatgccatcatccagtggtagcccctaaacccagcacagtgcctgctggggccggcttggcagagtagatgtgaggctcctaatactttctggaagacactgaccactc

SEQ ID NO: 5669 - DNA, 653 bp, Homo Sapiens
  misc_feature (15)..(15): n is a, c, g, or t
tggtagtctcccaantcctgaggtccagtaagtagcttagaacttcctggaaacagttcatctgagcaggtttcccacgtgtgggatgctccttgtgcctcatctgtctcagggatgcaggctcccccgcatgcatggggatttctccccagaccagcatacttgtgacctgagagttcaatgcgtaaagatgcccctggtcagccatatccatcttctcttgcctggtccttgattctctggccgctccctgaccttcctccttccactgccttgactttcttcctttttattcctggtgccatctgtccaggcagctagacaagaacttgttcaccagcagccggattcaggccttcccaggggcataataagtgaccagcccctcctctccagacatcagatccaacacataaggaccctggcctaccctccagcccaacagccagttctgggtcagctgccaacttaggggtggtttgattatcccattgaaattcaccagtgcctttgccaaagaccctctcatttggacatacccagattcattccctggctccaactgaaaagactcagtttcaatcgttaaaagttcctttagggccagaagaataaatgaattataatcccattcttgaagacactgaccactc

SEQ ID NO: 5670 - DNA, 856 bp, Homo Sapiens
tctgtgtatcagccgccttggtagttcggcttgttttccaaggtcctagatgaggtggagcaccggcgtgggatctccgctgcattggtctatcccttcatgagaagtctcatggagtcgccccttcccagccccagggaagaccatcaaagtgaagacattcctgccaggtgctggcaatgaggtgttagagctgcggcggcccatggactcaaggctggagcacgtggactttgagtgcctttttacctgcctcagtgtgcgccagctcatccgaatctttgcctcactgctgctggagcgccgggtcattttgtggcagataagctcagtaccctttccagctgctcccacgcggtggtgccttgctctaccccttctcctggcagcacaccttcattcctgtctcccggcctccatgattgacatcgtctgctgtcccacccccttcctggttggcctgctctccagctccctccccaaactgaaggagctgcctgtggaggaggcgctgatggtgaatctgggatctgaccgattcatccgacagatggacgacgaagacacgttgttacctaggaagttacaggcagctctggagcaggctctggagaggaagaatgagctgatctcccaggactctgacagcgactccgacgatgaatgtaataccctcaatgggctggtgtcggaggtgtttatccgcttctttctggagaccgttgggcactactccctctgtctgacacagagtgagaagggagagagggcctttcagtcgagagcccgtccgcatatctgtggcctccgcacccccccggcgcggtcgtgaggtgtgtatgtagtctcagtatat

SEQ ID NO: 5671 - DNA, 1190 bp, Homo Sapiens
  misc_feature (716)..(716): n is a, c, g, or t
ggtagggtccaagcttcttgagtggattagacaaagcagacttcgtgttcatcatatatcatatgatgaacagttcaattgcacccacaggagagaggtcttcttggagaatgcttgtttatagaatcttctgtaaaatagagttggctacttctaatgattcatcttgtactaaaacaatatcataagagtccatgtacttggctaaaagctcatccactctatcatttagatatccaattttcagaatgtgctcaacattggccactccatctgccattcttaagtctccttgggagtctcccagaagaattatgttactattgtcttttagttgattgaaatattctgtattcctcaaggcaccatcatgtttgttaaatacatgaattagttctcctttaaatcctttgagcaccccagattcatcaaaatccataaaattggacacaactttgacattgggatgataaacaccagcttgacgaataacttcctctagtacatcgccgattccagccgaaaatatgaacacggggatgctatgttgttggagcttatcaaagaaattctcatatccttcttcgagcataacgtcagattctgccacaatttctttaagtgtagcttgtggtaaagcttgctgaacaagcaaaccatgtgatttagtataccatgccaccatataagggtacttctctgtctacagtaagaancaggatcaacttcaatagcgtaatatttttcctttagttgcaataacttttttctacattcatctgtaaccagcttacagttgtcaatgatattatgacatgttgggcatcttttccctttatatgaaaatctactgagtgtcatatcaaagtccgttattatctgaagtttggcagctcctcctttgataagaccacagataatttcttctactcttgtagggttcttgattcgaactgaacttttctggaattctggcatcatctcgatgatcttggtcttccgccccgtcttcctcttcaaggtgaatatgtactgagccagcaccacccccgccaccagggcgcacacgctggcgctcgctaccgcgcccaccctcgccacggccgcgcggtccatggacggggccctcatgcgcgtccaagcaggaaaaaaacaggcagctcgcgtagactgcgagtctcggaagcgcg

SEQ ID NO: 5672 - DNA, 668 bp, Homo Sapiens
ctcgcgaacgtgttatcattcatagtgtctacaggacatatgaagagtgcaatggcaaaacaagagcaaaaagcacttcctcccatgaccttacagtaaccatactgattgaatccccagggacattccatcattgcaatagctcagatttttcttcctttttctttgcacaccagctctactctttagtacaattgtaaaaggctgccattatggacattaggtatcccaacataaccatctggagtgtgtccagtttgttcttcataggaccaatttttatttgcagcttgagtttttatatgaagttgcattattgtggacttggctgtcttgtgatgaatttttttcatatgtattctgtgccatactattgttaaaatgaactgttgctattgtgagatggattttaactgacctattaagggtttctttcgaatggcactactttagggacattctagtatttgcttctattgtttgggccttgtggataatgtacagatttaaaaacaaatcttgttgctgatttgtccatttctttccctgcactttgttacatctgggatacagtctaactcatctgatttaatatgcatttaaaaaaatgccataactattaaacaccttgtttacagacagatgaaataaatttattccaaccaaaa

SEQ ID NO: 5673 - DNA, 351 bp, Homo Sapiens
gacaaactgcaccagttgctgcttcaatttatacctcaattttcactgtgtccaggtggtactttggctcgttggctagattaaccttctctgtccgagtgtgccacacgagaacctgaaggggaaggaaatagcttgggtagcgcactcttcatggtgacactcgaggtcgggcagcacaagtgtaatgaataccttagtgcagttatttgctttcggttccagttcttcgactgttgtaatctgtttgagaaagtcagattcttgcatccctggctgggatccacgacgcttaaaaacagcttttggattggacaaaatgacttgaagacttacagcaaatcctttgtg

SEQ ID NO: 5674 - DNA, 593 bp, Homo Sapiens
agccctgtgacctgattttaggatctgctctcacagccggtgccccagagactgggacaacgggttctgaacattgaaaatgagagcaggctcaggatccacaggggtaaccatcccgtgagcccctcctgagcagccagccagtcagtgaggctcttcaccttacttccatttctctgattccacctatgtacaacttacgaaaacttgcattattatagactgggagttcttaaattggaatctgtgaatctaaaggggccagaggatagaaatcaggaaatctgaaaacttcgatggaaaaaagaagtttttatttatttccatcaggaaaataggcaacaaaccacagcagtattagtacctgtgtctctgtcatcactaggaatcacagatatccacgttacagatatcttaaaatatttatgtacagcaccactctgaaattatggtaataattagatccaccccctaggtcttgtaatctttaatatgttaataaagaagcacatctattatgtgacagatttaaatgtttaagaatttgatttcaatgaaattgcatttcaataaaattggcttcctttgcaaaa

SEQ ID NO: 5675 - DNA, 589 bp, Homo Sapiens
gcggccgctccagcatcagaatggttgaaagaccagctctaagtaggccaattaaaaaaatctaattcctcaaatttgtgtgttccagtcctggcctggaatgggtaatggggtgagttaacccaccgcccagctggcaagggaaaccttctgactggttgtgatcgaaacaggtggacagagacacctgcacttggaactggactccacccaccagttccattttgggtggcagcagctttggatcactcattattacaaggtcatgctgaaattttattttgctcttgctatagatacttaggtaatgtggatttgttttggtagctatttcactgaaggaagtgctacttatataaaagctagaaataatgtgattcctaggatgagaaattggttaacagagctctgttgtctggttttagtctttctaaaggatattttaactaaaactatggagatgctaagagagtgactttctaaatatgaaacagataatttacggtacaaggctgacatagtgcccttgtcagtttctgtaagatgccactactgtcacaaggtgtttcagactcttgataacgcagtg

SEQ ID NO: 5676 - DNA, 861 bp, Homo Sapiens
cgtgcatcattgtttcagttctagttttatttttctctcagatatttttcttctttaaaatctttcccagaagttggttcctagaaaactcaataccatcatctcttatctctatacagggactaggtaataaaaccttcaaaggttgtcaaaggtcatcaagcagtgttcatttatcctgtcacatgtttctgtttctatagtaatttagaaattgcaaatagttaacttttcatcatgtaaaaagttaacattatcctatttccatagataccatggacggcggtgtggcctgagttgtcagtctttaatcctgagtcatgtggctctcttttcatctttgatgtcagttccaattatttggcatcaaaaaccttcatggtaggtagagttttaggtaaaagtggatctagggttactttctttattaacatttcctaaataactgaattgagagacatactctgctactatgtcctcaggttaatttttgtctgatcttacgatgccctgccttttactagctactttagaaatagaaaatgtgaagagtgactatttacatgtatactcctttggctgctagaactcatctgtagtcctttattatttacactgaattccaatttcatttctgcttccgctaagtaagagcacctcattcctgtgttttctctactattgagctgtagacgaactgtttctctaattataaagcaaactgtttgggatattcagggaaactaccccaatgttatgttgtcatttaatgggaaaggctgggatcatatgtatttctatgttctgtaaagtatttgacttactagttctcaataaaattttattaggactataaaaaaa

SEQ ID NO: 5677 - DNA, 497 bp, Homo Sapiens
  misc_feature (38)..(38): n is a, c, g, or t
  misc_feature (54)..(54): n is a, c, g, or t
gtccactggcggaacccaccggagcccggaggctttgngtccccctgggctggnttccgtctcctccagtggagggagaggtggggccctgctggggtagagctggggacgccacgtgccattcccatgggccagtgagggcctggggcctctgttctgctgtggcctgagctccccagagtcctgaggaggagcgccagttgcccctcgctcacagaccacacacccagccctcctgggccagcccagagggcccttcagaccccagctgtctgcgcgtctgactcttgtggcctcagcaggacaggccccgggcactgcctcacagccaaggctggactgggttggctgcagtgtggtgtttagtggataccacatcggaagtgattttctaaattggatttgaattcggctcctgttttctatttgtcatgaaacagtgtatttggggagatgctgtgggaggatgtaaatatcttgtttctcctcaaactgtc

SEQ ID NO: 5678 - DNA, 429 bp, Homo Sapiens
tgatcaggcctgaccaagcccctgactggggctggcctctgacctgggagcgggtggccaggcccctggcatcgtgccgagagcactcggtaccactccattctcaacggggcatcctccctgccatcaccgccgtcctccaactggatcccaggtcctgtgaccctgagagggaagctgtgtctgggctccaggagctggtggacagagctgggcagaatctcattccttcccttctgaggattccacgtaaccacttgggagccgggagggctggcaaattctttcccttttgacttctgccttttgcacagggaatgaactagaccacaggtaatgtgcgctcagagatcttcagatcagggttcctcaatcacggtgcaggtggtgtccatgggacctggcccgggctgtctctgatgcggccgc

SEQ ID NO: 5679 - DNA, 633 bp, Homo Sapiens
tatccgtgtcggggttgcaacactgtaagcacctgagcattcagctcaggcaccacacctggcccagatgaggtcaccgggctcagagcagcttccgggagttcagtactgaggaccgtcagatgctctcagggtggaggggaccaagacgtactctcagtgcacctctctcttacattgcttagatgttcccaaagtccatccaggttgttgtgctttgggatctgacgttcttgggtttgcacaataacggttaggatgttcacacccgggagaggaaacgccacaagaggtacacacagagaatcagaggatgaacacaggtgttcttgaaggcaggctcagagctaggtagctaccagcttatccgaacaggaaccttccagcagacctggtacctgaaccagaccatccataaaacctagtctctcacacactccacgtggcctcacaacatccaaaagtgttagcagcgaacatggcttcattcccagaaatggatgcctttaagaccaaacaaagaggccacttgtgcctgactccctccccttcccggccccacaacaggcagaccaactcatgtccccactccccgccaaccccgaacacggatagggaatcgagcttggattt

SEQ ID NO: 5680 - DNA, 581 bp, Homo Sapiens
tgggatctgacatgggctcagaatcgaacgcagaggctggtgactgggtgaaatgctaacgcctcatgctatagatggacacgactgagggtacacaggaggagtcaggacatgcccagactcgtgaaacacatcgtggcaccagaggaacttgtgtaaaggaactaccccagcatcacaagtggctgatagtatggagtctggaaacactctgtccttcctgtaattggacccccgcaagcccccatgcaattaccactatccaggctgatggctgtagaaaaacttctctcttcctgagctaaagtgcttcatctcagactcccaactgaccagagatgcagcactgcacctcaggctggaagaccagggcgctgcgctgctccgcttctggtggcctgtggcgggactccaacctggccaggagaaggggtgttaagagggtgacctgggctccacctctccagctctgaccgggaggctgttgtaattcctcacaagtgtgtttcctgtctgtggcctgccatttgagcaccccggaccaaaccttgacccttttcttctctacttatctttgtatc

SEQ ID NO: 5681 - DNA, 616 bp, Homo Sapiens
aaaaatgaaacgcaaactgaagaagatgagcagactcacggacccatgagtccacagcaagcagcccattcgagtacctgggactgcaggaggcaggggaagagaccgaatagctagaatatttccaaattgcataaaaatgacaaagcctacaaatcttgacaaacccccaaaacacacacacataccctaaagcttatcaaattacagaaaaccagggataaagagaaaaaatcaaaagcagccgcagaatacatacatgatgactatcatgtatcagtcaagagatagaaacatttaacacgaagaatgattcaacaggaacagagggttccactaacatgtaaagagacttccgagaacagaggcgctgaggcctcgggagaacctccaccgccaggactgagacaacaaacccacaagcgttgagtctggatcttggtgagaacctcggaaccccacgtcggctgagacgcagctctgacctgagtggggctatgatgtgccgggtggtgcagttggccaaggtgcagcaggccaaggcctgagagcaggaagcccggggcaggagtgccagcgagactcacccagaagctctacctggggcaggagggag

SEQ ID NO: 5682 - DNA, 661 bp, Homo Sapiens
acccaagtggacattcatgttctctccgtgccctcaggtttcaccccacctaggaagcaagttttgcagagatccatgtcgctgcactgcagacagcggtatcgatgccagagggcaatctcatcacacccatcacaagagatgtccacatttaacaggtcacagtagcgagcaatgaacatgtgcattttcctctgcttctctggatcttcctgggctattttttcataccaggcctcaaacatgccatcctgacactcatccatccattctgaattctgcttggcatcagcaagctcatcttcttcactccattggctgatcacactgtcatggacacttatattctcctgtgacattttcatgaggagatctggtaactgaatatcaacaaagaaggcgagatcattgggttcccagcccatatccaaaagatgaagcagggctgtctgaacacaggataaggcagggagcaaggacctgtcatttaggctactaaatcctttaactgctttgaccaaaaacagaacaagttgatagtaagtgtctcgaatttctttgtgtagatcagcaccacagccttccaggtgtccaaaataattggtaaaatctttctggcaggtcagaagttccaacaggaaaagtatgaaagctggattgc

SEQ ID NO: 5683 - DNA, 621 bp, Homo Sapiens
acagaggccccaggcttggtctggcgggagggtgggtccagccctgatcctgctggtggactgttccggtgctcaccaggcgtgggctcctctccagccaccgcaacctgagtggggagaggtaccccctaagagacacccaatcagttaggcccggaaaggcggggagacaggcaggtgggactagctgtgcaaccttgggtatcagggtcctgagtagaaaggacttttctattccatcgtcccgaggctttaaagcagggccaggtagcgagcttggcaaactctcaggtgctgtgcacttaagtgacacacctgcgaggaatgtggagaagagacaagttcaggagcccacaggctgaggagccccccaagtcctcaagtctaacaccagaaatggtcactgaggttgccacctagccagagcgccacctctgagatgaggctactcaggaaaaccttctaaaccccaataacttctaaaggccatccaacctcagtctccactccgtgcctgtcaccagaccagcctctgagccaccctccctgttctgccctgctctgttcccttttggcgggcgccagggtttagagccgggccgcaaaaggcttgctgccttg

SEQ ID NO: 5684 - DNA, 661 bp, Homo Sapiens
gaggatccgaggatacggattgccccgtctgtgtctcttgggcctctggagggacggcatttgtgctaaggcctgaaggaagggtaggaagcagcaagaagggccttccacggaggaaggaaccagacaaatatagaaaggtcccaagataaagatgagtgaattccaggacagaagagaaagccagtgtgttagggcctggtgcagaaaggggagcgggataggggcgcggtcagaggtaaggctgagactggaccagtttgggcctgggtgccaggatgagtctttggtcatggtacacggaagggttatctgtttgaagttgcggaggggcatgatgtgatgctctgcgtctaagaattatcattttatctgctataaggagaattttggtagggctaaaagtggaagcagtccttatcaggaaacccaaacatttataacttttgggaatttctcactcctgggactggctttagaaagtgatccaaaattgtaaggggagatcatcagtgttttggtcagcctggcaatttagtccacttgctctggtgatggctgcccaatttcttatttttcttttgagaaatcacatccttccctcacccatctctagtccttagggtgggctgactctacaggatgggtacacacctggcct

SEQ ID NO: 5685 - DNA, 508 bp, Homo Sapiens
tagatataggggttggcgatgggaagcaagaatgcccccacagctttgaacccaggtgccattcattatttctatgccatctgccaggcattgcatagctattatcgcatctaatctcctcctaatcttgtggcctggtattttcatccttatatcagagacgagaaaactaagggtcagagaaaattagcaattggtctaaaattgtacagttgtaacaggatctagaacagggacttcagtacaggcctccctgacccccaagcctgtgttctttctactgtactaggcttggaagacagcgtacgtaagagcaaagacaagctctgtccactctgtgcatattcagtgtaggtgctggtgagattcccgccttcaggtgtccagcaagtggttggagacatggagccgaatctcaaggacattgggaggattgaaggtcaaggcttaagaaccatctgcatcctcatttatttattcagcagctatttgtagtgtcttcgtggac

SEQ ID NO: 5686 - DNA, 311 bp, Homo Sapiens
tgccctcgagactcccaagtgctgggattacaggcataagccaccatgcccggcccacatgggctaattgttttaaacatgatctcttcttgtcctgccctgctaggacgacaaattatcaagcgcaggggtggaagctggagccctgttcattcctctcttccctctttccctcctctcctccctctaggctagtgcaagcagcagctgtttgaccctaggggcacatatccttgcctggcctatctgcacttgagcttcctatgggtgcccattcttggtcctgccatgctgcaggacttgcgcttctg

SEQ ID NO: 5687 - DNA, 646 bp, Homo Sapiens
ctgtgaactgcgtccatcatcttcttgtcatggcagctttgcctccgtgcacacgctgttgcctgagactcaggggagcttttactttggtctctaggcctgtgattaatttctggctaatcaagttaattgacacagatctgtcacagtttctcattgcagggtcaagagttctagaattcatctattctacagttaagccttctccaaagatttgtgcctgcacatcatcatcaagttaaaagcaagaaagatcatcttagtgatgttgggtatttgcttatgttaactgccggaagcacatgcgcacgcacacacacgcgaacacacaatcacttcataagtggagaacagaagtgaaataatacgcaaagcctaaattacacagctcccaagttaactaaagaatgacactgaaaccataaggtaactccttctgattacacacgaacttattgcgtgatggcggaaagcaacttctatgacccaacaagtgtaaaccaaaagtgttctttaaccattagcttgacaaggtagctaaaaatagcgtggttaagaataacctgtataattctgctccgtgtacctcatgacattaggaggcagtgaagcaggacatggatatgctctctacaaaggacattcc

SEQ ID NO: 5688 - DNA, 946 bp, Homo Sapiens
tgtcacaaagtgctaggattactggcatgaattaccatgcgtggcccagaatagtatattgagtgcccatttacttgccaacagtttcaatgattatcagcttgtggacagacttgtatatctctatttgcatccgctctctgactccttgattattttaatgcaagtcgcagaccataaataatttcattcataagtatttgagtatgtggcctggctcctgtccacttctccatccccatctggtgccactgcccttctggatttcactggcacggggcaggcaggactgcctgataagtgccctgtccctcccttctaggacaataacggtgtgattggactgttggagcccatgaagaagagcatggtgcctgtgcaggtgcagctggatgtacctgtggtaaaggtggcctcaggtgggtctgggggcacttgctcagggcaggagttggaggaccttgttctggggctggcctagccttgggccttacagttgtggcctgcatcccttaccttttcatccttaggaaacgaccacttggtgatgctgacagctgatggtgacctctacaccttgggctgcggggaacagggccagctaggccgtgtgcctgagttatttgccaaccgtggtggccggcaaggcctcggtaagtggccttggtacctccagcagggcaaattggcaggccacccccacagtgaaggccaaaggcaggaaggatttgctgtggtcaggcttgcatcagatgggcttgtggtgttggttaggactttggagacagactgctctggtagttttgccacctactgtctatgggactctgaacatagtttcttcatcactaagtctacctacctgtaaacctacttcattaggttgctgtgaagttaaatgagttaatgagaagaatatcagcagattcgctatcctcgggatcct

SEQ ID NO: 5689 - DNA, 764 bp, Homo Sapiens
tgcgggaccctatcatcctcggtggactatgagctccgtaccagccactcaaaagtgtctgaacagaaccgctccgtgactggtagctgggtctgaggattcaggattgtggcgttattcaaagaggagactttgaaattccccgatggctggaatgtggagcccaggtgcctctggtggagggtcatctgcttttccagactgtggttgtgaaccggctccttctccaagaaaggttgcaagctgagaacatccagaggtgagactcagacacattgaaagtgactgcatttagggaggtttaacgagttcttactgatcattccacttgttactggttaagataatttgcccacgggtttgtttccaagtcctcttctaggaccaggctcctggtatttcaggggctggttggctgcacagacagcccctcttctgctgtccttgaggacagacaccaaaccagaggtggaggaagaacggtaggaaggctgatggcaaaagcggctgtgtgtcgaggttattttaactttttactactttttgttactgtttctgcaaatgctaacacataaaccatgacctaacttttgtcaccttggatatctattgaatgttaaacatctctaataaagatggccaccacttaatgtgtggaaagtgatggccttctcgtgggccacgcgtttgggtgtgagtatggccttgaccaagggtcttggtgctttattcacttttagagatagggtaacccaggcgagctc

SEQ ID NO: 5690 - DNA, 465 bp, Homo Sapiens
gggctgccgggctggtggccagtgtttccacctccctggcagtcaggcctagaggctggcgtctgtgcagttgggggaggcagtagacacgggacaggctttattatttatttttcagcatgaaagaccaaacgtatcgagagctgggctgggctgggctggtgtggctgctgaagccccacagctgtgggctgctgaagtcagctccgcgggggagctgaccctgacgtcagcagaccgagaccagtcccagttccagggggaggcctgcaggcccctggccccttccaccacctctgccctccgtctgcagacctcgtccatctgcaccaggctctgccttcactcccccaagtctttggaaatttgttcttttcctttgaagtcacattttcttttaaaattttttgttttgcatccgaaaccgaaagaaataaagcggtgggaggcagggccattgtgttg

SEQ ID NO: 5691 - DNA, 354 bp, Homo Sapiens
gggcaactgtgctgcctgcgggaggatggtgagcggtgcggccgggcggcaggcaacgccagcttcagcaagaggatccagaagagcatctcccagaagaaggtgaagatcgagctggataagagcgcaaggcatctttacatatgtgattatcataaaaacttaattcagagtgttcgaaacagaagaaagagaaaagggagtgatgatgatggaggtgattcacctgttcaagatattgataccccagaggttgatttataccaattacaagtaaatacacttaggagatacaaaagacacttcaagctaccaaccagaccaggacttaataaagcacaacttgttgagata

SEQ ID NO: 5692 - DNA, 584 bp, Homo Sapiens
gagtggcaaagcactttacagtagtaactgaggaatcagagtctctgcttcagcgatatctagtttgtacagttgggtgatcttttgtaattcctaggaggtaatgcatttttaatgttttctgaagctttgtaagtgtgagagagggacaagaagtgcagttctgttctggaattccttattgctttcaacggacactctttgtgaaaaatccaagtaatattttagttcaaacttgatcttgagccaaggcccactgccacctctgggatgggagtcggacctacataccaagtgacaagttcaccttaacatctgcttccagaatggctttgattcagccgtgccaggcaacagaacagggtcagactcctgctctgttattggcttgaagactaggatcccaaaggggttggaggcagggaatatttgaaaattcagactggaattccaggccaaaagctcaagaccaccagcctctcctcctgcctggaaaaataagcctttgtgaaagactgatttaccatgtacaattgtgattgtgaacgttgttgagtaaacctccagactttctctaaaaaaaa

SEQ ID NO: 5693 - DNA, 1431 bp, Homo Sapiens
  misc_feature (65)..(159): n is a, c, g, or t
  misc_feature (559)..(586): n is a, c, g, or t
  misc_feature (985)..(1011): n is a, c, g, or t
  misc_feature (1265)..(1265): n is a, c, g, or t
gatgaacgggacaaaccagcacttccgagattgcaaccccaagcacagcggcggcagcagcaccnnnnnnnnnnnnnnnnnnnnnnnnnnnnnnnnnnnnnnnnnnnnnnnnnnnnnnnnnnnnnnnnnnnnnnnnnnnnnnnnnnnnnnnnnnnnnnncggcaacatgcccgcctccgtggccacgtccccgctgcaatgctgccgcccaatgtcatagacactgatttcatcgacgaggaaggttcttatgtccttggtgagtagaacatgggtttggaccgcatcaaggagctgcccgaactctggctggggcaaagacgagtttgattgtatgacggtacttcgtgtgcgaaacagcagcccagcagagtgagctgttgactcgatcgaaaccccggcgaaagaaatcaaacccccaacttcttcggcgtgaattaaaagaaacattcccttagacacagtatctcacttttcagatcttgaaaggtttgagaacttggaaacaaagtaaactataaacttgtacaaattggttttaaaaaaaattgctgccacnnnnnnnnnnnnnnnnnnnnnnnnnnnngtagccttgacattcacccacctcccttatgtagttgaaatatctagctaacttggtctttttcgttgttggtttttactcctttccctcactttctccagtgctcaactgttagatattaatcttggcaaactgcttaatcttgtggattttgtagatggtttcaaatgactgaactgcattcagatttacgagtgaaaggaaaaattgcattagttggttgcatgaacttcgaagggcagatattactgcacaaactgccatctcgcttcatttttttaactatgcatttgagtacagactaatttttaaaatatgctaaactggaagattaaacagatgtgggccaaactgttctggatcaggaaagtcatactgttcactttcaagttggctgtnnnnnnnnnnnnnnnnnnnnnnnnnnnatatgtacagatgataatagggtgtggaatgtcgtcagtggcaaacatttcacagatttttattttgtttctgtcttcaacatttttgacactgtgctaatagttatattcagtacatgaaaagatactactgtgttgaaagctttttaggaaattttgacagtatttttgtacaaaacatttttttgaaaaaatacttgttaatttattctattttaatttgccaatgtcaataaaaagttaaggaacttccnccccgaccaaacctccactagaagaaaaatcacccctacccaaattggtatgaggggtcatcccctacctctaagaagagtcccctcaccctctccctaaaacggggggggcccccctcaaaaaaatccctccgcgggggcgcccctttatacgccccaccccttt

SEQ ID NO: 5694 - DNA, 403 bp, Homo Sapiens
gtgataatacaattttctttattaaaaataatttacagcatcagtaacatatacacaattgtcatcaactgaactttgcctccaatatatttctatacaatacttaacattattgaacttaaaactgttacactgttttggtggctttaaataatagacaatgatttttgtctattacttagtgatagacaaagggattactttgttacttaagtgagatatatggtttcatagccacatattatgtgtaaaattgatagaaacgtcagcaatatcactctttaggggaaaaaacactgaaaagccaaaggccaccctcttcttctctcttattactccaaccaaactaagataggataaacatccagtatcttagtatctcctcctaaacctaaagacaaaa

SEQ ID NO: 5695 - DNA, 413 bp, Homo Sapiens
gggattacagatgaaagcaccattatcaagtcagaagagcacaagtcaaaccactgtatgttgaggactctctgtactttcttaaatgtttgatagaattcacctaagaaagcatgtagcctgtaattatagaaatctttttaaattaaaaaaattcttcaatacatagagaagctattactttttctatttcattttgcatcagttttaagaattagttttacaaataatttcccatgttattttaattgtcaaatgtattggcctaaagttttcataattatattgatgtctgtaggttctgtagttacatcctctatttaattcccattatctacattatgtagcttctgtaatttttttcgagataaatcttgctagccattgtttattaaaaaatttttttcaaagaa

SEQ ID NO: 5696 - DNA, 344 bp, Homo Sapiens
agcagcaaagaagagtcactccctaaacctaaagaaaaaactaagctaggatcctcttccgaaatagaagtacctgcaaaaacaactcacgtcttgaaacactcagtgcccttgccaacagaactcagctttgaagcaaagaccaaatcagaatccacttcaggtgcaacccagtttatgcctgaccccaagctcatggatcacgggcagtcccacccagaagatatagatatgtacagcactagaagctgaagtagactgcatgcagagactacacagaaaactacaagatgtgtggcgttgcaaataatgatgaaaataaatcatgtaatgggtaactgaat

SEQ ID NO: 5697 - DNA, 1109 bp, Homo Sapiens
tctagaggttccgagggctaggggatctgccgacggattcggatctgcccactgaccctcgtcccgcccccgccattcgccgcctcctcctgtcccgcagtcggcgtacagcggctctgcttgtacgtgtgtgatgtcgttgcaggccttattcatgggctcaccgctgaggttcgacgggcgggtggtactggtcaccggcgcagaggcaggattgggccgagcctatgccctggctttagcagaaagaggagcgtaagttgttgtgaatgattttgggaggggacttcaaaggagttggtaaaggctccttagactgctgactaaggttgttgaagaaataagaaggagaggtggaaaagcagtggccaactatgattcagtggaagaaggagagaaggttgtgaagacagccctggatgcttttggaagaatagatgttgtggtcaacaatgctggaattctgagggatcgttcctttgctaggataagtgatgaagactgggatataatccacagagttcatttgcggggttcattccaagtgacacgggcagcatgggaacacatgaagaaacagaagtatggaaggattattatgacttcatcagcttcaggaatatatggcaactttggccaggccaattatagtgctgcaaagttgggtcttctgggccttgcgaattctcttgcaattgaaggcaggaaaaagcaacattcattgtaacaccattgctcctaatgcgggatcacggatgactcagacagttatgcctgaagatcttgtggaagccctgaagccagagtatgtggcacctcttgtcctttggctttgtcacgagagttgtgaggagaatggtggcttgtttgaggttggagcaggatggatctggacaaattacgctgggagcggactctttggagctatttgtaagacaaacagaatcacccaatgactcctgaggcagtcaaggctaactggaagaagatctgtgactttgagaatgccaggcaagcctcagagtatccaacgaatccactggccgtataatcgaagttctgagtacacaatagctccgcaagaggaagttcacgcaacttcatactaa

SEQ ID NO: 5698 - DNA, 606 bp, Homo Sapiens
gcggatctgcccagaactgaaagagatcttagacttcacttgtatactccgcttgtttttgctgcattttagagatcactttcctggacttgcactctgcctcctcttctctgggttgtaagctacctgaagacaggacgatatcttctatttctttttggccctcctagcactccacagcctttaatacagggctttgtacatgggtactcacctaattctggataaagtgcatccttgggcaggctttccctccatccacccaaacgcataagacatcctgtagtggagctaagggttatcctcttctcctctgcccctgtccttaatgccaatatctgagaagcagtgacccccagcccagctctccaatgccctccttctgctactctcctgctcttcctccttccaggccttgttgtcaggacatgaaatcactccacgtcctgagtgacactcacactaggatctcgttgtattcaactgtctcctccaggttctgaaggttggggttgacactgcggattgcacgcatgtatgcctttagcagctggatgtctcgcttctgtagtggggaagaagaacaggaatcatggttaaggcaga

SEQ ID NO: 5699 - DNA, 872 bp, Homo Sapiens
gacggggtggctgaacctcgcaggtggcatgagaggctcccctggggctgtggggctctacgtggatctgatggagccgctggtgacctgggtggtccccctcctcttcctcttcctgctgtccaggcagggcgctgcctgcagaaccagtgagtgctgttttcaggacccgccatatccggatgcagactcaggctcggcctcgggccctagggacctgagatgctatcggatatccagtgatcgttacgagtgctcctggcagtatgagggtcccacagctggggtcagccacttcctgcggtgttgccttagctccgggcgctgctgctacttcgccgccggctcagccaccaggctgcagttctccgaccaggctggggtgtctgtgctgtacactgtcacactctgggtggaatcctgggccaggaaccagacagagaagtctcctgaggtcaccctgcagctctacaactcagttaacatatgagcctcctctgggagacatcaaggtgtccaagttggccgggcagctgcgtatggagtgggagaccccggataaccaggttggtgctgaggtgcagttccggcaccggacacccagcagcccatggaagttgggcgactgcggacctcaggatgatgatactgagtcctgcctctgccccctggcagatgaatgtggcccaggaaattccagctccggaagacgggcggatggggagccaagggaagtcctggagcaagtggagcagccctgtgtgagttcccctgaaaacccaccaagctcaggtgagatctcggtgagcagctgggccagattggaacgaagcggtgaccctgaaaaaacagcacaccaatgggagtcaaaa

SEQ ID NO: 5700 - DNA, 436 bp, Homo Sapiens
tggcatctgtgaagcttttctttgtattgagtgtggaaaaagtttcagtcggagctcattccttattgaacatcagaggatccatactggtgaaagaccttatcagtgcaaagagtgtgggaaaagtttcagtcagctttgcaaccttactcatcatcagagaattcacacaggagacaagccccataaatgtgaggaatgtggaaaagcctttagtagaagctcaggtcttattcagcatcagagaattcacaccagggagaagacttatccatacaatgaaactaaggaaagttttgatccaaattgcagtcttgttatacagcaggaagtctaccctaaggagaaatcttataaatgtgatgaatgtgggaaaacttttagtgttagtgctcatcttgtacaacatcaaagaatccacactggttaagaagca

SEQ ID NO: 5701 - DNA, 606 bp, Homo Sapiens
tgacatctacttcaaccctaagacgcgaaagttcaccaaaaaggccccaactagcagctcccagagaagtttcgtggagtttatcttggagcctctttataagatcctcgcccaggttgtaggtgacgtggacaccagcctcccgcggaccctagacgagcttggcatccacctgacgaaggaggagctgaagctgaacatccgccccttgctcaggctggtctgcaaaaagttctttggcgagttcacaggctttgtggacatgtgtgtgcagcatatcccttctccaaaggttgggcgccaagcccaagatggagcacacctacaccggtggtgtggactccgaactcggcgaggctatgagtgactgtgaccctgaatggccacctgatgtgccacactactaagatgtacagcacagatgatggagtccactttcacgcctttggccgggtgctgagtggcaccattcaagctgggcagcctgtgaaggtactgggggagaactacaccctggaggatgaggaagactcctcattgctcggggttcggttatggttgctgtcttcacgacttggatgatcaacacctgcaatcagaagccag

SEQ ID NO: 5702 - DNA, 267 bp, Homo Sapiens
acccccgtcctgattgccatgtagttctgatacacagtcccaagcacgcatgaagtcttgacactgagagcttgtcccggagctgctacctctctgtcacatccccgaaaggttccaagcgggcacggggggagcgatggtagtagagctcgttaaattcatccatccatacttcagctgcgacaaacactgttggccagagccttgtggcgggagtagggagcgtgcttgcggaaaacattgtgccaacatgggccgggtaccgag

SEQ ID NO: 5703 - DNA, 312 bp, Homo Sapiens
  misc_feature (21)..(21): n is a, c, g, or t
atgaggttccccccgtccgantggcccactgaacaactagccggaagaggtgagaagaagagagtggtctgaggggctttgcgagggagctagactcggcccagttccaggaagggctggaactggagggccagaaccagtaccactgaccgggacctgaggcctccactggcgacttgttgaggggtcaggggagggcctggcaaggggaggcaggagggtggcctggacctccccactacctcctgcagactttgagaagcccacagtggagacatccaacaccccagccatgggcccatcgggacgggg

SEQ ID NO: 5704 - DNA, 575 bp, Homo Sapiens
cggccgcgcgcgccagcagggaatatactggtgcccgagcccagcatccgcagtgtcatgcagaagtacctggaggaccggggcgaggtgacctttgagaagatcttttcccagaagctggggtacctgctcttccgagacttctgcctgaaccacctggaggaggccaggcccttggtggaattctatgaggagatcaagaagtacgagaagctggagacggaggaggagcgtgtggcccgcagccgggagatcttcgactcatacatcatgaaggagctgctggcctgctcgcatcccttctcgaagagtgccactgagcatgtccaaggccacctggggaagaagcaggtgcctccggatctcttccagccatacatcgaacagatttgtcaaaacctccgaggggacgtgttccagaaattcattgagagcgataagttcacacggttttggctagtggaagaatgtggagctcaacatctcgtctgaccatgaacgacttccagcgtgcttcgccatcatagggctcgaagcgctgttgtgccgaggtgctaataggctcccgagggttt

SEQ ID NO: 5705 - DNA, 528 bp, Homo Sapiens
agccgtgtcttagggatgttcgcgtccagtaaagacactggtaactgcggtttcagccaacactcttcatggcagtgtcgacctcgggttagcttctgttgtctttgtggatggttttcctggagcggcctgacgttgacgtgttctctggtcccatgtcttagcggggcatggtacggtttcgtgcctgacgcgtgcattagggtgttctcttatactttcagtagcatctttccacagcaagggccaaaccctcctggttcccttcagagtctttttggcctgatgatgactcttgagtgataccctgtgatgcagacatgccccagatggattctactttctttaaaactagggactttcaagattaaaaaaaagattgtcactactaatttgacgcctaacttcagaagcttcactgtctacatgtgaacttttccagaaaaactgtgccatggacatttttcctctggggaattaacatctaaattctggtaactattaaaagacagatctggttaatttaaa

SEQ ID NO: 5706 - DNA, 1637 bp, Homo Sapiens
  misc_feature (1084)..(1134): n is a, c, g, or t
  misc_feature (1381)..(1389): n is a, c, g, or t
gaggaagcacagctgtggtcagaagcatttgacgagctgctagccagcaaatatggtcttgctgcattcagggcttttttaaagtcggaattctatgaagaaaatattgaattctggctggcctgtgaagacttcattaaaaccaaatcacccctaaagctgtcctcaaaagcaaggaaaatatatactaacttcatagaaaaggaagctccaaaagagataaacatagattttcaaaccaatactctgattgcccagaatatacagaagctacaagtggctgctttacaactgcccagaaaagggtatacagcttgatggagaacaactcttatcctcgtttcttggagtcagaattctaccaggacttgtgtaaaaagccacaaatcaccacagagcctcatgctacatgaaatgtaaaagggagcccagaaatggaggacatttcattctttttcctgaggggaaggactgtgacctgccataaagactgaccttgaattcagcctgggtgttcaggaaacatcactcagaactattgattcaaagttgggtagtgaatcaggaagccagtaactgactaggagaagctggtatcagaacagcttccctcactgtgtacagaacgcaagaagggaataggtggtctgaacgtggtgtctcactctgaaaagcaggaatgtaagatgatgaaagagacaatgtaatactgttggtccaaaagcatttaaaatcaatagatctgggattatgtggccttaggtagctggttgtacatctttccctaaatcgatccatgttaccacatagtagttttagtttaggattcagtaacagtgaagtgtttactatgtgcaagggtattgaagttcttatgaccacagatcatcagtactgttgtctcatgtaatgctaaaactgaaatggtccgtgtttgcattgttaaaaatgatgtgtgaaatagaatgagtgctatggtgttgaaaactgcagtgtccgttatgagtgccaaaaatctgtcttgaaggcagctacactttgaagtggtctttgaatacttttaataaatttattttgataaatnnnnnnnnnnnnnnnnnnnnnnnnnnnnnnnnnnnnnnnnnnnnnnnnnnncaaaaagataccccctccgagaggggccgcaagtcttaagcgcgcggttacgcccgaggtttttctctgggtcaaaaaggggggggcccctagataaagggaggagaacgcgcaaattaataaaagccagaggacagcggggcccggccgtgtaacacacaaccagttgcgggacgtgggagaaagacgcggtctcagcctggggagatccgttggggaaaggggagaccccctatattcttgcgtnnnnnnnnncgaccctatactgtgggcgaccaaaactatacccttaaggagaagatattttaaagcgcgaccccaagggggaacaattaatttaaacaccttttttcaagggtgtttttacgtgggggtgtttaacaccatgaccggggtatttgtgccctcgccggtcttagaaaaaaatttggtcctcaccagcgaaatatgaatatttggcaataattttttatccgccggacgctgtggctaataataaaaga

SEQ ID NO: 5707 - DNA, 805 bp, Homo Sapiens
gcaaaagcctatggtgtgcttgttactggacccaataaggggggcaagtctacgctatgaagacaggctggctttataagctgtaatggcccagatggggtgttacgtccctgctgaagtgtgcaggctcacaccaattgatagagtgtttactagacttggtgcctcagacagaataatgtcaggtgaaagtacattttttgttgaataaagtgaaactgccagcatactcatgcatgcaacagcacattctctggtgcttgtggatgaattaggaagaggtactgcaacatttgatgggcggccaatagcaaatgcagttgttaaagaacttgctgagactataaaatgtcgtacattatttttcaactcactaccattcattagtagaagattattctcaaaatgttgctgtgcgcctaggacatatggcatgcatggtagaaaatgaatgtgaagaccccagccaggagactattacgttcctctataaattcattaagggagcttgtcctaaaagctatggctttaatgcagcaaggcttgctaatctcccagaggaagttattcaaaagggacatagaaaagcaagagaatttgagaagatgaatcagtcactacgattatttcgggaagtttgcctggctagtgaaaggtcaactgtagatgctgaagctgtccataaattgctgactttgattaaggaattatagactgactacattggaagctttgagttgacttctgacaaaggtggtaaattcagacaacattatgatctaataaactttattttttaaaaatg

SEQ ID NO: 5708 - DNA, 804 bp, Homo Sapiens
ttcctccacggttctgtgcagcgtgtaacaactcaggcctgtacgacagcagtaggttggagccatcaagcatgtatccgtatgctctacatgtgggatattaatcggtggagactacattttctcagtgatatactttgtagggttaaatacctgcacggcagggggctcgagatattccatttaaacacggagcagcctagttctaacctgaaactctgtgggtgaagaagacatctgtggttggatagcgaagaggctaaagagtctgcagcaggacttggagactgacggagtgactgcgggctgggggggcattacccagtaggaatgtgaagccagaggttccggattccgggacatccaccccctgggcaagtgagagcatctgcaaaacgcaaagagaacgtacctcatatgcaggatgagccaatggcagtctcaagaaatgtactcgggcgacaccttacctgtggaaagcaaatcttttcaaaataagccactgggactcggtaggtggagccccagctgctcttctagggacctatggggccttcgtggcatctctgtgctgtgtgctggggaggaggttgatgtaatggtgactcttttctgatcagcaccttggccgtgattcccaaggtcccagccaaagcaaagggccagttgtttcagtttaaacagacatgtctttagtctaataaaattagttaactgccagtaaagttatttgttagctttgatgaaagctatgttggtatctttccctaatcatcaaagtaaataaaaaatcatttctaaaaa

SEQ ID NO: 5709 - DNA, 393 bp, Homo Sapiens
ttccccgagcctgaccctgttccgcccactggcaatcagggctgcgcacttccctgtccacggtccccaggccttcctgtcttgtcccttttgatcattaactcagggtttcagctccaacctcgctgagttggtgcagctccgggtcattcctggggtgggaatcggatcatccctgactcagcttttaccttaattttatttgcagaggattcttttctcaaaatgctctggcatttggacacacatcacatgtcgatatttgcataggagtcattttcagtggaataacatttttaatgtgtggttttacggttcaaggaactacatgatgattttgaggaaacacttgccagaaactaaattaacgaataaaagatttcagtgctcaaa

SEQ ID NO: 5710 - DNA, 492 bp, Homo Sapiens
ctccgagaggcaggcatacctgctggcacagacactggcctctgagaggtcactgaccgctcacctgcagcttgtcccgctgccttgtgtgggacatgagaaggtcttccgtggatagcatgcttctgggcagctctgctgtggccaggcaggacccaaacgtctgcagcatctgggcagtggtcttcaaggtcaaggcaaagttttcgatggcctggaaggtcagacaattgtaacaatatggagagattaacattcaccaacatgctgtcttgatggaaagacaacagatttagttgataaaattagtgaataatcacctcaccttggaaatggtatagaggacctgattctgatagggagattaaaaagaggctggttttagtctcaatgctgccactagttgaccaaatgactttggataagtcacctctttacactgaacgtcagtttatttatctataaaataaagtgattgagtcacacgaaaaa

SEQ ID NO: 5711 - DNA, 486 bp, Homo Sapiens
ccggccaggtgccctccaggatccgccttccccacccctcctgggaagcctggaccagcatcccttcttgggtggatggagcctcgtcctcatctccagctacatcagtcattctctgcagggcaaaatctcctccccctaccccagctgtttctgcagaagggcccctggctgtgttggcaggacttcggtgtccagggtagatctcccctccactgaggagtgaggtcccagaatcctgttgggtcccaggcctcagccctgcacagatgtgatgtggggcgatggctctctgggaaccctctacagatctatttttatatggaacttgttcactggacagaggtggcctgcaagcccccattaccctggtctgagctcaccctgggagggagggggccagtcggagggggttccttctggagatgtttttatatttcttgggttctctatgcaggataataaaaacttgtctgtgatatggtg

SEQ ID NO: 5712 - DNA, 675 bp, Homo Sapiens
gacctttggacccccgccttatatacctaccctacctggaaacaaagagtctaaacttagccttgagagataagctagttagactttcttatttctagtgcctttcttcttttacatattagtggttccagttgttagaagcatcagtaacatactcaaagaacaatggttgcagttggaaaaactgaagacaactttgtggattgaccaagcatcacttcccttatctgaaaggctacattctacagaaaccgctctaaacagcacccttgatactgattctagggctgcaaccagagaagactaaccagccaggttccacagacaggagccctgcaccttcgtcagtcatactgggaaccttaccaggggctaaattttaaatgtggctaaattagtttctgcaagctccatttcccctcctgacccgctagctgcttcgcgttgtcagtaacagcgccttccaccccagagcaatttaccacagctcagcactttgacattttgcagtatgtagggcaacgaaatgtcatgactgcaaatttctacggtgcgcaggatcaccaaagagaggtcaaaaagggtagtctcccgggcttgatcagcaagggtcccttgaggatggtgggggatgaaggcagtacattgggccggtggcatccctgggtaccgagc

SEQ ID NO: 5713 - DNA, 130 bp, Homo Sapiens
caatatcagtgcccacaccttactgagtattgagttttagagctttcgcttgatgtgcttgaccaagagacttcttttgtatccttttcttgtcctatgatgtaaataaaagcctcgatttatgtaaaaa

SEQ ID NO: 5714 - DNA, 373 bp, Homo Sapiens
cggcagcccccgagacacccgccccctctccacgcagcggccactccccccactgtgcagcctggaaaccatcgctgaggagcccgccccaggccctggtcccccgccaccagcggctgtccccaccagctcttctcagggacggcccccataccccacaggacccggagccaatgtggcaagccccctagaggacactgaggagccccgagacagcaggcctcggccgtgcaacggcgagggcgccggcggggcatacgagagggcccccggcagccaggcagttttcccggcgttttaggatctgtacatagagaaatatttaaatttttagaagcaaaacttatacaacattaaaatgataccaagtccc

SEQ ID NO: 5715 - DNA, 475 bp, Homo Sapiens
accgcctccatcatacctacctgttcccctcttgactttcactgtgacaattttaagtgcatccgccgctcctgggtgtgtgacggggacaacgactgtgaggatgactcggatgagcaggactgtcgtgagtgttggcagaggctggacggaactccattgagttccactgggaaaggattttcaatcagaaagcaatgccccaggtccacatgagcccttgtgtattcagcactttgtcctgtcctttcacttcctctcgaagacagataagctgctgagaggcagccacctccttcggagccctcagggcagcactggagctacttgactgctccggagggctttaagtcaggcttccagacaccagacccccactgcctgcagcagactgactgctctgtgcccacagccccccgggagtgtgaggaggacgagtttccctgccagaatggctactgcatccggagtctgt

SEQ ID NO: 5716 - DNA, 524 bp, Homo Sapiens
gcggcagcatcctctgcttcctccagttcatcctggagttcttggctgacactagactgcagggctgcgggcgtgagccactccttcgggaggcaactctgtagaaagggtatacaggagctgaagtaggcaagtcgattgatccagcgaggaatctctttcccacaaagaatctctgataaagctgaagaaaaatgattgcagtttttatgcattaaatgataagcattgcctttgtattcttttcccagttcttctacaattttttctatatcatcttctaggaagtccgtgctccctaaaacaacagcttctttaaatttaaatgtttctcctagttcagaagcatttcctggggaaatttcaaatattccagaaaaggggtaaggatggccaccataagcaaattctctgccatagacttcaattcctgaatgaaaaactccaattccaatggatgaggtatattcgttcatccaatacatgtcgtacacgttgagcaccactaactggttagcccccat

SEQ ID NO: 5717 - DNA, 573 bp, Homo Sapiens
ccgatggcccatggcctatcggaaggggggggctggcaggcaagagaacgagttgatgtttatttgcttggctgtggagaatcctgaagggtggatgggggagtgggtgatcggaacagtatgttgacttatgggtacaggagggccttgaaatgggaagagactagaagctcagaccttctggacccacggggggagttgggaggctcctgtggtgttgatgggagaagtgatgacattctgcgttagagaagataatgacagtgggaaggctctggtgaacaaggatggcaagagtcagggaccccagaacaagaagcagggttgggggtggtgctgaggccacacatttgggagcacgcgttgggtgccctggctgagctctgcactccaggccctgggtgtgtggggtgagcagccaagccctggccattgacatcctcaggtggggagcagacactaaacaggctgctggtggtggttctctgaggaggaataaaccggttagagaggccaagtctgtagatctcttgcaggtggagactgaaaggaggtggaatgtgtggctgtcta

SEQ ID NO: 5718 - DNA, 572 bp, Homo Sapiens
  misc_feature (541)..(541): n is a, c, g, or t
gcccggagggtgggggtgaaaggctaatcaaacttggagatagctcgtactccccgaaatgcatttaggtgcagccttgagagttactaatgtgaggtagagcgactgataagatgcgagggcttcaccgcctatcaagtcttgataaactccgaatgcgcattagttctatctcaggagtgagggcatgggtgctaaggtccatgtcctaaaggagaagaatccagaccatcagctaaggtccccaaataaacactaagttgaactaacgaagtcagattgctaagacagctaggatgttggcttggaagcagccattcatttaaagagtgcgtaacagctcactagtcgaggagtttggcgtggataataatcgggcataagtgttttaccgaagctatgggatcctaatggatcggtaggggagcattccactcagcgttgaaggcgaagcgtgagctttactggagcgtgtggaaaagcaaatgtaggtataagtaacgataaagggggtgcagaaacccctcgccgcaagactaangtttcctgatcaacgctaatcggatcaggct

SEQ ID NO: 5719 - DNA, 1407 bp, Homo Sapiens
  misc_feature (674)..(674): n is a, c, g, or t
  misc_feature (881)..(881): n is a, c, g, or t
  misc_feature (1017)..(1029): n is a, c, g, or t
  misc_feature (1188)..(1198): n is a, c, g, or t
  misc_feature (1200)..(1261): n is a, c, g, or t
  misc_feature (1302)..(1311): n is a, c, g, or t
caggtgcaggtttcccagcagctcaggcaagagtccgatgtttgtgccatctgatcctgatgtctggagagatagccatgtgtgagcctgaatttggcaatgacaaggccagggagccgagcgtgggtggcaggtggcgagtgtcctggtacgaacggtttgtgcagccatgtctggtcgaactgctgggctctgctctcttcatcttcatcgggtgcctgtcggtcattgagaatgggacggacactgggctgctgcagccggccctggcccacgggctggctttggggctcgtgattgccacgctggggaatatcagtggtggacacttcaaccctgcggtgtccctggcagccatgctgatcggaggcctcaacctggtgatgctcctcccgtactgggtctcacagctgctcggggggatgctcggggctgccttggccaaggcggtgagtcctgaggagaggttctggaatgcatctggggcggcctttgtgacagtccaggagcaggggcaggtggcaggggcgttggtggcagagatcatcctgacgacgctgctggccctggctgtatgcatgggtgcccatcaatgagcaagacaaagggcccctctgggccccgtttctccaatccggcttttgcccgttcacccgctggaataatccctgggnctcgggggggccccttggtgttcctggaaggggcctgcccttcacattcctccgccccccgtgggctttcttgcggaacctctggccggggcgggggtgggcatccaaaacccatacctgtggcgaaaaacctttccccaacccttggggaattcccctcacgtgggggcccttggggagggcccccccaactatccccctttgggngcctttgtgggcccctctcggccgtttttttaggttatggggggaccacctgtgggcccctccacaatttttaaaacgggggtgggcgccctcttccccccctctctttgggcaaacacaaaattgggggggtagnnnnnnnnnnnnnctccccgcgggccccttttcaatttttcccccctgcggagaaaggggggcctcttttcatccccgtggcgaaataagtcacggagagaccctctctccgtcgtgggagcgggaaaaatatactcccccctgggcccggggggagctttatccccccaannnnnnnnnnnannnnnnnnnnnnnnnnnnnnnnnnnnnnnnnnnnnnnnnnnnnnnnnnnnnnnnnnnnnnnntctcttttacggccccacccacatggggtgggaaagcagannnnnnnnnntggggggggtatttttctccaccctttccccccctcggcgggttccaaaaaaagcgtgcccgcccccccttacgccagggcgaaatactccccata

SEQ ID NO: 5720 - DNA, 316 bp, Homo Sapiens
cgtccttcatcatacctaccaatgggtttgatcacagatttgatctacaagcttgctgtcttcaaacttaggaaagtcaggaaggctgggaggagtcagacacataccctaaatttttcaggaagttccaaacaagtattatcttgtggtctgaggctgaaagggaagcagatctgaaagactgagtctcaaacccagaattctgagtgtgacagtcagcaaaatgaggaaaaaagaccacattgagagggaaagagaggaaactaggccatctaccagaaaagcatctagagctttaagaatggtatgggaaggg

SEQ ID NO: 5721 - DNA, 652 bp, Homo Sapiens
gggcgatgtattgagaatgaagatggaactatgacatcttatacacagctgccaagccgggcacatatgtgatctatgtgcgcttcggtggtgttgatattcctaacagccccttcactgtcatggccacagatggggaagtcacagccgtggaggaggcaccggtaaatgcatgtccccctggattcaggccctgggtgaccgaagaggcctatgtcccagtgagtgacatgaacggcctgggatttaagccttttgacctggtcattccgtttgctgtcaggaaaggagaaatcactggagaggtccacatgccttctgggaagacagccacacctgagattgtggacaacaaggacggcacggtcactgttagatatgcccccactgaggtcgggctccatgagatgcacatcaaatacatgggcagccacatccctgagagcccactccagttctacgtgaactaccccaacagtggaagtgtttctgcatacggtccaggcctcgtgtatggagtggccaacaaaactgccaccttcaccatcgtcacagaggatgcaggagaaggtggtctggacttggctattgagggcccctcaaaagcagaatcagctgcattgacaataaagatggacatgcacagtgtctg

SEQ ID NO: 5722 - DNA, 586 bp, Homo Sapiens
acggcttcaacggaactttcagagcggcgaattcgaccagtttcgggacttccccatctttgagagcaacttcgtacaggtgactcggttgggagaagttgccaacgaggtcaccatgggggtggcagcctccagtccagccctggagctcccggacctattgcttctggccggccctgccaaggagaacggacacctgcaactcttcgggctgttccccttgaagttcgtccagctctttgtccacgacaaaagccggtgtcagctcgaggtcaagttgaacaccagccgcaccttctacttgcagctgcgggccccactcaagacccgagaccgagagttcggccagtgggtgcggctgctctaccgcctgcgcttcctctctgcttctgctgtgcccttcacgcaggagtaagagccccaaggcgtggaagccagacttgaccccaagacctctgaactctggggactctgagtcttccagcatccttcaaggtcaccgaatgaccagagatcaaagtaccttgcctcagggccgggcagatgagatattaaagttaataaaggtcagtccattaagaaccaa

SEQ ID NO: 5723 - DNA, 183 bp, Homo Sapiens
cgggagggggtatgaggaagcggatattgtcacattctcagcctgttgcggctagtgagttacatggagcgggcgcgcccggaagatgctaataaaactcggattagtgactgagtgtttttggaagttcttcctggcactgtgtagctagtttcaatgacttcaaagtggttataggaagga

SEQ ID NO: 5724 - DNA, 774 bp, Homo Sapiens
  misc_feature (157)..(157): n is a, c, g, or t
ggaccggtccggaattcccgggatcacagtgcacgaagacgctgtcgggagagcccaggattcacacgggccttgagaaatgtggctcttgtacctcctggtgccggccctgttctgcagggcaggaggctccattcccatccctcagaagttattntggggaggtgacttcccctctgttccccaagccttaccccaacaactttgaaacaaccactgtgatcacagtccccacgggatacagggtgaagctcgtcttccagcagtttgacctggagccttctgaaggctgcttctatgattatgtcaagatctctgctgataagaaaagcctggggaggttctgtgggcaactgggttctccactgggcaaccccccgggaaagaaggaatttatgtcccaagggaacaagatgctgctgaccttccacacagacttctccaacgaggagaatgggaccatcatgttctacaagggcttcctggcctactaccaagctgtggaccttgatgaatgtgcttcccggagcaaatcaggggaggaggatccccaaccccagtgccagcacctgtgtcacaactacgttggaggctacttctgttcctgccgtccaggctatgagcttcaggaagacaggcatttcctgccaggctgagtgcaacagcgagctgtacacggaggcatcaggctacatctccagcctggagtaccctcggtcctacccacctgacctgcgctgcaactacagcatccgggtggagcgggcctcatac

SEQ ID NO: 5725 - DNA, 607 bp, Homo Sapiens
gacggcttcaacggaactttaaattcctctggcaactggagtccctcaaatctcaggaatttgttgaaacggggctttgctatgatactcggaactggaatgatgaatgggacaatcttatcaaaatggcttccacagacacacccatggcccgaagtggacttcagtacaactcactggaagaaatacacatatttgtcctttgcaacatcctcagaaggccaatcattgtcatttcagacaaaatgctaagaagtttggaatcaggttccaatttcgcccctttgaaagtgggtggaatttacttgcctctccactggcctgcccaggaatgctacagataccccattgttctcggctatgacagccatcattttgtacccttggtgaccctgaaggacagtgggcctgaaatccgagctgttccacttgttaacagagaccgggggagatttgaagacttaaaagttcactttttgacagatcctgaaaatgagatgaaggagaagctcttaaaagagtacttaatggtgatagaaatccccgtccaaggctgggaccatggcacaactcatctcatcaatgccgcaaagtccgttgaagccgt

SEQ ID NO: 5726 - DNA, 602 bp, Homo Sapiens
  misc_feature (327)..(406): n is a, c, g, or t
  misc_feature (408)..(408): n is a, c, g, or t
agatatcgtcaatgacaagcataccaattaccaggaggaatgaagactgtccttccctttataatgtgatattaaagtgtggcctatggaccatttataaagtaaagagtttgatagtgtaatttttattttacaaaaattgactactattataaaccaacatgattagcttgcactcatccaataactgagcgaacaggattataaaaatatgtaaaaaaattctgagatgcataatgaccagatatgcgaatatccatatagctagtataaatctgatgattaaaaaaagtagttttgtttccttaaaaacacttggttcatggnnnnnnnnnnnnnnnnnnnnnnnnnnnnnnnnnnnnnnnnnnnnnnnnnnnnnnnnnnnnnnnnnnnnnnnnnnnnnnnnancatcctggctcacatggtgaaaccctgtctctacgtaaaaatacaaaaaagttagccaggcactgtggcgggtgcctgtagtcccagctacttgggagctgagccaggagaatggcgtgaacctgggaacagagcttgcatgacacgagatttcgaccactgcactccacctagcaacaggtaccgagctcgat

SEQ ID NO: 5727 - DNA, 889 bp, Homo Sapiens
gctgggttgtatgaaggtcccaagaagatgagctccgtcaccctaagaatccctatgaaataaatacgcggttaatttggttttttcctcgctaatggccccctaaagactgtggcatctttaaaacactctttgaatgcatcaacatagacaggattgatttggtttatgcccagggcgaaggggcacaatgagcagcaggggtttccaggctgagcagtaggcagaggtgcccttactctggtttgaagcagttaaagaatcgggaggcctgtcaccagctgtgtcagcactcaagggaaggacacggcacatttttttgatatcttcaatgaccactgtgttatccattgaaacataaacagccaaggaattccattcgtcaaataaagcaagtttttttaacacctgtgcaactgtatttggtccaaaccattctccaattgatttcccttctcctacacccatttgtgccatttgatggatagagtagcaacaatcttctctatctaagaagcactgtaggatgcgttggtattctttgggttgttctttttgtttctcccagctccagtcccttcccaagtgtctacagataagggcttgagccagcatcatctgtccacagcgtagcatacatccccaaccagcatctgatgaagggcccgttccaccaattggtgaaaatttccttctgtatgtaaaccatagacgagcacttatatcagacaacagcttagatttttctgttttaaggagatgctgcttccctaagatccataccagctcatctgtatctggatattcttctaggtagtcagtgaaaatagtaatctgatcttcatacttggataaaactgactccattctccagctgtcatcctgggcc

SEQ ID NO: 5728 - DNA, 456 bp, Homo Sapiens
ccccgtccccgatggcccaatgtacttaaatggaaaaaggacatagccttgaggttatgtccttttccacttaagtacatgtgccaggaaacaagagagagagaaagtaaaggcagtaatgccttctcctatttctccaaagccttgtgtgaactcaccaaacacaagaaaatcaaatatataaccaatagtgaaatgccacacctttgtccactgtcagggttgtctacctgtaggatcagggtctaagcaccttggtgcttagctagaataccacctaatccttctggcaagcctgtcttcagagaacccactagaagcaactaggaaaatcacttgccaaaatccaaggcaattcctgatggaaaatgcaaaagcacatatatgttttaatatctttatgggctctgttcagcagtgctgagagggagggttatagcttcaggaggcagctac

SEQ ID NO: 5729 - DNA, 559 bp, Homo Sapiens
atattgttgcaaaccacataagggggactaaccatttacgttggatcttaattgcagtgaatgcaaagtttattttcttcggggacctcccccatcacccaggttccaactctgggctcccgattcccatggctcccaaaccatgccgcatggtttggttaatgaaacccagtagctaaccccactgtgcttccacatgcctggcctaaaatgggtgatatacaggtcttatatccccatatggaatttatccatcaaccacataaaaacaaacagtgccttctgccctctgcccagatgtgtccagcacgttctcaaagtttccacattagcactccctaaggacgctgggagcctgtcagtttatgatctggcctaggtcccccctttcttctgtcccctgtgtttaagtcaggatttttacagagggagctgtctccagacagctccatcaggaaccaagcaaaggccagatagcctgacagataggctagtggtattgtgtatatgggcgggacgtgtgtgtcattattatttgagttatgctgttgtttagggg

SEQ ID NO: 5730 - DNA, 595 bp, Homo Sapiens
atcgacattgtgagcgtgtagccagaagtagtaagacgaagcaattgttactgatgtgtgtcggcatggttctttcgggttttatttaaattttctcccaaaccttgatgtattttgggcttgggcttctggatgtgtgctaaattaatttgcatgtgtgatctcaaagggaggatatagagtatagaataagaatctgtccgaggattcccttgccaaggataccacacctcaacccttcccagctctcacacagccatctggggagcagagggtacatcaccgcaatgtgaacgtgtgcccagcggatctcacctcgggagcgatgtagtctggagtgccaaagaatgtcttggtttgtcaccaccatcccagaatgttttccttacacatgccaaaatcggcaatcttgatgtgtccctcagaatcgagcatcacgttgtcaagtataaggtcactatggcagacacaagaatttagagatttaattaaacgctatgcatttcaagccaaccaacagacactcatttatgcataaaacactgtgttaggtgtagtgtgggccaaaggtcagtagaaaacaagctttgactcc

SEQ ID NO: 5731 - DNA, 920 bp, Homo Sapiens
ccttcctcccccacttcaattatttatttacttcttcttttgttcctttctctttctacttccaccttgcatttccctctgttctggccctcagttctgtccaccaaggggctcttgaacccgtattaaagccccagatgatccagttcactctttctagggcagaagactagaggccagggcagctagggacttgctcatcatattccaaccacccacgactgccatgtaaggttgtgcagggtgtgtactgcacaagcacattgtatgcagggagcactgttcacatcatagataaagctgatttgtatatttattatgacaatttctggcagatgtaggtaaagaggaaaaggatccttttcctaattcacacaaagactccttgtggactggctgtgcccctgatgcagcctgtggcttggagtggccaaataggagggagactgtggtagaggcagggaggcaacactgctgtccacatgacctccatttcccaaagtcctctgctccagcaactgcccttccaggtgggtgtgggacacctgggagaaggtctccaagggagggtgcagccctcttgcccgcacccctccctgcttgcacacttccccatctttgatccttctgagctccacctctggtggctcctcctaggaaaccagctcgtgggctgggaatgggggagagaagggaaaagatccccaagaccccctggggtgggatctgagctcccacctcccttcccacctactgcactttcccccttcccgccttccaaaacctgcttccttcagtttgtaaagtcggtgattatatttttgggggctttccttttattttttaaatgtaaaatttatttatattccgtatttaaagttgtataataaaataacctcaaaacaaacccctatgaatcc

SEQ ID NO: 5732 - DNA, 389 bp, Homo Sapiens
actgggggagctaccagggctctgccttcaggagcccacagctgggcaccccccttgccccccaggagaccggggcgcaggcggggcaccggcctcacctggttctccaacaccgctgcctgcggtctgttttgcttttgtcctccccagcccagaattttcctttgtataaacagaactcctagtcaggaagcaatatcatttcaggtctaaagaaagggacgtgcatctggccgagggcagttcagtctcactgcagagcccgcagcccgctgcgcagctcggcccctcccgcccgcacgggcagctgaaggccgctgttttctaatatttgtattctaatttaattgtttttaaaaaatgcaaataaaaaaggtcgaggtgaagcc

SEQ ID NO: 5733 - DNA, 636 bp, Homo Sapiens
gacggcttcgacggactttgcgatacagccgtgagttctactccccccatcacttcttcaatcacctccacatatacggtgacttcgatgacaactaccacccctctagggcccacagccactaatacggtaccatcatttaccagtagcgttgcatcgtctacgcctgtcccaagtacagaaaagatcaccagtggtaccacaaacaccacccctctatctacattggtgaccacattctccaattccgacaccagttctacacctacatctgagaccacctaccctacttctcttactagtgctcgtcacagattccacgaccagaaccacctattccaccaatatgacaggtgacattgtccacggtgaccgtctcttcgacccacctcttcctctctcctcaccagagatgagcagtccagcaggttccgacaacaagactggttatccacgatccaccaagaagcactctcacagcagatacatcctagacgttcacttcttgcaatggcaatccaacgagtaccctcctcatcatcagatactccgcagattcactgtcttgcaatcactcactagcgaggacccccttcagaaagttactccgcagattcagttcttcaagtcaaccaa

SEQ ID NO: 5734 - DNA, 688 bp, Homo Sapiens
  misc_feature (75)..(75): n is a, c, g, or t
  misc_feature (118)..(118): n is a, c, g, or t
caggttcggaaggtttgtgctgcaaattttggtgatatttgtcatgctgttggacaagaggccactgagaaattnttgatccaaaggttctttgagctctgctctgatgctgtttggngcatgcggaaagcctgtgcagaatgcttcacggctgtgtcgcacagctcctcccctggggtcccgcagaacccagctcttcccgctcttcatcagacttgtcagcgacccctgccgatgggtgcaccaggctgccttccagtcccttggccccttcacttccacctttgcaaacccctccagggctggcctttatcttcgagaggatggcgccctgagcatctggccactcacccaggatttggactctggttttgcctctggctcccctgctcccagcagtggtggtaacacttcccctgccaggtatgctctggctagggtcaccaccaggaccctcgatgtaccttaagcacccacctaaaatttcagcaattatcttgtctcgagttttagtagtgaccttctgggcaagatggaatattagagctttaattatgtaaagaatcaaaaagtaattgcaataatgattttgaaacatgactactgggttataaataatgaagctactatgtctcctaaatttagataaaatattcattgagattagtgattaaataacctataaaga

SEQ ID NO: 5735 - DNA, 189 bp, Homo Sapiens
ggctcaacggaatttggggggttactggggccgctggacgagcctgtggccgtgcagcgctgggctcggggccccaacctcacagccacagtggtctggatcgacccaacctatgtggtggccacatcttatgacatcacagtagatacggagactgaggtcacgcaatacaagcccccactgagccgt

SEQ ID NO: 5736 - DNA, 485 bp, Homo Sapiens
cgcccgtgacgggcatgagaaaagaaagtggtgatgccgagtgcaaaacgttagactgcaccgtgtgaggctcgaactcacgaccttcagattatgagactgacgcgctgcctactgcgctaacgaggctgctcagcgaccacttcgcgccgcggcttttgtggagataggggtcgcccctcgcgcccgtgcgtcccgcttccggcgcccgaaactgtgccgcgccggccgaatacaaaccaacagactgtagccatcttctgaacgctgtcctagatcatgtgaaggcacagcttcagaggttaaaaatttcggaatctggaaaccagagagaatgtttaaccaccaggagagttccaggcgccgcggcagggggactgggagaggggactgcgcccagaatgaaggctcgggacaaaagcagttgcgcaaacgcgccaaggctggacgtcgagtgaccgcgggcggaggtcaccagcggccgc

SEQ ID NO: 5737 - DNA, 436 bp, Homo Sapiens
gtctgcctacacgctccagaagggccagcgcagagctgggatggccactgagagccccagtgacagcccagaagatggtccaggcctgagtcccttgctctgacagagatggatctgctagaaggaacctggagagcaggacccatggctgggcggctggtgagcagtccaggtgcccaagggccagcttgctgctgcccaaagcagaggaagccgggctggctgagggtccgaaaagcctgcaggggcccggcgagccccaggaagagcctcagctccaggctggggctctggctgctggagcatctgctggctggtggggtggcccgagttccccttcaccgcccccagggagggtttcccacctcagagtacaccgaggggacctgcagagggggctgtcgggacagcgtggaataaacattatttcaaggac

SEQ ID NO: 5738 - DNA, 1087 bp, Homo Sapiens
ttccagcagggtcttccatgtggtggtcccggggcaggccgagcgcagtctcgtggtggctgaccactgcgccgctgtaaaaagagcgctcgccgctgccattctgcatggagcacgcgtagagtgccgagtagatcctgtccacgctgtgctgtgggtggctctgcaggtagcccgactccgtgtcgctgctctggcctgacgtgcctgactcgggagttgccccgcggcgtgtcctggcccgagtcctggatccccgggaacacatcgcccacgttctgtgacacgatgcgcgtgcactcgtcgatgactgttttgatctgcaggatgctggcggccgtgaggatctgcagagcttccgacgtgcgagacctcgtagcacgccgctgtacatgaagtcaatgagcttttgcactgactgcactgacaccaccgacgggatctcgatgtcgctgtaagccaagcagcagtttgtcctggaagaaggggctgccggctgccagcacgcagcggtgtgcgcgcagcatgctcccgtggatgcgcaccgttacgtcacagaagtagccacggttgcgctgctcgttgagggtctcgagcacggaattgctgaagttgtgaaggttgatgctgtgaatgcgctcggtcatccccttgcaactgatgtcacaatcagatgacccggtgtgagcgtgagagtttgtcagtgaatgtgttgagtggatgagggctgggtctggagacaaaacagcttcaaagttcaggcagggaaggcccggcttggcgctggatccacccggctgagtaatctcattctcctcagatgccttctggttttcagctgtcttgggtttcttcagtagtttcaaaatcaatggtgtcactcttcaggtaaattactccaaggcttgggcctagtgcagatgttcattggggcagggagcagagagcggctgcatgtaaagagaaggggcaggtcacagactgatggtcaaagatcaggactatggttcctgatccaaggagtgacgactgagaatcagcacacagtctcttgagggtgtccaggcctggctgttaagctccctgc

SEQ ID NO: 5739 - DNA, 396 bp, Homo Sapiens
tttcctcgtagcatctcacactacacacctttccttaggtcttgcaaccacgtccgtgttctccaaaactctgctctgctagttatcaccaatatatttgtttccaaactcctgcctcctacacctccctgcttccacagcaagtgcaggaatgtatttgacattttccttctctctgtgtaagtcagtggactaccatcctctcagctgcctacagtcgatcctagagtgtctgagatgcttttctccaccttggcattcctctccctggtggcaactgagagctctgtagaccacctacatgcttatcaaaaacactccgtcattctccctatcactccctacagcaggtcacacctatcccttacctgcttcataactgtgctggacccctga

SEQ ID NO: 5740 - DNA, 270 bp, Homo Sapiens
tctcgaggatccttcgattggcgggcacttacaaaaatatttatagagtgaaacgaaaaaagacggaaacaaaaaagattgtgagctgcctcgttccatacctgcctgtgtcccctggtctccttacctattccaacctaatgatacatgcatcgtttctggctggggacgagaaaaagataacgaaagagtcttttcacttcagtggggtgaagttaaactaataagcaactgctctaagttgcccgccaatcgaagtgaacctctaga

SEQ ID NO: 5741 - DNA, 475 bp, Homo Sapiens
ataactgtccagatgttgcggagtactcagggtactacccgtcttgttctgatttagttccataagcgattgaggatcggaccttgtactacttagacttccaaaaagtcagagttgacagcagtagctcctaaagtagatttggggaggaatgtgtctttcttacggaggtgtctttactggcttggtgtgtcatttgtaggtcttctttgtgccaaacacttcgccatttcgtccgactctttcccctgctaacatcttgggaacagtgttgcgtgtcccactgggttgtctctgtggtcctgctcacgtccgtccactcagtggcatcctctgagcctccttatagtggaatgtgagttatcttgaagccgtaattcaagattgtaaaattctagaagcacatgccgagctctggctttgcttttggtgaacggacgggggatgaaatgactgtgctggcgggtaccgagct

SEQ ID NO: 5742 - DNA, 872 bp, Homo Sapiens
ccaagtaaaagttcccagtcgttatccaagtcaccaatgaaacaggattctgattcattaatcatgtcttgcccacttttttcaacaaacctgacgtcctataatgagctatacagtgtgaggcatatttcatagcaacgttggttgattgccaaggagactctgccaccgttctggataagctcatgtttcccttttccttggctgctaatagaagggcaacttacagtgcagggtcaatgagcaagaagctgggggagtagaggctatacatctagcctaataatagagatctgacggtggttaccaggagactacgttcttttgattccattcctcagcagcaaaagtacttgagttcaaatgataaaacttgaagttgtaggcttggaagagtatcagctcagtatatccttccttgcataaatacaagggaaaggccaaggaataatcagcattaacctgccaggtccaagggtcttctatccctgacttcatctgagtcacaagatttctctaataagagaaactttgctactctgaggaaaattatcccttatgggagcccccagttcagaggtaagaacagttctttcacgtggaggtccaaaattctggacttctagaaacaagtgaagtgtgctaaagtctcctatttattgtttctcttccagtattgtgccatcgattcttgcataaaattctggaatgctggctcttcatggctttcctctgtaactctgctggtcaatgtcctcacgtatcgcgtgtctgcttcctcatcctcttcatccaaggttcctcgaggtcaggatcaaatccgacgggtgcacgcacacgagattagctgtctttggcactccctgcatcca

SEQ ID NO: 5743 - DNA, 682 bp, Homo Sapiens
  misc_feature (15)..(15): n is a, c, g, or t
cacatcactctctgntcaagatagagtcatcaggttcaaagtccctcataacgatcctgtccctcataacaatcaggtaattatgaaaacaactacttgtccacaaacagtaatacctgatgggtggggaaggagcaattggcagagaggggcagggagagggagagatcaaagggaagagggaaatacctttcctgctagacaacaccctggtgattaatctgccggggtgtggagagacacagtgaagtgcacagggcccgagttccttccgctcaccgcccttgaaggaaaaagggtcttcctcttccacattcacggtgtagcctgggagagcccacatacttccttctttcttatgtcaaagaggggaccaaagagggggaccatttgtaggcaagacgggatcagacttgggtgcttggattgcaggggctgtctataatctgaacctcatttgcctttttcttcctatttctcattctgcactgccctgtagaggtatagcccattctttgtgctcctgcttgtggtagcgatggcttgtggtgtagcttccaggagggtagagtgttaaggtgacagacccactgtgagggaaggcggtgggaggcccatggccatagtgacaggtgccatccgtctctctcttctactgtggtagaagtggaaacgtgtctgt

SEQ ID NO: 5744 - DNA, 450 bp, Homo Sapiens
gattggcgggccacttagagaggttctgtgtttttttgttgtaattttcccacagttatggtacatctgggctgccttgtaggcttgtgtgtacatttcactacaaacagtcacaaaaggctgaaaggccactccagcaagatctgtagaggattagtccgtgaattccgcagttgaactagagcactgaatggcgtggaacttccttttacactctgaagatttaggattcttcacttttcccatcagtaaaattaggtaatttactagataatttgaaaattctttcccagctgggaagttttgatgtgcccagaagctaggatgggcagttgtccaggtttgtttaaaactagaggttctagaacacaggactttcagttttaaaattgggacagtcctgagcagtaggatcaagtaagtgcccgcaatcgaagggatcctctagaa

SEQ ID NO: 5745 - DNA, 297 bp, Homo Sapiens
gagacagaaaatttggaagaggtgtgaaggaaagggtagcactcagcaaagacttgtgatggagagaacaacaatggtttcataggaaaacatcagcgggctcactgatcccttctagaactaaccattccattctcatcccttatcttctccccctctcccctgaacctccagggaaagtgactccagactgttgcttacacagcttgtaatgctcagaatccttagcacacaaaaccagtgggcacccgacccaggggcaccaacccacaggctggccaggcacctataacttgg

SEQ ID NO: 5746 - DNA, 416 bp, Homo Sapiens
cacattagaaggaaggcatgcagtttcctatgtgtgaacatttcttttcaagcatgggactttttagaaagtttctggtgtgctcattgtccatggttaggaagaaatgttccacatacacctgacattggagtcagtttattgatatgtttggagattggcctttcaacagttttcatatttgaagaattagaaatgaagtccgttcagattctccaaagaacctccagccactggtgggggacattcttaattcacattcctatcagttggtatctcctgtccctgaagacactgatgaggcttgggaggagaatcccacctttccctgcagggggttaggatgggcagggcagggacgcccagggcgatggtccagaacaatggcaagggatgggaacgtaaatttttccgtg

SEQ ID NO: 5747 - DNA, 671 bp, Homo Sapiens
ctcctatctgaatccagatttacattcctctatggcctttattgctgtagtcaaaagaacaatcctcccattctgaagggtctgaaccctgaatttccagagatccatatcccttaatattcaccaatccaacttctggctttgtttctctatagcctttgttctttgaaagctttaaatctttgtcttgctctgaatcctctacatgttgattgcaaaaggataatttttttcctttgttcttggtacctttcactttcactgaaggctttccatcttgcttgtatgcaaatagcagccatgtgcctgcgcctatagtaatctctccatttctgctggataacgatggctgcagcccgtaactccaagtaccgctgcctctctaagtgagcacgccaggaagcttggagaagagcagctgcactagccataacaaaagcatccttctgcacagctgcatctctgacttgcttctgatttaggtaattcctccagaatctctggataataacagatgcttgtctcagatggaggaaatgctgcctacacagcaagaccctgaaccatcgctgcaacaatatgattctgcggagcacctcttggtgaagcagatcttgtaagtgctgtcgttcctgctcctttagaaagaccatggtttttccaacttgata

SEQ ID NO: 5748 - DNA, 443 bp, Homo Sapiens
gaggtgtgtgaaccaaagcaactccatcttaaataggagccgggaaaaatgaggctgaaactactgggctgcattccctgatggttaaggcattctaagtcacaggatgacatagaaggtcagcacaaaataccagtcataaagaccttgctgataaaacaggttgcagtgaaggagctggccaaaacccaccaaaaccaaaatagagacaagactgacctcccatcatcctccctgctacactcctaccagcaccatgacagtttacaaatgccacggcaacatcaagaagttaccctatatggtctaaaaagaggaggcatgaaaaatccactccttgtttagcatatcatcaacaaataaccataaaaatgggcaaccagcagccctcacggctgctccgtctatggggtagccattcttttattcctttactttctctc

SEQ ID NO: 5749 - DNA, 597 bp, Homo Sapiens
  misc_feature (51)..(306): n is a, c, g, or t
ataactaaatgaatgaagtaaataaaatcaggccaggcgcagtggctcatnnnnnnnnnnnnnnnnnnnnnnnnnnnnnnnnnnnnnnnnnnnnnnnnnnnnnnnnnnnnnnnnnnnnnnnnnnnnnnnnnnnnnnnnnnnnnnnnnnnnnnnnnnnnnnnnnnnnnnnnnnnnnnnnnnnnnnnnnnnnnnnnnnnnnnnnnnnnnnnnnnnnnnnnnnnnnnnnnnnnnnnnnnnnnnnnnnnnnnnnnnnnnnnnnnnnnnnnnnnnnnnnnnnnnnnnnnnnnnnnnnnnnnnnnnnnnnnntctgcctcaaaaataaaaagataaaataaattcctatttgcatttggataacttaggagaacctgtcttccccggtttgctgacggaaagtcaattgtctgaagtactaagctgacattctcagtttttgctttaggtttgggtattcatttaaataataatctcacaaataatgaaatagtttctgggggaaaaattattataaccttatgcccatatctaaccccattcccttgagccctggtcagtgccaagtgccagtagcttggacaaacagggtacgagctcgat

SEQ ID NO: 5750 - DNA, 726 bp, Homo Sapiens
ctttcatgcatttccagcacggtccaagaagtcacagagacgtgcgttaggaggagtccgtcgcacagcgtaccatgcattgtactgtggatatcctctatacaaggtgttcactacctccactgagacattgatgaccatggtgatctggttgctagacagcatgagcttgtagttggcggccacaccattgctgatatacaggcttttggtaatctgcgagagcccgctgactgagggctgccggaactgaactgggaaggcacacgagggttgctgtcatcaaggcggtgggtcagtggtcagcagtcagcgaagcacgaaggctgcgtctttctgctaggctgtgtccatggaaaactctctccttcaggcaggtgggcgggttcgctcaggaagtagccgcttggggaagccttaggcaaggttcctcgggagagagacccgtcatgatcccgcagcctcaatccccgctggcctaacgctttggtttccatagcaatgggctcgtcgcagaaaggaatagcctgtgccgggtcttcagagaaatcctggcctcggctccacgcccctgagcagccccactctggctcaacctgttacccgccctgccggcaagccggggtcactgcagtccccgtggcgaagcagggtcagctcagctcaccgcaccccactccatccagcctgccatctctacggcaacggccgggtcgcaccagctca

SEQ ID NO: 5751 - DNA, 835 bp, Homo Sapiens
acagcggtgcactgtctgagcacggggaagggtctgagcagaagaaaagagctgccaaagatgcatggaatgagcaacagcaaaacaccagtggagtctgtaagtccctcctcagcaaacgaggtcccggaaggcaaggcagcagctagttctcctccgaactggacaggcggcatggggcttctgttgtccagctgcagccaggagtgcagacatctatttcctcttcccactggcccttccagcgctgggatggaggagccatgtcaattgtggggtcacacggagaaaagtcagtgcagcagtatgtttccaggataggaatgtgagtagacggcaatgtcacacgtgctcagcttctcctcctcccctcggttcatatgcaggaggaactcgcacccagaggccccgccgtcacagcactaagaagaggatgagcacaaccaacaggactgcaaagaggatggctatggcacaccattggcgccgatcactggtcatatgagatacttttgcaagtttcttcatcacgttgtccagccgggactgagtgctctccaattcgtgagagaaatcttccaacataactgcctgttcctccagctcccctccgatgcgctgggacatgttcttcagcaccccgatgctgccagagaccagctccaactgctcatcctgctgttccacgatcaaccgctgctgtgcctgctgctcctcaatgaaatgagaattggctctctggagctctcggtccagacgcccatatttatctgttgttccagtgctccagttctggctgccactgtctcccagcagtgcctgtctattttttctt

SEQ ID NO: 5752 - DNA, 880 bp, Homo Sapiens
aggcctaaaaataataattatattttcttgtcctctgggtaaaatgagatttctttttatttgtatagaagaatgacagttgtgtcatctaaaatttaaaaaactttcagattatcttgcatctgttagtttttttggaagaattaatttagagaagatatctctgatcctggaaattagggaaaaatagcatataaacgtttaagtgtgtaccttctggttaagattatgacttctatatttcgattaataggttggagtttgtcttaatctgttttctgttgctgtaatggagtaccacagactgggtaatttatgaagaaatgaaatttatttcttatagttctggaggctgggaagttcaaagttgagccgaatctggtgagggcctcttactatgtcataacatgctagcaggcatcacagagcaaatgcactacctcagatctctcttcctcttcttaaaaagccactagtcccatcatgggggccctactctgaagaccttatctaattctaattggaaatagggtcttgaagccctcatcactagaggtaacctttaacaggaagagagaatttataaaaattataatgcagcaccaaatccctccctacttgtgaatagtcaaggtcatttcatttacagacttgttattaaagaaacaggttaaacaaatagattgagaggaaatgtggttcatgtctgagatcagcaaacttttttgtccagaagtccagataataaatattttagctttgtgggtcatgtggtctcagttgtagctacttgtctctgctgctgtacctcaaaagcagccatggataatatgtaaatgaatggggatgactgatttccaataaaactttatttacaaag

SEQ ID NO: 5753 - DNA, 1057 bp, Homo Sapiens
tttttttcttatgtgacaaattttaacttaatgtgatgattgttcattccaaaaagggtgctgttttccaaatacctcatgcttcacttacccatggtggacccagcgggcaggttctgcctgctctggcgggcagacacgcgggcgcgatcccacacaggctggcgggggccggccccgaggccgcgtgcgtgagaaccgcgccggtgtccccagagaccaggctgtgtccctcttctcttccctgcgcctgtgatgctgggcacttcatctgatcgggggcgtagcatcatagtagtttttacagctgtgttattctttgcgtgtagctatggaagttgcataattatgaagtattattattataacaagtgtgtcttacgtgccaccacggcgttgtacctgtaggactctcattcgggatgattggaatagcttctggaatttgttcaagttttgggtatgtttaatctgttatgtactagtgttctgtttgttattgttttgttaattacaccataatgctaatttaaagagactccaaatctcaatgaagccagctcacagtgctgtgtgccccggtcacctagcaagctgccgaaccaaaagaatttgcaccccgctgcgggcccacgtggttggggccctgccctggcagggtcatcctgtgctcggaggccatctcgggcacaggcccaccccgccccacccctccagaacacggctcacgcttacctcaaccatcctggctgcggcgtctgtctgaaccacgcgggggccttgagggacgctttgtctgtcgtgatggggcaagggcacaagtcctggatgttgtgtgtatcgagaggccaaaggctggtggcaagtgcacggggcacagcggagtctgtcctgtgacgcgcaagtctgagggtctgggcggcgggcggctgggtctgtgcatttctggttgcaccgcggcgcttcccagcaccaacatgtaaccggcatgtttccagcagaagacaaaaagacaaacatgaaagtctagaaataaaactggtaaaaccccaaaaaa

SEQ ID NO: 5754 - DNA, 620 bp, Homo Sapiens
ccgatccacatgaaaaccccctccccaggcttacaagcaagtacagcaatcaaccctcaaactatcacacatcaactgcaactccaaagccacccctcacccactaggataccaacaaacctacccacccttaacagtacatagtacataaagccatttaccgtacatagcacattacagtcaaatcccttctcgtccccatggatgacccccctcagataggggtcccttgaccaccatcctccgtgaaatcaatatcccgcacaagagtgctactctcctcgctccgggcccataacacttgggggtagctaaagtgaactgtatccgacatctggttcctacttcagggccataaagcctaaatagcccacacgttccccttaaataagacatcacgatggatcacaggtctatcaccctattaaccactcacgggagctctgccatgcatttggtattttcgtctggggggtgtgcacgcgatagcattgcgagacgctggagccggagcaccctatgtcgcagtatctgtctttgattcctgcctcatcctattatttatcgcacctacgttcaataaaacacccccccatacttactaaagtgtgttaattaat

SEQ ID NO: 5755 - DNA, 423 bp, Homo Sapiens
tttttttaaggaagaaaaacattaaatttattagcattttgtatcagacttacaataaagactgtataccaacatccacgcacccgagaccacctcccaaaggaggatgttattctaagctctcccgcagaactgtgactaaaatcacttctgatactccaccttagtgttttcaggaagtctagcaaaattaagcaacctatactcaaataaggtatgactctaaaagagacagagacagggcatggatgagcaggaattactttggcagcgtgtacctgcagaacgcacactgctggtgtctgtagcctctttccaattaacagattacgagatgggtctaagccacacaacagggtgaaaaaggaatgtttcgaaaacagcattttaggaaataactataaaggatcaatatattggcag

SEQ ID NO: 5756 - DNA, 653 bp, Homo Sapiens
  misc_feature (64)..(64): n is a, c, g, or t
  misc_feature (76)..(76): n is a, c, g, or t
  misc_feature (106)..(106): n is a, c, g, or t
ccgggcatgcgccggatgatcaggcgcccgcatttatgcacccatgccgggcccagccgcctancatgccgccccntggtatgatcccccgcccaggccttgcacntggccagatccaccaggggccatgcccccgcagcagcttatgccaggacagatgccccctgcccaagcctctttctgagaatccaccgaatcacatcttgttcctcaccaacctgccagaggagaccaacgagctcatgctgtccatgcttttcaatcagttccctggcttcaaggaggtccgtctggtacccgggcggcatgacatcgccttcgtggagtttgacaatgaggtacaggcaggggcagctcgcgatgccctgcagggctttaagatcacgcagaacaacgccatgaagatctcctttgccaagaagtagcaccttttccccccatgcctgccccttcccctgttctggggccacccctttcccccttggctcagccccctgaaggtaagtccccccttgggggccttcttggagccgtgtgtgagtgagtggtcgccacacagcattgtacccagagtctgtccccagacattgcacctggcgctgttaggccggaattaaagtggctttttgaggtttggtttttcacaaaaaaaa

SEQ ID NO: 5757 - DNA, 386 bp, Homo Sapiens
gtagaaatgattcaatacctgcagctggtgaattaggaattgtatttgttgccttttttatattagatgaggtgcaaaaattttaatgctagtcagtatgcaccaccacaggaaagttagatcccattagcacttgaaactacagctttggaaacttaggctaagttaatttggatttgttacttgattcacctactgaccttttcttttgtttgaagtgcttatcagcataatgaggtaagtgtcatgcatatttgtgaagaaacaccctttttggtcccttttgggacagagaggtactccttgatctttatgaatgacaggttactgttttgccttattgcttaacttaatgtagtgaaataaagcagacaaagcttgaaaaa

SEQ ID NO: 5758 - DNA, 444 bp, Homo Sapiens
gacccatatatccctacctcccaccacctagtggccaaacaccccgccaggagttcaatgctgggagaggtccagagggttcctataaggaaaaactatttaatacatgacctaggggaggcctaaaacccttttggggataatgtcccagagtccccccactagacacaggtcactgccaagcatcagggccactcgggctcagaggtcactcagggtcaatactcagggtcagtgcaggttatgagatccttggggtccaccctagtctctgacacctgggacaggggtgcttttgctactttggttgtggtcactcccccacacctgcctgcctccttcacggactcgaagtgaccttcctggaggaggtgggcagctcagactccacatgctggtggtgcctgaggtctgatggcctctaataaactgtgtcctatatgc

SEQ ID NO: 5759 - DNA, 808 bp, Homo Sapiens
ggggagtttttggccacgtgccaagattatccgtatgtcatggcagatagtttactggatgttttaacaaaaggagggcattccaggaccctacaagagatggagatgtcattgcctgaagatgaaggacatactaggacacttgacacagcaaaagaaatggagattacagaagtagagccaccagggcgtttggactccagtactcaagacaggctcatagcgctgaaagcagtaacaaattttggcgttccagttgaagtttttgactctgaagaagctgaaatattccagaagaaacttgatgagaccaccagattgctcagggaactccaggaagcccagaatgaacgtttgagcaccagaccccctccgaacatgatctgtctcttgggtccctcatacagagaaatgcatcttgctgaacaagtgaccaataatcttaaagaacttgcacagcaagtaactccaggtgatatcgtaagcacgtatggagttcgaaaagcaatggggatttccattccttcccccgtcatggaaaacaactttgtggatttgacagaagacactgaagaacctaaaaagacggatgttgctgagtgtggacctggtggaagttgaggctgcctggtatttgattatatattatgtacatactttttcattcttaacttagaaatgcttttcagaagatattaaatatttgtaaattgtgtttttaattaaactttggaacagcgaatttggatgttccagaggttggacttgtattaggtaataaagctggacctggggactcgtgagtcca

SEQ ID NO: 5760 - DNA, 520 bp, Homo Sapiens
aaaccattggcaatttctctaaatgcaggggccaaagcttgtgacccgggcttccttaaacttcatctttgccgcatcaggacctttgattcctgaagagaacaggagagggtacaagaactccctgattctggagccctcatgctagtccccaatcgccagcttactgctgattattttgagaaaacttggcttagccttaaagttgctcatcagcaagtgttgccttggcggggagaattccatcctgacaccctccagatggctcttcaagtagtgaacatccagaccatcgcaatgagtagggctgggtctcggccatggaaagcatacctcagtgctcaggatgatactggctgtctgttcttaacagaactgctattggagcctggaaactcagaaatgcagatctctgtgaaacaaaatgaagcaagaacggagacgctgaatagttttatttctgtattagaaactgtgattggaacaattgaagaaataaaatcataacagagtcaaaaaa

SEQ ID NO: 5761 - DNA, 405 bp, Homo Sapiens
attttcacttttaatgatcttttacttaataataaaatgaaaaataagaatataggaatacatacaatctatatacatatatttattgcaaatacttaaaattcttatgtaaaatgattttctatatttgtgaaaaaatatgactttttaaatggtgttgacaccaacttctctgtacataccctcaattccaatgttaacaattcctttaaaaaggcaaaagacacaaaagtttagcatttaccaaaccagtctgtacaaaccttacagccagaagggaaaaaaatagcttgtggtaaataagtcaattttcttttaaaataaaaaataaaccccaaaactattccccttattgcatttttctgaaataatctgagtgtctttagagtaacttcctttgaaata

SEQ ID NO: 5762 - DNA, 515 bp, Homo Sapiens
atggtctcttcttgtaaataaagttttattggaacacagttacacacatttttctacatattgtctgatggctactgtcacgccacagcaatggtgttaaatagtccagacagaggcggtattgcccgaaaaacctagaatattcaccatctgagcttttacgggaaaatttgctaatatctgttctcatgcattaaatacaatgtttgttacaggttaaggaagtttctgactatttttagctttctgaatatcttgtggttgtgtgtgctttaaaattaggactaaatattaaatttaccagttgcttgttaggggcctatcttttgagatgcccaaagtttcccttttttagtctcttcatgtagtgagttgtactaacagattctctaatgttgaaccgtctttgctttccggagatagactttacttgctcctggtggattggattctgtttgttaatacttttatttttgggtaattacatccctattataaataatatgtcagcatca

SEQ ID NO: 5763 - DNA, 1019 bp, Homo Sapiens
  misc_feature (246)..(281): n is a, c, g, or t
  misc_feature (535)..(552): n is a, c, g, or t
cccttccacacaggcactattataattttcagtgccatgttaaattggattatttcatttactttaagttaggaattactgtgtaatttattaattcatgattctcataacattcagcataagtgtagcaaagttgctaataacggaaggggatcatagtggtgttgaatgtaactttgaagtagggaatggccttttaagtctgagagagaacatttgaatccttttcagggatttgtgtagggnnnnnnnnnnnnnnnnnnnnnnnnnnnnnnnnnnnnagataagtgtatatacataaatacactcttctaaagttgtatatacatatgcacattacatacattttaatttattgacaaaattaaccaaattaagatttggagatgtgggatgttcttgttttaaaatagcatgtttgaaaccatcagtttgtgtctaaaattagctgtagcacatggatgttgtccatattaagctatttgctgtttgaattatagaggtctacagtatttgtgttggcatagtttttgtnnnnnnnnnnnnnnnnnntatcaggatggtggaaaaactagatctgtgtatctctgttttggcatgcatttattcagtatcttctagcaatggtttttctctgttgatctaccgtagtatcctatttttaagtttattttatttttaaggagtattgtcatcacttttcaaggtgtcttgacttctacacaaagtatatatattcaggactttaaaaaatagcagtacacatttaacagtagcgaattacaccaaaatgatttactttgagatttgaataatttgcatagcagtaaaatgtgttttgtgtaacatacaaatagaaaaatgacccagtatcttaattgatacttactggagagtatcagaattacccagcagctcttacagaatgccataaattctttaagactaaatattgaaatcaattatttgaagtaatgtttctggatttactgttaaaagttgctgagctcagtttttgg

SEQ ID NO: 5764 - DNA, 434 bp, Homo Sapiens
acgaatgtgtcttttcgaattcccttgataaagaagcctcagacaaggaagaaaatagaaatgaaattggacacataaataggacacccagcaaaggccagaagagaagcccttctaggagaagggacatctgtgcttccagctgagatcagcccatgtctctggtcgctctcttgcctgtggatcctgtcttctttcatgtttactacgaggcatgacattcatggcaaaacagggatgccgtttccaagagcagctataaaacaatctgttttcctaaagacagccactctgagaaggagatgaaggaacacggcagggttcatcaattcatagactgtttccaaaaataatttttaaacttttccactaggcatctgtgtctttaaccactgcacaatgcattgcctgtttaataaaaggtttcaaacatg

SEQ ID NO: 5765 - DNA, 196 bp, Homo Sapiens
cgagctcggtacccctcctatctgaatccagatctcctatctgaatccagaccgccatgatgacaaaatgagacggatggccttgtacttttattgtcgtcgcagtcactggattcagataggaggatctggattcagataggaggatctgattcagataggaggatctgattcaatagaagggggtcctctatat

SEQ ID NO: 5766 - DNA, 1011 bp, Homo Sapiens
  misc_feature (514)..(610): n is a, c, g, or t
  misc_feature (743)..(751): n is a, c, g, or t
  misc_feature (853)..(861): n is a, c, g, or t
tatggacagtgttctgctttttaatcctatttagcttgtttcagaaattctcacttttgttgactgccaacatacaaagtaagggaaactcaagatattaagatggctgtatcagttcttaaaatctgcagagcctggttcaaaatcagtcactcccttcagaagcagacatggcatctgttccttgcttgcttgttggttgtgtacctttcacgagacctgaattttagaattgcccagtgctgccagagtgagtgagtgtaattctcctttcaggtaaagataggctatctcaacactgctgagtgattcataaacatatcaaccaatagcattaacccattttatttcctgtccttagtgtctgaagatgctcaccagttttctgtgtacagtaaggcagcatgctaaaatgcttttgttcagttctgtatatttgaaaatagcagtgtgttctctgatggttacctgcagtggcaccctgtacaaaaaataaaagacttattgctgtagnnnnnnnnnnnnnnnnnnnnnnnnnnnnnnnnnnnnnnnnnnnnnnnnnnnnnnnnnnnnnnnnnnnnnnnnnnnnnnnnnnnnnnnnnnnnnnnnntttgtgggccgcctcgccccccgaaaaattttttaaacaattctttgggggcggggccccccaaggaaagagaaaagggtcatacttgtttcttaaaaaaacctggccataataagggttggtattctccccnnnnnnnnncccccgggggaaaccaacggttttaaaaaaatccaaagggagttctgaggactttatgggagttttcaccaggggtccaccgaagttctatataaatttatnnnnnnnnntgccgcctattcaagaaggggggaaattattaaagaatgctgccgccggggagcccctcccaaccggcttgttgaacctgattctcccggggggttaacaccttggtgccctgggggaaaaaaatttgcccccgcgggaaaacggggggg

SEQ ID NO: 5767 - DNA, 578 bp, Homo Sapiens
ccggattaaatcagattattatcatctatgccgttaaatttagccctactccacctctccatccagttccaagagcctatacctggccaaagagttcacttctctcctcatttctcggcctcttagcaacattgacaagattgatattcctaccttttaaaacactttcttcttgatgcttttgagacaaaccatgaataacaatcacctcactctatttacctgatatctcacaggcctcaacactagtctcctttgctgattcctcctttgtatgatcactaaatactggcttgtttgagtgtccattctcagccatcctttcttctctatctatacattcttccaggtaatcgaatctgtctccatcccataatctctgtcgagctccagacgcatgtcaccacctacctaatctctacttagatgtgtaccaggcatctcgatatctacacggcatgaaaaagaaccaactgactttctcccatgctctaaaatttcctcctccacaattctttcccatctaggcatcaaaactaatatttagtctcaatttattccctcttacatccatggcg

SEQ ID NO: 5768 - DNA, 809 bp, Homo Sapiens
  misc_feature (95)..(105): n is a, c, g, or t
  misc_feature (161)..(161): n is a, c, g, or t
  misc_feature (163)..(165): n is a, c, g, or t
  misc_feature (176)..(176): n is a, c, g, or t
  misc_feature (178)..(178): n is a, c, g, or t
  misc_feature (182)..(182): n is a, c, g, or t
  misc_feature (186)..(189): n is a, c, g, or t
attgggggaggaaacccaaaccccttagtcaatggccccaggatctccctaggaaaacaggctatgggcccatgtccactttacctaacgggggnnnnnnnnnnnaaacggaaatggtcttagaaaagtttctcgaagggccgagggcggcccgacagggntnnntttttcttttntnttgngctnnnntagaaagttgaatattttattatttacacatataaagtgagaatgaaaattgggcatggggcaagggcaggaagatgactccagctcagtcggtgatgatgagctcgtccaccccccagtcttcatagctcccatctggcaggtaacggcgaatgatgatggggatctttcgggccttgagttccttcatggcaatgagcagaggatctgtctccccctccagctccaccatcacaggggcacacatcgcaatctggagcgctcgggtgcccagcacgcgggctcgctcgtacttggtcatgtatggtgtggtgattcgcttctggttggcctgcggtcgctccccagaggggaggatctcgacattctcctggccttcctcttcggcattctccaagtcatctagcccttcatcctcctccacatcatcaaagtcgtcgccatcaaaattgtcctcgttgtctgacatgacaccctcgcctcagcgaccccgctgcgccccggtcccgcgcggagacccgcaaacagcgacactacgactcgcgcggctcctagcttatcttgcgcctcgtgccgaattcgccacccaggcctcgctacaattacggaccgttatagta

SEQ ID NO: 5769 - DNA, 545 bp, Homo Sapiens
tatctgaatcagagtaggaggctcctatctgaatccagatagcacgtcctcattgctccatgaatggcaaataataccttcaccattatctaactacttttagatctttattcaaacaactcaaccttcctggaaacaccctacactcatgtctattacttttcttcaagatccgggaagcttttccgggctgacttcaatccctactcttcaaaatgctctgtaggtattctcctaacaatttaaaaagtttctccagcctgggcaacaagagcaaaactctgtcttaaaaaacaaaagaatattggaaataaggaggagtgaagagtgaaaattttaatctctgtcctgctctctgggagagagagtgctctaattttagacaactagacattatttttagacagaaccattgctacagaagggcagtttgccataatttgatagaactgtggcctaagaatgttcaactttcatttgttccaattctctgcttatcaagcaactttctgatctctaatctggattcagataggaggggaccc

SEQ ID NO: 5770 - DNA, 458 bp, Homo Sapiens
agcctttggtgtctttcactcacagcagaaagaaataggtcataaattacagcactgatttgttccaatgatatcattagctcctggaaaacaaggatcatgaaaaacccatttcaaatgaacatatgagtcaataccaaccaagcatcttttggaaaagagcccttataaattcatactagaattctgactcctaagtgaatatctctggatcttcagaacatagaagacttagctccagcccatgcatcagtcccttcagaccatagagtcataaccaggcctattgaaagagctggttacatgagacagtcagagatttacctaggtgagaaaataaagattagatggtttgaagcagagttctagcccttccaaatcagacctccaacccctttcttaattctatagtttgtagttttcaaaggagaagttgtaataaagagtaagtaaactaa

SEQ ID NO: 5771 - DNA, 584 bp, Homo Sapiens
tgaggatctgctctagtctgaatcagactgtagctcgagagtaatcatatagaaaataagtcgggggggagaggagaaggaaaaaagagcggagctgcaatccggggcagaggtgtgtcctgtgctatgaaaaacacgtaggaataggtgaaaattagtctatttagtctatgcattgagctctagggaaagtatgtcgtgcaagagatgagagtaacaggtgagagtacgtatactgtattagaaagtgagagagccctttgttccatgtaagaaagtcttgccagtccagtttaggttgacatgtggacctgagtacatcaaatttgaggattcagtttaatgaaaatgatgaacattgtaacattttagttggattagtatcatagtgctgtaaatactacttcatgctgtttcttttttgtgaatttgcttttatgaatatatagcacttatctagataaatatactacaaatgtgattattgatggaggtgggcatgtcccacagaaagtttaaacattgagtgtgaaacaattttagcaggaatatctttgctcaaagactgaggtttttcagaactg

SEQ ID NO: 5772 - DNA, 760 bp, Homo Sapiens
gcacagggtagctgccgagcacacaagcgtaagacgctgctcagcaccgaccacgccttcccctacatcaagactcgcatccgtgtgtgccaccgggaggagacggtgctgacgccagtggaggtggccatcgaggacatgcagaagaagacacgggagctggcctttgccaacgagcaggacccaccagatgctaagatgctacagatggtgcttcagggctctgtagggcccaccgtgaaccagggtcccctggaggtggcccaggtgtatttagcagagatcccggaagaccccaagctcttccggcatcacaacaaattgcggctctgcttcaaggacttctgcaagaaatgtgaggatgcgctgcggaaaaataaggccctgattgggccggaccagaaggagtaccaccgtgagctggagcgcaactactgccgcctgcgggaggctctgcagcccctgcttacccagcgcctgccccagctgatggcacccaccccacccggcctcaggaactccttgaacagagcaagtttccgaaaggcagacctctgagcccacaaggaccaaagctgtacctagaggaaccagcacccgggcctcagctgtctgtgctgcgaggggagtctgccctggtgcccactgggctgtggggtgaccacactgtacttggggctgggccctctgcccctgtgtccccatctgtgtgcactgatgcttcctcccttttttaatttaaaatggtttttataagcaa

SEQ ID NO: 5773 - DNA, 1709 bp, Homo Sapiens
gttgaccgtgcagcctccttcgcgtagcgtataaaatcccgtccatgctgggctggctcggagacacaccctcttccacttcattctttaaatactttctttttaaactgactatggattccttgaaggtctggcagttgttgatgatggcgatcatgtactgaacgtagcagtgagggtgctgccgattcctcaggtgctcttctttatacagctgcgcttcatctttatatctgcttaggaaagaattcatctgctgaagacataaaactagtacctttgttttcaaatcttcacttatctgagcagcaacttgaagattctgttcaaacacctggaagacaatggcagggagtgtggtctggtagtacccgtcctggtcggcttctggctctgtccctttgacccagtctttcttgtctgtctccagcgctttccgcagccaggcgatgatgtttgaagtgagcgtggacatggtacgtgtcaaccagctcagagaccacgtgtggagaaagcaatggctccaggctgccgacatccacttccggggccagctccacgttcctcatcatctcagtacttgtgtaggtgtttaagacccacgtcaagaggctcacgatctcattggcttccaggtcttccgatgcgaggtcctgcatccgcgtgctcagggcttggtggtacatgttcaggaggttcttaaagatctcatagtggggaggaaagcactgaaccatcaggtttttggcgacaatgaggtcatccaggacgtacttccttataatttccaggtggcggacaagccacatcttgtcagactctctggtatctgcctgtgtgccctcaaattctgggggtcacagtccctctccaaggatggtgaacattttctccttccaattcctgggccctcccaggagggaacaaagcccagtttgctttttccggtccaagtatgcgcctgtcaattttctcttccctttcaatgatcctgacaactgagaccagcaaggtggggtcacggcggacagtgaccagtgacctctgcagcaccatccacagctgcttagccagctcatcagagagcccctgcgtgctgccaaagtagccatggatgagggtcatgtcacgcgtgttcccactgtccatgcggtactgctcgtacatcagcccgtcccgggagcattccaggtccatcagcttccggtgggcttgcaggagtgccccttgttcaagttaggtcgctgggtctccctcacgaatctcaggcactgagaagatgttcttgaggttctccacggctgcggcgagctggctgtgctgcaccacggcgtctttgacgtccttgaggctctcaatggtgttgatgctctgcctccagtccttgctgacgtctgccagcgactgctggatgtctttgacgtcattcagggcgttgtggagctggctgaggcctgtgcgcaccccgtccaactgtgactggatggcggccttcaagtctggcctccacggaggccttcttccgcgcttctctcctgcgatactgctccaccttgtccagctggtccgggcgctggagcatcccagcaaccctttgcactgctgtcgcaacggcctcccggtctgtctccttcatggtgaaaaagctggtggaatcctcacactgttcatgctaggggtgttctctgtgcacctctacggctacgccg

SEQ ID NO: 5774 - DNA, 600 bp, Homo Sapiens
ctttctgcattggtctagacgctggtttgtaacccaggtgcagctcattttagctcattgtggtcatctcctcggaagtcccacagcgagcgtgcactcaccttttagcccagtcctggatggggtgtgactgtgcacacacgactggcgtgggtcccagatctgagtgccccagtaagcccatttcctaaacaaaaagggtttgaagaggctatctagcctaaccctctgccctgcaaacagagccaacggccttgattatcaaatgagaatgtggacttcggaggcaaactggtaggggcattaagaaaacagaacttaaattgcttccacatctggaaaacaaacccagcagccagccccaagaattccaggcatgccagctcaaagagaagctgcaggtcaaggggaggcttttccctcttagctttcagtccccccatcacctacctaaagccacaaagatctcctgtctacaaataggctagtggagccacaaatcagaaaaagagaacaaagttgaaatactagggcgcctaccatgtggccagtctgctctgtgctttacagaggtgtaaactcctgctgaaatgctgggcc

SEQ ID NO: 5775 - DNA, 437 bp, Homo Sapiens
cccaacacaaatcagacagaatggcctatgcattagtgtcatgtctcaagaattaacatctgatatgctgttatttacaaaatgagatgctcaaaatagattagaaaattaaatttatgctacaaaaatgcagttggtttaagttctgtcctatgtggtgttcttcccttttcataacaaatgcttgtgttgggcgataacatcacttatcgcccaacactgaaaactcattaggtgattaaaatgtcagtatgtgcaccccagatttttacttggatcatcattgttggtgtagttacacccataatgaagttatttgaccatagtaataaaatgaagagtacatttttagtggttactcatttttatacactaaacagaaaactttaaaaaaatgttgttacctggatttgttcttgctgcagtgtgttgaggga

SEQ ID NO: 5776 - DNA, 505 bp, Homo Sapiens
cacggtccagatgtaacacacaggagcatgggggtggcagacctgggggtcaggcattggccctgatcatctctggaaggaatgaccctaaatggagcgagaaacagagcttagacacctggcggccacttcctgctcaccttaggcaagcgccttcctctttggctgtagttttgtgcctccacaagctcttagtcctggagtcagccagatctgaggttccatctcaggtgtgatactagatggctttagcctcaggctagtgccttcaccgctaactgttgttcgtgaaaggagcgctgctcacctgagaggagggctggaggaagtgagagaggcagagtaggagtttatccagcccagtttctttatcgacttaattttctttgccccccttcttggagggagtgagggtgaagaagggaggagggtatcgacccgctaatgagcactttatgacagaacgcttttatatagtcctgctggaaaactgaggccgagctcc

SEQ ID NO: 5777 - DNA, 1006 bp, Homo Sapiens
  misc_feature (329)..(373): n is a, c, g, or t
tggggggagccagaaaggcatatacaaatggtcatatttgccttctttcacatacaaaaatataaagttttttgggatttagaacatactctgtgattgtttgttccctccaaagaacagattggggaaagggactgcagctaagtgtccactccccaaagtcttcctattcctaactccatgacagctcctcagtagagctttcctcctcagaagcaactagaacaatgcagttaacattattgggccccaacggcgtttactgtgtatttgggctgagatctttagaagcccgaggcctaaacaattaactgaggaacatctaaaannnnnnnnnnnnnnnnnnnnnnnnnnnnnnnnnnnnnnnnnnnnnctgtgtggggcgataacatcacgtgatgttatcgcccaacacttgattcactgtctctaaagtcgaccacatttacatatttaaaagtttctttgggtatttgccgctgtgtttttaaataactttgtctatctgtcttgacttcttagctagggatttggagaactgacttcccgccccggttgaggattcagctttcttactgtgccttcctcatgcacatgtgcctccctcccctcatcctctgggtgttttctatcaccttgtaaagaaatcagtagtctgtgtgtacatctttatgactatgtaaatattattcatggatgacctatctggtgtactatgattgcatttcctttggttttctctgtagttaataatcatctcttttttccatgggcttacttctctatattcctattaccaatttgtggccagaattataaatctcctttcagtacattccaacacactgtgtattctgtgggttgggaacctcctgcaccttctgttcttaatttcaagttggtcctggttaatcattgaaactgctgcacactgtcatcctatggcctccatttactgtcatctggtaggtttcatttgtcattttcctgtgttgggcgataacat

SEQ ID NO: 5778 - DNA, 954 bp, Homo Sapiens
agtacagagttactttccccagaaatttggtggagaacagaagacgaaacagagctgataatattgattttcatgagaagtcagatggctgcttaaagggaaggggctgaagaaacagagaaggaggtaaaggatgggaacagctgctgtgggaattgatacagacaggaaactggctagattttctgaacaggctgtcccagcagcactgagaggctcagcattaagttatcataacttggtaacaacaccaaccagctgggctctgcagctctctctaacagtgccaggcagccctcgagagcaggacgcagaattagagacactagagtccctttgggtggggccagcctgaagtcaggagcactgagcagctgctgaacacgatggcaaaggcacaatgtgggctcccagatgggcaaaagaaggaagcccttgggaggcaggtggatccggaggacaggcaggcattggctaaggatgggaaggtggatttgcagcaggtctcatgagaatgacatggtaagagaagcagcagctccaagtcatggttagagaggagcatttccagtgggagtttaggtgggacagttttgggcattggaaaactcctaggtgcggctctgggctgggctgctggggggaaggtgagaggtacgaggaggtggaggctgctggagctgcaaaggtggaggatctccaaggacaggatttcagcagactgaacacggaaagtgcctacagtgctgggcagaggcaggtggaggagaggctgagaactaggggaggagcctgccaagaaggcggcctgtgagaagggagttgtgggaaacaggttggtgaggcaggagctgggctgatcagacaggtcactggccaggctggagctggaactttaatccacaggcagtgggagttttgaattgggcagtcacaatctgagcctgctggatg

SEQ ID NO: 5779 - DNA, 399 bp, Homo Sapiens
gccccagctattcagcacggcaactggaacacacacatggttgccagagggagtggaaactggagcaacaacaaaggagaaacattagtgcccaacgaaaacactcacgaatcgttcacccaaagatacacacaggaaagttcaaggcagtgctaatccaaataatcccaaatggaactccccacccaaacccccatgattggaagaagggagacataacttggtgaatgaacagcacagcagaccacatacagccaacattgaaggagagaacacaaggtagcaataacacggatgggtctcacactgtgcagtgtgaagggggccagagagaaaggagtatgtcatcactatatgatttcactataggtgcccttaaacatggacaaaacaaatcta

SEQ ID NO: 5780 - DNA, 639 bp, Homo Sapiens
caacgcggcatcaggaagctgaactacacctatctcatcagcatcttgaatgacatgaagcagaacagggtcccggagaacgaagtggtcatccgccagccggagttgcagcccagtaccctcccacctttgaccggtaccaagggaagaacacctacctggagaagattgacggcttccgagcctattacaagcagtggctgacagtgatgcccgcagaggaaaccccgcacccctggcagaagttccggaccaagccccagggggaccaggacaccggcaaggaggctgatgacagatgtgccctttgggggcaggtgatgggagcacagctggaacaatgtgctcggccccccagtgctcttgtgagagccccaggacatagtgagctggtgtcacctcctgcctgggggaagagccaggccctgaggaacagccgcagagtgtcacaggtgttggtgaggacacacactaggcccaaggtgcctgtgctcacagcaggttccaagtgcagctccagccacctttgcgtgtcaccttcacgggacttccagctccagctacctttgtgtgtcaccgctacacaccacaaggggctgggcatcatatcctgggcctgggccgtcctgccatgaaacc

SEQ ID NO: 5781 - DNA, 591 bp, Homo Sapiens
caaggacagatggaacatgttgtcacacattgggtggtatggggttcatcagtgccgcacatgtatgttctgtgcatttttttgtatgttgtagtttacagttactaaagaagatagcaggaagaaatggtgaaaaaagtaggtaagtcttttaaggagttttcctgctaagcggacagagaactaggtctggtggtggtcgtcaaaggagaacttttttctccctccttccctcccttcctcctagatacttgcatgtgttgtaaagagtgagcacagtggtacatcttttcttagccacagtcagctgcccaggagcagtgctgaatgggcagagctggattttacagggttgggattttgccaggtgagtaagatagaggggagaagtgggaccaggaagttccaggtctgtgaacgggcctggctgaggagctggatcatgaaatctcgagtcaagtaagaaggaaattgaggacacgagttgggtattgcatagtgttactgtgttaaggtcaggggtcaaagacttactggcatggagtaaccagagtaagtgagctggaagatgagtttcaggcagagacgtct

SEQ ID NO: 5782 - DNA, 133 bp, Homo Sapiens
gagcggacctattatcccaacacatcagtaaagcaaatcgagtgagcagcttcccgatagaaattcaccaaagtgtgaccagcattcctccctgtctgtctggggtcatttattagtgttgggcgataaatca

SEQ ID NO: 5783 - DNA, 703 bp, Homo Sapiens
tgagggtcagagccctggcacgctctcccaagagctcatggcattgcctgggatgggcccccttttgctgagaggctctgcctaaaggggagatggtgacagccacaggcttggcgcctccccgccacctacttcctaacccaaggcagcatcaccctttccgacatttgcggcgaagctcttttttccctgaactttggagttaccccagataccctttcctctgaagaaatgcttgtgaaatgcagcttctcagcaccctgctaaaacgtctccttttgcaagtcctggtccgtccccaacagtaccgtcatgacgatgcagcctccaagcagctttgacatcagagccagcgctcctgtgggcctgggggcagggggtcgtggtgcctacagcgagaaagacacacaagcagcacgcagctcgcgctgtgctctctcggaagaaggagaccttaccttcaggaaaaatagagccacagcagtgccacatgccaggccgagcattctggttgacaggggccaggctgtacttgctgctagggtctggtgacctggggccagagaagcaggctggagccctcccaaaattaggcatactctgtgaggaaaagaaaatgaagctgtcccttccacaaggctacaaggacatctctctccagaaaccatctttttccacccgggcaaatgttttggtggaaacc

SEQ ID NO: 5784 - DNA, 584 bp, Homo Sapiens
  misc_feature (131)..(180): n is a, c, g, or t
tagataaaggtggaaaagttatcttggacaaatgctgacaaaatgaaagtaccatagccatattagtgtgggataaaatagacttcatattgatgaaagatgtaatctcctaaaaaaaataacagttatannnnnnnnnnnnnnnnnnnnnnnnnnnnnnnnnnnnnnnnnnnnnnnnnnagcaggggtttttaattttataaataaatatgtggtacagctggcagactcctgagctcagttttaaccatgctttaacatggttaatacaggagcagggaggagaaaaggactaagtgcagggtcagtactccagcgccctctcatcagacaatgaattctgacactggctgtaagttttctgtgcagtaatacagatccttaagacattgccccaggcaatgcccataatatcctaaaggttccttgaagttaagtttcaaggatcaagtttcagttttctattttagaatagaaacattactcttgggttcaatccagtagctcatctgccccccagtctccttaggcactgattccttcatgctgtgctttgagaaaggaagcctaggctgacgagacca

SEQ ID NO: 5785 - DNA, 216 bp, Homo Sapiens
ttccagcagagtttttatgctatgcacaacactgacttttgaggtactacactagctttaagtttgttagacacttaaactctttccgcttgatccaaaaattctttactcagtcacacaacaaatgaggtaatatttgtaatgtaaatttcaccttttgtcatgtttttctcttttggaaaaatgaaagaaaaaagtgtatatgctttccttctc

SEQ ID NO: 5786 - DNA, 358 bp, Homo Sapiens
tatcttaccctaagatctggttcttccctccccatccccaccccccacccaccgcctgccagctcacactaatagatgattcttaattgccaaatgtgttagagtttgtatatcctactcctgggccttacatgtcgcctgttggggcttaagaccaggttgataagtaggaactgaaagtcttccagattcacagtagaaaattttatagacatttctgttaaagaaatatatcgattttatgtttttcaattatgttactgtaaataccttgtacctgttcatggattattttattctaaaatattttgtcaaatgtgtatcaaccaaattaaaaagaaaggttttcatgtcaaaa

SEQ ID NO: 5787 - DNA, 1031 bp, Homo Sapiens
ctggccagctacatcatcgacgtgcgggccctagacgagaagctggtcaacatcatcgacctgcagttcctgcatgggtactacgagcctacctccctcatcctgtttgagcccaaccagacctggcctgggcgcgtggccgtgcggcaggacacgtgctccattgtggccatctcactgaacatcacgcagaaggtgcaccccgtcatctggtccctcaccagcctgccctttgactgcacccaggctcgggctgtgcccaagcccataggtggggtggtggtgtttgccgtcaactcgctgttgtacctgaaccagagcgtccccccgtatggcgtggctctcaacagcctcaccacaggaaccacggctttcccccttcgcacccaggagggtgtgcggatcaccctgggactgcgcccaggccaccttcatctcctacgacaagatggtcatctccctcaagggcggcgagatctacgtgctgaccctcatcaccgacggcatgcgcagtgtccgagcgttccactttgacaaggcggccgccagcgtcctcaccaccagcgtgagttgggactaggggttgggtctgggtccagacccggcccagccatcacacacctgccctccctcagatggtcaccatggagcccgggtacctgttcctgggttctcgcctgggcaattccctcctcctcaagtacacggagaagctgcaggaacccccggccagtgctgtccgtgaggctgccgacaaggaagagcctccctcaaagaagaagcgagtggatgcgacggccggctggtcagctgcgggtaagtcggtgccgcaggatgaagtggacgagaatgaactgtacggcagcgaggcccagtcgggaacacagctggccacctactcctttgaggtgtgtgacagcatcctgaacattggaccctgtgccaatgccgccgtgggcgagccttgccttctctctgaagagtcatagaacagacccgatcccgacctcgagattgtggttgcctctgcc

SEQ ID NO: 5788 - DNA, 488 bp, Homo Sapiens
aggccgggtgacaccggggggctcccagcccgtgcaccctggaagggcaggtctggcggctccatccgtggctgcaggggtctcatgtggtcctcctcgctatgttggaaatgtgcaaccactgcttcttgggaggagtggtgggtgcagtccccccgctgtctttgagttgtggtggacgctggcctgggatgagagggcccagaagaccttcgtatcccctctcagtcgcccggggctgtcccgtgcatgggttggctgtggggaccccaggtgggcctggcaggactccagatgaggacaagagggacaaggtatggggtgggagccacaattgaggataccccgagactaccaggagagccctgggctggaggctgagctgcatccctgctccccacatggaggacccaacaggaggccgtggctctgatgctgagcgaagctataggctcttgttggataaaagcttttttaacagaataaaa

SEQ ID NO: 5789 - DNA, 365 bp, Homo Sapiens
ggtttttgggaacaaatgaacttataaagtggttttatataaaacatcaattgtcttgtatattttggataagcagcagtaccagctttcatttgtaacagtctgtggcattgggaaaaaaggagtctgtgattgttgaagtgaattatgttataaatgcaaagagaagataaaatattaaaaaacatattttctaaatgcgtagtgcatggttaattcaagcttctgtacactacagtatattccattttcgttcagtttgtatatttgctgactattacttgatatctctaatctcttttcctaacaaatatagcattgtagcatgccttttaataaatgtcatgacatctgtactctcttaa

SEQ ID NO: 5790 - DNA, 567 bp, Homo Sapiens
aggtcacctcatattattattcccttcttgcctgtgaggactgcggcttttcgctgtggctcgtccttaacgtttctgaaccaccttggtgccctgagcaggaagatgtgccacttcctagcaggcgcaaggcctgtgcggaagaaacgccgctccctgccaccagggctgaagatgcgagcccgtcctcatgacgcaggcgccaccctgctgccggagccgggcttcggcagtcttctccactgagggactgggctgggaagtcctgcgtttcagtggagcgtatgagcgtcaagtcctgctttctcagtagccccattgcggggccccaccattcatcctgtctgaaggtcctgggtttggtgtgaccgcttggcggctggtgggtggggttttcaagtgggtgacggcgctctccggcagccggggatggccgtgtccgcactgaccaggcctgtggagagtgctcggcctaaccttagaacacatttgtaactgaatacagtgttttcaatttgtacagaatagttagaatattctattaaagtggtgaaacattgagtcagc

SEQ ID NO: 5791 - DNA, 572 bp, Homo Sapiens
caaaataaataaattatataattatcactacacagattcaccatacaactcatttctacttaagagattcatatagacacaatgacaaaatagattgtgtccacagaaagatcgagagtgaaatttccagaaactatcttagatgaaataattgaagaattcagttaaatatttattgaacaaatgcagagtaaatgaactaagggctgttataaccttaagttacaacaaacaacttcaaatattcagagggctgtcacacagagaatgaaagacttgctcagtatttctccaaagggcagaacttgagccaagcgataaatataagcaaccaatgggctgcaggatagttgtacaaagtgtatcatgtatcttcatagcttctttgcccatataatgcattccacacttaagtttctccttctaaaaggcgacacgacaagttaatatgtctcataaatgtcttaaataagttgcattttcatggcaagccctccactgccagcaatggatatactcacactattggaaaaaatctaaagttaacaaactggtttagtatggaaatggtc

SEQ ID NO: 5792 - DNA, 684 bp, Homo Sapiens
  misc_feature (12)..(12): n is a, c, g, or t
  misc_feature (88)..(88): n is a, c, g, or t
  misc_feature (507)..(553): n is a, c, g, or t
aacatggtaacntaattcatgaacttgagccaggcgaatgctcaggggacgcagcgctgggagctcaaggtaccagctgacgaaggcntatggggtgccggacgccagcgcccactccatgcacacagggctggaccgcatcgctggcgaccagagcacactgcagcgctactacgtctataactcagtcagctactctgctggggtctgcgacgaggcctgcagcatgcagcacgtgtgtgccatgcgccaggtggacattgacgcttacaccacctgtctgtatgcctctggcaccacgcccgtgccccagctcccgctgctgctgatggccctgctgggcctgtgcacgctcgtgctgtgacctgccaggctcaccttcttcctggtaacgggtaacgggggcagcgcccaggatcacccagagctgggccttccaccatttcctccgcgcctgaggagtgaactgaaataggacaaccgaatcaggaagcgaagccccaggannnnnnnnnnnnnnnnnnnnnnnnnnnnnnnnnnnnnnnnnnnnnnnaagccagactctctccaaaaacaaaccagaaacagaaaagaaatgacgacccaagacccccctacaagcatactttttttgcgtattatgttttactcacaaaacaaagctcatcatgcgtttgaaaaaaa

SEQ ID NO: 5793 - DNA, 506 bp, Homo Sapiens
  misc_feature (106)..(106): n is a, c, g, or t
tgtctgcactgcgatcctcttgggctctcctaggatccccccatgccccgtaagaggtggaagacgcttccttccaggacagcaggctttgagtccagcacccccncagcctgcctttgccaccagcccccaccctgcagagtatatgaggcttgacagagtctgccccctcccccactgcaccccaagagagagagccccagccagcggaacagtttctattaccccctccctgcccccagacccatgtgatttctgctttcttctttagcaagatattctggtttctagataaggaagagtctctaatgagcccccgagccccagtctcttcagactcatggattggtctgaggggtctgaacgtctcctagccaatcagaactggctgtggaccaccctagcacggccacctctcagggccactggcaggccttcctgagttagatttgtagttgcatatttagctttgcacatttgaaataaaccacggttgcagccaaaaa

SEQ ID NO: 5794 - DNA, 1059 bp, Homo Sapiens
  misc_feature (794)..(802): n is a, c, g, or t
gataaaatgaaaattaaaaacagcaagtgtcaaccctgaccagaatcctaatctggaaagaatgagggtgtgcgtggtgcgctccacagctactatgtgcaagacattcaaaaataatggaatatggatccctcaaagttgttgtatttcagagattatttactgtatgttgtgggttatgaataatgaattcagctttcaatatttcataatcctctcctactctgtattatgtacaaatattgaacagcaagagattctaattataaatttatggatttcttgctgtagaaaaatttatgtctaaattgaagcttttcataagatgtattagttgacaggtatcagtgttcaaacagccttagaatgatgcctaattacatctacaagggagtgattgtattccacaaagaaatgatgtgctagcatcagatccttcagaagtagagctcgaatggtaaaagattttctgtgaattgaaactaacattacataacaataaccattttatattctgttgtgaaacctttagacagatgtcttcaaaattaattgctaaactacatgtgacagtaattgtgtattagttctgtaattgtcattttgaaaacccatgaagtattgcttggaaaaaaatgtcactagtgataagacttaattgcaagtgaagtctgttttcaactgtttgcagttagaagcaggtgttgtaacatctattaaatgattttataaatcttgggttttatcacatttgattaaatgctgctaagccactgatggtcaattccagaggnnnnnnnnngtttaatgactacagtttataaaattaatcaccaggcaaaactacatatttaaaatgtcaaaaggcttgaatcatgaaaagaattcctcaaccttgttaccaaattattgttttcaggattcacaaagcatgttatatatccatttatatttcagtttatacatatgactggtttctattcctgagacttaagtaagtacttggtgcgctttttcttttgttacaggtcagaaataaatcaggataatgaaaaatag

SEQ ID NO: 5795 - DNA, 463 bp, Homo Sapiens
  misc_feature (37)..(37): n is a, c, g, or t
ctgagggggaacaggagcagggccacagcaccctganggtctggccaggccccaggcacagagctgcctgctccctcccggggctcttcttcatcacctcacggtatagcacattgcttctgcgctggtggcaatagggcaacaaagccataggccagagggcggggggatgtccctgcctccctgccacccccactgcctgagcccaggacccactggagccagccccaccctaggcaggaagacccctgctgagggcccccccgtgcagtccgcatacccccctgtccagcagggcactgtgggtggctcaccctagattgtggcccagatctcaggagtctctgccttcagggtcatccaaaagtggaccttgggagcagtgggggtgtctgtggagtgcatgactcagccccccgactcgcagccttaataaagcgatggttgacgtctgctgtgggtt

SEQ ID NO: 5796 - DNA, 570 bp, Homo Sapiens
  misc_feature (71)..(103): n is a, c, g, or t
  misc_feature (517)..(517): n is a, c, g, or t
  misc_feature (551)..(551): n is a, c, g, or t
gaaaattctcagagataatgcatttataaacacagaaatggttacaacaaagatggccgtgatgagtgggnnnnnnnnnnnnnnnnnnnnnnnnnnnnnnnnnaatccgtgtccggcatctgactgtggcacctagggagctaagtccagtccttgcgtttgccttgaactctcccttctccgcaacacccatgttttggagtttcacagataacacaaagcctcccacagctccttgggggtgggttggggagactgagagtatagggtctttgtaggcagagaaggagagaggcttcaaggaaatccgtaaaaccataacacacacttctaagccacctgtgaccaacttgggaatttctggccccttggggaccacatctcagcccttgcccccttcaaataaaaggaggtctagcccctaccccaaatctccttctaccagcagtcaataggaagcaaagtgagacgatgtaggggaagaaatggctctcagggactgaggcatttgagaaanctctgttcttttgcaggcaagaataggaccagangctgggttgcattgggggc

SEQ ID NO: 5797 - DNA, 1474 bp, Homo Sapiens
  misc_feature (1245)..(1254): n is a, c, g, or t
caccgaaagggcagaactatacggtttaaggtagcgaggctgggtggcgaattcggcacgaggctcttgttcctcctcctgcctctcttcgcttcgcctgcaaacgcggtgggggctgctcggcggtcaggagcaggttaccctccgtctgcatgcccaccatcaaggtatgaggatggtagaagctctcgtcgaaccagatggatgaagaccactaacggcttatgtttcctctggtaacagcaagagacagagcgacatgagagattggaccgcgggctgcactggagaatttactggtaggataattcatccctaaagagattgaagtgagcttcagaatggcaaaagaggagccccagagtatctcaagggacttgcaggaactgcagaagaagctgtctctgctgatagactccttccagaataactcaaaggtggtggcctttatgaagtctccagtgggtcagtacttggacagccatccgtttctggccttcaccttgctggtgttcattgtcatgtcaggccgattcctgttggattcttcctgctcatcgtggtgcttaccaacctggctgctctgctggggggtcataatattggaaggattggtcatctctgtgggtggcttctcactgctctgcatcctctgtggtttgggcttcgtatcactcgccatgtcggggataataatagcatcttatgtagtggtctccagcctcatcagctgctggttttctcccaggccactgacacagcaaaacaccagttgtgactttctgccagccatgaagtctgcagacttcgaggggctttaccaggaatgagtgactgctcagaggccgggcttcttttcaagtactgctggatcatactcaccccttgggattatggcttaaaagaagggggctgggtaggcaagcactccttggctgtgtcctctcgctttttcacttacttgtaggatcccgcagcagccaatttagggattgtgttgttcttgtgttggttcccatgtaaagaagcagcagagaaatgcgatggttcaacagctcgccctgccccaagtatgcagacttgaccttggcggggtcctgggcttctagagtctagcccgttgaccccaaagcctcagggcttatgtccaacggtcccattgggagcaacagtgattgtttatagttttttgttttcagaaatgagggcagctgttaattttttcactcatgtgaaacaaaatgnnnnnnnnnntccaaaacagaacaagcccttctgtggtatttgctttttatcagaaagaacagcaacatttggcctctccaggttggaaaatagagtccaaatgtaactttgtggccaagagtattttcaaaaaagtctaaaggtgtagtttccactgtaactgttgagtactgttaagtacggtaatcttttacatatttgcacttgggcgctcgtgccggaccaggct

SEQ ID NO: 5798 - DNA, 214 bp, Homo Sapiens
ggtcgctctacaggatcccgtgatgttatccccaacacccccacagtgaatgaggccactgagagtgaatgtctaatgggagatgggaaaaggcctaagatataaacctcaggaacctcaattttaagggtttggaagaggaaaagagtctgcagagaggattaaagagtagacagagaggctgaaggaaaactaggagagtgaaatggtgatg

SEQ ID NO: 5799 - DNA, 870 bp, Homo Sapiens
  misc_feature (42)..(42): n is a, c, g, or t
  misc_feature (791)..(822): n is a, c, g, or t
ccctatccctttggttccacatccaagggtagggccctgacnccaggaagtgtctgtctctctctctctgtctcccacccagctgtcctgaactccctacgccagctgggcacatctaccagtatcctgaccgacccgggccgcatccctgagcaagccacacgggcagtcacagagggcacccttggcaaacctttatagtcctggccagaccctgctgctcactcagctgccctgggggctgctttccctgggcacgggctccagggatcatctctgggcactcccttcctgccccaggccctggctctgcccttccctggggggtggagcagggtccaggtttcacacttgccacctcctggaggtcaagaagagcagagtccccgtccctgctctgccactgtgctccagcaccgtgaccttgggtgactcgtccgctgtctttggaccgctgtgtttcaatctgcaaaatggggatggggaaggttcaatcagcagatgacccccaggccttggcagctgtgacattgggggcctaggctggcaactccgggggctcaacggtggaaagaggaggatgctgtttctctgtcacctccacttgctccccgacaggtggggcacagacctctgttcctgagcagagaagcagaaaaggaggttccctctctctgctccttcactgctgacccagaggggctgcaggatggtttcccctgggagaggccaggagggcctgatcccaggagacaccagggccagagtgaccacagcagggcaggcatcannnnnnnnnnnnnnnnnnnnnnnnnnnnnnnnggttttgtaaattaaaattgcccaataaaagcaaaaactgtttgctgg

SEQ ID NO: 5800 - DNA, 302 bp, Homo Sapiens
gaaatgttctttaaacatcacaaataaacatactgcatcagggacttgtaggggacaagactgattaaccaggggctgaaatccccatatctagaaaccccagacagttaaaaatagtaagatatcactgtaagaacaatttaaagaaaaacaagtttacggcaaaactagactacaaatcaatttcattataactaaaactccttaatttaaaaatacagtactagaagatcatccacccagtagatttgtatttagtaggacctagatttgctagtgttggggattacgggatcctctag

SEQ ID NO: 5801 - DNA, 570 bp, Homo Sapiens
aaccattcgaaaggctttggaattggccctgacaaggattgaagctgcccgcccatggagctgttagaaatcagaatcctagctccaccccatccagttcatgagaatctatatttaacaagatccgcagggggtgtgtctgctcagtaatttgaggacaaccattccagactgcttccaatgtttctggaatacatgaaatatagatcagttataagtagcaggccaagtcaggcccttattttcaagaaactgaggaattttctttgtgtagctttgctctttggtagaaaaggctaggtacacagctctagacactgccacacagggtctgcaaggtctttggttcagctaagctaggaatgaaatcctgcttcagtgtatggaaataaatgtatcatagaaatgtaacttttgtaagacaaaggttttcctcttctattttgtaaactcaaaatatttgtacatagttatttatttattggagataatctagaacacaggcaaaatccttgcttatgacatcacttgtaaaaaataaacaaagaacatagtgcatttaggattgtt

SEQ ID NO: 5802 - DNA, 172 bp, Homo Sapiens
tgatgttatcgcccaacacaaacttcacaacctgattgacagatcctaatgcttgaacaaagggaatgttggcatcatcataattggttcccagaggaaaatatgagtgcctttccttttctctggtgttggggataacatcacgggatcctctaggcacccgcatcactgt

SEQ ID NO: 5803 - DNA, 323 bp, Homo Sapiens
ggtgaatgcctagtgctgagccttggctgggcatgagcgtctgaatatctaaaaagcatgcagcatggtgcccctcttctgaccaggcacacacacgacccctcccccaacacccccaaattcaagagtaggatgtggccctgtcacaggtagaaaaacctatttagttaattctttcttggcccacagtctcccagaaatgatgtgttgagtccctatagtttaaactccctctcttaaatggagcagctggttgaggctttctagatctgtttgcatcttctttaacactaagcggtggaaaccagcattgaccaggaggg

SEQ ID NO: 5804 - DNA, 440 bp, Homo Sapiens
aatgctgttcgttcaaaagtggagttgttttaacagatgccaattacggtgtacagtttaacagagttttctgttgcattaggataaacattaattggagtgcagctaacatgagtatcatcagactagtatcaagtgttctaaaatgaaatatgagaagatcctgtcacaattcttagatctggtgtccagcatggatgaaacctttgagtttggtccctaaatttgcatgaaagcacaaggtaaatattcatttgcttcaggagtttcatgttggatctgtcattatcaaaagtgatcagcaatgaagaactggtcggacaaaatttaacgttgatgtaatgaaattccagatgtaggcattccccccaggtcttttcatgtgcagattgcagttctgattcatttgaataaaaaggaacttggaaaatcatgaaaaa

SEQ ID NO: 5805 - DNA, 1270 bp, Homo Sapiens
  misc_feature (109)..(290): n is a, c, g, or t
  misc_feature (1029)..(1029): n is a, c, g, or t
  misc_feature (1204)..(1204): n is a, c, g, or t
tttactgcagacctactttattatgcaccgtgatgtttcaagtatcacaaaccattacaaagcaatataatcaccctccttcccccttactgcttcaaactattgtggnnnnnnnnnnnnnnnnnnnnnnnnnnnnnnnnnnnnnnnnnnnnnnnnnnnnnnnnnnnnnnnnnnnnnnnnnnnnnnnnnnnnnnnnnnnnnnnnnnnnnnnnnnnnnnnnnnnnnnnnnnnnnnnnnnnnnnnnnnnnnnnnnnnnnnnnnnnnnnnnnnnnnnnnnnnnnnnnnnnnnngccaccacgctgggggacggagtaagactcagtctcaaaggcatgacgaaaatagcaaaaatgctttagtgttatacctgttacgaatttaatggaaattacaagtaggagcccattacaatctctagccttaaaatgctgaaaacatacacagtgtgacaataagtaaacttcgagacccaataaagggggaaagtccaacgtggaaagtatttggtaggagtgaagaacagagtgacaactgcttagtcccactggatatttcgctcctcttcaggaagaatactccagtttggggaggccatatcccgggccagccagttaaaatcgtcaacatcgttccagttatttttgctcctatctaaaccagagctctcgaaggccttgtcgatctccgggtagctccaggtgtaaggggcgaactggatcccactgcagtcctccacgatggccctgctggtcacctgcaggaagatgcgggtgtctttcgtactgtgtatgcggagctgttggcaggccactgccagcacgcagtcactgcagtcctccaggaaaacagaggtagacaccggaccgcagagcagcttgcagctgtgggccttggttagccgcagggtgttgggatttccatacagtctgaccgtgcagttgctcagttcgggtcaaaagaacgtcgcgctggtgcaactcgctggctctcttctccaagacttgggactccagggtggagaaaccgcangacccagctggggccgaggtctccttccgccttcttgggcagcggggagtcctgtatgctttcaactgccggggggatgccaggagccgcgtctactttggtagacgaagcagcatcctttccccgggtcttgaaagcgaaacgcttcttgggctgcagcccccggcgccggctncaaggccgcctgcatgccgccaggcgcctcttatccctgccgcaggtcgtaagcggctaggaaaaa

SEQ ID NO: 5806 - DNA, 229 bp, Homo Sapiens
caggactatttgttttcatattcctcctcacacccagtttagtgtctggcatgtagatgctcagtgaatgattgatttgggtagttttggttctttatacgggtcttcaggttagtcccaatgtactggcatggagctagttacttgagcaggtcttcacaaggtctgagtagcaggtgataaaaggggtgtgaagtctgactcctaactaagtgtggacgataagtac

SEQ ID NO: 5807 - DNA, 516 bp, Homo Sapiens
tcgaccagatacaacaggctctcaggcacttgagtggctgccgttctacaacggcgcgactggtgctttgggacggcgtccaacccgcattcatgtcaggagtgagtcgcacgtggctttgtggtcatggcgacttaatccgcctggacggtggctccgtctccctgggcttagacgaccttggcacttctggagataagcccatggctcccaggttgtgttcatgtgacgtttccttgtggtaggttctgggtctgcgttttgtctaggagtgtcacaggatggacactgcctcctggcaggggctgcccaatgcagatagcctcctgctggtgttctctcttgttgcttggtgaaggtggccctggtcagcttctccactgcccagtgaacgacccctttgtaatgaatgagtggtgaggtagtgtgaagcgatgccaatatcccatccctgtcaaactgcctttactttttccttccttccttgctcccacctgtgtggatcctggtcccttc

SEQ ID NO: 5808 - DNA, 415 bp, Homo Sapiens
  misc_feature (143)..(153): n is a, c, g, or t
ttaaaaatttagcagggcatttggtgcatggctgtggtccaaactaaattggtggctgaggcaggaggatcacttgagcccgggaggtcaaggctgcagtgagctgtattcatgcctaggtgacagaatgagaccctgtctcnnnnnnnnnnnggaaccattaattttctctcccacaacactggaagttctgagacaacacaacaactttcgaaattctgagaagataataattcctactctaaaatcccaaaccagaactatccatcaaatataagaatccaacaaaaatacagccagatatgcgagttctcaaaaaattcatttcccttgaattcttttctggggaaaacacaagacaacataatccatcaaagtgagcgagtaaaccaaggaggaaaaaaagttagatcca

SEQ ID NO: 5809 - DNA, 559 bp, Homo Sapiens
taaataaactgaccatctagtccttgtcatctgggcaccctcacacatctcctttaaccacacttaatctccaagtaagtacgataacatagtcatagtcccacccaacatgatgcagttatcttgcatacaactgaagacaactaaccctttccccaacagagcccaccagcagtggtggagatgtcggtccatgagcgcacacacaagactgagggactgtcggccctcccaggtggtgtcaacacaacatcacacacaggtgggggggcctgatagcccagcacccatgatacatgggcctaccaatgcttaaaaccacacccagggagcccacagaggcactcagtgggtggtggggtgatggatacacatctatcaggcacagggcggaggtgggcaccactgagttgcactcagcaaacacattgggtatcttgtgcccaaggcctgtatttgtggagctgatgttctagtgagagacagtaaatgtgacaaaagtaaaatatatcagatggtgagaaaacagaaaaatgagatcagaagtggagatattggg

SEQ ID NO: 5810 - DNA, 156 bp, Homo Sapiens
gaggatcccgttatgttatgcccaacacccacacatctttgtccctgcatcttcattagagctgtctaattcagcaagaccactttctgattcagtatggctttcctgcattgtcactgggtttccaggtgttggggataggtgttggggataaca

SEQ ID NO: 5811 - DNA, 307 bp, Homo Sapiens
cacgccgcaccgccggttcaaagcgaggaggagaagggatgtactttttatttggggctttgtgtctggtggggaagcacatgcaggatccactctgtcatcaccaatgctaggggcagtttaatctcaaatgttcttgctgtttcctgttttattggcaacggattaaaagagagaaagcagagtgtgtacagacaaatatagcacatgcaactggacacaagaacaaccctgtcaatgttcactggtttcctgtctgagtggagtaaggatcagtgggtatatatgcctccgggcactgggacat

SEQ ID NO: 5812 - DNA, 201 bp, Homo Sapiens
gcggcgatctagaggatcccatgttatcgccaacacttgcccatccctcccttctttagcttctgcaaccagtactttctggtacacctacctctccggcccctcacctctctatcattatacatttaatcaacaaatatttattgagaacctaccatgagctagtgcattgttttaggtgtaggagataacatcactggt

SEQ ID NO: 5813 - DNA, 411 bp, Homo Sapiens
cacgccgcaccgccggttcaaactcaaaatgggcatacagtcatcttaaaataggttcagctatctctagcaattataaagctctttccatgaataaactttttctaagcacctaaaatcacatgaatatatctgcctgacaaaaatttgggaagtccagcatctctgatttaaaaagaagaaactatttgtaattttagtctcttgttcttaatgcaggatctgaccattggttagtaatgcaacagctgcgattagcaatgaaggaaaactattttcagagtcttctcatgacctagccacattagcaatctaaaaatacaaacaggaaaagtttttaaaagcttaaccttttataaagtgactaaactgcataagccatcagccacagatttctaggcttttatagag

SEQ ID NO: 5814 - DNA, 157 bp, Homo Sapiens
tgcctggtagtgaataaaatcttaaatcatgaagattaaaaataacctgctacttctacttatgttgccataaaagcagttttcaaaatatgttctcttaaaatatcttgaaaatagttcctggtctaatgaaacaagtgttgggcgataacgtcac

SEQ ID NO: 5815 - DNA, 176 bp, Homo Sapiens
gtgatgttatcgcccaacacgtatgttatccccaacacttgtttttttaaaaattcaagactacattaaagttgagagagaagtacaataaacacccatatagcatacctacattcactgactgttaacattttgccacgtatgctttatgtttctgtgttgggcgatacaacggt

SEQ ID NO: 5816 - DNA, 359 bp, Homo Sapiens
cattaggcaataacgcgcggatgttggagtggggaaggaggagaaaggaccagcatgagcctagaaaaatgcagtacgtgttcaagtggaggggtggttggctcccaggacacatggtgggaggtggaagagatgtgtgtacagtgagatggagaaggaccctttcctcagtgcctgggagtttccttttgctttgaacagcttatctgtgagcaggaaaatgtcataactatcagctgtattttaagaacatttatctgaagatgcacttcttttattattagatgctattcattgtgttgtgttcagccattcttttaatgtagaataacattcacatacactaacatcaggctctt

SEQ ID NO: 5817 - DNA, 593 bp, Homo Sapiens
tgcatgaactatgtgcgttgatctgaggctgagggatatgcgcgccggccggtgcccatcatcgcaatccgtagagtcatttcaagacagacaaccgcatgtgtctcgataagcgctcgggtcagcttatgcatggcatcgttacgaatccgcacaacgcgcgcatgtacttttgcaagcctagcttttgcccgctgccgtctgcgcgaacccagctgtttacgagacatacacccgtttgcaaagtaaaacaggcgcgcggaacccttgcttaatcgcgcttctaagcactagcgtttgtccgtctgtcgaggtcgcggcacgtacagcaccaaaatcgaccccgacccgcagtgcccgtgcgtggaactaactcttcatcacgctcggtctgcaatgacacaaaccaattcccctgctcacgatagactgttgcgttcttaagctttccacacacgtcccgcgacattcttactcggacccaaccgagttttgccagccgcatgcgggcattaaccttatcgagttcaacagcctgtggtaaccgaaaagctgctcgagcattgcggcttttgaaccggcggtgcggcgtg

SEQ ID NO: 5818 - DNA, 320 bp, Homo Sapiens
atgtcttatgggctaaaggacaccggaggtagttgatagatcgagaatacacaaggacactcacagtcacacatagaacctagaaacaacactccccaaaacagatgtagattcaacaaaatactataaaaagccataaagcatattcagtatataatgtttaaattgttctgacatatatgttgtttgtatacccgcacaaatgttactgtcattaaactaatgatcctattttcttcttctcaaaaaaagtcctagaaatctgtttgtgatggcttgatgaagtttagtcactttataaaagccaccttggtaaagtt

SEQ ID NO: 5819 - DNA, 291 bp, Homo Sapiens
  misc_feature (171)..(197): n is a, c, g, or t
acgcacgccgcaccgccggttcaaagtgtgggactacaggtgtgacacactgcacctggccaatctatgttacttttgaaaaaagttcaaataaattgaaataagtctttactattatacactatgttcttatggtctaaagaactcaagaaatagttttaaaatcgagannnnnnnnnnnnnnnnnnnnnnnnnnntagaacctaaaaccaaactcctcacaaacaaatatagattcaaccaaatactataaaaagccataaagcatattcagtatataattttactttc

SEQ ID NO: 5820 - DNA, 1158 bp, Homo Sapiens
  misc_feature (523)..(567): n is a, c, g, or t
  misc_feature (810)..(822): n is a, c, g, or t
  misc_feature (906)..(968): n is a, c, g, or t
  misc_feature (1047)..(1047): n is a, c, g, or t
  misc_feature (1143)..(1143): n is a, c, g, or t
aaaggatgttttgtcccatttccttggaggccaccgggacagacctggacactagggtcaggcggggtgctgttgtggtggggagaggcatggctggggtgggggtggggagacctgggttggccgtggtccagctcttggcccctgtgtgagttgagtctcctctctgagactgctaagtaggggcagtgatggttgccaggacgaattgagataatatctgtgaggtgctgatgagtgattgacacacagcactctctaaatcttccttgtgaggattatgggtcctgcaattctacagtttcttactgttttgtatcaaaatcactatctttctgataacagaattgccaaggcagcgggatctcgtatctttaaaaagcagtcctcttattcctaaggtaatcctattaaaacacagctttacaacttccatattacaaaaaattttctataaaaaagacaacacacaacgccaaaacactaacccactacaaacatcacaataatacaaaacaaaccnnnnnnnnnnnnnnnnnnnnnnnnnnnnnnnnnnnnnnnnnnnnntttgggacccctccgcccccgcaaaaaattttccacaaacccttttcttggcggcgcgccgcccaaaacaggaaaggcgaaactgggccccaaccttttctctccaagaaaaaaccccggcacctacaaatcagcggcctcgggtttcccacacaacaaaaacaaccccccggtccggccacccgagggttatcctaaacaacccccaaaaaggggatcctccggcgcgccccttactgggannnnnnnnnnnnngggaagtcccacagacgcgttccgaatattaaaaattaaacctgccgcccgccggcagaatatttttattagaaccgggcgttnnnnnnnnnnnnnnnnnnnnnnnnnnnnnnnnnnnnnnnnnnnnnnnnnnnnnnnnnnnnnnngctatcgtgtgaaacacgccgcgctatatcgcccacgcgcctaaaatttacaccacccttttgctctccgcttacgcgncggtaatatatatatttcccgcccctggtgaataacaaccgccgaccacttagaaaaacccttcttcctccatacgccgccgcgccaccccttcanacattatctaacggt

SEQ ID NO: 5821 - DNA, 984 bp, Homo Sapiens
ccaaagcacatggtaccttcaatctgaaattgaattgtactgttaagcatgtctggtgattcaaaagactggcataccttatttccagtcacttcctcgaggcctgggctttgtcaatatgtgaagatgaattttggagaatcatgtaaacacaattgaacagatctgggggatccagtctgatgggtttgctgaggccaatccagtcagccacgcagaagtgtgctggacacacaggccccaccaccccccgccaaagaggcagcctcccaacaagctgccaatgacataagcaaagcagcgtgtctcaagtgtctccaatcataagattcgcctgggaagctggttaaactaacacagcctcttaggctccttcctgaagactggattccatgggtctatgatggggctagaaatttgcatttctaacaaaactcccttgtcatcatggacgttttagagatattgatactattatttctactgatttctgctctcgggagtctgtaaactttttctgcaaatggccaactggttaacttttaaggctttgtagaaccgatagtctctctctgtctctcactactcatcaacttgatgtggtagcacaaaagcagtcagtcagcctattgctaatggtaaatgagatttagcctaaagctgcctccttaagttcggcctgaagttttctctgtacattgtgaactataacaaatgaaggtgtaacaagaccaatcaccgagtttcggtcaatcaaatgtagccaactgctcaaactgtgttcaaataaggcaaacgctgagctgtaaccaatccagctgtttctgtacctcacttccgttttctgtatgccacttccctttttctgtccataaatcttccaccacgtggccctgccagagtctctgagcctactctggcttggaagactgcccaattcacgaatcgttcatttgctcaattaaactcctttaaatttaaaaa

SEQ ID NO: 5822 - DNA, 506 bp, Homo Sapiens
ggatccacagctgtggccccggaagggctgcaggagctgaacctgcgtgagccccgcagagggtgcagagccggcttgtgcaggctcccagcaggctcatgacagcgcggatggttaaatgtagctcctgacagccaactgttaaggtttcaggcatttttgcaccaggtgacatgatggtagcctgaacgtgaccttggcagcagtctctacatcaaggaaactggcaaatgtcaacatgctgggtaccctcgctcctgccgccgcaggctgtcagtgtcttccagcccacactgcggggggccttgttgtgtggctgcctcccaggctggggcgagggtctccagagaccaccatcgtgcaggctcttggtcaatagcagggtgtggtgctcctgccaggggacgcattctccgtgtgacctctacaccccaggtcaggtcaggatgtgatttgcttctccagggccgtgactcactagatccacctcccactggtgcctggtg

SEQ ID NO: 5823 - DNA, 940 bp, Homo Sapiens
gggtttctgcccagctcacccgctgtcagctggggtcctgctctggtgggaggaagaggctcagacgcttccctgccctctcgcctcaaccacctcgaggcagcggctcccaggatgtgcactttgacgactaaagctgagccggcgccgccacgaccttgggcgggtggtcggcctctgccctgagcaggaagtagaaagtctcagcagacccttcctgagggccgagcaacagtgtagtggcgtattccacatagcaaacaggtccccagacagtcccggtgtgcacacttccctgcttctgttcatgatgttctctgaacctgggatcacctttccccttcctcttacctgcccgatcctacttgtcctcccagattcagttttctgaagctcagagggacaccttgtattgctggatgataaaaacaggagcaaagtgatgaagtgctgacaaggcaacaatagaacatgagagattcactgctgtgtaggaagagatcttcggtgaccatgtagcctgaagctctcattttgtcatcgagggacaccaaaactcagaacagtgctaagctcctacatcctgttctggaaggacaatcctgagcacacgatgagccatataaacttcagactgacgctgagtgaaagaatgctggaaaagcatcacaggccagggcagcaaagtcttcaaggtcatccgtgctctgatgatgtcacgcttcttccctgtctggaagacatttccccaagagcataccaccaacatcagggaaatggaatccaactggtcgctgcaaagtttgctgagcacacagtgataaagatggcaagaaggtcctgagagaaacgcaatatttttgtgcagaatgggatgttctgcctttgtcccatgctttgaaatttaccacatgaaaaataaaattaaaaactgatcatc

SEQ ID NO: 5824 - DNA, 428 bp, Homo Sapiens
  misc_feature (147)..(155): n is a, c, g, or t
gggagaatgggatgtgaagcagtagaccgcagccacgccgatggttatacagtgaagaagacttcacctcttcctattgagtttgcttggaatgctgacagcatcaggcaactctgaactgaacatttgctttgtcagaaaatatcnnnnnnnnnactttgaagtttggcaaccttcatgttaccccaaagcaaaaccattgtgtcaggagtcaaacaaatgtttagaaagcaaacatgacgtctctattgtacaacctcctttctcttggctgtttaaaggatgtacttcgtgtattaaagggtactttatgttgaagtaacgaaaaaaccctaatgggtgttcctaaacctaaaccttttctttattccacatttgctacggtaaaatcctgttacaaaactaccctataaagaattatttaatat

SEQ ID NO: 5825 - DNA, 725 bp, Homo Sapiens
  misc_feature (654)..(664): n is a, c, g, or t
gggtttgtttctgggaaggccaagtcctttgctgtgagctctgtccccgggtttatcacgctaagtgtctgagactgacatcggaaccagagggggactggttttgtcctgaatgtgaggttagttcctgatgaatgaatgcattacctgcctcgtttcctctcctttctctttcttccttttatttttaaatttacaaataatccagatagatggaaaagagaaatttcttgctttccacctgttctatcctggtcacccccttcttgaccaacaccggcagtggctgcagtactgcagctcttggaaagacaattgcacggaatattatttctgatttctcatgagtccttggattccttggagatctgtagtcgtcatctctgcatcttctatgatgaactttttgaaagttaactcccaaatcatgaacggctcacacattttgaaaagatctcattctgttttctccgtcttggatgttgttgcctgccgcatcattgaatcatcagcagtagccaagctgagaagaccacgtttggttgcatgttccctgtagtggccgtctggtgctttcttttgtgcaacaagtatttcttgagtgcctattaggtgctgggaattcgacagtgcacaaaaacaggcatggatcannnnnnnnnnnccagcagaaaaggacaaaaaccaaaataaataaagttccatataatgaattaaaagaaaaa

SEQ ID NO: 5826 - DNA, 671 bp, Homo Sapiens
gctccaacttggcgagctgctaactcagggcgagctgctcaccgaaggtggggagtagacagcgggtcagaggccgcctagagccggagggacaccccaaatacaaacataccacggagagacctgggatctgagtttcaaaagggcctgtgataaaagactgaatctttttccaaatgaagtagaaatggttctgtcgttttaaacatacacaatacttaggagacttgttttactcagagtggaaaattttgccagggacaaagtcaacacaaagaaacaaacaacaaaaaatagccagaaagagaacagttaagtgcagctcggtgagtcccggcagttccttcccggcactggctcgtccctgggttctcaaggttccatgcggccacagcgtccgtccacctgtccacgcgagccacatgctgaaatggaggtggataaaattcatcaggcagctgctgtaacacggaaatgtgcagatgccagagtagcttcgtctgaacttgaacaagacagacaaaaggaaatcattccataggcctgaaaacaaaaacaaaactacgttgtttccttgccccaaatgaaatccacggaaaggggcctgtgtgattctgaaagtctcagtagaaatggagtgaatgtgaaaatgccccaagaccccattattt

SEQ ID NO: 5827 - DNA, 1686 bp, Homo Sapiens
  misc_feature (963)..(963): n is a, c, g, or t
ctggaccggtccggaattcccgggattcagattgacccagtcgacaggatctgaacttccagtgaccatcccaggaacagaaagcaactgtgttaccagttctgcttttcctggacctgttccaagctctcacgttccacatcacacatgggacatctagtgtcaggctcccagagagcaggaaccaggtgaaatacaagagcacagtcctcccagccggtggcatggggataatcggacaatacaactctccacccttttttatgacgtgtacagaagggccatgctgttattactcttacacaaggaggcagccctcgagccacagggtccagctgttggctataatagcctaccggtctctgatgatcaccatgtttctggaattcaagccaggaagaagcagcaatctgtcttctggattaaaactgaagatcaacctactttcaacttactaagaaaggggatcatggacattgaagcatattttgaaagaattggctataagaactctaggaacaaattggacttggaaacattaactgacattcttgagcaccagatccgggctgttccctttgagaaccttaacatgcattgtgggcaagccatggagttgggcttagaggctatttttgatcacattgtaagaagaaaccggggtgggtggtgtctccaggtcaatcaacttctgtactgggctctgaccacaatcggttttcagaccacaatgttaggagggtatttttacatccctccagttaacaaatacagcactggcatggttcaccttctcctgcaggtgaccattgacggcaggaattacattgtcgatgctgggtctggaagctcctcccagatgtggcagcctctagaattaatttctgggaaggatcagcctcaggtgccttgcattttctgcttgacagaagagagaggaatctggtacctggaccaaatcangagagagcagtatattacaaacaaagaatgttcttaattctcatctcctgccaaagaaaaaacaccgaaaaaatatacttatttacgcttgaacctcgaacaattgaagaatttgagtctatgaatacatacctgcagacgtctccaacatctttcatttataaccacatcattttgttccttgcagaccccagaaggggtttactgtttggtgggcttcatcctcacctatagaaaattcaattataaagacaatacagatctggtcgagtttaaaactctcactgaggaagaggttgaagaagtgctgaaaaatatatttaagatttccttggggagaaatctcgtgcccaaacctggtgatggatcccttactatttagaataaggaacaaaataaacccttgtgtatgtatcacccaactcactaattatcaacttatgtgctatcagatatcctctctaccctcacgttattttgaagaaaatcctaaacatcaaatactttcatccataaaaatgtcagcatttattaaaaaacaataactttttaaagaaacataaggacacattttcaaattaataaaaataaaggcattttaaggatggcctgtgattatcttgggaagcagagtgattcatgctagaaaacatttaatattgatttattgttgaattcatagtaaatttttactggtaaatgaataaagaatattgtggaaaa

SEQ ID NO: 5828 - DNA, 480 bp, Homo Sapiens
cccctagtcactcatatcggagcctggactggcctccaggatgaggatgggggtggcaatgacaccctgcaggggaaaggactgccccccatgcaccattgcagggaggatgccgccaccatgagctaggtggagtaactggtttttcttgggtggctgatgacatggatgcagcacagactcagccttggcctggagcacatgcttactggtggcctcagtttaccttccccagatcctagattctggatgtgaggaagagatccctcttcagaaggggcctggccttctgagcagcagattagttccaaagcaggtggcccccgaacccaagcctcacttttctgtgccttcctgagggggttgggccggggaggaaacccaaccctctcctgtgtgttctgttatctcttgatgagatcattgcaccatgtcagacttttgtatatgccttgaaaataaatgaaagtgagaatcctc

SEQ ID NO: 5829 - DNA, 766 bp, Homo Sapiens
aaaagatccgcccctacgattcagtcatctcccaccaggtccctcccgcaacgcgtgggaattatgggagctacaagatgagatttaggtggggacacagagccaaaccatattaaggggttacatcttcaagtggcttactgagtccttttgattaacctagtaggctttgcttagcttatttccttgtcttatttgacaagatgttccgtattcatcttgaatattttctgcctcagtcctggaatcagatgcttttataaggaatcctggttcattttagtgtgaattactcctaccaacctgggtactggaggttgtggtttttcttgggaagtccatatttctagaatgagtgtatttaaaaaggagctttgaaagactttatttctaaacaaattaatattgattaaaaagtatggttataactttttatcatacttctttaagttttaaaagacataaaaaggctaactttacattttatttgttgcatgtccttcccaaactgaatgaaaaaagtactaaactgacacctacaacattcctcttgtgtaggagtatacggaggagatagaacgtttaaaacgagatcttgctgcagcccgtgagaaaaatggagtgtatatttctgaagaaaattttaggtaagcccttggctatggagttaatttccaagaataagcatttctgataacaggctatttgaagtaaaacttatgtagcagtaagtaaaatctttatatccagtgccgataaatacttc

SEQ ID NO: 5830 - DNA, 429 bp, Homo Sapiens
cagggtaaaggggataggtgccatttggtggtgagaatgctgactgaaaaatagaatgatcaatttaatctgaaacaaatggttatttcttttataatccatataataaatttaaaatctaaaatgtaaaattttgaacacaacactggaaagggtatccacagcaggaagtccccagttcacctccatgactacagggcagctttgcacagccctctgggcgcactgtgtgcctctgcccagaagggggcctcgccgttccaccagaagctcagctccaggccctggaggggctgctgctcctcagttgcatttcttcagtagattcatttccttgatgcaaagcatctgtatttgttggttctgtcatttgagcgatgtctctgacttgtttgttttgaattacattacaggctggaatgtaaaaaa

SEQ ID NO: 5831 - DNA, 387 bp, Homo Sapiens
gtgctcaaaggtgagtgggggcatgcagaccaggggctactgtggcccaggaagtccaggtgaagaactgaggaatccctctctcccctacaggatcccagttatctgcaagggctgcagatggatccccctgcaatgtcctcctgtgctctgtggtccccagcagacgcatggactctgtgacctggcaggaagggaagggtcccgtgaggggccgtgttcagtccttctggggcagtgaggctgccctgctcttggtgtgtcctggggaggggctttctgagcccaggagccgaagaccaagaatcatccgctgcctcatgactcacaacaaaggggtcagctttagcctggcaggtaaactgaggaaggagacggaaagggatg

SEQ ID NO: 5832 - DNA, 777 bp, Homo Sapiens
cgagactatgttgtgacaaggcagccttccatctgcctctgttccctggaggactttctctgtgattttggctactaccgtccagaaaatgactcaaagtgtgtggaacagccagaactgaagggccacgacctggagttttgtctgtacggaagagaagaacacctaacaacaaatgggtaccggaaaattccaggggacaaatgccagggtggggtaaatccagttcgagaagtaaaagacttgaaaaagaaatgcacaagcaactttttgagtccggaaaaacagaattccaagtcaaattctgttccaattatcctggccatcgtggaattgatgctggtcacagtcgtagcagaagtgctcattgtgaagaaatatgtctgtgggggaaggttcctggtgcatcgatactctgtgctgcagcagcatgcagaggccaatggtgtggatggtgtggatgctttggacacagcctcccacactaataaaagtggttatcatgatgactcagatgaggacctcttggaatagctcttcagaggagctggacccagcatggatggtggaaccacagtacctcttacactccctgtggctccaacttcaggaaataaatttcccattgcgagggacccagctctgtttctgctgcttccatcaaagccaaaaggacctacactaaagaaatgcagggtgggggtggggaaccctgagcacttttttacaattggctctgagaaaaagggagacattttaaattctttaacttattaa

SEQ ID NO: 5833 - DNA, 833 bp, Homo Sapiens
  misc_feature (194)..(224): n is a, c, g, or t
agtttaataaagtttgaaaactttcaaagctcctgtacaattccattaataccagacttggcaaaacgctaattctgtttgaaaaggtgtttttttaaaagtagtatatttgaacaatgtctaagtatgtggggtggggagaatccatatccgaatatcttcataaagcaagttcttaaaatttgcaaagctannnnnnnnnnnnnnnnnnnnnnnnnnnnnnncttttgcaccaactaatatttaccactgaacacgctggcatttagatcacttccttctttcagcatgctagacagtaaagagaatgggcatgaggtggcaggaagaaggaaagagtgaagataatggagttaggtcagtgagggatatttcctaaattccccacttcttttcctctagcagttctgggaaacttctcagcagctatcatataaggaaagtatctcgctaggagaagcaaagaatcagaaatagcagggcatggggagaatgcaggaagtgggccagggtagacaatgctggggaaaggaggccaagggaggaaaacctagaattggacaggatgtttcctctgctgtctggaccttctttttataaggttgttagaattaaatttcatttatacagagaactgaagtgataggtggccagatgattaagtccttttgtctctgatgaggatttattcccctcaaaattctgataaggaattcccatgctgcaaatattaatttgctcctctacctacgcctctgagagtcacgagacaccaaaggccaaatttacttatctatattaagggccttatgtgaaatgaaaggtgatttact

SEQ ID NO: 5834 - DNA, 603 bp, Homo Sapiens
gatcctcgagtgggagtctcgggtgactccatatgaaagggacttcgagaggatttccacagtggtccgaaaagaagtgatacggtttgagaaagagaaatccaaggacttcaagaaccacgtgatcaagtaccttgagacactcctttactcacagcagcagctggcaaagtactgggaagccttccttcctgaggcaaaggccatctcctaatggaccaaggaccccagagcccacctgtgtgacgctgcctttttatacactgtcctcctccaccttgatggacccctagtgatgcatcctgcctaggctggacttaaccccttcctccctgtccccacgaccaactgtccccagttactctaaccgttatttcaattaagcttccatatatattttcttacctaagagaatagtttcctgctttaagcaaaagacctacaataggtggtggaattatgggatggggtggagtattgatataaatatataaatacaaatgtatatttttcaggatgtggtttaggaactgggaataacgttttctgttactcctgatggtgccaccaaaaggttatgtaataaaatattttaaaatcagg

SEQ ID NO: 5835 - DNA, 385 bp, Homo Sapiens
gcgaggtgatctaaggatcccatttatccccaacacccagcctgtatattcatatacaatcaagttcagtagtatatttaaaaatttcttttaagacctctttttgacttatagatatatttagtagtgtgttgatatagtttctaagatgtttggatattttcttgctacccttctgttataaatgtctagtttgattcaactatatccagtaacacactctatatgacttcgatttttgaaaggttgtttgagatttgttttatgaccaggaatgtggtctgtcctggtgtaggtgccatgggtatttgaaaagaatgtatattttgctgttgctaggtagagtgctctatatattttgagtagatcctgttgtctaattgtg

SEQ ID NO: 5836 - DNA, 241 bp, Homo Sapiens
gtgatgttatccccaacacaatatagagagcagtgtaccagacagtggggacactgtgctcaaagacctagaggccagagggtgaggcactgcagattgttgagtaggccgagatagagcatacaaaagcataacaaaagatggggctaggcagacctaggtaataaactcatgcactttaaacctgcacttgatcctgcagcacaagtagagagccactgaaagattttaagcaagagag

SEQ ID NO: 5837 - DNA, 558 bp, Homo Sapiens
tcgatgctagcccgcgagctacccgccgccgtcgcccctgccgggccagctagcttagcgcgctggacgctgggcttctgcgacgagcgcctcgtgcccttcgatcacgccgagagcacgtacggcctctaccggacgcatcttctctccagactgccgatcccagaaagccaggtgatcaccattaaccccgagctgcctgtggaggaggcggctgaggactacgccaagaagctgagacaggcattccaaggggactccatcccggttttcgacctgctgatcctgggggtgggccccgatggtcacacctgctcactcttcccagaccaccccctcctacaggagcgggagaagattgtggctcccatcagtgactccccgaagccaccgccacagcgtgtgaccctcacactacctgtcctgaatgcagcacgaactgtcatctttgtggcaactggagaaggcaaggcagctgttctgaagcgcattttggaggaccaggaggaaaacccgctgcccgccgccctggtccagccccacaccgggaaactgtgc

SEQ ID NO: 5838 - DNA, 528 bp, Homo Sapiens
  misc_feature (314)..(322): n is a, c, g, or t
ggtgatctagaggatcccacacaaatcagaagacagcagttataaagtagactatagcatctgatgtagactccagctatacatttcacatatattcctggtcatgcagtaggttctgaagaaaaaagaactatggataatcagttaaaagaatgacagattccctgatgtgctgatcagtagtaatacctaatttcgatttcgagtgtactataatggattaccatatagatgcagctgagcactgagcattaaatagagctgtgtgtttttcagaaaagtaatatttattcacactgtgtggctttcttgannnnnnnnncttattttacctttccagtgaaactacaaacaagatgtcagtagcttatgtggcattcacagcagtatagcttagaatattggctgcagtagaagaaatgccagattgtatttgtcccagtaaaggtagctcttcatctagggctttctgagggacaggcttagcatttggacatagatagttgtgttgggcgataacagggtacc

SEQ ID NO: 5839 - DNA, 574 bp, Homo Sapiens
aatgattccaggggctgtggctgtccttgggtggttacattctaaggtcttgatccttgcattttcaggcctagagactccttatgtcctcccacccagaaatcattagctctcagatactggtgaattattgtataccaagctcaacttgaaatcaacagatgctacgttaacacatgctttctgtagccagatctccttgggaaacctagtagtcatcaaaaagctactcagtgactcaatgatagggagttggttgtgtataataacaagtggcatcaaagctataatgacattgtatcccctttcgatcaaccactcaacatttgtctgcactggcagtgcacctttactgaagaatattagattgctaatgtctgcctctctctcttttggaagtatcatgtaaactgcccccttttgttgttgtacagtataatacagttaattcagatttaagtcttttgtgtttacagattttagttattccatttctcttccctccctacacacatatcaccttaattatattgttgctatgcctaaacttgagtaaaaaaataatttgaatgtc

SEQ ID NO: 5840 - DNA, 744 bp, Homo Sapiens
tgatgttatcgcccaacactgagaataggtgaaccacagcctaacaccatttaggtttttgtgtttttttcaggcttgcctctacttaaatatatttagatgggagagttctcttagacttctttctttgtaaggaagggttatttggggaagtgttggaaaaaagattagggcagggtacccttagtttatatagggtacaaaagaatgggaaacatcttccctttcttccttaatctctgaagtcatgtttggaattacatataatgtagcaggtactggagaggacctgaatttcaagcttctgatttagctgtttgtaaacttccaagttttgcttgactaaagaatgctgatcttttttgggagtctgatctccttctaatatcagaaagtgctttttatattccagattgcttgaattaaactgtttggattaaagaacatatatggagtttcctctctggttttaaataatctttctttattcagtagctattaataatttatctcatattcagcgaatatttattgagaatattgttgagaatctcttacatgccaggcactatactaagttaatatgcattcagtataccagttggtgtgacccagaccaaaggtaacacaaagatgaatgagaattccttcaaggcgccgataatcctagtaggagagctaagacacaaaactgttgcatgtttttaatcatcaaattaaacttctttccacgtccttaaaaaa

SEQ ID NO: 5841 - DNA, 712 bp, Homo Sapiens
atctagctgaattctcactggtttcctcttgatgaagctaaccaccggcatttctcctgatggtgatttaggatcggcaggggaagcaggatgccacactgagaacatctcctcagaatgtcataggctgctttatctcctctaggggagctggtcctgggcttgggctctgacatcaaaagtggatccgaggttttgtttttgcttcttggtgctttctttgatgaactttcagaatgaagaggaaatctgtttatacttcttgtctttggacgaacatctttctccatcgtggaagtttgattttcagcagcttgacttggaagagatgaaggaagaatttctggatttccaacaggaaagtgtttcttaaactctgagtctggacaacatttacccatatggtggaaatacttattttctggaatcatttggttgcaataatgacagtagatttccctttcaggagctgaaattctttcccctgcctggtcttgactttcctgcgctgccggcatccttgaccacacaggcaactcttggccgaatcacccacatcatttcctttatggccactagatgtgcactcagggcagcagcaaccgtaatggagagacattttcctggatcaggactggtttctttcccgagctgggcctgttcactgcgacagacatctctgtgttgggcagatacatcacggtccggctga

SEQ ID NO: 5842 - DNA, 213 bp, Homo Sapiens
ggattagcctgttcagtgctcttgaaactattttctcccattccataagtgtcttttgttttctttttggtttcctttgctgtgcgaaagccttgtcagtttgattaggtcccattggtttatttttgctcttatttctgttgctttgggagactgacctgagaaaacatgttgtaaggttggtaggtgttgggcgataacatcacggggcat

SEQ ID NO: 5843 - DNA, 428 bp, Homo Sapiens
gatgatgttatccccaacacccattagtgaacatacattcaaagtggatgaggatattttacctgattagtaaattccatctcccacttccatgcacagtatttaaacagccaccagtgcaagtgtgtataatggaccatcatagtcttataagtgttctgaggctcatagcaacaatttcttatgacgggaaaaaaatcattgcctctcaaagaaaccaacattttatttcagtgacagataccaagtaaaaacagtacttgtattatttttctttttaggagtttgatacttttcttgtattaaccttgacttcaaagaaaaatcataggcttacatcaaaaacacttgggaaatttgtcttggctctgatccgatcaggccagtgattctaaaagcggttactggattgtgttgggcgataacat

SEQ ID NO: 5844 - DNA, 426 bp, Homo Sapiens
ccggaccatgtatcgcccaacactgagccattgagctattttttggaattggcgtagaatacctataaccaatgaaaatttgtgaataagaatggcagataatggaaaaatatatcagctgaggtgaactgcactcagctgaccaaatactagccaagacaaagtgattaacactctttttggcatatatataatcttaaagatgattaataacaggattcctacaacaataatgattcacacgatttttaattaataaaatacgtaagaataaaatgactgcattgatttttcctctgaaactgcgaaagcacctgcagatcacctaactgactttggggtatggtgttggggataacatagtgatgttatcgcccaacacctttcccaaaggtaaatttgtgtgggttttacttcactgagtga

SEQ ID NO: 5845 - DNA, 699 bp, Homo Sapiens
gctatccccgtcggcagggaaggcatcgcggctgtcgtgtccgctctcctccctcagggaccccgtccaggcgggatcccgcctcccagagcccaaggcagttgtggggaaaccccttgcccttcctcgccgcttggcgctgtcgcctcgccctcccgactccagcccgccgcccgccagcctccaggccatgcatcctcttcgcaggcccagccctctccacgcccggctctgagaggaaactacggaggtggttcccgctcgcaggcgggtggaaaagcccatggtgaatgcctcggggtgtccccccagttgctgtgggaagtgggaagggaggaggaagtggacttcaccaccggggagaactatatcgattcctaacttgggggaggcctttagatggaagggaagccaacggggaaccctgggtggtttcctgggaatccattggccaaggggagggtgaccctgtccgcacacatcggttactatgacaatataaccacagcctccagttgccatggcagctgcctatccaatccgattgtcttctcttcctctccgggccccaccttatcccctccaagagtctcccagcgtgcatggggaggggctgcagcgaagaggagagggggtccttcgagtcactctctacgcgcgagggaagacaggcgttgagggactgatgggaggaactgt

SEQ ID NO: 5846 - DNA, 1018 bp, Homo Sapiens
  misc_feature (868)..(918): n is a, c, g, or t
  misc_feature (959)..(959): n is a, c, g, or t
cccaggacccaggcaaggggcacgagtgtgacccccccaggccttcccctggttccgtttccctccctagcccggtccccacgatgggtggggacagtgggctgtgacaatggatcgcgactgctgtttttacctggcggacgatgcgcccgaattcgctttaaccagatgcccctcttcgcctggagccctgggagcagtccccctctccgctcaacaataattagccttcgatctgattacctaccaggaatggcaagtggcctcgctgaaagtctcggctctttgagaaatgagagatgggagccctcactgccgatgtttcttccacacgctttgctgggttagaggcaacctcatgaccgccttgaaaagccattttagacaaatcttcctttgcattcttgctggagcccttctcttatgcccttccttggacatttgctctttcactccctcccccatgcactcaccccacccatagtgactgcgctcctcctgcctgcgacgctggcaacaggcagcacagtctaaggtccctcccgggaaagtgttcagagagggttccattctgggagaggcccccactttccccagaggtttcagattcgagtcaaccttgctgctggcaaatgtcagcagagaatttcagagcttgaagaatccttagagagcatcagttcgagtctcttacccggaaaaaactggggggcccggagaggctaagggtctggagctcaagatgcccgccaggcagtggcagggcagggtggtgcctggactgtgcaggacggctctgtctcttcagcctctctgtcatccccgtcaggcccactgtatttggagatttcgacgttgccttgggaannnnnnnnnnnnnnnnnnnnnnnnnnnnnnnnnnnnnnnnnnnnnnnnnnnagcacttactgtcccctggccctcctcccagcctgtttccncccatgcgggcaggaactgtattgcactcactctaataaatagatgattggaccaatta

SEQ ID NO: 5847 - DNA, 671 bp, Homo Sapiens
  misc_feature (231)..(277): n is a, c, g, or t
  misc_feature (390)..(430): n is a, c, g, or t
tgtgtccaaagctggaagctgccccagccaaacactggaaacacccagctctccaccaagataaaccacgcgagccacagcttgcgggcaatatcccatctccatcctcaccactgctcagcccagacctccctcatcttcctggcctgcagaccttagcagtggctgttcccacccctggaacacccttcccacctggtacctgatgcctgcagggcccatgcacggcannnnnnnnnnnnnnnnnnnnnnnnnnnnnnnnnnnnnnnnnnnnnnnatgattttcagcaaagaggcactgaagggaagatacctatgtgactgtgaggagacacaggctggacgatgaatgtgatggctggaactcaagcagccacagtggatcataannnnnnnnnnnnnnnnnnnnnnnnnnnnnnnnnnnnnnnnnggcctgaatcaatgcttccacctcagctgccagaggaaccgggattacaggcctgagccactgcagccagccagtttgttattttaatgtaaattcttagtaaacaactcaggagctctcttgtccttttaaaatccatttcaacttctgctaatcggagtgtatattcagggcaacttgaatctgtgctcctgggatgcaatcctcaagcttggcccaaataaagtctccgctgatatta

SEQ ID NO: 5848 - DNA, 797 bp, Homo Sapiens
  misc_feature (53)..(165): n is a, c, g, or t
  misc_feature (562)..(573): n is a, c, g, or t
acacaacctctgactatgtgaagatacggtgggaagatgactgaccgcaagannnnnnnnnnnnnnnnnnnnnnnnnnnnnnnnnnnnnnnnnnnnnnnnnnnnnnnnnnnnnnnnnnnnnnnnnnnnnnnnnnnnnnnnnnnnnnnnnnnnnnnnnnnnnnnnntccatgagagcaagcatctttgtccgtttggctcactgttggattccctgttttaaaaatatcacccggcccagcgtagaaaaagtttggaaaccttcatctagaaagtggtctagcaaagtgtggtccatggatgagtttgatctgcaaactgcttgttattggttcatgacaagaattggttccaaacagtaaagccgccagaaaaaacagacaaactcttaggaacaacaatgcccattatgtgtggagtagaagctgccagactttgattactggccagagattaacccctttggtgtcttaggggggaaaatgccaagtctgaatccagacatttccaggattttacagtcattcatggtatgagaccaggcgatttataatgacttgtgcnnnnnnnnnnnngactattgggagaaggaagtgcaagtcaaaggccacggctccttgcttcctgaattctgccatgactaattccagcaagcggacatagacctgatcacctctgcttttccctttgctagcctgcctggtcatggatgagaagcacgctgctcttgctaccttcatgtggtggtttgggtcctgaaacatccacctattttcagaataaactaaaataatttctt

SEQ ID NO: 5849 - DNA, 1518 bp, Homo Sapiens
  misc_feature (493)..(516): n is a, c, g, or t
  misc_feature (543)..(572): n is a, c, g, or t
  misc_feature (623)..(654): n is a, c, g, or t
  misc_feature (691)..(730): n is a, c, g, or t
  misc_feature (842)..(885): n is a, c, g, or t
  misc_feature (976)..(976): n is a, c, g, or t
  misc_feature (1064)..(1072): n is a, c, g, or t
acttcaataatagcctgtaatttatatttactgtgtgaatttttagtcccaaattttaataatttgtaaattgatctcttattccaagaatcctttgaacttgtagaacatctgggagtccacttccctgtcctcttcctgatccctgctttctggactgtttaaatcctctttgggatggatcagagagtctagagaggccactcataggtccagctgctggcctcctgactctccaaagccttcactggaattgggacatttgctccagccctagctgtgaacatgaccagagacattatttataattcagccatttaagatatacctgtactcaaaaagtcctgtatatttttaaaaagttttatttttcaggtgaacaaaaatacatcctaagaactctgcctacaaacaaaacaaaaaacaccccccctctcctcacgattaccatattccccgcgaacctctaaaaaagaaatacactctcctactnnnnnnnnnnnnnnnnnnnnnnnngccttttcataccccgctctgtttctnnnnnnnnnnnnnnnnnnnnnnnnnnnnnntctttctcattacgcccgcgcttttaattccctagtttcccataccctttnnnnnnnnnnnnnnnnnnnnnnnnnnnnnnnnttacctaagaccaactcgcgcgaccgccttcagactnnnnnnnnnnnnnnnnnnnnnnnnnnnnnnnnnnnnnnnngactccatttaaagcctccctaataaacccaacaaaaaacccagcgaatgcccgtccctccccagatcccccatatacgcccccttcgacaccccctcccgtataatttatnnnnnnnnnnnnnnnnnnnnnnnnnnnnnnnnnnnnnnnnnnnncttgccatctacctctcgccttttgattcacgccatcttgccgcattaataattcccaattttcgcagcggctctttactattgtccaccnccataattccgctcgactactcttgatgtatggcccgcgcgcgctccgcgccctaaaagcgaacagtcaccgcgccaatacataatgnnnnnnnnnttctgcttatcgccattaattcccccgtaccggtcgcgccctttcatcgacctattatatttgattataggccccccggcccactaaagttatgtggtattattcccccatattctaccctcgtccccctcaaccttaccccttatgccaatgcctctatttacaggcggtcacccaactattcacctctgcctcttgggtcaccccctgcacttttgtccacttctcacgacgaattccccgcacaccccgcacattctgcgccgccgcacacctctgctttccttacccacggaatgtccgccctcacgagacaaccactaagaccagtcgacataagagacacgccagtgtcccccccaccaaccccgcgacttgcgcgtttgtacacacccggtaaatgtttgttcttgtacatgcacgcgcgtcctcttttgcgcccgata

SEQ ID NO: 5850 - DNA, 1155 bp, Homo Sapiens
  misc_feature (842)..(878): n is a, c, g, or t
  misc_feature (1083)..(1093): n is a, c, g, or t
cggtccggaattcccgggatggaggtgggggttatcttctctccggcttcaccgttgccatggacaaccttaaagcagacaccagcctcaaatctaatgcaagcactttagaatcacacgagactgaggagcctgcagctaaaaaacgaaaatgcccagagtctgactcttaacccttttgagaattgctctgaattttgttctcaggcattatacagttagtaattaaactttaaatgccattactacttgttttttcatatcccaagaataagaacatgtctatgtacccgtttctaggaaggaggagtatatgccttttgtctatttctgacacagatgcatttggtctgtcaaaactgcaaccatggggtatgtagtatgaccaactgcatttaacaaaactcctctaagtacttctaaatattctgtgcaaatatcttgagaacttcaacatcctaaaaatgtgtttctacaagactttatattttaagctaagtggaataatacaacgtaactaaaacatggcgggtaccgaaaggagggcaattcatggaagaaatttcctctgttcattccgttctcttcaacctaagcaatatggatgtgtgagtgtgtgatttattatggtaccaaaaatgtccaccttctttcctgcagcggaataagcttttttgaaatgctgaggttttattttaatagttgacaacctgggaaagttctgagtatttattttactgctcttttttgtgcatagaaaggtttagtagggtacttttttgcattaatttgccaatactcttattctttgttctaaataaagtgactagaatttttaaaannnnnnnnnnnnnnnnnnnnnnnnnnnnnnnnnnnnnaaaaaagggggggccggctccagagaatccctcgaaggggcccaaagcttacgcggtaccagcttttcttggaacaaaggggccccctataggggagtcggaataatacgctaaggcactgggccgccctttttacacacgtccgggactggagaaaaactgccaaccttggggaaactttggtgaaaggaaaccttaactttcnnnnnnnnnnnaacataaattgggaacaaactaccttgcgagaaaaattataggcgtctaagggggaaaaata

SEQ ID NO: 5851 - DNA, 686 bp, Homo Sapiens
gaatggtgtgaggctaccaaggtccacgtcatgggaagcttcccagatgtcacgttgaagctatgtctaacaagcatgaacagggtctgcaagcaaggcagaaaagggaagccaacgtactagaaaagcctaaatcatatttgaaggtatgaagaagtatgaaacttttaggaaattgcaagtgttcagaaaataaagaaaattgccaccatcttgtttatagggaatgaaagacttgaaaaatgacacttaacatcagcctgcagaagtaccaagggccaatagtaaattggacttagggtttaattacattagttgtgtagcttgaaatgtttgaagttaactcaccatcatttacaatgatttgtatgccaaaggaaatatgcatgagcagggaaatatttcctggatagctttttgctttccatgttaggccttatgtcagctatctaaaatgtagaagtgagcaacacatttattgttactgagaatgcatagtaaaataacatgaattctatcatttttacagctaagatgctgtatagattaagcagaaaaacactggcagcctctgattaaaaaataatgattttattattctttttggagttaacatttatttttaactaatgtttcactgtattaaaaaattcctttcagagactaaataatagagtcaaatacat

SEQ ID NO: 5852 - DNA, 719 bp, Homo Sapiens
  misc_feature (563)..(589): n is a, c, g, or t
aaaagacggtttggctagtgtgataatgaataggtaagatatgagataatggcaacatggtctagttctagtatggtaactattctggaaatggtatggaaaaataccgttaattcaaatggacagagatggataaaaagaaactgatttacctaagtttactttttaatggcataatagagcatttttggcttggagttccctcattcttattaccagaaagagctggcaaatagttttactttcttggcactggaagggtagttctggaaagctactttgttgagagtctcattcttccctggagttaatagagtgattcacaatctttggggttttctcctcatcaaaagcatttcttaagtgcctatctaaaagcaattaaagactgtgtctgccctttagaagctaagaatttgattcatgatgcaaattaactagataatttgcaaagtacccttgagattgaattttctctattatatatttcccatatttcaggtgaataatttaatttaaatgacaaaaccctatctagtcaactgggcataatgacattttcnnnnnnnnnnnnnnnnnnnnnnnnnnnaagagttttattataaaccgtgtgtttttggtttttctaagtatatagaaagcttgtataattcagatttatcaatttcctgatttaatgtagactttgacttttttattaaaaacctttgtattaaagc

SEQ ID NO: 5853 - DNA, 1061 bp, Homo Sapiens
ataccggaaaattactggaggcctccttcccacaaataattaaaagcttcccatcacacccataacaaatacctgctaggaagtaactggaaccactgtgtaccccacgtttcctccaaggaacctcccacccctgactccgtgtggtcaaccatagaactcaacccccacctggagcctcccagaacattccatccctctggccactactgatgttctggaaaagatacacaacccagcagggccatcagagttctcgcagggacttcctggaccctaagagggagagggtttctttccctgttcccttttggcattgatgtaaggagagtgtttgtctggctaggaattaagtaaacacccccagggaagtagagccggagacgaaggaagtgacaaagccctttcatcagccctttcatcgctggagcccctacatcctgccctcccgagttcacacccattgtccatcattggcccttcccaagtggctgggcaaccatttttaacttttgataagtgctgggccccagagccagatggcggctctttaaacaaactcgttcttctctgtgcccctgtgacctcagctattaagcgggctgatgatccatcctgttcacctcagaagactgtttcaagggatgagaggtgtcagcatttgaaagccatggccggcacatagtgtgcatcttataaatgctggtgctcactattattattctttgttacgggatcctctactctcccttctgaccttgaactagtatgaattagatttcagtcacttgcagctaagaagtcttgattacgatcatcagtttgacaaggaagttaaaagtcagaggcccaaagccactctatgagaaaatccttacaagtagtttctagattgaccctctaacccttagctttttcttcacccagtatatgcattatctctccaaagagatgataaattccagcatctcactaatattgctttgctctaacatcattcccagcacggagcctagctggagtaggtgcttaataaaaaccatgagttatgtttggaaaaa

SEQ ID NO: 5854 - DNA, 549 bp, Homo Sapiens
  misc_feature (471)..(471): n is a, c, g, or t
tctctgttgctccggctgctttgcagagttagggaggcttggtgtggggagctcctcagggagaacctgcctaggacagcctcgaaggtcatcggcagagacagagggagcagtgtgcgctgcgggaacggcactgcagatagattgcttaagcctggctgtggcataatgatatttactctggtcccacagaatctggaggaatgcgaactctgtttaccgagagcctctctccaaacagaaacccagtgcccctgcacattcctttggctcctccagtctaattgtcccacaggacaccgtaataactagttggaaggcaaacagtgttaactgatgtgatgtgctgctgtccagggcactgtggccaggccgccgctccacctatccccagccactcaaactgcaggtctgcctggtgcggaagctgcaactgtccttgtctaagaccaggtgagcccatgcaacctntcagaccccatgagggtgactgacagtgactcctgccagccctcgggagggaaaggcgagaagctgcttctagagagg

SEQ ID NO: 5855 - DNA, 599 bp, Homo Sapiens
cctcttccccgtgtcctcacagcgtccctaaggaagattttggcagcactctctggagctgaggggagtgaaatttggtccagagaaggcggaaggaaatagttttcctgtttccttttctcgaggtggatgtcctcaggcttccttcacacctccttctcatgggtgcggctggcagtacagtcaggctgtggaggagggctgagaagaaaggggcactggtccagccccaggtttggtctgagacaggtacacagcagataccatcccaccttcctctctaaagaacaggccagccacacatataaccctttccctactttactaatgtatcccttatgtggtaccagcaatggaggacaggcagacttaccccctgccatctagagagaatgttgttattacccgtaaaacttgaccacccccatatcccactcctttttgtaaaaacaaatgcttaaacctgtgagcctgccgttcctttctatgtgttaatcagtttccttccatttgagctgtgtgggagggaagggcattgaaattgtaggttgtaatcttgtgccaaccaataaaaaccagtatttcacacccaaaaaaaa

SEQ ID NO: 5856 - DNA, 448 bp, Homo Sapiens
ttgcggccgctcaaatctcccgctagcccagcccgccccgcgtgcgggggctgtggcggttacacggccgggcgcgccggagcgttcaggcttcccgtttttaaggtggagacgtccaggacttctttattagatgtttaggaatttgagtttttccgtagggcggttgtcatcgtgagcctctgtggggtcaggctgggctaactggggttttgatgtcagtttggtgtggccgagggcatgtctgacggggaagaaagtccttggcgttgcttcttagctgttgggagttgtgcggtgggagcgagctgggcggcgtgcgctccccgaggactggcctgagtggccttagactagttactcacgggacttggtttcccagccaaggtgggcagcaagtctggttactatttaaaaccgtctttcacaagggaaaagcaaaatctcc

SEQ ID NO: 5857 - DNA, 414 bp, Homo Sapiens
ccaaaggtggcaaacatatttattgcctcactgtaaatagagaaaatcttgtcttctctcgaccagatgcccaaaaggttataaaagaagtataacttagctccaatttgaggatatgtactaaaaattttaaacgtcaccttggtgtttttttcaagactaagtgtgataccacgtaaggcatttccatgtcataaattaattctaccatatttttatgtaaaaaatgctgcacgttgttgtgtctgcagctgtgctgtgattatgagacagatacaatgattcacactggctggaagctaagtctcacgtcccagggatcagggcagtccagcccggtgctgccacaaagggtggtggtatcaggtcacacctaggacctgccactttagactgaccttgtttgatccacgg

SEQ ID NO: 5858 - DNA, 519 bp, Homo Sapiens
cccgttatcgccccacacagaagaggaggcaccatgccgagttcagcagctttcatcctgatgcagtcattatctggttggtaccacgccaaagggcctgtccatctttagaaatggaaatgccaggtgttaagaattatgaggtttctgaggtgttggggataacatcactgatgttatcgcccaacacgctaccactaactttcttcatagaattggaaaaaactactttaaacttcatatggaacccaaaaagaacccgtattgccaagaccatcctgggcaagaagaaccaagctaaaggcatcacactatgtgacttcaaactatgctacaaggctacagtaacgaaaacagtatggtactggtaccaaaacagatatatagacccacggaacagaagaaaggcctcagaaacacaccacacatctacaaccatctgatgtatgacaaacctgacacaacaagcatgcagaaaagattccctattaataaatgtgttgggatacaaccggccgc

SEQ ID NO: 5859 - DNA, 561 bp, Homo Sapiens
gcggccgcgggacgcgctggggccgggcagccgggaagcggggcgctgacggtgagtgggcctggccccgggccggtgggtccccgcggggcggccgggcgaggagagaggcagcttcccttcccggagcccgcctggggcgtggaggctcagcgtccctatcctccatcccgccccgggacggcggaaccgggcctcagctggggacctcaccagggggcggggcctcccgcggtccccggcgctgctcccaggactggaggggcgtccgcgcccgggagaggggttccccccgacagggccccgggccgccacgaagttagggaagcgctctctccagggtggaacctgggcccgcggctcccgggagaggagctgcccgcggaaggggtcggggtgggctccaggctgggagaaggatctgactttgctgacctcgcaggctggtaggggagctgccccccagagcagcatggatgccccgcgaagggacatggagttgctcagcaacagcctggctgcctacgcgcacatccgcggtgagggcgggcgccggaagac

SEQ ID NO: 5860 - DNA, 403 bp, Homo Sapiens
cccgtgatgttatcgcccaacactactataagtctactgtttgcccaatgccatcaaggtttattaccaatagtaagaaagattcaaatatctggtatccagacaatgttcacagctacttctcctttaagagaagcagaaaggcagttttaggtgtggtctgtctttattcccccgaacttgatcaatgtatacaatgcttacacattcaaatatgtgcaagattcaacaggaacactctccactgctgtgctgagtacgcaagtttccctgagatgtccgcatcaccgagggctccgttctaactctggtcgacagtttctgaacaatgcaatagtgtagctagaggactatataaaatataaggttctctcaaaaagattcatggtgttggggataattc

SEQ ID NO: 5861 - DNA, 299 bp, Homo Sapiens
ttgccacagggaagcagccagcttgggtttactttcaactcaaagggttttctgttgtatatccatgtcatcacctcttatttatcaggaagtgacacaaagtaacaggcttcacaatgccatcaatgtcattttgacagcattcatgtcacaatacacaatcatgtactgtaattatacaaaatccaaagaataaaatgttactagttacactcgttaaaatgaaactgacaaccaaaagaataacaaaacaaaaagaaatctctgtcagaatccatagagacatttgacaatattac

SEQ ID NO: 5862 - DNA, 590 bp, Homo Sapiens
aacgtgtgccaacttggaaaagatacccaaactgagaaatttttaagtgttacaaattttattaaaaattaacatttcaagaggtcatacgtatacaaatctaactgcaaaaaattccaggcataaaaactattatctgggttagtgtgccatctttcttctccaaatgtcaaaatgtccacaaaaaaagtctttagaaagtcaaatccactgtccatttgtgttgggtaagaaacctatgtcttcattcactgcatggaatccatgttaaaagaaccctgtcttggttgtatattatcacaggactcttgtattaatccatttttcctcaattccccatagtagactgccatcttgatttctcagtggtagggtccatttgaaactcttcaagctgactgggtgtaaatgtttccaccaatgtctacttcattgtatggggcctttagaggattcagtttgaggttcatatttttgctatataaaatactgactttcccaaagatttcctttatcctctaggataaaactccaacgtctcagtcttcaaaatggcatacctcagattaaagaactcattatttgtttca

SEQ ID NO: 5863 - DNA, 679 bp, Homo Sapiens
ccacgcgtccgtgaaggcttatattttaaataattattttttctcaactaatttttttcacttaaacttgagagaacaagttcagcttttatcataagaaactcatatgcctagctagaatatatgactgactattcaataccatactgaagagtttgatactattaaaataagccgctttgttttttaaatatgcaggcatgggttcagcttaattccataattcccttccagattattaactcttcatacttacagcaatgaatctgacaatgtttttcaaaaatgtatgctcagggttatttgtttcaagtcataggccagaacttctaaccatgtttattgtgtctaaaagagttggttgctattttccttcattatgaatagtcagtattttaaaagctcaaagtagaagaggagtcactaagccctaacagcttgtccaaagatttaaattcttatttcaaatttgatttgtcctttaaggtttagggctattttatattcagagttctgaataattactttgaaattgtagtatcataaaattgaaataaaatacatctactaggctgttagccaaagcatcaccattacaagtccatgaatgttaaaatgtacaggtgggattgtgaagatttactgacatcaaaagttcttctggaaacaaacctttgtt

SEQ ID NO: 5864 - DNA, 859 bp, Homo Sapiens
atgcccaacacaaaaacagattgtgctgcctcattcacgctgacaattctttggtcaaggatacagccaaggcaccggtacagataagaacaaaccaaatataaaaatttgtactcagagtgaacaggaccagagagctggctatgtggctacccccatagctatggttcaggcagccatgactcttctaagtgatgcttctcatctgcctaaggcgggcggggtcttcacacctggagcagctttttccaaaacaaagttgattgacagactcaacaaacacggtattgagtttagtgttattagcagctctgaagtctaaacactggaagaattaactgaagtcataacgtgcgtgaattaacagcttctctatttgatatttgaaattcttctgtaagcctgtctgagtgtatgtggaaacgattgtcaaatctaaaatatctatatattaaaaagtaggaaattgtcctagcttaccctaaatttcaaatctgagttgattttgtgaattttatgccttataacagagaactcatatttgacatatttttttcattgatgtgttcctggtagattttcacgaatgagctggcaggtctaatgggggaggcggcgtcccagtctgtgttgcagcagcattctcatcgggggtgcgcacaccatcgttactgtcgggcagtaactgccgcttgccttgccgcagtaggagggaaatctcaccttccttccacatactgtcttgagcctttgctaaattaaactgcactttttgctatttttgcctagtttttcgccaatctacactgattttggactgttacctaagttgaaaaataaaaggttgtcaatcgaaaaa

SEQ ID NO: 5865 - DNA, 342 bp, Homo Sapiens
gatgtatccacaacacataaggcacagaacaatgtgtactttttaattatcatatacataaatgcatactgttttcatgcagtatacataactgtttatgtatatagtgtatacatgaatgtattcaggtatttaagagtgtctgtatgtggcatgcaccgttctaggtgctgaatattccataggtaaaaagggttatttagcccacatttttttcgttgtatgaagagaaatggaaaaaaccaaacttacatagttcggtttgagcaagttaaatgcatggatgatgtaatgtgggagcactttccacttttcgttgatgttagtgttgggcgataaata

SEQ ID NO: 5866 - DNA, 858 bp, Homo Sapiens
cggaccaactcgaggacgcatcatgaaacaacagcaaaaatcatcaacagtaattcctgtagtgtagaaaactagtgcagccttcactgcgggtcagcatctcaggtggctggcaggttgagagacgcctgacaatccaagatcaggctggagctcctagacaaacccaaattagggcagactcgaagccccagcggtcctgatgtggctgacattgttctttctgtctcgcgggcaccggtcactccctcaatatgtgagcctgtctccttagcacgagagagaatatgtccctcactattaatggcgagataaacacaatggtacaacttgtccgtaaagagaaaatagtattaaatatgcagcaacagtttacttctgttagagtgtcatgttgtgaacataataatggatgtggacaattacattcatttttgacttcatacaaagataatgtttaatcttcaatgaattagaaaatgattttgaaaattatggctaatattacaaaacactcaacatcacatttcagttcccaaaaaaagaacaatacatacaaataagttgccataggcggagcagagaactgagaccagaggctcagatgaacaacagtgatccttataatagataaaagtgttctttctactacagttcctagtatgatcacatcagaaagttcttcacaagatacttccctctacttagcatggatgccagaaatggaacacaagttacatgggcccagtccttagaagctagatgggaattagatgaaagctccaaggtattcctggagctggactatcctggcggctccttgacctcagcagaggaacagctgcctggagtatcgag

SEQ ID NO: 5867 - DNA, 553 bp, Homo Sapiens
  misc_feature (275)..(283): n is a, c, g, or t
ggacatcacgtcacattaaggaccacggaaaatgtatggttataatgcataattgacttacctaattaaacatacacacaaatttaattatttctgttctctttaacctgatcacgacacagctcttaatcatggtcacttccagtatatcatagtagttagtagtagattgccttgatggcagtaattctgtagtaatttctattcaatcaaacctaagagagctgtgatcttactgtaaaggtacaaacaaatctcttatataattcctagcnnnnnnnnnggtttatgattctgatcaactataagacacaaggtaaagaattgtggcttataatttatctgaaatttattagcttagtttagttggggcaggagttacaaatttaataggaatggtcattttacttacagtttatttcctgataagttgtaaatttttttcccctcagttatctctatccagtcttatgggtcaaaacaaagaaacaaatagtccatcaactaaaataagctgtgatgaatttagaagatgatgcgtccgtcgaagtgg

SEQ ID NO: 5868 - DNA, 618 bp, Homo Sapiens
ctttcccgtttcctcccatgaccctcttctcccttctctgagctgcttctctccttatactttcctttctttctgacttcaccatctgaagagtgtcaggccctaccaagcaaactgggccgtgcctaaggggacactgggggaaagggccatgcctgagggatccagcctgggggaaaggtgggagtccaaggccacagggctgcaggtctcatccagggctgactcctgtgtaagaggacacagtggcaggccacagccatcccaggaacacaccagcgaggctccccaaaaagccacggtgatgggagcggaaaccctggtcaagaaataagaagcaactcctgcagtctctacctgggtctccacggaggatttgcaaacgaaaatgaacagctgaagccttcctaggtaaaactcagtgtgccatggggccccatgtacacagaccaagagcccacacagaaaaggcagcttgcagtggcatccaaccatcatttcacctgccttctcccatcacagtttggggacagaaaccaaccacagaagaacaaagatggcagctggcatgtggctctttctgtatccgcactcggaggtgaatggtggtccttgagc

SEQ ID NO: 5869 - DNA, 456 bp, Homo Sapiens
cttcgacgtaccattaggggaatagttttctgggctttagagacagtctgagcaaagagttatacctggtcaaaacagatacaagcctgttatctatttaaaagagggaacgtgggagataaggtgagcttacaagtgctagaaaattatggtgggaaacagcagagacagactaaccaaatgtttagaaattactgctgtaataaaaccttgtaactaggcacctccagtaaaacataatacccaacactgattacaaagtaaatccaagaaaaggtagcaagagctcatgaaggtcttctggctacagacaaggatatatcccaccttaagtggaatcatttctactcaggattaaaatccaagaaacaagcaggctcactatgaaactttatattatattggttgcaccctgcactacagcttgggcgacagagcagagcctgtctccaagat

SEQ ID NO: 5870 - DNA, 806 bp, Homo Sapiens
aagccccaaattcttaaagggatataggaaagcaagtctcccggccatgctttttgagagggatgttggtgaagggcgtttagtcctccccatcatagaagaggagaatctggccacccaaaatgtgggaactgggttctgtggactgggaaggttcgaaaagagtatcaaaaacgggggaggttcgcctttcccaactgcagccagatggcacacaaggctctcctgcatgtgcttccagaatgtctccaggcagacagaatgtgtccaaatgctaggaggaaaacagagtacaacagcgtcaatgaccacagcagtaatggaaaccatgctaataatcataataccctctaccaagcccaaccccatgtgtcatcctacacagtagctaggacgacattagtaccccatttcattctcccgtgtctcagtctctgtatctgaacaacaggacaaataacagtgtctacttcattatgctgtcatcattattgaatgaaggttcaactctccatattccattttttaacaaaagcttcaactcacatttattggcaaatgttgatgtcatccaggtccagttccatgctgccaacagaagatccattccttatcttccagcgatgcgctgtacttctgaacagcttcgcctgcatttggtaagcaagagtcgtcagtagcctggaatcaatgagaagtttacaaagttgttgagaggtcaggcttttgtgaatgaattataagaggataatacaaaacaaaaataataataaaatgccctagggaaaaataatttatcccatgcc

SEQ ID NO: 5871 - DNA, 744 bp, Homo Sapiens
  misc_feature (36)..(36): n is a, c, g, or t
atttctggactctctttttctgattccattaattancttcttaattaagtatttatataatgtagtgtgactcgttcaaaattgttttggctatagtaagtcctttgtattgccacataaattttatatttagtgtgttaatttatgcaaaaaagactacaaggattttgattaacagcattgaatataaaaatttacagagaactggcatcttaacaatattgactcttctgattcatgaacataatctatctgttgtttatttaaatttgctttacttattctaaacaatgctttgtagttttcagtacatattttttgttgactttattctaaattagttcatgattttggatgctatttcaaatcgtatttttaaaatttcagtttccaatttttattgccagtatacagaacgagaaacgatttttatatgttgaacatgaattctgggaccttgataaaatcactcttcgattttctatgtggataatcctgcctgtgaatatggacaattttacttactgctttttgatatgtacaccttgtatttctttttctagccttaatgcacagctaagaccagaaccagaacaatgttaaagggaagtgatgaggaaaggctctcttgtcttgttcctgatcttagaggaagagcatcagtctttctgcattaagtatgatgttagatgtaagtaaacataaatgccttttattgtgataaagaagttcctttctattccc

SEQ ID NO: 5872 - DNA, 677 bp, Homo Sapiens
aagaaaattatctgtcttctggtaggtgaattatatcttcgtttttaaaaaccaatggctgtttaaactctgtgcacaccaggggttagcaggacatgagggagtgtagctctgatgcggtgacctgggccggagccctcggactagcctcagctttggtggcagcacgccctgccttgtggagccacggcctcccgggacggactccccggctctcccccagccgcccgcagccgccggatgatcctctgctcccgtctctgtctcccacagtcggcctcgctgaggatggagcccgccccgggcctcgtggagcagcccaagtgcttggaggccgggagcccggagcctgagccggcgccgtggcaggccctccctgtcctgtccgagaagcagtcaggggacgtggagctggtgctggcctacgccgcgcccgtcctggacaagcgccagacctcacgcctcctgaaggaggtgtcggccctgcacccgctccccgcccagcctcacctcaagcgggtgcggcccagccgcgatgccggcagcccccacgccctggagatgctgctttgcctggctgggccggcctcgggcccgcgctcgctggctgagctcctgccacggccggctgtggacccccgcggcctggggcaacccttcctggtgcccgtgcccgc

SEQ ID NO: 5873 - DNA, 499 bp, Homo Sapiens
agagctcagagactcatgaatataagggaattacgaagaaacaggaaaaaactgactgtttagtaggttatagtggggaaaagctcccataatatggagaaaaataaaactgcatccttacctgatataatatacaatgaacttcagcaagagtaagaatctatacataaacagtgaaactaaaaatgtaggaaaatatttgtgacctaaaggtggaaattttcttaaacaagacctaaaaatcataaaccacaaggtaaaaaaatatgtagatttgatttcattaatattacaggtttctattcaacaaaggaatccatagtcaaagttgagagggagaagatactttcaacatctcaaactgacaaagaattcataattagaatatataggaaacttctgcaaatctgtaagtaaaagtcagaaacccattctataaatggcaaagtatagaagcaagtaattcatagaaaaaacaaattaataacaaatatatcaa

SEQ ID NO: 5874 - DNA, 980 bp, Homo Sapiens
gatacagacaattaattgcacatagcattctctcttcactgaactccactgatcctatccttattgccacatcatctaagttcttttggattcagctaggatatcaagtgtccccagtgcctacaaacacaaacttaccccaggtctagcctaggtgcaactcctatgcactttagtagtactttttatttccctctaccatcatacgtcttcagtgcaatgtaattttctctttaacttatcacttactagaataaaaagattttgtacctgtgaatactttacagtgtttggcatttaggtgatatcatctgtaggagaaccatgtgtttggagtcacccaataacatcacttatatgaataaacagtgaaaataaaccaccctatgagctttggaccttctaattcaagatcctgctgtcattgtcagctttaagccaaaccaatctggggtgaaaggtggggtatgtaaagtcctttgatggtttattcacaactattacccagccctctaacatcttacctcacctactcatccccaccaaactgctactagatggaatttgttcaaaagactattttctgccattttctccaaacattaagaaagtgcttcagcccaccaaggaattcgacacacaagaacagcaaaaagccaaataaacagtgaattctgaaaggcagtaaattgattatttcctatggccaagctgacaacctcatgtcaagactttcctacttacactatggttattttctttaaacttttactaagacacttgcaaagacctctgaaaactcacataaactatgtccagagatcggttttacctattattttcttaaaatttattcaaaggactgctaaacatttttctttaagaattagctttgatttttccttggagaactgtgaatataagtaagagctataatataataagggttgctgtgcctcaaaactaaaggtgaatttatc

SEQ ID NO: 5875 - DNA, 869 bp, Homo Sapiens
  misc_feature (204)..(274): n is a, c, g, or t
aaaaatccaaaagcatattgcaacaataagtttgagactttgtgtgaacaaagggaaattcagcctcttatgtctttgtctttaatacattaaatactgattttgaataaaaatctaaattgatcaatatttttaagtgccatgtaatcacaggcctgtcagatagttttgttagagtgaaggataatatcttttgctcattcnnnnnnnnnnnnnnnnnnnnnnnnnnnnnnnnnnnnnnnnnnnnnnnnnnnnnnnnnnnnnnnnnnnnnnnatatatatatatatgctggaactttgagcaatatttataaaaatattgtctgtaaaacaagtttgagaaattaattttttatatttataatgggcactgtaatggattgatttttttcttaatcttgaaatagtgaccaagatatttatatcatttttgaatttattttttaattctttaagaaaatttagaacttttcactttcatttgctaaagtcactgtagtcacattcggaaggaatatgtggctttctgttctttatggactacgtttatcagaagtccatatttattaaacatcctatttgatgtcagataacgtaaactcaagcagcttcaaagagttcagcatgttacatattattgagagagcaagtgactgaattttagttgtataagcaatattataggtaggtcagggagtcctctggatggcccctctacctctttatgtttgtatgtttatgtctttatttgttatgtcgtatgtgtttatgagcctagaaaataagtgtcccatatgtaaagtttaataattttgtaatacatttaccacgctgtctgccctattaaaattttccacaaatttgggaaa

SEQ ID NO: 5876 - DNA, 1055 bp, Homo Sapiens
ggtcgcgaatcaactcaacacatgctcccatcccaacctttggacagacattcagaccaccgtggatagaggcttgctgttctttgcagaaaacggggatcgcttcatatctctaaatatagaagatggcaagctcatggtgagatacaaactgaattcagagctaccaaaagagagaggagttggaactcgagcatagcccgtaccttcaaaataatttttgtctgactcttccttcctccttctacaaggctccacttcagttgtgttgagattggatgtttttttgaagttgtacaagctcagaacattttcattgaggtcatctaatttaatacaacctttgtatggagggaaacttagtcgactgggaagttcaaaatcaggtgggtaacctccaacataaaatacaacattttcaggatccaaattaaggagtgtattgctatttctaccatccatgtcatagactccgggtgtttctggtttactggatgtggctcctttggtgtaattaagccttgcaaactgataaattctctgaaatttcacccgatccataactgcctccttagtctcactcttggtcaagatctggtccacttggagttcagcctcacggtcccccaggttgtagacacaggtgagctggcatccaaaaatggcaatgcgattttattcccgggaggcatctttatttccaaggtacatcacaaacatattctcagtacccccattttctcttgagttgggcctttggagaaacaaggacagagatgtatatcctttcaaatcttccaggtcatttggcagtcggacttcgactccagatttaccattgaacctcatggggacagcaaccttactggcagcatctctggcctgctgaattagttctcgtattctgtccatgttgtcagagatgtttcccaagggcaacagctgttggttgatactttcaatcttgcgccaaagatcaggtagtttgttggttaacttattcaccgagttttctgcatcagtcagaagctttttgaagtcttcgttctgtgtcc

SEQ ID NO: 5877 - DNA, 1046 bp, Homo Sapiens
gacattactgctattttataggaaacataagcaacaaaaaacaaggcaattagcaccacaaaaaaacaaccaggtacatctagatctaacagaacattccattttacagatgactcagtctccccacagattaacagtattaagaaaggagaataaaggagatataagtgacttaataaccagatatgctatatagaccttatttgtatcctgtttccaacaaccaactgtaacaagatatctttgagatatttaggaaaatatgaatgaatattagatgatttttagagaattattaattttgctatgtgtggtaatggtgtgccgatttatgttttttaaaaagttcttcagttagagatgtatatttaaatatttatgtgtgaactgccatgatgtctagaagtttctttaaaatactctagaaaaaagagtttagggagaaagctgaaagatgaaataagattggcaaaatatggaaactattgaagctggatggtaggtacacggaattcattacattattctctttacatttgtatatgtttgaaaaatttcataaggtacacaacaaaataaatgacatggtcacctcagttattttgctgaagttttgtcaatcaccccctgcttagctggagtttaccttctagtatcattctcagcaaaggctcacaggaatgctattctctgaattcttacatattcagcctgttggcctgttctcgaattgaaggacagcttgtctggttcatactttctctacatgagtgtattgtaagcattacttcattgtcttttgtcattgaatattgctgaggtggccacagcctgatttctgatgccatctctatttctttctttattactaacaagatgttttatcctatattctcattggtttctttatctttcatgtccaaaaatgttaaataggccttcaggtaggtctttttggaacgatttttcctgctacaagtttactctttcattgtggagaatcattttcttatatttcaataaaaaagttgaaaaattttcaactt

SEQ ID NO: 5878 - DNA, 493 bp, Homo Sapiens
ttcccttagaagggaggcaagcttctcatggcagctgggtcatatgaaggctgtgctagggaagaaaagatgctaggacacattctcagtacgctccctgaccactccccttttactgagttggtagggtgagggcgtaaccatcgaaggaaaaatagaacattcctcaaccccacctccacatccatgctgaggaaagtgttattatgtgggtaaaaactcaaggagtgttgctgacagcatccaagaacagagatgaggccagggaatgcatctcacatggctcttttctaagattttgacctcaggtcccaggactaagcagcaggccagatgtagaagttgctggagtttcatcaggtgtcttcacaacagcagtgtgggtttccattcctggaaataaaagaaaaatgtcagggtacaaggtcctggccaagcatatttgctgtgaaagtccattagtcacagaagtaacaatgaattttcaatattt

SEQ ID NO: 5879 - DNA, 530 bp, Homo Sapiens
aaagtgcaggataaatgtttcaccaataggactagcctataccaagggcagtgcccagacaaagtgacataaactaagcccagaaagatgaagaggacttagggggaagaagggttgtccagtcaagggaatttaaaattgttctaagtgcaaagttaagccatcggaagattgtacactggggaaggacatcagcccagctgcaatatggggatggatgagaagggacagtagccaataaggaatgaccagtgtccagatgggagaaaaaggagtacttggactagggcctactttttattttatctttttaatctcatgacagatgacaaggcctgctttttaaatgccagcattccccagaaagacagcccagttctgttagtagtggcgttcactagtatccaggtctttgccatgaatgtctcatccagcagtcttaagccaggcctctgcaagaagatgagtcttccctctcatcgggttagagaatagaaatccgtagcaacacatttcagatctcggtacgc

SEQ ID NO: 5880 - DNA, 1061 bp, Homo Sapiens
  misc_feature (80)..(128): n is a, c, g, or t
ggtgcttcagccatggcccctggtcctagtcaagattttgtaatcacagagaagaccaccctcggagctgccacaggacnnnnnnnnnnnnnnnnnnnnnnnnnnnnnnnnnnnnnnnnnnnnnnnnngtcctgagtccgggagctggccctggccacagaccctccaaaccagctcctctgaaggtccacagccagcacatggcgggcagccggccctggggtcctggggtgtgaagcagagcttggatgtgcgacgggagccctgcacatctgttgctcctgctggcatcacttgggaaggcctcgtgcccaccctgagctctgtccaaccctcgggaatagcgctgggtggcgaccagggttgaatgtacagaagcccctgctggggtgactgaggagagggtttacccagcaccctaagtgtgaaccctataattgaccccattgggcacttctgttcccaccccctggatctttttagcaaagccagccctcctcataaggatgcctgggaactattttatcttttggggaggtgatggtttcctaccttccaacccactgacccagggaggcagctgacctagcaccatccacagccctgagctccctttggtgggaggtggggtgagagtgtggagcaggcacagctccagacacccaggccagaggaacccccacctctgcaagggctggtgctggatgggcgacgttccaggagggtcccaggcctacagcttctgcccagaagagtccatggggcaaaggggtagaaccctgggccaccccagggcatgactggctttactggaaatggctggagaggttgggcttgtgttccttgaacccccagagcccggtgatcccacagcccggaggccatcactcccctccagctgccttttaggattagacaggcatgcggctaaaacatggccaggccatacccattttccacgtgacaagaggctgtggccgtgtttgcccacaccacctgtgtttctgctttgttgtcgtacagcagttgtgggtgattaggaataaaggctgactcattgc

SEQ ID NO: 5881 - DNA, 507 bp, Homo Sapiens
  misc_feature (304)..(315): n is a, c, g, or t
  misc_feature (360)..(385): n is a, c, g, or t
  misc_feature (406)..(456): n is a, c, g, or t
tctagagtatccctaggctgaatgtcaaggcagggtggggaatccagcctggaagtgactgcagcctagctgagagagccgtggtggccaggaccagtgaggcagcagcgtggatggagagagaggagggatgcagagatgtttaggacatgagctggctggtgatggatagcatggggcaggctggtggtggtaaggggtccagggtccagctgccactaggagggtgggtaggtttgggcacaagcccttgtctttctgatccttgttcaggtgagatccccctgcacagatttcacctgcnnnnnnnnnnnncccggagccatttaaaagggcctcggggggatggggccggcttgnnnnnnnnnnnnnnnnnnnnnnnnnngacagagtctggctctgtacnnnnnnnnnnnnnnnnnnnnnnnnnnnnnnnnnnnnnnnnnnnnnnnnnnngggggtccaggtgatcttccggattcagcctctgtgagtagcggggataac

SEQ ID NO: 5882 - DNA, 721 bp, Homo Sapiens
tctgtctgctagtcaaaggtaggaaattaggtagagcagcaagtatcaagatttaatttttgtgactgatctaattatgtagaatgctatgtctgtgctgcagtcctcttactccttttttatacatattctgcattcctcacaactcttgaattcttcatcttctgtctagctttcatttcctcacctctaaactctgggtttatttttctcaaaactacatctgtattgttattcccttttctaatcttcagttaaaacttgtgaaatgcattttgtctatgttttactaaggaatataaaaatttcttaaggtataagctgaatattaactcattttaaaaatctttttacagataattcttctattttcaaaatatctttaaagcacaacaacagggcattagctcaggctcttagtagagaaaaagagaattctcgaagaattacaactgaaaagatgctattgcaaaaagaagtagagaaactgaattttgagaacacatttcttcgcctaaagctaaataacttggtatgtaagctatattgtttttgaattctaattataacttaaatcttttagctgcattattatagaagctttaaaaatatttttcaaatctccaatagtgaaaaattattgaaagtcagtataccatgtaagtctatgtcaaagtacaaactgttaatgggtaataaaatatgtgttttaaatctacaa

SEQ ID NO: 5883 - DNA, 854 bp, Homo Sapiens
taaaatactttatggttgtgcttttcttaaagaatacaaaaagcaaaggctctgtccttcaaaatatcatacattaatgcaacaaaaagctatttcttatattcttttattctgcgttgcatccaaacattgtttcactttgatcattcatctccataaaatttgaattgctaaataaggcctactccctatataccaaactccatacctaacaaaatggcagtttacaaaggtcttagatactatatcccaagaagtatatgcagcatagaggtggccaatattcagaagctacattttcttatactgcccaagtgatcatgaataaccaaaacatttgaaatgaattaaaattacttatggtcagaaatgcacttgaggataaatcccaggaatgcaaacacaggagaaaaaaagtaagtgtagaattcattctgtatcacccagtaatatttgctatagtgagtccattttcaaggcagattcctaggtttttaatgtttgtaatgaaaacctttatgagaggactctgattttgagaaatgccgtgtggaactctgctggtttgtaaaatgagtgtaatccgcatcttcaccatctgtcatgataggtggtggtggccgtgctggcctttcattcttagaatggtgaggttcatcactctcttttgacttggaatttgctgctttagctgtttttggcttccactcggggtcttgctttcttttgtccaaagatgatttctcccgctccttggcttttttgtaagctttcttttcttcagccattagaagtcgagcgatttcttcatcttgagctacttgagcggctctcatgtccacctaggcgcctaa

SEQ ID NO: 5884 - DNA, 205 bp, Homo Sapiens
tctagagatccctgaggctgaaggcgcacatcatataaagcaatgaatgtactgattcctccctgcagaaggcatcgtcatgatgtttaccctgcagagtgtcattcctggagctgagatgctctgtacatgagaaaagtcaaggatctctgacattaagagctgcctaggccgcgcatggtagctcacacctgtaatcccagca

SEQ ID NO: 5885 - DNA, 329 bp, Homo Sapiens
cacgttcgacggacgcattcataacgcctactgtggctcctgtctttatgggacagtaaaagcttaccacaatagagaggtaggttttactctaagagggatgattgtagtactagactgtgttgtataacattacacacgtggttcctctactaaatgtagccccaatgagtctactgcaatttcgaagaaaccaaacaaaggcataaacaaagttcagggatgaaagcacggtaaaaccggcggggttagcaagcaaggccaacctacaaccctgaatgcaaccaaatctcaactgaagaagaaacgaaacagcagaagaaacgcaa

SEQ ID NO: 5886 - DNA, 476 bp, Homo Sapiens
acagactcggctcacacacaggcgctgacctaccaagcattcttcatcatccctatctataaacagctctctatgaatgacttggatcacatacaggcgcttacctaccaagcattcttcatcaaccctatctgtaaacagctctttatgaatgactcggatcacacacaggtgcttacctaccaagcatacttcatcaacccaatctgtgaacagctccttatgaatgactcggctcacacacaggagcttacctaccaagcattcttcatcaaccaatctgtaaacaacactttatgaatgactcggatcacacacaggtgcttacctaccaagcgtacttcatcaaccctatctgtgaggaacaaattgtctaattaaaacagacaagcctacacaagccacagtacagacacagaaagatattacttggaagtttattcctaaaactacagccttccaatttaagaaatgga

SEQ ID NO: 5887 - DNA, 861 bp, Homo Sapiens
cccccttcgacggacgcattcacaagtcaatagtaaaaaagaaaatgacacgattttaaaatggggagacaatctgaatagacatttctccaaagaagatatacaagcagccaataaacatgaaaacatgctcaatcttataactcatttaaacaatgcaaatcaaaaccaatgagaaagcactccacatccatcaggaaggcaataactagagagacagataacaataagtgtttgtgagaatgtgtggaaactggacccctcgacattgctggcaggaatataaaatgatgctgtcctttgaaaagcagtctggcactttgtcaaaaagtgaaacacggggttgccatataatatagcaattgcactcctagatctggagaaatgaaatcatgtgaaaagcttgtatgtgaacgctcagagcagcattatttagaacagccaaaacgtggaaacgacctaaatcccataaactgcagaagagatagataaaatacggtgtaggtaagtaacagaatagaagtcaaacataaaaagtaacaagctactgatacataccatgaacataaatgaaccttgcaaactttgatagaagccagtcacataagacccagtgttgtgtgacttcatttatgtgaatggtctagaataggcaaatccatagactgaaagtgattacggatttcctagggcggggcagatcagggaaatgggcagtggctgctgatgggtagtagtttcttctggagtgatgaatgttctaaaacgatggtgatggatacacaactctgtgaatatatacaaaccccttgcatggtacacttgaaatagatgggctggatagcatgtaaattatatctc

SEQ ID NO: 5888 - DNA, 521 bp, Homo Sapiens
ggagtaatgaaatctgacttacagtttagagtatcacgctggctagtgggatggaaatagtctgtcgggagacaagggaggaagcaggaaggtgagttcacaggccagtggtagctcagaccagggtgaaagtggtggagatggtcagagtcaggttcgggacatatttaaggcaaaaccaacaggatttattgattaaatggatgttgaagtgtgagagaaagggagaagtcagggacgacgagaattttaggggccttggcaaagcggaaggatgaaatcatcatgaactgggatgggaaagacttagggaggtacagggatgggatgggggttcattctgttttggacacgttaaactaggaagccttttagacagcaggtgtggtgagcaggcagcagaatatccaaggctgaagttgcagagaattgggctgaaattataaatgtgggaggagtcaccagcatatataatactacataattctatgtatgatcatgtgtaatttgcctgactatgt

SEQ ID NO: 5889 - DNA, 511 bp, Homo Sapiens
  misc_feature (253)..(253): n is a, c, g, or t
  misc_feature (261)..(261): n is a, c, g, or t
ctacttcgacggacgcattcaggagagagaccttatgtttcgtcatgactgtgggagaccttatcgcagaagtcagcacttaatgaccatcagaaaattcacacaggtgtgaaactatacaagtgtagtgaatgtgggaaatgcttcttccgcaagtctactctcacgacccacctgaggacccacacaggagagaaaccgtatgaatgtaatgagtgtggaaaaatattctctcggttgtcatatctcactngtacattnatagaactcattccaggagagaaaccctatgaatcgtaatgaatgcggaaaaaccttctacctgaattcagccctcatgagacatcagagagtgcacacaggagagaaaccttacgaatgtaatgaatgtggaaagatattctcccagttgtcatacctcactatccatcatatgaactcattcaggagtaaaccctatgaatgtagtgaatgtgggaaaaccttctacctagaactcgaacccagtgta

SEQ ID NO: 5890 - DNA, 509 bp, Homo Sapiens
  misc_feature (135)..(135): n is a, c, g, or t
  misc_feature (426)..(427): n is a, c, g, or t
tcgtcatagagggaagctggtactattaatgtcatgcaaggagaaagcccattttgagtagaaacagaaggacatttatgaggggaaagttggctgggtagggcaaaactgagtagtagaaaatttaactgtaanttattccattgaatttttttagaaggactcttcaaattattgaaagttgcttagtaattagcatagtaaccatttacaaaatacactctgacctagagcaacagggaagggagtcagagagacaagttttgtgcagactgtcagctacagcaggaaagtatgcacggtgaatttccacgttaggtcaggcccatgtaaaacttacaaatggcagggggtatggaggaataaaggcattagcattgcatatgacctggtggccctttgaaaactgtgtttggggtttatgtnnctagttgcgggtaaatctgaatttgaagtttaatccttttgaccaagctaggtctaagaattgtctttgacttcacctcagg

SEQ ID NO: 5891 - DNA, 813 bp, Homo Sapiens
cacaaccaccaccactaccattcatcaccagcagcctcaccaatacctgcagcatggagccgagggcagccccaaggcccagccaaagccgctgaaacatgagcagaaacacaccctccagcagcaccaggaaacgccgaagaagaaaacaggctatggtgaactaaacggtaatgctggagaaagagaaatatctttaaagaacctgagttctgatgaagccaccaaccctatttccagggtcctcaatggcaaccagcaagttgtagacactagcctgaagcagactgtaaaggccaacacctttgggaaagcaggaattaaaaccaagaatttcattcagaaaaacagtatggacaaaaagaatgggaagtcttatgaaaataaatctggagagaatcagtctgtagataagtctgatactataccaattccaaatggtgtggtaacaaataattctggttatattactaatggttatatgggtaaaggagcagataatgatggtagtggatctgagagcggatatacaactcctaaaaaaaggaaagctaggcgcaatagtgccaagggttgtgaaaaccttaatatagtgcaggacaaaataatgcaacaagagaccagtgtcccaaccttaaaacagggacttgaaactttcaagcctgactatagtgaacaaaagggaaatcgagtagatggttcgaagcccatttggaagtaatgaaactgggcctggaggaacaagtcgaggaaaacctgctgtgggtgatatgcttcggaaaagctcagatagtaaacctggtgtgagcagca

SEQ ID NO: 5892 - DNA, 227 bp, Homo Sapiens
  misc_feature (78)..(95): n is a, c, g, or t
tgggggttctgtgcgcccggattatggcatgccactgcggcctgggtgacagtggacttctgtttcaaaaacctagcnnnnnnnnnnnnnnnnnncaccacacattataggggataaccagtgaattgaagattgagtatctgttaggatgggtactgttattactttgaggaaaaagttgatatgtttaccttggttctattgagactaataaaccccaaaataaa

SEQ ID NO: 5893 - DNA, 1130 bp, Homo Sapiens
ccggcgcccgctctgcccgccgctgggtccgaccgcgctcgccttccttgcagccgcgcctcggccccatggacgccctgtgcggttccggggagctcggctccaagttctgggactccaacctgtctgtgcacacagaaaacccggacctcactccctgcttccagaactccctgctggcctgggtgccctgcatctacctgtgggtcgccctgccctgctacttgctctacctgcggcaccattgtcgtggctacatcatcctctcccacctgtccaagctcaagatggtcctgggtgtcctgctgtggtgcgtctcctgggcggaccttttttactccttccatggcctggtccatggccgggcccctgcccctgttttctttgtcacccccttggtggtgggggtcaccatgctgctggccaccctgctgatacagtatgagcggctgcagggcgtacagtcttcgggggtcctcattatcttctggttcctgtgtgtggtctgcgccatcgtcccattccgctccaagatccttttagccaaggcagagggtgagatctcagaccccttccgcttcaccaccttctacatccactttgccctggtactctctgccctcatcttggcctgcttcagggagaaacctccatttttctccgcaaagaatgtcgaccctaacccctaccctgagaccagcgctggctttctctccccgcctgtttttctaggtggttcacaaagatggccatctatggctaccggcatcccctggaggagaaagacctctggtccctaaaggaagaggacagatcccagatggtggggcaccagctgctggaagccaggaagaagcaggaaaagcagaccgcacgacccaggcttcagcagaacctggggaaaatggcctcccgcgaggaccaggtgctgctgggggccccggcccaggccccggaagcccctccttcctgaaaggccttgttgggcacctttcgggttccagtttcctcattaagggcctgggttcaaggcttatcccaggaaccggctcctcctttcatcaatccaaagctgggtccgaaattctggattaggggttattccccaccccccttggggcccccctcct

SEQ ID NO: 5894 - DNA, 678 bp, Homo Sapiens
actatatgtgctatcaaagtgagaccccatttatcttttaatctggtttctgattgtttttccagtgtctacttaactgagaactcttacaggtaattttgtaggattactaggtgttttagatggcaaatataaagattgtgtttgtgtatgtgtatgtgtttatatgtgagggccaatctattgaaaagaaacactgcagaatactaaagcaaaattgaaaccatttagagtttgtagttgttttattttaaaagctaaccttgtaagtacttagtctttcaaaaaataattttaacttctatgttttatttttctattttaatttttcctgggccctgcctcccaatcctctcaccttccctttcttctgtgtgacctatagattcagaaattcctttctgggataatttctggcactgctttggagatggagcccctgaaaattggctatggaccaaatggattcccactcttggggatctctaggtcatcatcaccatctgaacagctctgagagagacaagaagtggaatggagaaggtgattaggtaatccaagaattgccaggcgaacaattgtgaaaatctttcatagagttcccgatgaaaacaactctttcttgttagccactatctctgcctttcctttctaaagaaaaacacgtcatttcatctt

SEQ ID NO: 5895 - DNA, 496 bp, Homo Sapiens
ccaaagagaccccctcaaaatgatggcttccagagcacatgaataaaaatgattgcaatgagtttaaaatacttaacattattttacaaatcattaaatgctgtacaagtcataacccagtggactcacaaattaaacagggctgactgataataaaacaacaaattaagcaacacaggggagtatctgactgttgttcagaaattaaccaactctaacatgtaggagtaattaaaataattccaaaataatggagcttattaatgttggaaactggaagagacagtccaatcgtatttatttaaaatgcttatactttgtacttaaattgtgtattttttcatgtctattgtttcttgtgagcatcattacaacctctttttttacatgttgacatgagtttatttcgtggttttgatcacaaacaaaacatgttcatcatgagttactcaaagaggtataaggagagatataaaattaaaagcaaagttcacaa

SEQ ID NO: 5896 - DNA, 768 bp, Homo Sapiens
  misc_feature (49)..(49): n is a, c, g, or t
  misc_feature (62)..(62): n is a, c, g, or t
  misc_feature (67)..(67): n is a, c, g, or t
  misc_feature (74)..(74): n is a, c, g, or t
acctgcccaaccacatggaaacttgagaccctgaagcatggcattgagnaagctgcctaagnaaggnaggcagnatccatcagcctgggtgcccgactgattaccctgagcagagctccccagcccacctgtgatggacgcatggagcttgagcaaggaataaatattcgttgctggactctgattacactggacctatccaagatctgagatcatcaactcatctcaaaatccttaagctgaccacagcagcatcgtcccttttgcagtgtaagagaaggaacacaggctcagacatcagtgccatatctgaagacattcagctaataacaggatggagtccaatctgaaacaactgtcacgctgagcctaattgctgaagatggttgaaggcaccaggaggctggagtttcctggaggtggtttgtggccaaccgtcaattacttgggctgctgtgcagtggggatagaaggatgattagaatccacagacaacccattggcctttgtttaccattaacttctgttttctccaccagccaagctcctccagacccaggagatggctcttccctctgtgtagcacactctttccagtcaaggggtcttgcactgctatttccccttctgctttgcttggttcattcttactgaccctccaaatactgaaggaatgaatggagaaataagtaaatgagagatgtggccaagagtctccaagagaggaaattaaaaaatcctatacctgtgaggaactggcccacttgc

SEQ ID NO: 5897 - DNA, 668 bp, Homo Sapiens
accgctgtcccaaggacaaccccaaagaggggcctcgactgcacctcctcgaagttgctggctggctttggccaagtgcaggaatggtttttgtgagggcatggatggagaagtgccaagggccccttttggtcacttccgaagagcaaaaacgtgttgagaggagaccggtttaagatttcaaacagaacctccccagcgcgcatgaaaggacttgattagcatatgtcaagaggacccgcttatatactcggtgtgtatgtacacaggactctgatctgatcagtttgcggaattggagccccagccaacagccctagtcctagtattggcagcggcagctatagatatttctgcagagccagcagccggctcccacctacccaaggagagaagatcgctccaagacagtgagagcttccctgccatttcagtgcaaagtccctccggagcgacctcagaggagtaaccgggccttaactttttgcgctcgttccgctataatttttctctatccacctccatcccacccccacaacactctttactgggggggtcttttgtgttccggatctccccctccatggctcccttagccgaagtcgggggctttctgcccggcctggagggcttgggccagcaggtgggttcgcatttcctgttgcctc

SEQ ID NO: 5898 - DNA, 872 bp, Homo Sapiens
tctagtccaattctctaattctgtaagtgaaggtctacagcctctagaaaggtgacaagacttgctcatgatggcgtatctcaagcattgtcagaataattttagagaaaatcttcctgcaaagtccaaccagctaaaaaatacaacttttctagtttctccgctttaactacatcagtgtcttgtggctacatcatgcctgacaatctcagatgcttatcttacttatgaaatagaaacttccatttctggcatacattcaaatcaagtgaaagcatcatcaagtgaaagcaaacagctttggggaagggagtcgaagaaactctttaacccaacttcatggtgatgaaacagcagctttgtattgggtgtctaaaatactagtttcacttaaacctcattccaaattgatattgttggaaaagtagaaataatatctcaagggtcaagttgaccttttcagtgggaacgttgtccttcaggctacttaggattctttgtatctgcttcctggcaatctttgagatgctgtaatggaatggctgccctgagtgttaacagtaaaactgtatattcagtttttaattaattaggggaaatttaattaattggggaaagtgtctcaagcattctctttagaaaatattcctaaagagctgtatttagaagcaaaagaagaggataatatgtgttttatttacttgatgtaacattaaattgcaatggcagatgagctgctttttgtcataaatttatgggctgggctaaacttgcaactggccttggtgactgtatttcctttcatttgtatcttcaagagctaaaatgtaaggctttatcaatttatgaataaagtgatgataaattcttgt

SEQ ID NO: 5899 - DNA, 584 bp, Homo Sapiens
gagccggaagagagcagtgcttcacaataaaaggaagaattgcttgaacggaggcgtttcaggcatgagtcacaggccgggtgtggaagaggaaagtgtgaagcaagggacaggtaccagctgggatgttggcagcagccgctcccctgcaaggagaacctcccacttcctgtcccgcacacctgcctcattggaaagtgacgcacccactgtttggcctcggcagcctgatgtttctcatcacacaggaagacggtcatgctacaggaagacctcggactttgcatccagcagatggttgttctaaagattgtcagaccgagaccacgccacacacccagaaggcacccaagtcacagagcctgatattgttcctggagcgccattgcatcatccttgaccacaagatctgcgtcattggatttgtctcaaaaacttgggactctggagataaaacctcattgcaaggctacctttgcccctgtattttagcagcttttgaagcaaagcatttcaatatttagaccctgtgtttttaatgggtactgggatcaaaataataaaaactcagtttgcaaagggag

SEQ ID NO: 5900 - DNA, 588 bp, Homo Sapiens
cgagagcggggcaagataagcagtgaggaattcattgcattatcagccagtaactaaaacaaataaaaaagggaaatagcttattcctattgtgacttcctcttattgtgtcttccttgcatgtgttagccatgtgatttgagattaatcaggggttatttctagttgtccccataaagagaagagaagcaaaggaagacaaagaggttgcttctaaaactaaaacatatcatttagtattccagtttagccagttgtaagaataatttggaagataggagaaaaccatcttgtatgtttgctgaaaatatttatggaaaggaggcatttatagaatgaactgggagttttattatgtgaaattgttttgttagaaaagcatagtaatataactattctacaaaacagttctctcacatatgcacaagttagcttattgaagcattgtttaatacagtattggaaactgtaaacaacataaatgttatcactaagttccatcaatggctgcataaactggtgcatccttagtatggaatattatatactttttttactgagaaagaaagctatgtactgacagatctc

SEQ ID NO: 5901 - DNA, 539 bp, Homo Sapiens
  misc_feature (94)..(94): n is a, c, g, or t
  misc_feature (188)..(480): n is a, c, g, or t
aattcggcacgaggtgataaacttttaagaatgggtaaatcaacaatcatagttggaaatttctgcattcttttcctaataacttacagtaagnaagtaaacagaaactcagcaacactatttactgaatagtgaataacactatttaccaacttgactaattgatgtaaatatgtccatgtaatagnnnnnnnnnnnnnnnnnnnnnnnnnnnnnnnnnnnnnnnnnnnnnnnnnnnnnnnnnnnnnnnnnnnnnnnnnnnnnnnnnnnnnnnnnnnnnnnnnnnnnnnnnnnnnnnnnnnnnnnnnnnnnnnnnnnnnnnnnnnnnnnnnnnnnnnnnnnnnnnnnnnnnnnnnnnnnnnnnnnnnnnnnnnnnnnnnnnnnnnnnnnnnnnnnnnnnnnnnnnnnnnnnnnnnnnnnnnnnnnnnnnnnnnnnnnnnnnnnnnnnnnnnnnnnnnnnnnnnnnnnnnnnnnnnnnnnaggtaagatatggctacaaacagatcaaaacttccacttcaagatgctagaaagaagca

SEQ ID NO: 5902 - DNA, 238 bp, Homo Sapiens
ttgctaggattgaaatctagaatcaagagtgtagacatttctaattgttcttaataaatattaccaaattagcctcgagtaaagagtctctagaaatatgtaaactcagagaaatccatgttaaagctctattacccttatattctaaaatttagaggtactatggtgggaggtcttgggcagtttgggaactgagaggtaagaggtatcaaagaagacactgctgaagctgttcatt

SEQ ID NO: 5903 - DNA, 289 bp, Homo Sapiens
ctacacacgcagcaggttcgcaaatgtgacatatgatgaatacattgagaagctgtactttataattcagttatattacttctggaagcacatatctaaggaatatattctaagactcagagggaaaaaaactcgttatcataggatcatctgaagatactttagtatatttgtgatcattttaatctatagcaaatacaaatgaattagataagtgccacatcctggatacatttcggaggggtagtgggcaatggtatacaaaaataccaaatataaaattttcatc

SEQ ID NO: 5904 - DNA, 343 bp, Homo Sapiens
gctacatgatcatcacaggaataaaacctatattatagccttcccaccatatgaaaagagattacacatgtattctcataaagaactttaatccatggtattataaaatctgtgacataaacctaggtaatagaggtttatattatttcttttaggtcctgttcttagatttgccattgtttaggaggattgtaattaacccctttattgaaataataaatgagtttattagaaggatttatgatataactctctatgggatatagttattcccatggccttatttttctcccaaaggcagggtaactcccagcagttgcgtgggggaagagtcagaatcaag

SEQ ID NO: 5905 - DNA, 690 bp, Homo Sapiens
  misc_feature (40)..(40): n is a, c, g, or t
gtaaataagagcaaaaaagttgagcttccgaattctgatncgtgcctggatttgaattccagtcctagcacttaccatctttgtggcattgggcagtttcctaaatctctaggagtttctttaatcataaaattggaaaaatggttataatctcaggttgtcatgaaaactaaacccaggatggcttatgttcttcacttgtcatttagtagatccccaataattattagttatctttccttctttatatattaactttttattctttcattcagggactttttttccttttaaatatatgcaatagttaaacaagtccctatggccctcatgagactgtatttacccattatgtttctctattggatcttttctatgttgttgtttatcccatcctattaaaaaacatgttatgtattccatcttaaaaacgcttttgacctttacatctctctgtagctactgcctctttcttttcccagactattgtctaaattcaattttaacctcagttcctatcctcttataacaagatcctcagtgacttccacattactaaatccagtgattagttctcaggcctcattttactttatttttcaggagcatttattgattctgccctcttttcttgaagctttttctttatttgcttctggacacctcgttgaccttcagcctacgggtcct

SEQ ID NO: 5906 - DNA, 476 bp, Homo Sapiens
  misc_feature (229)..(238): n is a, c, g, or t
ccccgctatactcactggacatctgctgtatgatccaaatctgagggacagagggaaaaacacttataagacactaaacttgaatctcaaatcacacacacaaaataactctagtccattattattaggaatatcatctttaaagagcaagaaaatgtgggccagtccatccacacctttcgctatctattcactcaacaaagctaattgctttgctttgttggaatcnnnnnnnnnnggcgggaacagagagaatgaatgaggtcatttccctatcatgccagtagtgatttttaatctgggagtgtaatgtgcacatgtgtatgtgttaagagaaagaaaactttcctgatggcatttgggaaaatagctgccaggcttcaactaaatgcgctaaagataatggcctttggagttcttaaatttccttttaaagatttcacaactagttcctaaaatttttatacaatgaaaat

SEQ ID NO: 5907 - DNA, 659 bp, Homo Sapiens
  misc_feature (93)..(130): n is a, c, g, or t
gctgaaggtcacaggatcgcttgagccaggaggttgaggctcagtgatctgtgttgcactgtgcactccagcctgagcaagaccctttctggnnnnnnnnnnnnnnnnnnnnnnnnnnnnnnnnnnnnnngaggaaaacgggtctgtgttgccaatcgggtaagttccaggaacaaggcaaacaattggtgttgggagccagtcctctatgggttctctccagttttctgacatgtcttatgaagcagattgcacggcacagcttttatggcgctactatctttccggtacaggacatctgtaaatagcatttaaagatagcaatagtgtttctctctggcagccagatggaagattggttggctatgcacaataataaaaataatgtctccatcaaagcaaaggcggggcaggattatcagttcccttacaaaaaatgggggttccccaatctcagattttctcaacggtggtgcatacccacggcatgggcaacatccacctagacccacccagccaccgtgttacccacatggtcttggaggggcaacaaaatactatacaaacagagctgtcacaaacatgaagttcatactgcctgctgacccaggagtgctgtgtcttctgccatcatccgtgaaattttaagaagctaactt

SEQ ID NO: 5908 - DNA, 536 bp, Homo Sapiens
gtcgcgaagtgaggcaacacatgtacaggtacatgacttaattttttcaccaagccgcctcttatgttgccgttgttccatctaaaactctacttttcctggattctttactttccagttgtctgcatatgatcatccaaatgtcccaaaagtgcccatttctcttcttcaccactaccttggggtccatgccactagtgttttcttgcttgatctgttacagtgacctgactggtctttctgctttcactcctacacactcccccaaccctctgtgtgcaagagcagagcgagctttttaaaataaaagtcacatgccttaggtaatcctcccatgttccactatctgggctcattgaattcctgtcttcaggaatcttgtcctctgccttacctcaacctctcactctggtcttattcatttccagtaatcgaaccccctccctaattgtgtgtatccttctctctgaccatagctcctgtctttccagctcactttctgtagtatcccagatccagtaatccttggatcctac

SEQ ID NO: 5909 - DNA, 565 bp, Homo Sapiens
  misc_feature (100)..(100): n is a, c, g, or t
gcttgaaaatgctcatcaatgttgtactccacaggtaatgttgtacagatggtcaagtgaaataaaaaggacagcccacaaactaagagcttctgaacanccgcaagtcaatacatgctgtaaaggctccagataaatctcatgaccttacatttggagatggctctgttctttcatactgtgtctcatcttttccattttcaccagattgtgtgatatggtatgatctgccttcaatgaaagtaatgtagtctttgtaagagcaaagtgggcctgccaggatccccatgaagttacagttgtaactcaaatactccagtaagcttggcatgcgccttacagctaaatccctctgtgaggaagtcagttcttcatccttccgaaacatcccatcatgtatttcgcaagccaaactagtgatcttctgagtaatgatcatcattgggcctgaaaaatcagcagaatattgtccatactcaaagatatagactcgagtaacttggcacactgtgaggtatcccagagcaaacacaaagcagtaattgtgcatgttctccactcctat

SEQ ID NO: 5910 - DNA, 704 bp, Homo Sapiens
ataggtaacttcttcataaggagcaggaaaagagagtacaagcgaaagaggaacgccaaacacttataaacccatcagatgtgtgagaactcaactcactatcatgagaacagcatgaaggaatccgcccgcatgataccatcacctcccaccaggtacctgcctcaacacgtggagattataattccaggtgatatttgggtggggccacagaaccaaaccatatcatagggttttaagtaaatgagtgatattatttgagttagagtagagaaatatcacacttctataaacaattactatatctcaggcactgtatatccaccttaggtccttttcctttaatcttcaccaatgaatgggtacaattattatcacttctcagattagtaaagtgaggcttagggaggaaaagcaacttgtttggagtcacatagcgactatatggcaaatctgaacctcaacccttgtcatctgcctccagttcctggctcaaaatactcattaaaggctcattttgatggccatcgtttatgatgtttatttttctaacccttccaagagtgttaggtggatggcattattcttttcttctcaacttttataaataaaagagactcgcctcgaaaatcacaactgaaggaaaaaataacaaacttgtagtgtcctctaaagaacttcacgacacccagctcagaagaatg

SEQ ID NO: 5911 - DNA, 503 bp, Homo Sapiens
ggtctgaattcctcacctgtccgctggctaagagccttaagccaggctcagcccgcacaatgtgtgcgatgacctccaccacggccaccacttgtcactgtgtccctctttcccacacgtcttcccagccacagtcctattaatttaatgagttgagcatttgagacacccacctgtagaccagtgtaagttcttttagacaggggttggtccctgcttcaggtaacacccgtctccttctgttttgtgagctataccctctgactttcaagataccacccagaatgagtcccagagtttcatggaaagctagagttcaaaatgaataagctagagcaggcttgtctaacctgcagcccatgggccacatgcggcccaggacggcttagaatgtggcccaacacatattcgtaaactttccttaaaacattgagtatttcgcaatttttatttgccagttcatcagctatcgtaagtgtattctatgtgtggcccaagaaaat

SEQ ID NO: 5912 - DNA, 384 bp, Homo Sapiens
taggactccgtctcagaaaaaggaaaatcagtcttaaggttgcagcttctatttgtcctgagggttcagagaggttagtagtggtatagtggaaagatttattcactggccgagagtcaggaaacctcttatttaatctgttcgttgttttcattattttgttaaatggaagttagctttaaatgccttgactagatttaggttcaagttttttggctctttaggtgttactgtaaactgtgtattgcctcccatctggagaaacaggatgtctggctctggctctcctatgtttagtaaggctgatgtgatcactgggttcaggtaatgacagcctggttccttcatttgtaaagtcctttttatcaagtgattttatccatt

SEQ ID NO: 5913 - DNA, 460 bp, Homo Sapiens
  misc_feature (141)..(150): n is a, c, g, or t
gcaggcagaggtcaaattactcctgatccatgggctgcaaatggatgttgtgttagcaggcataaaacaacttaatcactttgtacatctctaccaggctcttgagtgaccaggtacattgtcagtatttgaaaggaatcnnnnnnnnnnctgagcaataggtctcaacaatgggtttcacatattcagtaaaccatgttgtaaacagatgtgctgtcatccaggccttgtttcatttctagagcatggaatagagttagcataattctgaagggccctaggattttgggaatggtaaatgagcattggcttcaactgagagtcacaggctgcactagcccctaatgagagagtcagcctgtgttttaaagctttaaagccctgcgttgacttctcctctctagctatgaaagtcctagatgacatcttcttcaaatagaaggctgtttcatctacattt

SEQ ID NO: 5914 - DNA, 681 bp, Homo Sapiens
  misc_feature (442)..(442): n is a, c, g, or t
tcctaaaggcctttgatcctttgaagaagaaagacatgttatttgttcagcagacgccgaccactcagacggaggggcccctgggattccctgtctcagatggcctggtcttacgcctgtgtagatttcttctccattgggaatgaaggtgtcaggcgggactggaacgttctagatggtatgttccgtgatattaaccaactctaacccaggacagaccacaagccacactcagaggcctcactgtgctgggggcttcggtgtccaggcgcccaggtgtggccaccagcaccggtttctgccttcgcgttgctggagtgcagtgagactgccgcacgcgtgcacatgtggctctgtgggtgtctcctagagaggacgtggcccctgctgccagcccattgagcaggcccgtgtgggggcccgagggacccacacagtgggngccagcctcgctggagggagagcaaccctttgccgatgaccacgcttgccgccatctcttagttttctttttcacaagcgctttatttttttaatagacaaatcacattttgcaaggcctttaattaaataagattcttctttccttcattttatgctttatttcctgtttgaaggcttactgtagaagtggcttactgtagaagcagcttgctgagcccctccgagccggtccccaga

SEQ ID NO: 5915 - DNA, 428 bp, Homo Sapiens
gataatctaagtcttccactgcctgcatcaaactttctggtgctggtcaggtcatgacgtcccagtggcctaggcccgcaatgtctatcctcttcataaaaagcaccatgcttgttaggttggcttcctgcatttctgctggcttcagtggcgtcatgtctttggaggcaaattcttcagtgtacaggcagaaaaattttcctgaagaagatgagcgcaagaaatctgccttgcgtatctctgcctggctctggcaaatgggctgcatgacgagcgagtttgctcttattctcgggttgtacacctttcttctttccacacccacatcgataacaaatctgactgagttgctccagatcaaaaactctccagagctagtagttaacaccactcttctttgataaacttggcatcttttttctgtttca

SEQ ID NO: 5916 - DNA, 518 bp, Homo Sapiens
caggggcacattcttgtcacacggccaagcttccattgcaaaatgactacattacaatggatctttatatgagtgtctagcacattgttgcaattatttgatgaactatcattttgaatttgttcagctgcacttgtggaggaggaggggtaggagatgaaaaagaagaagaagatgatcatcgattatgtactcactctgtatcaagcactgttctaagtacttttgcatgcatcactacttcgtccagtttttatgataaccctttgaggtagatattttgttttacagatgaggaaacagaggccccaagaagttaaataacttgcttaagatcacagagctaatgagtggcagaacaattattctagctctgattttaagggatttacttaacttttacttggaattcatggagtcattgggctttatttaataagtatctcatcatattctagttatatcatctcctataagtgttcaaaatttgataaaattcagatcaaaggtgttttggg

SEQ ID NO: 5917 - DNA, 1247 bp, Homo Sapiens
  misc_feature (855)..(855): n is a, c, g, or t
  misc_feature (1011)..(1011): n is a, c, g, or t
tggcggccgtggggcgagtcggctccttcggttcttctccgccgggattatcctcgacttacactggcggccccttgggcaacgagatagcgtcgggcaacggtggcgccgcggcaggcgacgacgaggacgggcagaacctttggtcctgcatcctcagcgaggtctccacccgctcgccctccaagctccctgcggggaagaacgtgctactgctgggtgaagatggagctggaaaaacaagcttaataagaaaaattcagggaatagaggagtataagaaaggaagaggattggaatatttgtacttaaatgtgcatgatgaagacagggatgatcaaacaagatgtaatgttggatcttagatggagacctatatcacaaaggcctccttaaattttcactggatgccgtatctctgaaggatactctagttatgctggttgttgacatgtcaaagccttggactgctttggattctttacagaaatgggcaagtgttgttagagaacatgttgacaaactgaaaatccctcctgaagaaatgaaacaaatggaacaaaagttgattagagacttccaagaatatgtagagccaggagaagacttcccggcttctccccagagaagaaatactgcgtcacaagaagacaaagatgacagtgtagttttacctctgggtgcggatacacttacacataacttgggcattccagtactagtagtttgcacaaagtgtgatgccattagtgtatcggagaaagaacatgactacagagatgaacattttgattttattcagtcacatatccggaagttttgtttacagtatggtgcagcacttatttacacttncgtaaaagaaaacaaaaatatagacttagtatataaatacatcgttcagaaactatatggatttcccctatagattcctgctgttgttgtggaaaaggatgcagtatttattcaagcagggtgggataatgataagaaataggaatattacatganaatttttcaacattaaaagcagaaggatattttttgagacatcctaactaaaaccacctgttcgaaaattttgtacatggagaaggaaattatgggcagagaatgatccggtgtttctttttgaagcttaccgtccctttttagcaaagcaaccacccaactgcaacttggaaggcctgggggatgcctcacccaaaaatccccaggaggcctcccccccaaaccccaaattgatt

SEQ ID NO: 5918 - DNA, 866 bp, Homo Sapiens
gggggcactccgttggtcttccagctggtgggagttgacgacgcggtgctgggcgttgggaccctactttatctagttcgggaagttgggttgtggggtcatacctgtctgtctgctcccagctttcttgggtttcttccgacggcgtggggcctcgctaaggaattcccggcccctcagggccacggctttagcggtgtcttttgcgagttcttcgtaagtacatcttaaagctgtcaagatggttctagcagaccttggaagaaaaataacatcagcattacgctcgttgagcaatgccaccattatcaatgaagaggtattgaatgctatgctaaaagaagtctgtacccgctttgttggaagcagatgttaatattaaactagtgaagcaactaacagaaaatgttaagcctgctattgatcttgaagagatggcatctggtcctttaccaaagaaaaaatgatttcacttgctgtatttaaagaaacttgtgaagcttgtaaaccccggagtctaggcatgggactccccacttaagggaaaaccaaaatggtgattatggtttggctgggattggcaagggagtgggataaactaccaacctggtttctaagtcttggcattatcttttaccagaaggaaagggttcggcaacaccctgttttattatgtgccagaaaccatttcccaaatacggggctttttgaccaaacctataacccaaatggcttccccaagcactggattttcccttttctttgggtagcctatcaacgaaattgtggtcctggtccctcttttgccttctgaacagggagatacaaaattttaaacatcggtacattttgtgaaactttactct

SEQ ID NO: 5919 - DNA, 988 bp, Homo Sapiens
  misc_feature (608)..(608): n is a, c, g, or t
  misc_feature (762)..(803): n is a, c, g, or t
tagaccaagctgtaaggccctactacagacagtgtttaacaagtaaacttacaagaacccaacacaattcccagaaagtaacaatagccagaggttgaagggcggggtagaagaggggggaatgttgcagcgtaatccttcataccacctggttcttgatattctgccgcctgttcaagttcaagaataaaagcgacagcaggacccaaatgcagctcccaacccactccccaggctagacatgcttgtgtccacacagcacaccaatgtgatacttccactgaccggctgcagctctgcatgaaggactcggggtctggatgccatggaatcactgtggctcttgttgcagttttgtactctatacttggtttttcaattaagcttaatggcttttttaaaacatgacttgaagctctagttttctagatcttttacagtgtacagtattttacataactaagctgtattaaaagcttgttcatttacttgccaggaccctggctctacttttagagtcattgtaagaaactctaacttgcatcaaggtactaataagcttaattttaataacccaaagtttaaaggttccgatctttctccttggnggtggagtgatctcattctcaggacaaccgtttacttacctgattcctcggagcattatcaacttctgctctgttgtcctgaccatacctatgtcccagaactaccgttaaatgtgctgcgggattctacgcttgaatcccgcactgcaaaccnnnnnnnnnnnnnnnnnnnnnnnnnnnnnnnnnnnnnnnnnntgggttgtttgccgcggccccccggcgactcttcgcgctttactccttccgcctcgcggcctccttttgcgcccgccccccctcggcagtacgcggcgactccgaatcgccgcggcccgtgcgtttgtccctttttattccctgaccggcgcggccccattcggggtgttcagccgtcctcggcc

SEQ ID NO: 5920 - DNA, 555 bp, Homo Sapiens
cggctgtagcatcgtggaaaagccagaaggaggtggagggtatcagtttcctgactgggcctacaaaacagagtcatccccaggctcccggcagatccagctgtggcacttcatcctggagctgctgcagaaggaagagttccgccatgtcatcgcctggcagcagggagagtacggggaatttgtcatcaaggatccagatgaggtggcccgcctctggggccgcaggaaatgcaaaccacagatgaattatgacaagctgagccgggccctcagatactattacaacaagaggatccttcataaaacaaaagggaaaagatttacctataaatttaacttcaacaagctggtgatgcccaactacccattcatcaacattcggtcaagtggtaagatacaaactcttttggtagggaattaattttgaattgaaaagaatttttaaaaatccaaatctaagacatggcatgtttaggaagattttagaaacactaaaataatgtgatcctttggattgcctcaatgttcttactcaagtcatctcacttataa

SEQ ID NO: 5921 - DNA, 684 bp, Homo Sapiens
ggaatcttcagccagctccaagttccaggacagcacagcagcagctttcctctttcctcaacttgtgaatgagaacacattcttcaatacagatgagcccaggcaagaatcattcagcacactttgcacagtgggggcctccttctcacctctttctgctgctgcttcttccagatgaatcagagtgccagccacgtgtaccatttgtaccaagtccattaaagatcgatgagcttgttcttcatctgtaaggacagactatcctcacccttctaatgattttaacagccacaacatctccaacaaataacgcacctctttttattattttggagatctaccttttaacagtacagcacactgagaatcactacagcctcatggcctgtaacatattacagtttctttctacatatgagagcttgtgatgcaccccaaactaccaatgtttcagatgtgggttcttctgtttttaggaaatactgtgaaatcgtttgctagagaaaaaggaagaaagatattggttgaaataaaagctgggctcacctttggattttaatgtgcactctgcccctgttgtgtagcatgattaatacatatctgaactgtattgtaatacaaagactgtttctctttactcttttaaatcaacacactgtcatcaccaatatattgaattcaaat

SEQ ID NO: 5922 - DNA, 941 bp, Homo Sapiens
  misc_feature (840)..(840): n is a, c, g, or t
  misc_feature (880)..(880): n is a, c, g, or t
gggagcacttccgggttgggagaaaggtggcggtgctttcggagggaataaaatggaaggagaatcaagcagatttgaaatccacactccagtttctgacaagaaaaagaaaaagtgttctatacataaggaaagacctcagaaacattcccacgaaattttcagagactcctccctggtgaatgaacagtctcaaataactaggaggaaaaagaggaaaaaagatttccagcatctcatttcttctcctttgaaaaaatccagaatctgtgatgagactgcaaatgccacttccacactcaaaaagagaaaaaacagaagatatagtgctttggaggtggacgaggaaccaggcgttacatttgcttctcggggataccgaaactacttccaacaccccaaaaatattccacaaccgcacggtgattgtttccctcccccccatccgagccttccgccgcccgcgtcgctgccactctaacccaccggctctcacgctttcccctccccgccccccttttcccgatgctgagtccgtcggcaagcgctcctgcactcactgcatgcggccgccccatttattaccaggccgcggccctttatcattacccacccctcttttttccgtacccgctttcttttatccccaaaacccgcgctaggtaaattctgctatctggccgtcaacacgctgttttcaccagctcatctagtcgcgcctgaatagtagcgccgctacccgcggggcccgcgtctatttcttttattagtcgccgccgcgcggtgtgcattatatctcaatccttgcgagtcgcgtgaatgcggagcgaatttgtgagncacgcgagtgggccgcgccgcacggggacgcctttcgctncccatcattcccactttacggccgtccggcccagccggtcgcgtattacttgccggtggcc

SEQ ID NO: 5923 - DNA, 659 bp, Homo Sapiens
  misc_feature (102)..(102): n is a, c, g, or t
  misc_feature (222)..(237): n is a, c, g, or t
aagaatcatttgagcccaggagttctacaccagcctgggcaacataacaagacctaatctctacaaagagttttaaatattagtgcatgcctgtagtcctanctactcaggagggtggggcgggaggaccacttgaaaccaggaggtctctgaggctgcagtatgccgtgactgcgctgcatgcactccagcctgactagataaggcaagaccctgacttcnnnnnnnnnnnnnnnngatatttaataatgaaaatacaactactaattataagatacaattaatagtattgtctttagtcagtataattacagtattgtatatataatatacaatataaaatttaagtctaactgaactattgtttctgtttgggtaaaatattctcctctaggaagacactggtactaaaattagaagttaaggagaatttgatgtttaaataactagctggtacacagtgtgaaacccccttgattgttcaccactaaatttctatctggaaggcatgaacacacacttgcaattctaccatctccaaagtcagcatacaacacaattttctctaagaccaaaatgccttttttaggtatcagtaatatagaattcttacaacaaaatggctagagctacgcacaacatagcacttttactttgag

SEQ ID NO: 5924 - DNA, 393 bp, Homo Sapiens
ctgctgcgctagaaaatgacaaaacaattaaactgtggaagagtgactgtaagttccctttgctcctgcccgcgagagactgtcgggaagttgacccggattggcaagaaacagggtgtcttggaggtggtcccccagatctgcgcctgggggtcaggacagggcctgatttgagcctcctctctgaagatgatttggccgagcggaaggtgtggaccaccggaaagttcttaaaagttgctggtgacatttcttgccaattctaacactgtctagggaagagttcctagtctattgtgttcaaacagagtcaacaaaagtttttaattttttattacagaagggtgaagttcaatttaacatgcgttgtgttttttcagtaaacgttctgta

SEQ ID NO: 5925 - DNA, 799 bp, Homo Sapiens
  misc_feature (737)..(737): n is a, c, g, or t
  misc_feature (777)..(777): n is a, c, g, or t
agagcggaggccagggcgggctctaggccgtggaatctggggccttaaagccccttcgtctccccagcacccaactctctgggggcaggtgggcccggtgacagtaaccttcagggagccctgaagaccatggaggactactgaccaacaacctctgaccttcacccctctggatgggggacgaatcactaggcaaaggggaacaatgggaaggagacaaaatggctgcctttacagctgcagcaagatgtggaaacactggttccctaggcacctccattgtcttcccgccttgggagcatgaaataaataaagtgtgaaggggaacatgaggaagactgatccaagtcacttgacctgtcttttgtctagttgtttatctcatcttagcctcccagcaactcaggattggggctgcgacgtctgctttgtctttcatgatactcaaccccaagcagagaaaaatatcttaaaaatcgaagcagattaacccagtccctctgttcagatccacctgctgccctatctgcatttggcagttcctggacatactttgcacctatgttttgtctgagttccacatcttccttgtctccccgcagggatgggaaatgggcagtagtgggagattcaggtataaacggtggctctgtttctctggtgcctgagattcgggaaggcctgtcttgggaagataagtgtcagcttatctgtggactgaacagacaggcacctgntctgttggccccggaactgcgggcatgaaaagcccacctncccaggggaggcctgttagcta

SEQ ID NO: 5926 - DNA, 1203 bp, Homo Sapiens
  misc_feature (189)..(189): n is a, c, g, or t
  misc_feature (265)..(265): n is a, c, g, or t
  misc_feature (346)..(346): n is a, c, g, or t
  misc_feature (418)..(418): n is a, c, g, or t
  misc_feature (1170)..(1170): n is a, c, g, or t
gttttcctggaagtaaagggtttgcgtgtttggctccgaaaggcccttcatcatgggatggtggttttgcaagctcccggaatcatatgagggtaacccaggggacacagcacggagtaagacggtacatatttgccatgtcatttttttctccttgtcgaattatattatgacattctgcaggtaaanactgtaagtggtctgctaccattcgttgttgacattcatgaatcaccttagtatatgaacttggatgtaggtattntcgacatcgaatttcttcatcttttaatctacctagaaccttttccatatactgtgagcagtttgattcttgtaataaatntgaagcttcttgtttgtaatactctcctgtttcagtcagaaagggagactcaaaaatttcctgataaaactntaaggggaattttttcttatactgttcaacatgaacaaaggagttaataaccccatggattactttctggtttgggtcttctccaccacgatcatttttgatttctcggagcagcattcggataaggatggcctgaagtggttcaaccatcaatttcctccacatatccaatgctagctctcctatttccataagtggttcattcatatctacaccaccatagccatactgaaggtccgcttctgttaatttattctttttaataaactgggtgttgagatacctatataagcagtccatatagtctgcacccttgctgtattcttcccagtacctatgatacataacaagtacttgttcttctgactccaaaactctcttatgcaaatgccgaacatgattttccaaaaaaatcttaggttctgtataaagtctttctccaaggggttcaggataggccacacataaagcatagatatctgagaaacggtcattccatgttgctctttcgacgtattccaacatgaccacggcttttattgtcgtcaaaagtttgttccatgtttcatcaaaatctactactcttggtttcaaagacattgtgcaagtgtagtgttgaaatctgtctccgcgaggaaagacagcaaagtccaaggccgccgccgctccccggcgggacaggggcggtagggaggggggaaaggggagaaggacgggccgatcacgggatccgtaaaacaatcgtcctcctnctcctccggctttgcccaacacacaccctccgg

SEQ ID NO: 5927 - DNA, 552 bp, Homo Sapiens
ctgatcctcccccgactctaaccccaagccactttccctcaagtccaaacagatgggctcgggccccctcacccaaactcctacactacaacctcccccagttgatgccctccagtttatcctcctcaagctcccaaagggatttttttgttaatggctttattgagatataatttacatactataaaattcacttgtttgaaatgtacaattcagtgatttgggggggttctaaagtgtagatctgattatatactgcttaaaaccttccatgatgctttattgcccttaagattatacatagaatctcgttcttcctagaatgttttcctgtctaacccatatactgcataattccctgatttttctccacaggttatgcccctgatgaatggggactaaagctcagatgtgtggtcatttgcaacccctgagttcacttttttaagacagcttattgatatatataatgtacataccatacagtcacccacttaaaagtatacaattaaatagcttttagtatattcagagttgtgcagccatcattcg

SEQ ID NO: 5928 - DNA, 963 bp, Homo Sapiens
tcaagttcataggggggcagaagacgttgtggtacactctccatgaggcgctgcttgtcactggtggcatccaggttttctactgcattctcgatggcatccagaccctcatgcttcgactgttccaggtttaactcagcagagaggaaggtgcgtagagcccggttcagacttgcatggtagcctaagtcacaacaatcaataaggtcagataggtcatggatgtagtacttgaagacagatgcattggttgcctccaaggccagcaagtactcattctgggctttgatggccttcagcttattctccgtgtacttggcttggtgcttctccttcatcttctcaatcttgcttcactgagctcctccggacatgtttctcctcaatgcgaacgttggccgtggagtcaggggagcatggggtctgccggtcctcctgctttaccgatttaccaatttgcttctcctcctgcttctccgcctcctttagtttgctctgagcactgatgctgtcggcattgtacatgtgatatgtcttcatgaccgagtagagctcgttcaggaccttcatcaaatcatcttggagctgctggccgacttctttactctttttaaagagtcttcctgagtcctcgctgacttgtacaaatcgaggaatgatattattcaggtagatgtcactcagggtggtatggtccctgctttcccacttcacctggtttaagaggagattccagcagttgactggagagagaacattctgatccttcttgaattgctggtccttggtgctgcgtgtcttggccaggaagtgttctgccagcttctccaggttgcgggagtagtccatctcaatctctgccttctttcggaagaagtcctggaggtcctgcaacagttgcacccgaagctcacactgctggtccaggcatttcatctgctctgtgagctgagcacggatctc

SEQ ID NO: 5929 - DNA, 1018 bp, Homo Sapiens
  misc_feature (708)..(813): n is a, c, g, or t
cctgaagctgaaggtcaagaagggaaatcacaatgaatagaggagaaacaatatgctctaggtagaaaacgcggtctttaactgtttcatttggcttccacttctgagtagaatgtagtatgtaacacacacaaaaggaatgcattatgtctactgcaacctgcattcttgctgcaaaactggaaagaaaaaagaagaaatcatgaaatcatttgtaaagacactggggagctatggaagtaacaaggacaacatgaactaaaattctagagagcaagagcctatcttagctgaactgatgattgctgatcattttcttttcagggatgtgtaatgcttttgggcatgggctgaagactggacttgactcaagcagaaggaaagtgaaaccatcagagtttttggtggtcatgtacaacagattagaagctagaagaaaccaagtgcaaagccagttttccccaaggaacatttgtgaaagtctaagatggtacacaaggaggaaggggctagctcagagaggttgagtgaaatctctcatagtatcatgatgtttaatagataaggtacttctatggagaagggggcctgaaaccaatatgcaactgattttccacgcaaggcctctgccagatcttgaacctgcttggggcaagaggttacagagctaggctcaaaaaatctgaagaacaagtacagtggttcatnnnnnnnnnnnnnnnnnnnnnnnnnnnnnnnnnnnnnnnnnnnnnnnnnnnnnnnnnnnnnnnnnnnnnnnnnnnnnnnnnnnnnnnnnnnnnnnnnnnnnnnnnncaatttatagtgctgtgaaaacagacacctaccaggctctcaatcaaaagtctgtaagagccacattggaggaggtggctggggtcaaaatggcaatcttgtgcagtactgtggtacttaggaaacaaaatcccaactgagggaacccatagcagacatacaaccatctctcccttaagacattgatccttcagcctcagggatc

SEQ ID NO: 5930 - DNA, 591 bp, Homo Sapiens
  misc_feature (549)..(549): n is a, c, g, or t
tgcggccgccgccgcggcggggagcgcgtctccgcgcagctgggacgaggcggaggcgcaggaggaggaggaggccgtgggcgacggcgatggcgacggggacgcggacgcggacggcgaggacgacccggggcactgggacgcggacgctgccgaagccgccaccgccttcggggccagtggcgggggccgcccgcacccccgggcgctggctgccgaggagatccgacagatgctacagggcaagccgctggccgacacgatgcgtcctgacacgctgcaggattacttcgggcagagcaaggccgtgggccaggataccctgctgcgctcgctcctggagaccaacgaaatcccctcgcttatcctgtgggggccgccgggctgcggcaagaccactctggctcacatcatagccagcaacagcaagaaacatagcataaggtttgtgacattatctgcaacaaatgccaagacaaatgatgtgcgagatgtcataaaacaagctcaaaatgaaaagagctttttcaaaaggaaaaccatcctttntattgatgagattcatcggttcaataaatctcagcaggacac

SEQ ID NO: 5931 - DNA, 532 bp, Homo Sapiens
gaaggtcaaggcgatagctaaggatactgtgaaaatggtcagattctggatatattttaagggtagagctgatgtactgacagattggatgaggattatgggaaaagggaaggcattcgggatgactccaggttttgggcccaagcaacaggaagaatggagttgtcatttactgaaatagaaaaatgacataacatatagtaggacagattggtcccacagatatttactgagtacctgctctgtaaagatacaaaagatataacgttgtaaagatagtctccccttcgagatatttacattcttaagacaactataggtaagtaagtttattagtttgccagggctttataacaaagtaccacagaccgagtggcttaaacccagtgatttcttatctctgaattctagaggctggaagtctgggatgaaggtgtcagcagggttggttccttctaagggtggtgagagagaatctgtatcatgcctctcccctggcttttatttttgagggttggctgcaagtcttgga

SEQ ID NO: 5932 - DNA, 553 bp, Homo Sapiens
ctcaacgctttatacttcccttatggcattatatcttgttgagggagagagacagaatcctggactctccaaagtatttaactgaaagtagggcctgctctgacagggcccatgtcccacaaggctgcttggcctcagtgggtgcttggctgtgctggatgatatgttgatctgtattggataaggaccaatgacagcaaagcaaaaatggctttaaagcttggtgttacttttcttaagttgtttaattatagttaagcaatttcaaaaatgctccaaagaaatgtgaaaggaccttttgtcacagcacttcagaaaatacacaacagccccttctgcccccgcacagaaatgctgcagagtatataaaacttgagacatttttgtaggatgcctgacgaggtgtagccttttatcttgtttccggatgcatatttattacgagtactctggttaaatattgaaaagttatatgctgtagtttttagtattttgtctttgtaatttacagaagttattggagaaaataaacttgtttcattttgcaaaaaaa

SEQ ID NO: 5933 - DNA, 451 bp, Homo Sapiens
agaggaccccctgatattctgggattatatatcatgcatgttacaactgcagaaatatgaattaccatatcagtctttaaaaatgccaaattctattgggcccagtagtatactttacattttgtaatttttaaaattcagtgtatttacaggtctctaaatgaatcactttagaatgcttgatttcactcttggtaaatagaatgattacctgtattttatatatgcaactgtttacaaccaaaataagattgatttagaacaaagtacattaccataagtatgtctgtttaaattgtcatgatacaatcatatgatgaaacctatcccaaagctgatgacctgaagaaaaatacgtactagattcagcttcatgagattaaataaatagtcatgataggaaccctatgaataatttctgggattcgggatctcttatgagacttaaaag

SEQ ID NO: 5934 - DNA, 490 bp, Homo Sapiens
caggtagatgaccaaatttaggtggtcaagatataaaggtgacagctagttttaagtgtgaaacttatttcactttcacactgccttcaggccagaagcaaaccaaatttaccaggtttggctggaggagttttgtgactcatcttttactggtttgaattttttcaaaccagtggctgatacctgccttgtacttagtaccttaataccaataacctaatggtacttaggcgagtaccatttgcacaatcactgttttacttatgagcagatacagatatatccaaacccttacctactaggtatcctgctagggttttcaattccaattcttgtattaagttttttcctttcagttttaggtgcgaaagtaatcagtcaatccaatatcccccatctttgtcttgaaacaaaaactgttttaagacgtctacgttgaattattcagagaattaagcaataaaagctcacaccttattgtcaaaaaaaa

SEQ ID NO: 5935 - DNA, 513 bp, Homo Sapiens
ccagaggagttaggatgggccccaggtcatgtagctgggagagtgggagagccaaggtgtgaatcccgcacctggctctggagccctggtctcagccaccgtgctgggcagcccacacctggcatcctctctgttaggagcaggggcctgcccccacgccctctctgacattgctattcttgctaaaatgaagagacagagctgaggggagagctaaaaagaatgaatctggactggcatcagaaacatgctgcttcccaccagcgaagtttgtgcttcactcttgggcccagggcctgcagggtgtgctgtgacctcatctgaagaagcacccacacgggcaggccctgaggggctgcagcagaaccacctcgatgcctctcgagccccacccggcccctaattatgccttccatctgcaccaacaccgatgagaagcttgcacctccccagtcttccctggttttgctcgtagctggctggctggatcccggcatggattgcccttggaca

SEQ ID NO: 5936 - DNA, 632 bp, Homo Sapiens
  misc_feature (217)..(501): n is a, c, g, or t
ctctgaggatcccgtaggtgaaggtcaaagcttaaaagtgagaaggaaaagggatgaatgaatgaacatgatgaggtgagagggaagaagtagagggaaaaggagaacaagaaactcttctctgcgtggcacctaggatgaatggtttctggggacatccctgatggcagttttgtggagaggtgcaaagctttatgtggtaagaaatgagctgtannnnnnnnnnnnnnnnnnnnnnnnnnnnnnnnnnnnnnnnnnnnnnnnnnnnnnnnnnnnnnnnnnnnnnnnnnnnnnnnnnnnnnnnnnnnnnnnnnnnnnnnnnnnnnnnnnnnnnnnnnnnnnnnnnnnnnnnnnnnnnnnnnnnnnnnnnnnnnnnnnnnnnnnnnnnnnnnnnnnnnnnnnnnnnnnnnnnnnnnnnnnnnnnnnnnnnnnnnnnnnnnnnnnnnnnnnnnnnnnnnnnnnnnnnnnnnnnnnnnnnnnnnnnnnnnnnnnnnnnnnnnntatgttttgtaaacctgaagatttgagatcatataagccaaatcgaaacttaacgggcattcacaactttgggttctagagactccatgatcaactaagttgcccggcaatcgaagggtaacgagctcgaa

SEQ ID NO: 5937 - DNA, 493 bp, Homo Sapiens
acgttcacccttacccggccgttttccctgatgcccttacaacgtatttccgatcctggtcttctcacctcaaactttccttttttgtcactacacttacattcaactttccactcaaaaacatcctcccacttcagaggtgttaagttattaagtcagccctaaatgtaaatagttttcatttctcgtaacccccaaaaacctcccttccctgccagcatgctcttggtcttgtcacccagacacatcaaagccattgttttccgtaaaagcgttctgatcacttgggtgacttgtgcacataaacaaccacccaccacatgccaggctgtccagcaccttcctggtgccctgtcaggaggtgaacgcgccagtgaaaaaatgccgaactctactggcaaatgctttgcaacatggtcacatgccctgcacctctctccaagctctttgggtagccttggccaagtcccttccccaaaagggccctcttgca

SEQ ID NO: 5938 - DNA, 901 bp, Homo Sapiens
  misc_feature (248)..(248): n is a, c, g, or t
tgatctagaggatccggatgagtggaaaggtaaaaagtcaaatttggagctcgagctaaactttcataaagcacaagaaatctatgagaaaaatttagatgagaaagctaaggaaattagcaacctaaaccagtgattgaggagtttaagaaaaatgctgacaacaacagcagtgcattcactgcttggtctgaagaaagagaccagcttctctctcaggtgaaggaacttagcatggtaacagaatngagggctcaggtaaagcaactggaaatgaaccttgcagaagcagaaaggcaaagaagacttgattatgaaagccaaactgcccatgacaacctgctcactgaacagatccatagtctcagcatagaagccaaatctaaagatgtgaaaattgaagttttacagaatgaactggatgatgtgcagcttcagttttctgagcagagtaccctgataagaagcctgcaaagccagctgccaaataaggaaagtgaagtgcttgagggggcagaacgtgtaaggcatatctcaagtaaagtggaagaactgtcccaggctctttcacagaaggaacttgaaataacaaaaatggatcagctcttactagagaaaaagagagatgtggaaaccctccaactaaccatcgaggagaaggatcaacaagtgacagaaatcagctttagtatgactgagaaaatggttcagcttaatgaagagaagttttctcttggggttgaaattaagactcttaaagaacagctaaatttattatccagagctgaggaagcaaaaaaagagcaggtggaagaagataatgaagtttcttctggccttatacaaattatgatgagatgagcccagcggactaataagtaagaagacttcagcatgaatg

SEQ ID NO: 5939 - DNA, 714 bp, Homo Sapiens
  misc_feature (619)..(619): n is a, c, g, or t
  misc_feature (636)..(636): n is a, c, g, or t
gccaccacttcatcaaatgtgtctgcactgagagcatcgtccttagtagctaacggcattgctaaagctgagaaaacctttaatactgatgaagagtgatcctgtttgctgttaaggacaactgtcatgaactttcaagagaggctgcagttcaaagggtggcatgtgttcctcttttggctagcaccataactagatgaactgaggaaatagcagaggatcctgaggcacaatcgtcagagagcattagtgaatcaccgtggtaggcaatccagattgacaagtctaccgatgttgacaacaaggcaacagtgcttgtttttgtgtgatatatttttcaggaggatatccatgaaaatatgttacatgtacttctgttgccaaccaacaccacagctgcagaactattcacgtctttgagtgaatacatatcaggaaaactgaactgatcattttgtgttggtatatgcaaggatggagtggctgccatgactggacagctttctggtttcactacttgggtcaaagaggtcatttttgaatgttgagtctatgcagtgtatcatccatagagaaatgctggctagctgcaaaatgtcacctgaacttaacaacgttntgcaggatgtgattaanattatcaaccacgttaaagtacatgcccttaactcacgcctgttcacgcaactctgggaggtgatggatgtagaacac

SEQ ID NO: 5940 - DNA, 329 bp, Homo Sapiens
tcaacatggcagtaggcagagaaaggagtcaaatcagtcacctactaagaaccagcaactcttttgaacttaaaagtcatttttccattcaaactcatgaacctgaaggagatattgcgtagacggcggggacggtggaaagaggctcagaaaggttaagcaactctcctaaggtcacacagctataaaaatggaaaaacaagtttagaaccagtggttatcttaagatgatagcattactgctaatacttattttcctttttatgtttatttgcatttctaacttttcctaggttaaacacattttgctgggaaaattttccagactc

SEQ ID NO: 5941 - DNA, 554 bp, Homo Sapiens
caacctcaggctcagatttaaaaagggcgcatctatacgttcattggaaaagtcgtcgtttctgtgaacccttacaagttgttgaacatctatggaagagacacaattgagcagtataaaggccgtgagctgtatgagagaccgcctcacctttttgctattgcggatgctgcttaacaaggcaatgaagaggcgatcaaaagacacttgtattgtgatatcaggggaaagtggagctggtaaaacggaagccagtaagtacactatgcagtaatattgcggccatcaccaaccccagtcagagagcagaggttgaaagagtgaagaatatgttgcttaagtccaactgtgttttggaagcttttggaaatgccaaaaccaaccgtaatgacaactcaagcaggtttggaaaatacatggatatcaactttgaacttcaagggtgaccctattggtgggcatatcaataactacttactagaaaagtctcgagtgattggtgcaacagccaggagaaagaagcgttcattcttttctatcagctactcaagggg

SEQ ID NO: 5942 - DNA, 494 bp, Homo Sapiens
cactcctggaatccagagatcctcctgcctcggcttccaaagtgctggaactacaggcatgagccaccacacctggcctttcctactttccatgtttaaatattcaagaatcaattgctttttttcatggcagcctgtatgtgttcagtaggcataataccttaacaaatttgaagatactaatacttactttaaagctttcttttgtcttacattagctccactgcttcagtgcctagttctgtattggtttggtctgaagcttctcttagatgctaccgatttcccacaagtgtttagtgattttggttgtgtgttcacattataaatgtgctagtagtatctcagtccatatgaaaatcactgtactccttctgtgaattcacattggtaactagccctataattcaattttacacttatacccagtgcttgtgtagcatgacaataacaatgtaagttcttagaccttcagactcagggtaccgagctcg

SEQ ID NO: 5943 - DNA, 1253 bp, Homo Sapiens
ctggcacagcagcaggcatgttactggtgcccaggatggctggagccgagatgagcatgtaggagttcatttcttcctggaatttctccactgtttcctgaattgctttctggaaagtgctgatggccacccgctggaaaacaggagccaactgaccccggaaatcagctcccacccggctgaaggacagcccaaagtacatgcactggcccagcagagagtccaggtggccgcctatgccccggtaaaggtcggtctccagcacctgcaggaattgtgagaccttctgtagcacccagccatggaagatggcactctcattcacagtgtgctcacccatggcagggggcagcagtgggtcctcgtctgagaagatggcacggtactgggtgatgatatcaaagagatggacacgggaggcctcgatggtttttgtaatatggaaacagggatcatcattaggaatggcagtcaggatggaccggagccaagcatctcgggcctgaagaaacttcaccctcaactcagcctcagtgaagacgtccatgcgccgcaggtagccaatgacacggaggcaggcaggaagctggatgttggtcctcagttgctgaatcagctggctcagcatcagctgcatggactggcgcacttcgttcacgatgccctggatgacagggatggaagagtatttcctctccagtcggcgtacgtaggctgcaagctccagggcctcttcataataactgttccggacacaggtgtccatgagctgaggaatctccagtatttccaaatttctgtgtgccggtttagggtcaggctattcatccggcggttggagctgatctcctcggcttccttcacaaagttcctgcagctctgctggaagctgggcaaacggtcgagcaggcggccgagcgacgcctccacgtcgccaaacaggcggtggatgcgctcggtgcactcggcgccgcggatgaaggtcttgtagttagcgaaggccaagtcgcgcgtctgctgcagcagctgcgcccgctcctccgccaggcgctcgggctcgcgccgcagccgctccagccccgagccgctcaactcccggaggtagcggcccacatcgggccgctcgcgccactgggcctcggggaagcggtcccggaacagcgacgccaggagcccttcatcctccacctcgccgagagccgctgctgtggccgtggctaccgatgggatagtcgccgcgtcgccatcttccc

SEQ ID NO: 5944 - DNA, 538 bp, Homo Sapiens
cccgtagttgaaatgtgtatggctagtgttactacttcataagttcattgtaaaatggctttactgccatcaacatgggtcatctacctagcagttaatgagtattgctgaatcaggtgtccaccttccaatgatgaagcaaggtaaggggtaatgttttgctcttgacacagagaaatttaatagctttatgtactaaaatataatatcttttaaagatagtgaaattcttcagttttttaaatctctagggattttttttcaatgttgtagaagatgcagctgcttaatggtcttgactaggacttttttaaatgaatggtgtctgcaggtagatgatcatgaaaatatctctaacaaagttttactcttctatgaaatgcagaatttctagtacctgcctcctttgtttttgtaataattaaaatacttcttgtataaagagattagttcagcctgttagtaagtctgcagagatgatgctgagttggttgtgatttttagaatagactcctgggttgttttacaaatgtgccat

SEQ ID NO: 5945 - DNA, 856 bp, Homo Sapiens
cctcaatgaggtgagcactccatttaaatgatctttacagatccctgaagttgctgtcctgtcactgtatttaagtgatggatattcaattgaattattctgcataaataattctgttcaacccagaagtatagtagtatgatgggtcagatacagacaactgttcaataaaaatgcagatgtctgaaattattaaaatgtacttaaaagtaacaaactgtatcacacacttaggcttagaagtgttctttcaagttttttcttttaaaaaaagcaaccagtctttgaagatttttgttgaatatagctattttccaagcttcatcttctttttctttggtccattaaggtccatgtttgaagtatcagtaggaatgcttattcctggtatctgtggttctaccagggacattcggatcttctgatgttgaagattagatgagtctaacatgattttcactttaactttatcaaatacatggaacactgtatcttctattttaagtgagggtatctaaaccaaacacattttatcattcttaattgctttcttacatttgaggctttgttctaatcctttacaatttatcttacatagtagaagtttaaatataaaaattagtaagcatctacgtgttcaacataacaaaggccaaaaacctagtagtctcatataaatatgacctacttatgtgcttactttctccttcattaaggtatttctaatatatatgttcattaaattattggtgattaattaatcaccccactaataaataggaaatttttagtctagtagaggaacacaaaggtattttgccgtttattgttcaaatattctctcaggctgtatacc

SEQ ID NO: 5946 - DNA, 513 bp, Homo Sapiens
gtcccaaacttagcatggccaaatgcagaagaaatgtggaaaactttttggaagcgtgccgaaaattaggagtaccagaggaaaagctatgtctcccccaccacatccttgaagaaaaaggcctggtcaaagtgggcattaccattcaagcattactagacatcaccgtaacgaaggctctgttcacatgaaactaccccttctccattgggggctcagactctgctctcatccaggatcctgaactctgctccaggcacctgttcaaccctctctcccacccactgcctgtcacttcactgactccagttacattgaaacaattttcagtctaagggaggattttctacctttcagagctgacctccgactttaagacttgacaggtatttatcttgaaaccagagagggagctggaggaaaaaacacactgagcagcacatcaatgccttttccaccctccttcatcctttccacactcaccgactgccattaccaaaacgccaagcacac

SEQ ID NO: 5947 - DNA, 513 bp, Homo Sapiens
gtcacgttggtatctgggacaactgagggctccagtactcagacaagggggaggttggctgctgcaggtggagctcctgccacgtcggttctgtgagctcgcctcttccttttatctgggagagagacaggtgtattgctttccctcatgccagagaagtccttcttgctggtttgaacagcaccactcagagtcttgcaggctgtatcatataatctccagccttctacactttaggagacgggacaggctgaatggcgtggtgttgaggtgaaggccaagcccagaatccatcaagaaatctaagactaggcgggtgtaagcttcaggtacctgggcctggtctccttcccatgttcacatccctaggataggaatccctttctctcaagctcagatcagcctgtgttttgctctgagagctttactgtgcagagaaaaatcctatgaataaagcatctagtttctacggtaataccggcggtaccagtgtgtgtgggcaggacaagccca

SEQ ID NO: 5948 - DNA, 616 bp, Homo Sapiens
ggtgattcagtgctatttgtaactgtgtcccagtgaccaaattgcactcgactcgatcagctgttcatccatttcgtgttttttcctgtcaaacattaatccagcaaatatatgaggtatttaccaatttattttcttagtattacaaaataattcattagcataaagtacaatagtgaaatatttgagttgttcggaacctcaattaatcctgttttacatttcagacctaaagctggcaatcaggagaagaagcactttgttttaaatgtggagaagataacacttgattccatttcattgtcattagtgtattaaccagcaggagaggtgatgagccatttttcaaatgaaataccttttatttccatataatttttttattttagagttcaatagctgtttctatgattatcctcaatttccatatgttactgaatctgaaaaacatctttaaaattcaaacagttccattttctctcttgtaagtgttaaatgtgataaaagtacatattttaaattgtttccagctcttggatatagcagcaataaaaacactaatttgtgggtatttaagaaaacccggaaaataaactcatactttaaaggaagcagc

SEQ ID NO: 5949 - DNA, 966 bp, Homo Sapiens
ggcaaagaaatcacactgtttcattccacctcaacaaactgaaatacaacagtactgtgaaggaatctcggaatgatatttcacttattctcaatgagtatgctgaattcaacaaggtgatgaagaatagcaaccaattcattttccaagacaaagagctaaatgatgtttctggagaagccactgctcaagagatgtatctgcctttcccaggacggtcagcctcctatgaagacataatcatagacgtgtgcaccaatttgcacgtcaaactaagaagtgttgtgaaagaggcttgtaaaagtaccttcctgttctaccttgtcgaaacagaagacaaatcattctttgtaagaacaaagaaccttctgaggaaaggaggccatacagaaattgaacctcagcacttctgtcaagctttccacagagagaatgatacactaatcatcatcatcagaaatgaagatatatcatcacatttgcatcagattccttctttgctgaagctgaagcatttccccagtgtcatctttgctggagtagacagccctggagatgttcttgatcacacctaccaagaactgtttcgtgcaggaggctttgtgatatcagatgacaagatactagaagctgtaacattagttcaactgaaggaaattatcaaaatcctggaaaaactaaatggaaatggaagatggaagtggttgctccactacagggaaaataaaaagctaaaagaagatgaaagagtggattcaactgcacataagaagaacataatgttgaagtcatttcagagtgcaaataacattgaattgcttcattatcacccgtgtgactctcgatcatcacaaaagcagaaattctgaaatgtttgctaaacctgcaattcagcatattgatgcctggtttcctctcctcctaacatacagcctactatccccgaaatatcagggatcctctaga

SEQ ID NO: 5950 - DNA, 1171 bp, Homo Sapiens
gggggtgaaaatagtgtggggctacgtgtattcataacttcaaatttttgtggcatcagagaaaaaaaagagtatagtccacagcatctctcaacagaacagaaatgctttgttgaacacatctgttgtagaagcccattgccctgcagccagcctgctccaattcgaggattttggattgtacctgacattctgggacccacgatgatctgcatcaccagtacctatgaatgcctcatatggccgttattaagtacagtccatccagcgtctcctcccctgctttgtactcgagaagatgttgaagtggcagagtctcccctccgtgttctggctgaaaccccagattcctttgaaaagcatattagaagcattttgcaacgtagtgttgccaatccagcatttttgaaagcttctgaaaaggacatagcccctcctcctgaagaatgccttcagctcctcagcagagccacccaggtgttcagagagcagtacattctcaaacaggacttggcaaaggaggagattcagcggagggtcaaattattatgtgaccaaaaaaagaaacaactagaagatctcagttattgtcgagaagagaggaaaagtctgcgggaaatggctgagcgtttagctgacaaatatgaggaagctaaagaaaaacaagaggatatcatgaacaggatgaaaaaactacttcacagttttcactctgagctcccagttctctctgatagtgagcgagacatgaagaaagaattacagctgatacctgatcaacttcgacatttgggcaatgccatcaaacaggttactatgaaaaaggattatcaacagcaaaagatggagaaggtgttgagtcttccaaaacccaccattattctcagtgcctaccagcgaaagtgcattcagtccatcctgaaagaggagggtgaacatataagggaaatggtgaagcaaatcaatgatatccgcaatcatgtaaacttctgacaccaccaggagctgactcacacctgaactgaacaccattgaaggcttaaacccatattgtaaaacaggtagaattatctaatttataaaaaggtgttttgatgacctttggtgtggttcatctttttaaatatgttgttttataataattgagtaaatgcttttatttaaaatttgg

SEQ ID NO: 5951 - DNA, 709 bp, Homo Sapiens
agcactacaaacactttttttaatgacatcagatggtacatttatacaaattacaagctacaatatagtgaatacaaaatccatccagaaaacggttagaaaagcatcacttaacagaagtaaatcggattcaagtagctaaagaactcaagccccccattttgatgattatacacggcttgaaatgcagcacatccaaatcctccccctagtcagggcactattcaatactacagcatattcaatgactctagtgatgtaaagattctaacacttttagcatcgacgtcaagagacatctcgtaacaggttcactatgcaaaactcaaatgagaatgtgtgaacgttctttgcaaactgtaaggtgctgtgcagatgttgttagctatggctattattactgttcagtgagattacactgaacgtggggaaaaggaagactactctgtataactgacaaatatgacttacagaacatcttaaaaggaatgcagatattactttcaaatacacatagcaacaacacaggcaaggaaagtgtggccaggagtgatgtcgaggaattcctattttaaggaatatataaaggattaagctattcatagattatgtgtaatatttatcattagattcccaaagtccctgaaaataatttatttttaaggtgaccctttccccctgaaaagggaaaaagaaatcttgtcaggtt

SEQ ID NO: 5952 - DNA, 1163 bp, Homo Sapiens
tcccgggatgggaagtgcccacacccttagtggtggggctgggggctgcgtgtgaggtggcacagcaagagatggagtatgaccacaagcgaatctcaaagttgtcagagcggctgatacagaatataatgaagagccttccagatgtggtgatgaatggggaccctaagcaccattatcccggctgtatcaacctctcctttgcatatgtggaaggggaaagtctgctgatggcactgaaggacgttgccttatcctcagggagtgcctgcacctctgcatccctggagccctcttatgtgcttagagcaattggcactgatgaggatttagcgcactcttctatcaggtttggaattggccgcttcactacagaggaggaagtggactacacagtggagaaatgcattcagcatgtgaagcgtcttcgagaaatgagccctctctgggagatggttcaggatggcattgacctcaagagcatcaagtggacccaacactagaagaatagggccctgactttgtgctggtctggcccctcctgcctcaccaacccgtgcacaaccagacaccttgttacacctagtggatgctctagattggtataagaccagttgacttcagcatcagtccacctccatgacagaaacacaagaaaactgtctttccctagcttcagttccttgggtgtggagcactccccatttcttctcgggtcttaaaagtgttgtggacattttcatccccaagccatagagacatttgctgtcatattgctgctgggcacatctgtgctcttggtgaggagagcaagaggaaccagaagaagtctctttggtcagggaccatgatgctctacatggacatttgagtcttcgtcttctgctgctgctcggctggaccagcttctttaacagcaagcataatccacttcaatgtaatattttctgtagctccaaaggctatctcttcatattgactgcagacagactgaatggacagtttcttagagggcttgtctcctttctacccttgtcctctttcctttcctttgacctaatggagctagaaatatgtctgtgactccaccagttattctaataatttgttttcttgaaaattgttaatttcaagactggagaaataaactcaccttctattta

SEQ ID NO: 5953 - DNA, 1168 bp, Homo Sapiens
  misc_feature (733)..(741): n is a, c, g, or t
  misc_feature (757)..(820): n is a, c, g, or t
  misc_feature (834)..(834): n is a, c, g, or t
  misc_feature (859)..(859): n is a, c, g, or t
  misc_feature (1049)..(1049): n is a, c, g, or t
  misc_feature (1074)..(1086): n is a, c, g, or t
gggaagggagaggagcatgtctgcaactcgagccaagaaagtgaagatggccaccaaatcatgccccgagtgcgaccaacaggttcctgttgcatgtaaatcatgtccttgtggttacatatttattagcagaaaacttttaaatgcaaaacactcagagaaatcaccaccttctacagaaaacaagcatgaggccaagaggaggcgaacagagagagttaggagagagaagataaattctacagtaaataaagatttagaaaacagaaagaggtctcgaagtaacagccattcagatcatatccagacgaggaagaggaagacctaaaagtggcatctgccaaaaaaccatgaggaagaaagagagaaacaggggaaaaggaaattgacatctatgctaacctgtccgatgaaaaaggctttcgtggtttcagtcggccttcggccgaaataaacagagaaattatcccgtccgcaggatttaattgttcccggataccttgttttgggccaaaaatctgggcctggaaaactttcctgggtcagggggataagcaatccaagccaaaaatttcccgcaaaagacccacggtttgcttggggaacccttcctttccagggggcggacccaattcctcccttggaaaccttggggccgtcttgcttaaccgttaagaaacggggggggcccccccattttccgggggacaaatttgcgggggctttctcgccnnnnnnnnncccttcacgcgccccnnnnnnnnnnnnnnnnnnnnnnnnnnnnnnnnnnnnnnnnnnnnnnnnnnnnnnnnnnnnnnnntttttttccgcggntgggagaggtcggaaataagggcanccttcgggggggcctaaaggcggcgtgctgtgggggagtcctcggcgtgtcctcgtcggggcggaagactcttctccccccttttggggggtgttcgacccccagcgggggggcgggctcctttgtcgggtccggaggcccagtgtgtttctgggcgcggcgtatcggggcgggcgcatatcaaagggtntaacggggggcgtgattacgttcgnnnnnnnnnnnnnaagcgctagcgaagagagaacgccctcgcagcacaacaaccaggcgttgggggatcggggtctggtgctcaacaaaggagat

SEQ ID NO: 5954 - DNA, 461 bp, Homo Sapiens
  misc_feature (397)..(409): n is a, c, g, or t
agttagaggtggaacattccttggaccaggtgttgtattgcaggaccccttcccccagcagccaagccccctcttctctccctcccgccctggctcagctcccgcggccccgcccgtcccccctcccaggactggtctgttgtcttttcatctgttcaagaggagattgaaactgaaaacaaaatgagaacaacaaaaaaaattgtatggcagtttttactttttatcgctcgtttttaacttcacaaataaatgataacaaaacctccccgtctgcgggtgctgtctgtctccccccctttccttccctccctgtagttttgaagcggatgtttgttctttatagatgttgtttaaaaagcctgataatggtgattgaaatttacaaactttgtgnnnnnnnnnnnnnaagaaaaatataaaatagttttcttcaggctcaatgtgctttcctaaccgtg

SEQ ID NO: 5955 - DNA, 465 bp, Homo Sapiens
aaagtagatgatgatttcagaggagtaaggcatgccaagcagcatgctcagtggggttttaggctgtcacatgcagctgagaaaaggtatgttcaagtcataagtaggtaattgatagggtatgaactagtcaaaatatgaaccattatgattcaagttagattttcctctggagagacagatctgaatgttcagttctagccaaggtagattttactttcaactttttaatcagtatcactttctgtgcttaactatttggtgttaccttgtctgttttcatttgtctaaaattctgcagagatgactaaaatttgacataatggtgtaaatggattgttaaggtaactttcagttgaagattaaagcaagatgccattttccccatgactttggttttgtttacatttttccctttcagttagtatacactacacgtactgtaataaaatacaataatatgac

SEQ ID NO: 5956 - DNA, 434 bp, Homo Sapiens
cagctggaaatgagctgctgtggtaatcagaagctacaatatgtgacacgactgtgaggctgacctgtaactgggcctcaaggagaccattcatgcaacctggaagggcatcaagactcttggtcagggcctgaaggacggtgagaaaatgtcattggaaactggagaaaaggtctgagagttacttgctgagggactgtgggaaaactatggccacaacatggaaactgaaagggcactgcaccatctcagggatctgcctaaggagacatctgggaagaacatggaaagtgctaccagcctcccctaactgtcactgaataaatatgacaggagagggacatgatctaaagaagaaggttcagttttcaaacagaatttagagaaaatataaagaaataatttcttgtctcaaaaggtcaaagtaaaaaaaa

SEQ ID NO: 5957 - DNA, 1004 bp, Homo Sapiens
ggggacaactgcagccgcacgtgggctcggcgcgatggaggaggagatgcatactgacgccaaaatccgtgctgaaaatggaacagggtccagccctcggggtcctggctgcagcctccggcactttgcctgcgaacagaacctgctgtcgcggccagatggctctgcttccttcctgcaaggtgacacctctgtcctggcgggtgtgtacgggccggccgaggtgaaggtcagcaaagagattttcaacaaggccacactcgaagtgatcctgaggccgaagattgggctgcctggtgttgcagagaagagccgggagcggctgatcaggaacacgtgcgaggcggtggtgctgggcacgttgcacccccgcacctccatcaccgtggtgctgcaggttgtcagcgatgccggctctctcctggcctgttgtctgaatgccgcctgcatggcattggtggatgcaggtgtgcccatgcgggctctcttctgtggggtcgcctgcgccctggactctgatgggaccctcgtgctggatcctacatccaagcaagaaaaggaggcccgggcagtcctgacctttgccctggacagcgtggaacggaagctgctgatgtccagcaccaaggggctctactcagacactgagctccagcagtgcctggctgcggcccaggccgcttcgcaacacgtcttccgtttctaccgggaatcgctgcagaggcgttactccaagagctgaggcaagctggggcaaggggccgctcccattgcctccacccactcaccccctacagcctgaagcaaaccagcagcccagccttgcctctctgacccatgggctccttgagcctgcagctctgtaaccacagggctcctgtggggaggccttggcctgtgacagcccccaggcctgggggcacagatccccccagcaaggataacattcaaaggagctcacatttatggaatggatgaatcaataaattaattcactttaaaaa

SEQ ID NO: 5958 - DNA, 1241 bp, Homo Sapiens
  misc_feature (36)..(36): n is a, c, g, or t
  misc_feature (116)..(116): n is a, c, g, or t
  misc_feature (140)..(140): n is a, c, g, or t
  misc_feature (145)..(145): n is a, c, g, or t
  misc_feature (148)..(152): n is a, c, g, or t
  misc_feature (154)..(155): n is a, c, g, or t
  misc_feature (347)..(674): n is a, c, g, or t
  misc_feature (676)..(682): n is a, c, g, or t
  misc_feature (684)..(694): n is a, c, g, or t
  misc_feature (696)..(696): n is a, c, g, or t
  misc_feature (698)..(700): n is a, c, g, or t
cggagaagatgtgcgtgacgggtgttgttaaagatncttgctatttaggcgagtgcggggtctaggttgggggctccgcgtgtgagtttcctgtgtctttcttgtgtggtgttcgngaggtgcgtggggtgggggtggcngggtnggnnnnngnnaaatagcgcgctagtgtcgcgccgtctccgaggtgggggttttgctttcctgggttgtcgtgttgtgtggtggcggcgcccgcttggcgttgttgtggcgctccggcgggtggggcggcggggcgtgctgtcttgtggtcgtgctttgtggctctgggttgggctggggcttttggcggtcgccgtggcgcnnnnnnnnnnnnnnnnnnnnnnnnnnnnnnnnnnnnnnnnnnnnnnnnnnnnnnnnnnnnnnnnnnnnnnnnnnnnnnnnnnnnnnnnnnnnnnnnnnnnnnnnnnnnnnnnnnnnnnnnnnnnnnnnnnnnnnnnnnnnnnnnnnnnnnnnnnnnnnnnnnnnnnnnnnnnnnnnnnnnnnnnnnnnnnnnnnnnnnnnnnnnnnnnnnnnnnnnnnnnnnnnnnnnnnnnnnnnnnnnnnnnnnnnnnnnnnnnnnnnnnnnnnnnnnnnnnnnnnnnnnnnnnnnnnnnnnnnnnnnnnnnnnnnnnnnnnnnnnnnnnnnnnnngnnnnnnngnnnnnnnnnnncngnnncaacccctccccctcctagctgcagggataaggcctcaatattagggcccacatgcattgtgcatcctatagaaatggatgagtgagtgcatgtcagactaacacgaggtttctcatcggcttcatggcgggtacacttctgcagcaccaattctcttcccttctacactaaacaagacagtacagcaacgtccgggctctcagtcctgaggccaccacttctcagctgcctccacagcaggctgggagctctgcgttctctcccaagtaggtctgatggtcacgatgttctcatcagccccattctaggcgcctatgcaagttccaacagaagttcattcctaagacctggggctaagcaggccacctcaggagctgcaatcacatcacggcccccaaagctctgtcagagttctggcctggtccccctaagtccatggggaccagagaggccaagctcacctcttcaaggccggtgggtgagccactgctcaggccaggatggacctcatacatactccggccacaacctcgtagcaag

SEQ ID NO: 5959 - DNA, 1065 bp, Homo Sapiens
tcctgtcctggggaagcaatgatccagttaatgtcctctgtaactgaaaaaaggtaagaatccaaactccttgtgcaaatacttcctttttcctctaaagttcaccactagaggggagtggggaaaggggtgggggacttagacctctagccttattaggggccttttcaagtagtctaaaattaaaatgtacatttagcatatgcttctcacattcctccagatctcactggttctagtgaaaaattaactgctttggaggtgctgagtccatcattgtaatagttaggacttagatgaagttgtctgtaggtagccccagtgtccctagaggaaggtggtgctctagggccatatgtagcctctgagtgtgggtgcccatccaggagcaagtcagacacaggtcaagaggacaaacagcaaaggcctttgtcactgaaggactcggagtctgcacaagctggccatttctggcaagacagtctttcctcttcagtttctcccttacgtggaagcgatgttagaaggctgtgcttttaaggattgtgggcctttcttgaccatcttttaacatccttgtgtgacttggagttcttctgtgtcttcattcctttgactcttagcatctggtcaatggtgtctgggagtggggtaccgaagctctctgggagaaacaaggtgaggatggctgtcaggatggtcagacttcccatgagaatgtagggcaggaagcggtcgtaggcaccaaggtaaacgaagtagggagacaggatgctgcccaggcgggatgctgtggagctgactcccacacccatgtttctcaccactgtgggatacagctcggctgtgtacacgtagaccatggaaaaggcagccgtgactccaaacttgcccaccatcaccaggactgtagccaaataatacaagtcacagcattatggacatgatggtgaccatccggatattccaggttcgaagcagatccagaatgttgtgggactgctgcttcttggaacttaggtcttgtaactgcaggaacaatcccgggaattccggaccggtcca

SEQ ID NO: 5960 - DNA, 497 bp, Homo Sapiens
gcggccgcgacttccccgacgcggggcgctgagaagcactatgaccaccaaagattatccatcattgtggggctttggaacaacaaaaacattcaaaattcccattgaacatctagatttcaaatacattgaaaaatgttcagatgttaaacatctggaaaaaattctttgcgtgctcagatctggtgaggaaggatattatcctgaacttacagaattttgtgaaaagcatcttcaagccttggcccctgaaagcagagctttgaggaaagataaaccagcagcaacagcagccagttttacagctgaagaatgggaaaaaattgatggtgatataaagagttgggtatcagaaattaaaaaagaagaagataaaatgcactttcatgaaactgagacatttccagcaatgaaagataatttgcctccagttcgtggttcaaacagctgtcttcatgtaggcaaggaaaaatattctaaaagaccaactaaaaaga

SEQ ID NO: 5961 - DNA, 1019 bp, Homo Sapiens
caagcttcggtagtcctctccgctgctgtcgccaggagtcacttcacgagaagccaggtcggaaccgtcggcccttttctggaaaagtaaaagtggatcctgccacgttcggagctccctggcgcctcgcccggctggagctagagaactcgtcctgtggcggcccccggcgtggggcgggacagcggccccctggagggggcagtcccgggagaacctgcggcggccggagcggtaaaaataagtgactaaagaagcagacctgggaatcacctaacatgtcgaggaggagatttgattgccgaagtatttcaggcctactaactacaactcctcaaattccaataaaaatggaaaactttaataatttctatatacttacatctaaagagctagggagaggaaaatttgctgtggttagacaatgtatatcaaaatctactggccaagaatatgctgcaaaatttctaacaaaagagaagcaagaggacaggattgtcgagcagcaaatcttacacgagatagctgtgcttgaattggcaaagtcttgtccccgtgttattaactcttcatgagcgtctactgcacaatacaagtgaaatcacgttgatattggcactatgcttgcaggtggcgcaacactttcagcctgctgtatacctgaagttggctgaaactggtttctgaaccatgatgttatcagcactcattacacaaattacttgaagcgacgttaatcactctacattcagaagtaacattggtacaccttgattctacacgccaccagaattatatttagctggaagccaggcattattatcggctcttcggggggaaccatttatgcactgtggtagacatctgggcaactgtcacgcgcacacaccaagcggcacatggccgttttgaaccctccgcgagcaaaatccttgggtaatccaccccgaagcaatgtcagagtcccctagattccctggacagctattgatcccccttcacgactgtcatccgtactt

SEQ ID NO: 5962 - DNA, 554 bp, Homo Sapiens
ggagcctctgcccgcaggtttctatgctgtttcttagcacagaatccagcctagccttagccgcagtctaggccctggcttggactaggactccttgcttgaccccatctctggttcctgccctggctcctgcaccagccccagctcctgcctacatccaggcagaaagataggcaggggctcttggaagacgttccgtgctgtgacctccgagccctcctggtgggaagacagctggaaaggctgggaggagaagggaggggttgggggttcccaggagccatgcgtggcctgcagagtccattccatcatgatgctgtgcccgctatgggctgtgtccatgaccagaggctggagtgggggtgtgttagagcccctcaccgggacttgctgtgcggatggggcctgggcctccttcctacaggggctcctctgtgggtgaggggccctctggaatggcatcccatgagcttgtggcctctatctgctaccatctgtgttttatctgagtaaagttaccttacttcctggaaacaaaacagaaaagaaagaac

SEQ ID NO: 5963 - DNA, 973 bp, Homo Sapiens
  misc_feature (355)..(355): n is a, c, g, or t
  misc_feature (765)..(765): n is a, c, g, or t
aaggggcttcggccatggtcctggccccacaagatggaaggatccatctgcagaagtcagggccagatgtgtgtgctttatgcgcaacacagtacagttttgcccttcatccagagctggggcatggaggccccaaacagtgattacatctcactgaatggcttggtttctgtctaggcattcactgctggaattccaggcttcaggctgcgagacccggaaggccgccacaggggtctgcttccaaagaacccagttcgcggcattctacaaaggcgcacagcacctgctggctctccaacgaggctggggtacaactagaggcggttgtctcgcattgacccgagtccttctntggggccccttcgttctcgacctgtcaaaatggtctgcgagatgctcctgggagatgcggaagtcctcaaacggctgctggtagcggaattcaaaggagccttcccgggctcggccatgaaacagctggcctgaggcatctgagccccgctcccgcagggacgtaccactgaagggactgaggtcaccattctcctgctggcagggaaaatgtcaatcttgatcagcagggaggccaactccaggtcctcactgtagttgttcttcaaaggcactgctctgtatcctgtcttcaggccttttactgggaaagtagcctgagccaggaaattctggacactaaacatgtcttcctcatacaccacgaagcgcagaaaggcaaattcagggttactgatctggaagtggaangggcttggctggccatacagggttgagtccattgtccaccacaaactctgtcttctgcttggtgctgtcatactcagctccagccacctcaatctccacaaaaggacacacaatgcctcggccattctttggcagatgtcgggcccccagcacctcaatagagatggcacatggctccagcccgcggaggctgctcttgtcaaagggg

SEQ ID NO: 5964 - DNA, 927 bp, Homo Sapiens
gctcttatggaaaatgctgtgcaacccttactcacttctgtgggagatgctatagaggccataatcatcaccatgcatcaagaagacttttctgggtcattatccagctcaggaaaacctgatgttccttgttctctgtacatgaaggagctacaaggtttcattgccagagttatgagtgactattttaaacactttgaatgcttggattttgtctttgacaacactgaggctattgcccaaagagctgttgaactttttatccgccatgccagtctcataagacctcttggtgaaggtgggaaaatgcgacttgctgctgattttgcacagatggagttggctgtgggtccattctgtagacgagtatctgatttaggaaagtcctatcggatgctgagatcattcagacctctgctcttccaggtaagtgaacatgtagccagtagtcctgcattgggggatgtgattccgttcagcatcattattcagtttttgttcacgagagcacccgctgaactgaaatctcctttccagagggcagagtggtcccacacacgcttctctcagtggctggatgaccatccatctgaaaaggacaggctcctcctcatcaggggagccctggaagcttatgttcaatcagtgagaagtagagaaggcaaagaatttgcaccagtttatcccataatggttcagctgcttcaaaaggctatgtctgctcttcagtaatgacatgaaatctttgttcatctccactttgtgctaacccattcatagttggcagttaaacacatactccaaaagactgctactatctactattttaagaatgtaattgattgttcggtatttcctatcgacgtttatttacctctttagcacttatactttagcataaaaaatgttgagttatcaccccctttc

SEQ ID NO: 5965 - DNA, 359 bp, Homo Sapiens
tgagactgaagatcaaaccacagtgggagaggagggtaaagatgtgagcttcaagcgggtaatgggcaagccacacctcccagttcctaggagggaatcgccacggccgacttcagcattctcgtctttactaagacttacccatagagaactacagcaggaaaccgatttcttcattcattctctttaaaaagtatgaatgcccagtattaagcttctatttttatttgaaccaaacatattctttggttaactatgtcatgggttctcactataatcaacaaagcatacttcatatattttatatctaaatgaaaatatgcttaaaattcaactggaaccatggcatttcacatcaa

SEQ ID NO: 5966 - DNA, 412 bp, Homo Sapiens
caagagggctgagcaggaaatggagcccctcatttggctgcaattaccactccacagggggctagggctggggaggggaaaagatacgaagggcaagtaaattaatggatgtggcattcctaaggagaatgggaacagggagttagcctccaataaatcaaacgctccagacccccaaacgcacagatgagcagtgcctcttctgagtttggcctgcaggtatgatacacgccgtgtacatgtgtgcacacatgcacagactgaattttgtgaagtaaattgcaaatccaagagtttggggggacaacaccagaaaaacatttacgtcattcttgattccaaaatattctgctggaaaatgtccaaaatctaataaaatttaagttatatttctctgagagctctaaccgtg

SEQ ID NO: 5967 - DNA, 262 bp, Homo Sapiens
tggcgtctttcaactgcggtttggaacatgtgcccttgcgaatttctatttagagctcatatttgaaattactgttttctgtttaatatagatgccagatatctcctgaatggtagtcacacagacatcttcatcactccttatagagcctacattttaagtcagcccaaactcgaattccatccaaatatgaaaatctatctagctgtttttgtctattatataacagacaaacagaaatgtcccctggatatcgggtacc

SEQ ID NO: 5968 - DNA, 798 bp, Homo Sapiens
gctttatataggacttagggacacaagcaggcttaaagtagagacaggagatacctatgtctaatgcttcagtttatacttcctaggtttttttcattggggtttttgtaactgttttggtatcctaccggtgctttggtagcctactgaaccctgtctttcttcttaaggacattctgagcatgtgagacctgaggactgcaaacagctataagaggctccaaattaatcatatctttccctttgagaatctggccaagctccagcttaacctacttggatgggttgccagctatctggagaaaaagatcttcctcagaagaataggcttgttgttttacagtgttagtgatccattccctttgacgatccctaggtggagatggggcatgaggatcctccaggggaaaagctcactaccactgggcaacaaccctaggtcaggaggttctgtcaagatactttcctggtcccagataggaagataaagtctcaaaaacaaacaccacacgtcaagctcttcattgttcctatctgccaaatcattatacttcctacaagcagtgcagagaactgagtcttcagcaggtcccagaaatttgaacacactgaaggaagtcagccttcccacctgaagatcaacatgcctggcactctagcacttgaggatagctgaatgaatgtgtatttctttgtctctttctttcttgtctttgctctttgttctctatctaaagtgtgtcttacccatttccatgtttctcttgctaatttctttcggttgggcactcgcgtgtg

SEQ ID NO: 5969 - DNA, 459 bp, Homo Sapiens
  misc_feature (376)..(388): n is a, c, g, or t
acaactgcgcgtgatgaaggcttaggttgcttccgcttttggatactgtgaatagtgctgctatgaatgtggctgtacaaatatctccttgagaccctcctttcttttggatatacagcccgaattgaaactgctggatcatgtggtaattccatgtttacttttttgaagaatcattatattgctttccacagcagctgccccattccacattcctatcatcattgcacaagggttccaatttctccacatacctgttagcacttattgtcttgtgtagctcactgcggcctcaaagtcctgggctccagtgattctcttccttagcctctcaagtagatgggactacaggcatgcgccaccacacctgtctagnnnnnnnnnnnnnaactttttgaagacatagggtcccaccatgctgggctcaagctgggcttgaactcctggcctcaagggatc

SEQ ID NO: 5970 - DNA, 374 bp, Homo Sapiens
cggattggcgaccatttcaacactactactgtgcggagagaatgacgcattcatggaggtagagatggctgaagtcacaaagatttatgttaaaaactatttcaggcgaactattgagtcaaaagccagtcattggcttaagcaagaccaacctgacatagtgaacaaattgatatggacatttctaaaagaagaaacaagaaaaaaagattgacttttctttatcttctatgaagggtctgtaatgaaatctctaaataatttttaaaaattgttcatcaacttctttatgttttattagaaaaaaactgttttaatgtgctttatcataaataaatatcctgacaaatggtattgaaatggtcgccaatccg

SEQ ID NO: 5971 - DNA, 397 bp, Homo Sapiens
aacaaatcttcgcaaacaaaggcctttggcagaaggtctcccgtgcttgcagaagcgggttcaccttgacgtttttcctctccagcagatttctccttaaaagcgttaaaacttgagataagttgggaggaattccttccatcgctggagcaggctaaaacctcagagtgagatcattctttccgtctcagtaagtgaaccttgcaaagctcagaaaattttgtctccaactccacgtttctcctcagggcccttcttctgtagacaataacgggaattctatggcagaggaggggagctctctttgacaaaaatgagggtgcaaacgtggaacgaccggtcatctgggcaaaatgaggggccctgtgcctgcaaatcccgaatcccctttggtctc

SEQ ID NO: 5972 - DNA, 521 bp, Homo Sapiens
  misc_feature (22)..(22): n is a, c, g, or t
tgtgagtataaatgcatttgcngtttcatttcaaaaatgttgtggaggaaaagagtacatttaacttgtataagagaatatttgtactcctgtccaggctgcaggacctttcttcgagagctttgcacacttgacttgaaccacattttctgatccctttactttgttttagaagcacactgaaaaatctcgttgtttaaagtacaatttgtaaatatttcaaaggtctaggagtcataacttttgttttcatactgaaaatgatgttgatcagagaaaccaactgttttgcttttcattgctctgtgagaaatttgaggattctgttttgctgttaggtaagctaaactcagaaattgaaaaggaaaagactggataaacacaggattttcagtaagaaaacaaccccagtcttgtcttagaagccacttgttgaggagtctgttgggggaaaaaagaggatatgcttttaaaggtagaacaaccttcttctgtgtaaatcaaaggatgttctaaatgga

SEQ ID NO: 5973 - DNA, 1071 bp, Homo Sapiens
acccccccagtattcccacacctcccggtttccatctgcaatggtggtcacagataccagcagcatcagtacactcaccaacatgtcttcaagtaaacagtgtcctctacaagcctggtgatgcccacacaccacttacttcgtgcgcaacaacaaggaccctgttttccacaccatcaccctctgggcagctgtcatggaaaagcccagtgacctgaccagcacctgcgagaggtccctgcttacctgacggacgtcctgctggcactctcagactaatccactctcaggaggcgcagcccgaagcccagtttcccttctatgcagtattgccacaatgcctctcccacgatgtcaaggactcctgtctgtcctggaggtgggagacaaggaacctccgaagaggaagcaagaaagccgtactgtctatgttgtgatccttcatcgaacaaactgatgcgaaaacttgaatctgttactgaaatgaggagagaaggacatgtgctattgaactgagccaaacacactgtaaatatccagcagactccctcccctgcccccatcccaaatgatcttgagatttcttttaaagaagtaaatttgtccaatggctgtaaactataaactactgtaattaagtgcaatttcccctctgtgtcctctcccctctgccctgtatataatactaaagtgtctattagttttctttgtaaaggtcagagtcaaaatttcaaaagtgatctgtcccctctcccctcatggagaaacatcctaagtgggaagtgaagccccttgtcctctcccgcgggcctggacacttatggggacagcataccttggactgactaccagctaactccagtctcctgacattaagacacacctctggatccctggaggggctgaatgtagtgtgtcagagtaacatgccagcttcctgtgggccaggagctcagccgtgcactccctaagaaaccccagggcagggaaactggctgtttgatagcagaagaaaaagttgcagtctcagaaagccttccattaaaacaatttattttatcactaaaaaaa

SEQ ID NO: 5974 - DNA, 864 bp, Homo Sapiens
tgctggagcgtttgtcaaaggacaaaagccagacacatttcaacatgagggacccactgacagattgtccgtataataaagtatacaagaacctaaaggagttttctcaaaatggagagaatttctgcaaacaggtcacatctgttcttcagcaaagggcaaacctggaaattagctatgccaaaggacttcagaaactggcaagcaagctgagcaaagcattacagaacacgagaaaaagttgtgttagcagtgcctgggcctgggcctcagagggaatgaaatccacagcggacctgcatcaaaaacttggcaaagcaattgaattggaagcaataaaaccgacttatcaagtcctaaatgtacaagagaagaagagaaaatcacttgacaatgaagttgaaaagacagcaaatcttgtcattagcaactggaatcagcaaattaaggccaagaagaaattaatggttagtaccaagaaacatgaagcacttttccagcttgtagaaagctccaagcaatctatgactgagaaggagaagcggaagctcctcaataaactgacaaaatcaactgaaaagttggaaaaggaagatgaaaattactaccaaaaaaacatggcgggttattctaccagactgaaatgggaaaacacactagagaaactgctaccacagcattctggagctggagaacgaagaattccacttttatgcaataaccttaaaccagtacagcccaacatatttttctcttttttggccaaacccctgaaccaccttgcccacccgccagaattccctggggccaatccgccaaggattggaccatttgaaaaaagaatatccaggcctggtaaagggg

SEQ ID NO: 5975 - DNA, 497 bp, Homo Sapiens
cggattggcgaccatttcaataacccccatatttcttcagatatgataaggtcttccagtttattgacgctatcatttttttacagccaccacccctgacatgctcttgcatgtttctttacctagtgcagattccgtgatcaatgatcatctctcacctgcacaaccatcactcacttgtgcccactttcttgctgcaaacatgtataagatgaaggtcaaccggtctccctgttctcatgcctacagaataagggaacatggctgggacaaaaccaacaaccatgaggcatggtcatgtcatttatattcatgaccacatatatcaatctggacctcaatttcacacatgaatttatttagtatgtttgcatttatattttccgagttgaataatttacaccacctcctctccaaatgtttgttatttcggttggaataaatggtgtcagaaatgaaacctgaaaaagaacactattgaaatggtcgccaatccg

SEQ ID NO: 5976 - DNA, 674 bp, Homo Sapiens
  misc_feature (150)..(171): n is a, c, g, or t
  misc_feature (659)..(659): n is a, c, g, or t
tgaggaccccggatggcgacatatcaagatgacatctgactgcatttttctgttggtccgaacttctaaacaaacactcataaagtaagtttaaacaatttggagatgtatgaggaaaaagtcttgttctgttcagttcagactttgttnnnnnnnnnnnnnnnnnnnnnnttgcccattccacatgtccatgatcttccagggattttgttaaagcttatcggagttggataaagggacaaaaaagaagaggcggcaagttctcctatctcttgggagtgtaccgctcaggaaatctggctcatcaaagtccagctaacatacacagcggacacatcaaaggcaaacgggggtgctccgagaatgcagaggggaatagatcggaagggaggtggcactgggcaccaccctctgggtggcacgggcctcatatccctagtggcaatggtcaccaccatgatggctcaaggacttaggaaacatgcacagcatcttcaattcatcttctgccttagggcaggacgggcaaacaaacagtttcataaagaggctggagagagaggggtaggttgcctgtgtcaggctgccaaatcttttgtcttttccctactctggagtcccatgccccagtccgagtattggccgttgaaatgtcgccnatccgaggatcctct

SEQ ID NO: 5977 - DNA, 664 bp, Homo Sapiens
tagaggatccccggattgcgacatttcaagtgactatggcttggccccaaatccaaaatgttcttattctaaatgaggttgtatttgcccactccatttttatgcatgattccctctcagtcttcagctctaaggcatacggaaacaccagtgtacacacaactgagtgacttcagctcaagctggtacatgctctggttggagaggagatagcatttttgactcgggacttgagctgaaaaataataggcatatactcagctgacagatgattgaatctgagtcctctcagtgaagcatagaaataaactggatatcgtaaagacttacaccaggtgatcaaatgatcaatcaatgaggtatttattgaatggccactgtgtgcccaccatcacactttaaaaagttcctttcctcacagagttcgctgtctggctgagacagtaagatataagcatgcgataaaatagagcacagtatggctatctgatactaggctgacgagggtcaggaaagaatgggggaagaagtgctcattgacagagcttagggggataaaactactgtcttcaaatgaggtgaaggcaagcaaagctgttctctgttactctagagaacaaatggatagcaggcaggcatgcttgggctcattgtaaagaacact

SEQ ID NO: 5978 - DNA, 919 bp, Homo Sapiens
  misc_feature (821)..(821): n is a, c, g, or t
  misc_feature (833)..(833): n is a, c, g, or t
  misc_feature (878)..(878): n is a, c, g, or t
ggtctgtagatattcatgattctattcaaccaaggtctgtggataacagaccacaagcaccactggtttctgcgtctgctgttaatgaagaagtcagcaaaattaaatctacagcaaaatttccagaacaaaaattgtttgctgccctgttgattaaatgtgttgtgcagctggaactcatccagactatcgacaacattgtcttcttcccagccacaagtaagaaagaagatgcagaaaacttagctgcagcacagagagatgcggtggactttgatgttcgcgttgatactcaagaccaaggaatgtaccgctttttaacatcacaacaactttttaagctactggactgcttattagagtcacatagatttgcaaaagcgtttaattccaacaacgaacagaggacctgcccttgtggaaagcaggattcaaaggcaaatccaagccccaaccttcttgaagcaggaagaccagcaagcctggcctgtgggctgccgcatttctccttccggatgtacatggatgagagccgcgttagtgcctgggaggaggtccagcagaggcttttgaatgtctgcagtgaagcactaaggtacttcctcactctaacatcagaaagtcatcgagaagcctggactaacttactgcttttgttctaactaaagtctaaagatagtgatataggttaaagtcatgctcatctatacccctctatgtgattatgcattgactgatccgactccgctgtctaaagatttttgcgatcgagtatctttgaatccaacccgacggactcggaaacagcatgtcgcaccggngaacaaacaganacaacatgcgcgcgcccccaaacactcgacattttaggcgcgccnagaagaacgagtgaatgtgtgtcaagccgagcgtctcttgt

SEQ ID NO: 5979 - DNA, 1494 bp, Homo Sapiens
  misc_feature (66)..(66): n is a, c, g, or t
  misc_feature (68)..(68): n is a, c, g, or t
  misc_feature (89)..(89): n is a, c, g, or t
  misc_feature (101)..(101): n is a, c, g, or t
  misc_feature (578)..(601): n is a, c, g, or t
  misc_feature (1141)..(1179): n is a, c, g, or t
agtttccatattttctggaaagttaaaaaagttacaatgtcatttggagaaaatcgtaataaagantnttgtgcatagattgatgctanaaagacatttcnagccattgtggaacatggtgagacatatataaaattcagaaagaaagcaactggatttacagatttattgtgagacacaaattcactgctgcctttacactaagaaatgtatatgttaaccatatatgctgtatttattttgtcgttaagcatactttcagtttactcagaattttcaatttgctataaagatgtatcaattagcatatagaaaaatattactttaagatgacttgtttcctttgaaaatacctgtgtactgagggttatgatttgtgtcaaaaattgacataagtgcttttacaagcaccaaagttgaatgaattttcaacaaaatgtaattaaagtctatgttttcagttatgactcaggttaagaaatgtgttttaggatctacttgctggtttttctttttgatccaaatgtgtgatctgccctgataaataacaagttatagtaccatctcccccgccaatnnnnnnnnnnnnnnnnnnnnnnnncccgtggcactatgtaaataaagtaagcatactttgttgttagcaaatagatgaggcatgcctgggaaatgctctccttggcataaatagcaatcaatcataattagtaaacaggtgtaccaataaaaagaatttacatgataagataacaaggaccaggaaagtgagtttcctgaaggagttctttgttcctcatcaaagaaattgatacctgttagcattcactgccaccatatgttaatggagaaagaactctattggtgtcgtctgagcagccatttaaaaattggaatctaaaggatggttgctgatgtactgtgtggtctggtagaagtggggaaatatgagagatggaggaaaaactagattatgtcttccatggcatatttactcttactctacttcgtaccaaatcaaatgaaacaagccgtcttacaagtcgttattgcctttaaaaatctgttccgtttttttcccaggtacttaaaatacaagtgccagtaagtggttcttatgtgttttggggggaaaattttattnnnnnnnnnnnnnnnnnnnnnnnnnnnnnnnnnnnnnnncaagatgaaccaaggttttttaaaagaaatataggaaacacttcattctttataaaactttctataatgccttatttgaatgttaatcttatgtgctttctaaaaaatgttgtgaaataccaaacttatggattatcactaggttatcaagcatatattagtctttatcagaataaaatgaaatttcataactgtggctattactttgttcttggtccttcacagggcctgctccatcccaccttcctttctgctgcctgatgtctcaatggcttctgaatgactgttctaataaatgatcttaaaacaaaaaaa

SEQ ID NO: 5980 - DNA, 830 bp, Homo Sapiens
gggaagcaaaattcaccctgcatctgcactgagtgacttctctttctttttctgtcattcctcattaggtatagacacgtgtggccgtttacgctgtaggatcctcattcccactggctttgaacattttggggacttacaatgccgccacccgcggacatcgtcaaggtggccatagaatggccgggcgcctaccccaaactcatggaaattgatcagaaaaaaccactgtctgcaataataaaggaagtctgtgatgggtggtctcttgccaaccatgaatattttgcactccagcatgccgatagttcaaacttctatatcacagaaaagaaccgcaatgagataaaaaatggcactatccttcgattaaccaaatctccagctcagaacgcccagcagctccatgaacgaatccagtcctcgagtatggatgccaagctggaagccctgaaggacttggccagcctctcccgggatgtcacgtttgcccaggagtttataaacctggacggtatctctctcctcacgcagatggtggagagcggcactgagcgataccagaaattgcagaagatcatgaagccttgctttggagacatgctgtccttcaccccgaaggccttcggttgagctgatggaccagggcatagtgtccttgggatacatttttcgggggcgttcattaagaagatagcaagttttgtgaaacaagtcagccaatagacatctcgaaacctgcagggggccttggccatttttggaacccaaaggggctccaatacccatgaacttacaaaggggcagaccgcctccgagataaccatgag

SEQ ID NO: 5981 - DNA, 944 bp, Homo Sapiens
  misc_feature (891)..(899): n is a, c, g, or t
tttgaccaaaatgttgctacattttattttcaacttaaaacttcattataaaatttgccaaataaacatgtcaaaaacaaacttaaaaacaaagtgtagctgatatccagaaattgcagcactgtattgataaagggctcttttcattaccagggaaagaatttaatgtccttccttcctccccaaaagcttccttggtgcaatccagtacagaaaacgccaccactttctgatgccaggagaaaagcaaaataaacaaactgcttgcacatattagcactgataaaacaatgacaatttcactaaaagaatgtttaaagactaccgggatgctggagcaaacccaacttcatgacggcattaacataagctaagttacatacacttcaaatgcagtatagaattaacactgcatatctaaatggctcatatataaaatgtgtaattaaaacccaaacatacacactatgtttattacattcccctacattgaaagtactgagaacaatttaactctgaacacaaaagtttagtgaatttgctactgttccattacaggacaattaaaaatgagactatatcaacttcactagaatttaattgctaaagctaccttatgcacatctattaaactaaaagaaacgactttaaccccttcagttgtttttaagacagcactcctttacagggagtcaggtttggtaaatataaaggatacataaaaaatacagtataaactgcataagcttaacagtagcaaaaacactgatgaacttttaaaaagtcaaaaatatataaaaatattagcctgaaatggcaaattttcaaacaccgatctgtgtaaaaatgtttaaatattgatgttactccaaaaatatatacttattctannnnnnnnnctattcgcaacagtttataaaggcaaacaaacacctgcaattgag

SEQ ID NO: 5982 - DNA, 806 bp, Homo Sapiens
ggattaaagaaaatggactttttttattttaatttctcattaaacttctaaaattcttataggtgaggatcatttttccccccaccttaggatggtgaatgttgcaacacaatgacaggtttaagtcagtcaagtttattggacccttgctttgataccattcttgggcacatactccaagattgtattagatttttgtgatgaagagcttccattacttctgaaaactatatttatctgagtgagtccaaggtgcaactcctaaatgaattgtgttgcagagaactcccagtataattcactgaccagtacattttataaccatccaggccttggtttgcaagcaacagaccttaaacatacaggaaactattaaaattggctcgatcagtagtcataggaattggtataagaagagactcatttagagctcagagttttcttcacataatgggggtattaattatttgtgctgttgcgaaattatgtgtcttattcttaaagccatggtaaaaatagggatctgtgaaggaaatttctaaaattggatgtattaggttttgaactctgagattgcacaaatattcaattaacttgaagttgtgtacatagagaagaaaatttggttttagcaaatgacagagccttcaaaaatatttttggaataatgtgaatcaaccgaaaactgggggcaaggcagaggacaggttttctcaggttaagagaaaaacgaaattttaaaaactttaaaaaatactgataaattcggatcaaatttgggggaataaaaaatattagagcaaaaa

SEQ ID NO: 5983 - DNA, 482 bp, Homo Sapiens
  misc_feature (127)..(127): n is a, c, g, or t
tcagccttccggtttatagactgtatttatctagtggattcctgcaggccccatactgagcctggactgaaagtatccactcggaccatctgttatctctctacactgaaaataaaacctctccacnccaccccattcggttcttctgcctgaccttcaaatgcccatgttggccttttacagcagtgccacggcaccaagcgagctgccacatcttcacactctaaagggtttgaactattagttcttgtcattttttaaaaaaaaccattcccaagtgaaattgttatatcgtctgtcttgcgtgtgtcagaactgggtttttgtggaggttcagagcaggcaacaccataagttgctctcagatccttgttctgaagtacattcttggttatctgtacttctgtagctggtgtgatgctgttaattgtatgtaccacacatctccagacgttaataaaggactcaaagaggtttttgta

SEQ ID NO: 5984 - DNA, 779 bp, Homo Sapiens
ggagagtacctggatgctacaggtggaaccctgcacccctatcaaatggagggcctgaattggttgcgcttctcctgggctcagggcactgacaccatcttggctgatgagatgggccttgggaaaactgtacagacagcagtcttcctgtattccctttacaaggagggtcattccaaaggccccttcctagtgagcgcccctctttctaccatcatcaactgggagcgggagtttgaaatgtgggctccagacatgtatgtcgtaacctatgtgggtgacaaggacagccgtgccatcatccgagagaatgagttctcctttgaagacaatgccattcgtggtggcaagaaggcctcccgcatgaagaaagaggcatctgtgaaattccatgtgctgctgacatcctatgaattgatcaccattgacatggctattttgggctctattgattgggcctgcctcatcgtggatgaagcccatcggctgaagaacaatcagtctaagttcctccgggtattgaatggttactcactccagcacaagctgttgctgactgggacaccattacaaaacaatctggaagagttgccccatctgctcaacaatctcacccccgagaggttccacaatttggaaggtataattggaggagtatgctgacattgccaagggagacccagataaaaaactgcatgacatgctgggggccgcacatgtttgcggcgggctcaaaagccgatgtggttcaagaacatgcccctcccaagaacagaacc

SEQ ID NO: 5985 - DNA, 542 bp, Homo Sapiens
caggtaacatcatgtctcgggtaacagaggacacgtccaccgtgagtgattctctgagtgagaatctgagcttatttctgtggtacctggtgcaaggcctatgtctcttggggatcatgctctggggatcagtgtccctcaccatggtcaccctgatcaccctgcctctgcttttccttctgcccaagaaggtgggaaaatggtaccaggtatgttcatggagttggcccgctctacacagaccctcatctcccagacttggcagactcagttcctctcacattgctttcagtccagctttcctggcacccttactgattctccatcttcatggaacaccctgtccctgtggtccatgttcccaggttgctcaacattaacctccatactctctgggtcttcttttctagcttctccccacaatctgtctttaagaatttgatccccaacccgttctgagtcattttcctcttcctcgtatttctttagcatccaaggggcatagctgtgtctctttctcttttctccttttcctctgtctc

SEQ ID NO: 5986 - DNA, 516 bp, Homo Sapiens
cttgaagtgaggcaataacgtaatcaagtaaatttcaacattaatctctaccagactaacagatccactcatcacagaagtataatgaactgttaaactggtaccaggtctggttaagactgcaggcttatcgcacatgcctttaaagaggacacacctgatttttaagctttgacacctgcacattttaagtttccatgtctagtatttgtacaaactaaatgaggtgaaattttcagagtgtaaaatctaacagaaataaagtaaatcaatatgagttatgtgttagactttcattcgttttcctgtcttcatattactaacgtgcttttttgttcaatctctttgctgaacagataaattttatcaacttgtgtggtgtaaaaggatggccattaaagttaactggtccaactctgtcattttacagataaagaaaccaagaccctgaaaagtttaatgaaaaagctgggagccaggcagtttagcattcaggtacctttgaccttcagctca

SEQ ID NO: 5987 - DNA, 514 bp, Homo Sapiens
ttttttttctcccttaaccaaagagccaggttttaatgacaagtcagttgccagcaatggacgtgcaggtaactatcgaagaagtcgcaactacaaatcccaaactggcttctatcaatggaaaagccctttgttgagtcacaagcctgaaacgaggcgttggcacatagtcagtgaggatggtctttgacttaggagggaagtgcctctgagtacatgaggatcacagtcttctcatctcgtaggttttctatttcattggtagcatcttctttatcataatccatccaactgtttacaaagaatggtaaaatttggaactcaggtggcactgcagctttctgccagaaataaaccagtttctataattcagtaatagctgtagaaggccaatatattccagagaaaaatgaaatcaagaattatattgaaaacagagaccattaagtgctctaaatatgtttcattaattattttactcatttttctgaaaatcttgccttatcaataaaaa

SEQ ID NO: 5988 - DNA, 766 bp, Homo Sapiens
  misc_feature (423)..(434): n is a, c, g, or t
ccaatttaaatatcatgcttcatgggataacatcctacaaaagaggagctcatgccaataaccagaattttgatcccttgcaagaatatctaggagcaaccagtgttgtgaatctgtcagtagagggactggtttcatctgtccagaaggggataaagttaaaaaacagaagagaaaaaagcacgatattatgatccaagaaaatggaaatggtctggaatgttttgaaaagagtggtcattgtacagcttgtctcactggaaaatatcctgtagaattagaatggtagctggtagggttggatgtgtgtagtttcaagatagaaagttggtcaagaagttatagtggtcacacctcatctatttactgttactcagttggtacaatgtaaaatgccatgcttatgtttataagttttgagannnnnnnnnnnnctgaaaaggataccaaagtgcgataactgaacatttccaattgcatataatacaacaatatgtggtgttcttttttttacacaagcattggctagcctttttaacctggtcagagaaggcaggtggtcactgacatttcccaagtccatgctttaaagggtttgcaagaagttagggttaaggagaggtgatgccaacaagacaggtgagttaaatataccatttcacacaaagtttgaatagaatacattatacctcataggtgtctagcctctacagttctggctgtagttatgaccttggcttccctgtctaactgtagacaaatcttt

SEQ ID NO: 5989 - DNA, 493 bp, Homo Sapiens
tccttgggtctggctcccgctcggcctcagggggctctgctccgtccttccatgccgcaggcgcagtccagtctctgcgagtccccgggatgcgagcccgactttgagccctcggttaccatgccactgctctccaccagatggcctcagatactagcgacttctttgggagcacgcttactcctcgagaaaggaacccagaggaagggatgggaggccagattgctgctggcgctcagcccagaccgaacctacagactcagcagaggcgacctgtgtgccccggtggcgttctctggcttcctgggttgggagggggggttactccctccccgcatcccccccatgaggtcgtctagttttgtcccaggttgggtggggactgtggtttttttccctcagactgtaagccttgggggaggggggcgtgcatataggtacataggcactgcgtcggcaccaaagagctaaataaaaggattgttgaatttta

SEQ ID NO: 5990 - DNA, 834 bp, Homo Sapiens
  misc_feature (523)..(523): n is a, c, g, or t
  misc_feature (596)..(596): n is a, c, g, or t
acactgtagcattgagactgcttgattcaagtctggtgctttgccagatgtattaatttccataaatgctttgtgagtttggttaaaatgaagattcacttgggaaaacactgcagctttagtctgtgttactatcttgttatgagtatgtaaaagtaaaatgcatgtgaatttatcatatttgcactatgaaggtatttggttaaaatacaaagacttttaagattttaaggccctttcttccaacagcttttatagttagcagccattctttattttctggatagccaggttttatcacgcttctattcaggatgctcctattccttctaaaaattacggtctgactagtgagcaaagtcttgaatttattcaaaagtcctaaataccttctctaggtaagacacttggtagatgagagacggaaggcattgtcaagaaccattttcatgagaggtggtgtgcaaaaaggtagaataaaagagttctttcaacaaagatttactgtgctattctgtactanacccctgtaggtttttggggtacagggttaaacatgatagaggctctgcccgtcttggactttaatagcttanagaagagagcaaatgagctgacagggggttataatgggaattacgggctgcgggtttagggaattggagaaaacccccaagggagaggaattccgggggtaacggtaacggctttcctgggacaaaatggagattttagacccacgaaactctctaaaaagtaaccccacaaagaagggaggggaaacaagggggaccgaccgtggccggggcacccaaataaaacccgggctggtgc

SEQ ID NO: 5991 - DNA, 836 bp, Homo Sapiens
  misc_feature (750)..(750): n is a, c, g, or t
aaaaaggggtgcattattattaaaggaggcagcttgtttttttctggtacaatgtgaaccaaggttcagttttcagcaagccttcagaatccacagtcccatggatggtttctgcatttctggccgggtctcagggaaaggacccgggcaggtagggaaaaaccatgaactacaaacactctctgaatacgtccattttccctgagcttccttgagcttcttgcagagggcctcgctgccatgaggatctggcttcacatctctgagagatgctgggggaggggaggtggaatggctctggcttctccaacccacgcgacttgtgtgtcttttccctttctcagccaagacgatgaagcagtcctgatgcgcagggtgcaggggcctcggccagtccccgcacaccttccaagtccaaagaagttcctggcctcctgcttggtaggagaggaggaaccttgggctgaatctgacatcatcccttgccagttacaagctttgctttctaaggccacctgggaacactcccgggttaccaaacctgagcatcgtgggcaccacggaagagcttaatcttttcctctcctgctcagacacccttaagcccactgttgcaagtggcagctgaggggttcagaggatagcaccatgatgactgacagctcgaggccccacttcttgcaggaggtgacccacctgtttccggttagccatacatctgcttgaactgaaagcattcgttgcagtagncgttgcagcttgcattgccaaaatgatcacaggcgggggcccggcaacgctgcttgggggggtcttcgggggcaggctcaccccag

SEQ ID NO: 5992 - DNA, 543 bp, Homo Sapiens
  misc_feature (71)..(71): n is a, c, g, or t
  misc_feature (74)..(101): n is a, c, g, or t
  misc_feature (118)..(118): n is a, c, g, or t
  misc_feature (168)..(184): n is a, c, g, or t
aagaaaaagcacagaagcgtgagacgcaccattcctggaaccacagtccacctgctcattctcgtagcttnttnnnnnnnnnnnnnnnnnnnnnnnnnnnngagctgcaaatctaganaactttttagagaaaaactatttaaaactgtcagatcctgaccagcaagnnnnnnnnnnnnnnnnnttccaagtgactccgtgccttgagtgtgtctgcgtgtttacacccgtccctctgctggccgcccccgtgcgagcggcacccctgccctgccctccacagaattgggttccaagggctgttccagacaactgccaacgtcactgagggccctgccccagcggccctggccccaggctctattaacctaaaatgtagctccctagcgctaacctaggaaccgccgctgcctgctggggggccacgcccctcatgcccttgtcccaggcccggggccttcagcgttgaacacttccttgcttttttcacatgttttatggaattgttcacctggtttgaaataataaaatgtagaaagaaaa

SEQ ID NO: 5993 - DNA, 492 bp, Homo Sapiens
cacatgtgccaccccctaccttccgggtcccagcaattcccatggctttggttggggtgagtgctggatgacctaggcgttgggtcctagccatgcaggagagacctggagggttggcaaagccaagtctggggctgtcaggcctgggtgccccttcacagggacggggaattgtagactgagtagcagaagggagccctcaggcacaaggatcatgaattacaaattgcaaattacataaaggaaaaatcagagcccaaaggtgggcctgcaattattaatgtaatgttcttaagttctctttctgctttcgtttctgcctgctttaagtctgctgttacttttctacagagataaaatccactgtttgcatccaaccatttctttttattgtttgtgtaaaccaatgaatttgtattactatctcatggctggagttctgaagtaaaaccatacttttgcttgagtgtgtatgtgtgtatatgtgcacat

SEQ ID NO: 5994 - DNA, 171 bp, Homo Sapiens
gctgatgctggagggccttcagcaacagggaatggaggtgccaaagaggaagtcgggcagagtcagccactgatctggaccccctcagcctcggccagagggtagatctcaatggcttccaccagggcgtagcgcctccacagcagatctccatgtacggccagcgccatt

SEQ ID NO: 5995 - DNA, 954 bp, Homo Sapiens
gcggccgcggctgggaccccagctccggccccggccccggctgcgagctgcgctgccgtcccggcgcctctttagcaggggagctgcacagcagctgccatgttgctacaaactgcatcctgggaggcatgtccctctcaggccgtttaaagagaaacactccgaggctcgtcggaggctgccggaacccagacagctccatctacagccggtaggagcgaacagtgtcgagcgagccgcccggcggcgacggacacgccctgagcccgggccagcccgtcgtggagcccgggccgaaccgccggggcctcccaccctccaggaccctccggcctctcacctggggtcctcgcctgcccaggcaccctcgggcgaggccgggaggcgcgcgggcggaggcgcagtcggagcgcgcagcccaggcgacgtgccggggtctggaggcggcttgattggctccgacagccttcctcccgccgatcccctgcgcctctcacacccagaacccggggtcgttccctttcaaaacctgcgctcacaaagggatctaagaaacccgtcacaccagagaaagcccggagttcatgtgaccagctcagtgcagcccgggttccagggacgcgggctgtgcttccaaggggagccagggggttgggtgcttttgtgaaatgcccgagtgttgttttcgacatgaaaggaccgaattcctagaatcagaccctgctggggctggaagtggccagacgggtcatttaggaggaaactgaggccaagtgggcagcgacttgtttaccctcagtcacagtatgaatgaatgctctttgtaaccatgagaagtcccaaaagaaatgcaggagcttagagttgaggactccccttcctggacaggtccacttaaacatgtattaattgaatacctacgaggtggcgagaactggggatgaattgaaaagg

SEQ ID NO: 5996 - DNA, 784 bp, Homo Sapiens
gggctccctccccgtcaggtctcatgtccccaagccgcctgcctggaagccgcgaacgggactgggaaaatggcagcaatgcctcctccccagcgtcagtgcccgagtacacaggtccacggctgtacaaagaacccagcgccaagtccaacaagttcatcatccacaatgccctatcacactgctgcctggcgggcaaggtgaacgaaccgcagaagaatcgcattctggaggaaattgagaaaagcaaggccaaccacttcctgatcctctttcgcgactcgagctgccagttccgggcgctctacacgctgtcgggggagacagaggagctgtcgcggctggcagggtatgggccccggaccgtcacgcccgccatggtggaaggcatctacaagtacaactcggaccgcaagcgcttcacccagatccccgccaagaccatgtccatgagcgtcgatgccttcaccatccagggacacctctggcagggcaagaaacccaccactcccaagaagggcggcggcacccccaaatagccccacccgggcggtccacgggccgggccctgtgtgctgcggccgccatcccctggaggacagtcagtcggtattcctgggtcctgtctgtccccaaccgtgtctgggtggggctggagtctccaccctctgactttgagtccagtcctgctgtgggggctgagctgggaggttcagggactcagggctcagctcagtccccttgtctgtcctcccccacttcttgaataaaataatttaaagtg

SEQ ID NO: 5997 - DNA, 475 bp, Homo Sapiens
tacccggctgatgcacgtgcactccagcagaacttcctggccatggcggcccagctgcccatgagcattcggatcaacagccaagcctccgaaagccgccaggactctgctgtgaacctgacgggcaccaacggcagcaacagcatcagcatgtcggtggagatcaacggcatcatgtacacaggtaggacccctgaggccacgccctgcctggacctcgcctctcccgccgccgtgaactcaggaccctgagttgcgcctggtcccacctgcttgaacctaggtgtgcgggcgagcagggcacggccaggggctttgcaggacaaacagtcaagactgatggagaggataccatcgttcacccggtaccacgctcagcccagagggggtcgtccacagatacatattcagtgtgacgttggatggttcacattcctagttttttgtttaatgagacggagtcttgcacagacat

SEQ ID NO: 5998 - DNA, 560 bp, Homo Sapiens
gccccgtgtgtcttggcgcccggcttcctctccaattaggggcaagatcaatctcacagctcagagactctcccactccggcatccgcagcagggcccccgggggaggtgggggtgcggcggggtgcagtggcgcgggcaggggtacacatttgcgggaggggccttgacttcttcggcctcaactccctgctctcagcctcatctcccctggggggcagccccttttgacacacttgcccacactcagacctcaatctgggggacctgacctcacagggtcaccaggccccaggggcaacgtcctggcctggttctggggaggaccgatcctcaagcatctccaggagactggcaggggtggggtgggccccccaggagaagcccacagaggcagccggggaggcgtgtggggaggaagctggcctgtcccttccttgatcttgggatgcattttgtccgcttgtcctttgatttggaaatgcacaaagtgatcatttattccaaacagtgagttcgtggaagtggcagtcctcacgctgtcgggacccagccccaccc

SEQ ID NO: 5999 - DNA, 672 bp, Homo Sapiens
caacgatggtcctcagctatgatagctttcattttcgttccactttgtgatccactgttttttttcaaggttatcaatatacttttcatctttgatctctcgctcttctttccggatccttacagcatggtatcggggaacactgtcatcgtacctagagcgtttaaagaatccacactagagaagagggaaagagaaagagaaacaaattaatctcacaaagaagcaaatacactaaatgggaatgtctaagctttctgttcagctatgtctacctctggactaaggggaaaaagacatggttttcttttaagaaagaaccaagaggctgaaatgaaagaagagccagtggggatcaacggaagagaacagctgtaaaactggaagaaaagtccattttcatcttctctttacattttataacaaatgtaggctaactctttactaacaatttaagagtttatgaaaacagtgcttccatatttaaaaataatcacaatatgatatgtaaaatatctgattatcagattagattaagaataatttttaaatggcataaaacaaagattatttcatgcccctttccactaatagggaagtgagctgaggacatcgttggggtacgagctcgaatcgtatcagagtgggggggacaaagcaaagagaggagaa

SEQ ID NO: 6000 - DNA, 1152 bp, Homo Sapiens
  misc_feature (852)..(864): n is a, c, g, or t
tcgcgaacgtgttactcgtggatgacatggctgacacttgcggcagcatctggcatgctgcggacgaagcttgctgtcagactgtatccaccaagagtgtatgcgttatccttacccatgggatcttctctggaccagctaatttcagaataaataatgccgcgctttgaggctgtggtcgtcacaaacacaactccgcaagaggacaaaatgaaacactgcaccaagattcaggtcattgaacatttccatgatcttggccgaagcaatccgaagaacacacaatggggaatccgtgtcctacctgttcagccatgtcccgctataaatccagaatgggaagtgtccagcaagcctactctgacttctgacttgtttttgttttctggatttttagctgtaggtattcagcaatgataggttaatcactggcaaaagcatcagatctttgtatatgctaagatttattgtttccccttctaaagctcaagatcatttctttccagtttttggggaaatggtggtggttatttggtctttaagtgaactgtctaaaaggagaaacgtttttgtcattttgacttttaacaggaacaggtgatctcttcctttgttctttcagtacttggaggcgacaactttcaagtatataatttcattgtggaagtcatagtttatatatttcgaggttgccaaaggtgacttcagattaaagccttctgtgtaaatatatactgagtaatgcctatggacatttgggtaaaaccctgtatagaattaattatccttttacttgggagtgaaccgttggaaaatttataattataataccatggattttgaatgttcctnnnnnnnnnnnnnttttggataactcagttttcagataaaaccctcttggttactggggcttaatttggacccaatttttattttagccttaatatgggacactggccccatttttggggggggatacctttagaaccttttcagaaccagggggaatttccgggatcaatttttttaaaaggaaccccctttctaaaaacattaaactggccactttaccctggaaaaggctgccatcccaaaaaatttcccaaattttttaattgaggccaaatcccccaaggggccttaaaagccaac

SEQ ID NO: 6001 - DNA, 413 bp, Homo Sapiens
gaaccagccagagaaatgctgtccctccttcctggggaagtggtgggcaacagaggcgccaaggctctccctgcccactgcccacataatctctgggactctgcgggttgccctctgccccaaggctactgccagggactcaggtgtggctgggctttccagagcctccctcaaccctcccctcacaggctgaagtccagtacttcgtttgggggaaccacacccagagccaggagcctgacttgctcagggcctagggaatgggaccaagagtgatccagcttcttctccagagctgcaccctgcacaaatccaccctctccctacgctttgccctggacactttcagaacacatcacacagcctgtcaagcttgaaaggctgatgctcgttctttagcagacatagcaaga

SEQ ID NO: 6002 - DNA, 545 bp, Homo Sapiens
aagacatagttctggtgattcgtagaaattggccgttggtgacaaagttcctgcttatataaggttaacttccatcaaatctaccacactaagagttgaccagtcaattctcacaggtggaatctgtctcggtcatcaagcacactgatcccgtccctgacccacgagctgtccaaccaagataaaaagaacatgctgttttctggtacaaacattgctgctgggaaagctatgggagtggtggtagcaactggagttaacaccgaaattggcaagatccgggatgaaatggtggcaacagaacaggagagaacaccccttcagcaaaaactagatgaatttgcggaacagctttccaaagtcatctcccttatttgcattgcagtctggatcataaatattgggcacttcaatgacccggttcatggagggtcctggatcagaggtgctatttactactttaaaattgcagtgggcctggctgtagcagccattcctgaaggtctgcctgcagtcatcaccacctgcctggctcttggaactcg

SEQ ID NO: 6003 - DNA, 594 bp, Homo Sapiens
tcgtctttacgtttaaatgtatatcatgtgtctaaagttgctttaagttaccataaattgaaacttcggaatctttggatgtattagctgatgttttgatgtatttttccaatgccagaataatttttaagtgcttcgagaaaggaaggcatttgatggagaggggaggaaaataacccaacccagttatctatccatataagatacacctgtacacacacaattatgcaatacacaacatctctctgtaaaagtacccttttcagacaaagaaaggaaggtaacttgctcatcaattttgtttttcttgtcaaattcaatccaatctgaaagtggcattaggtaaataataatattcttccttttctcttcctgtagggtgctggagatctagaagacccatggtagccttaaaaaccttctaaaatgcttttgattctgaaaattgggggaaaaaacttttaatcacaattttcttcaatacaaggggaaaatattcttgcggattcccaacgttttgtgatatgagcagaaaatcattagcatttcccatcatttgtacatatttgtgttttctgacagttgccacttgta

SEQ ID NO: 6004 - DNA, 820 bp, Homo Sapiens
  misc_feature (333)..(333): n is a, c, g, or t
  misc_feature (558)..(558): n is a, c, g, or t
  misc_feature (710)..(710): n is a, c, g, or t
gggctcgagaacctgggaaaggactgggtggctgaaagatggctggaaagcgcatttagccaaccgagcctgcgcatggaacctgcggcgctgcacagctgcatagagatgtggagcacctccctttaccgtagaaagtaggcgagccagctcgaggcactatactgaggaagcgctgcggcctacttccgccgtttttcttaacatcaaagaaacttccggtagtggggtgtcttgcattccaccgtgtcggtgccccagaatgagacgcaagctgatctgcagatcccgcagggtgccttctgctcttttcggggcaggttggccggtagngggagaaggccgccattggaacgcggcctttatgtcgggttctctcaagagtctaagatcgcaccctcaccagcggagggaaggagcccactcccagccacaccgctttgttttctttcgcttagccttgttgcgccgttctctaagccactcatgtccttagatcagattgaggggcccgcaggatttaagcctttaatccacagcacattccaagcacctacnccggtggtaggccctaacaaggaacacaggcaagtgacacgctgcctgggcctgaaaggtccgctcagaccctttacatgaagttaataaatgttaaagcttcagggcccctcgcttgtatggcctcctgggagaataaatagttgctgaanttggggagaggggaaaccagctttgaattaggaagcaaacctatgtaaccatttctaataaattaccccgaagaaatctaaggaagaactgaaatctccagtcctccagc

SEQ ID NO: 6005 - DNA, 562 bp, Homo Sapiens
gggtccatgaggtgtggactgctgtcatcccagagactgaggctgtaagacgcattgtggagagggatggcctcagtgaaaccccggctcaaagccggctgcagagccagatgagcgggcagcagcttgtggaacagagccacgtggtgctcagcaccttgtgggagccgcatatcacccaacgccaggtggagaaagcctgggccctcttgcagaagcgcattcccaagactcatcaggccctcgactgaaaagttctcagtggggccagactggctcctggagctgacaagcgaccccgtggtgaggagaaatgggggccttgatgctcaccctggttcaggcccagaggtccaagctatactgtgcaggacatggccaggcctggtggacacaggaagcctacccaacacgctggtatttggccaacactgaggatgtggttcatgggggagcagtcccctccccactcttgcccatgggtgactcttacccacagctgactagggccagcgcaaatactggaacctgtaacagaattaaaggtgaatgttctgagaaa

SEQ ID NO: 6006 - DNA, 1121 bp, Homo Sapiens
  misc_feature (353)..(416): n is a, c, g, or t
gggggagtgtgcgtggcctgagccgtgcgggtgactgcttcagggcttctccgcgactggaccgggcgccgctcgaaagcacgccctccattcgcactgcttgttgggctcatcatgaagcgcttgggctccgtgcagcggaaaatgccgtgtgtgtttgtgacggaggtgaaagaggagccttcctccaaaagggagcatcagccatttaaagttttggcaactgaaactgtaagtcacaaggcattagatgcagatatatacagtgcaattccaacagaaaaagtggatggaacatgttgttatgttactacctataaagatcagccatacctttgggctcgactagatannnnnnnnnnnnnnnnnnnnnnnnnnnnnnnnnnnnnnnnnnnnnnnnnnnnnnnnnnnnnnnnagaatttttttggaacgttgaggaggacttcaaaccagctccggagtgctggataccagcaaaggagacagaacaaataaatgggaacccagtgcctgatgaaaatggacacattcctggttgggtaccagtagagaaaaacaacaaacagtattgctggcattcctctgtagttaattatgaatttgaaattgccctggtactaaaacatcatcctgatgattctggacttctggaaattagtgcagtgccactttcagatctcttagaacaaacactggaactcataggaacaaatatcaatggaaacccatatgggttagggagcaagaaacatccattacatcttcttataccacatggagcatttcaaataagaaatctaccttcattgaagcacaatgatctcctgtcctggtttgaagattgcaaagagggtaaaattgaaggaatagtgtggcattgcagtgatggctgtttaataaaggtccatcgccatcatcttggcttatgctggccaattccagatacttacatgaattcaagaccagttattatcaacatgaacctgaacaaatgtgactctgcctttgatattaagtgtttgtttaatcattttttaaaaatagataatcagaaatttgttagactcaaagatataatatttgatgtataaaatgcaaataaaattagtttatcattaaa

SEQ ID NO: 6007 - DNA, 1177 bp, Homo Sapiens
  misc_feature (505)..(566): n is a, c, g, or t
  misc_feature (1091)..(1091): n is a, c, g, or t
  misc_feature (1132)..(1132): n is a, c, g, or t
gggcttttcccgggcgctgattcctgagtgctgagcgcgaacccgaggagatgaaccctttaactaaggtgaagctgatcaacgagctgaatgaacgagaggtccagcttggggtggccgataaggtgtcctggcactccgagtacaaggacagcgcctggatcttcctgggagggcttccttatgaactgactgaaggggacatcatctgtgtgttctcacaatatggggagattgttaacattaatctcgtgcgggacaagaaaactgggaaatccaaaggattctgtttcctctgctatgaagaccagaggagcacaattctggccgtcgacaattttaatgggatcaagatcaaaggaagaactatccgagtggatcatgtgtctaactatcgggctcctaaggactcagaagaaatagatgatgtgaccagacaactccaggagaagggctgtggggctcgtaccccctcaccaagtttgtctgagagctctgaagatgnnnnnnnnnnnnnnnnnnnnnnnnnnnnnnnnnnnnnnnnnnnnnnnnnnnnnnnnnnnnnngagaaagccgaccgggaggtacaggcagagcaaccatcctcttcgtcacccagacgcaagacagtaaaggaaaaggatgacactggccctaagaagcacagcagcaagaactcagagagagctcagaagtcagagcccagggaggggcagaagctccccaaatccaggacggcctactctggtggagcagaggacctagagagggagctgaagaaggagaaacccaagcacgagcacaagtcctcaagcaggagggaggcaagagaagaaaagaccaggattagggacagagggcggagctcagatgcacattctagctggtataatgggcgttctgaagggcgtagttatagaagtagaagtaggagccgagataaatcccataggcataaaagggcccgacgctcccgggagcgggagtcttcgaatcccagtgaccgttggcgtcactgaagacttcagctgcacagtagatttggaaataattatgtttttttaatgcagtcaaattcagttggggtgggntactattttttgtatctaaaactttctgggggctgggattncttttaatccccttggactattttagaggtcatttggggaagggg

SEQ ID NO: 6008 - DNA, 1195 bp, Homo Sapiens
  misc_feature (163)..(163): n is a, c, g, or t
  misc_feature (341)..(426): n is a, c, g, or t
  misc_feature (1022)..(1022): n is a, c, g, or t
  misc_feature (1025)..(1025): n is a, c, g, or t
  misc_feature (1061)..(1061): n is a, c, g, or t
  misc_feature (1064)..(1064): n is a, c, g, or t
  misc_feature (1084)..(1084): n is a, c, g, or t
  misc_feature (1125)..(1125): n is a, c, g, or t
caacagaaacgtggcgatttcgagtgttaaggggctgatgtacgtattacagggttacagtatagtacgcggagagacgagtaagcgtggtagggtgagaaggttaaggtgcagggggtaacggtggttagctgtagtggatgaagcgtcagttagaagcganatggtgactggggggagtgaagtgggagtatctggtacgacagagaggcgtgggtgataggggtggtggcggttgcggcgtgaaatcggtgggggtatgaaagcatggaagtgtgcaatgggtggggacaagatagggagatataaagggtgagagagagatgcgtcgaggttttgtnnnnnnnnnnnnnnnnnnnnnnnnnnnnnnnnnnnnnnnnnnnnnnnnnnnnnnnnnnnnnnnnnnnnnnnnnnnnnnnnnnnnnnaatagagaagaaaggagggcgcaagtcgcggtggaggggaacagggcgaggggaggaagattttcaggagagacaagataagtgaaagaattttgggggcgtgggtgaaagcttctcgaatagtggtactaatggggtgtgaattagagagtgtgggggagtagagagctcggtgaggcgcacacagaagggccttctcaagtccagaaaggttgaacagcaagatgcagtatggagacacgttgtccgccacaacttgatcaagggagtgaaacttcccctccttatcagcctttatgaggtagtggagaagcagaaatagaggatccacaggtgtggcaaaatggagaagacctcctgattgaactgattgatttataaaccaagaatggtgtttttccttgaaaacttttacttcaaacagcttgctgtagacacatattgaacaagtaaatggctccttcttcctgaacaggggttaaccaagttttacaaacattagcccatttttcatcttctttgaagcatcttttaaatattctgaaaccaggaacacgtgctgccgggcgccaaccccgtccccgcagtccaccgcncangcatgccgcccgcctcttccggggcgcgcagctcangcncgcgggcctcagtctcccangcccgccgaaaatggcgggagaagggtctgttccgggttgncggcgcgctgagggaccgcagcgcccgggaggaggcccagggaccgaatttcgtttcgtttccgagacca

SEQ ID NO: 6009 - DNA, 581 bp, Homo Sapiens
  misc_feature (253)..(316): n is a, c, g, or t
cagtattcttggttaatatttaatttcaactatttatgagatgtatcttttgctctctcttgctctcttatttgtaccggtttttgtatataaaattcatgtttccaatctctctctccctgatcggtgacagtcactagcttatcttgaacagatatttaattttgctaacactcagctctgccctccccgatcccctggctccccagcacacattcctttgaaataaggtttcaatatacatctacatacnnnnnnnnnnnnnnnnnnnnnnnnnnnnnnnnnnnnnnnnnnnnnnnnnnnnnnnnnnnnnnnntgattctgataaaatagacattgctattctgttttttatatgtaaaaacaaaacaagaaaaaatagagaattctacatactaaatctctctccttttttaattttaatatttgttatcatttatttattggtgctactgtttatccgtaataattgtggggaaaagatattaacatcacgtctttgtctctagtgcagtttttcgagatattccgtagtacatatttatttttaaacaacgacaaagaaatacagatatatctta

SEQ ID NO: 6010 - DNA, 1794 bp, Homo Sapiens
  misc_feature (1116)..(1246): n is a, c, g, or t
  misc_feature (1250)..(1255): n is a, c, g, or t
  misc_feature (1257)..(1257): n is a, c, g, or t
  misc_feature (1259)..(1261): n is a, c, g, or t
  misc_feature (1263)..(1263): n is a, c, g, or t
  misc_feature (1265)..(1265): n is a, c, g, or t
  misc_feature (1270)..(1270): n is a, c, g, or t
  misc_feature (1272)..(1273): n is a, c, g, or t
  misc_feature (1275)..(1285): n is a, c, g, or t
  misc_feature (1292)..(1308): n is a, c, g, or t
  misc_feature (1333)..(1333): n is a, c, g, or t
  misc_feature (1336)..(1336): n is a, c, g, or t
  misc_feature (1346)..(1458): n is a, c, g, or t
  misc_feature (1464)..(1464): n is a, c, g, or t
  misc_feature (1720)..(1720): n is a, c, g, or t
ccaaaagaacacacaagcataggtgaatatagaacagtgtgtaaaaaaagcaggctggtaccggtccggattcccgggatttgtcgaccacgcgttccgcctcacctcctctaaggttgggcaggatgaccctgaagtgagcacagcctagggctgagctggggacctggtaccctcctggctcttgatacccccctctgtcttgtgaaggcagggggaaggtggggtcctggagcagaccaccccgcctgccctcatggcccctctgacctgcactggggagcccgtctcagtgttgagccttttccctctttggctcccctgtaccttttgaggagccccagctacccttcttctccagctgggctctgcaattcccctctgctgctgtccctcccccttgtcctttccccttcagtaccctctcagctccaggtggctctgaggtgcctgtcccaccacccagcgccagctcaatggactggaaggggaagggacacacaagaagaagggcaccctagttctacctcaggcagctcaagcagcgaccgcccactcctctagctgtgggggtgagggtccatgtggttggcacaggccccccttgagtggggttatctctgtgttaggggcatatgatgggggagtacgatcttctaggagggagacactggcccctcaaatcgtccagcgaccttcctcatccaccccatccctccccagttcattgcactttgattagcagcggaacaaggagtcagacattttaagatggtggcagtagaggctatggacagggcatgccacgtgggctcatatggggctgggagtagttgtctttcctggcactaacgttgagcccctggaggcactgaagtgcttagtgtacttggagtattggggtctgaccccaaacaccttccagctcctgtaacatactggcctggactgttttctctcggctccccatgtgtcctggttcccgtttctccacctagactgtaaacctctcgagggcagggaccacaccctgtactgttctgtgtctttcacagctcctcccacaatgctgaatatacagcaggtgctcaataaatgattcttagtgactttaannnnnnnnnnnnnnnnnnnnnnnnnnnnnnnnnnnnnnnnnnnnnnnnnnnnnnnnnnnnnnnnnnnnnnnnnnnnnnnnnnnnnnnnnnnnnnnnnnnnnnnnnnnnnnnnnnnnnnnnnnnnnnnnnnncccnnnnnnanannnananaaaanannannnnnnnnnnnacccaannnnnnnnnnnnnnnnnaaaaccacccccacacaacacccantanccccccaccnnnnnnnnnnnnnnnnnnnnnnnnnnnnnnnnnnnnnnnnnnnnnnnnnnnnnnnnnnnnnnnnnnnnnnnnnnnnnnnnnnnnnnnnnnnnnnnnnnnnnnnnnnnnnnnnntattanaaaccattccccttttctcccttcccccacttcctaaaaacccctttcctccaaacccaaaaattctctttttccccctacacaaaacaccacaccccccaccccctttaaataacccaactcttttccccaacaccctccttttccccattcctttttacccctccctttacatcacttccctttacttaaccccctaaataattagtgtggagccctcccatataaagagtggacctccggtccgcctccggcntcagctcccacaacaacacaagatccgggtcggctggcccccacctcggataccccctaacatccgcggggcgg

SEQ ID NO: 6011 - DNA, 1037 bp, Homo Sapiens
gctcatgcgtggtgccatgaaggaaagaaaccttggcctggtctcgagaagcttcccatgcttcaggaagttagtaagggtggggtggcttgcaggattggcctgtttccagggcctcccacactcattggccagattgtgaactttgtcaggcttgtccctccctgataccaagtatgtcgagaaccgatggccccaccctcctggcctggtgctgggccggaggtggctatggaggattttggcatgcgtggcctgtcgccacctggacagcgtgacctcaggggttgtccactttacctttatggtgaggcctgtcggatggctaagtccttgaaaccctagaacttgtgacgtagaatatgtgctgtctgtgagaccgtgttcccaggagcactgactgcagttgagagagacccattttgctctcccttaccgccccccgccccgggtgctttctgcacaaagcctagagcctggcactcaagcccaccggtggcagctcctagtgactggacatgcctggaagacccctcagccttctgtttgcagaacgttcatttcaggagcttctccttcccacagacatcttacacttgctcgacactgccacctgcagaagcctggcgggctctggtcaccatgtgtctatctgaaggttgcactggccagcatgggcctgtcccaagcgagaggggagacacagtggactgaaaggactggttgaaagtggccaatctctatcagcttaatttggcagagaaaatttgtaacaactctgagcacatgctgggtgaagtcacagctcaaggaaagataaagctgggcggaaggaggtgtgcgtggcttctggggtgggacccagaggggaggctctgggacaggggctggggttcagtgccagggccctgaggaagaaatggggactgatctcaaaattccagaattccctgtacatctgttcacgtgcttgtgtccaggtgtgacttgtaaactgtctagtgtttgcattaaataaaatggcaccgagcagaaaa

SEQ ID NO: 6012 - DNA, 1165 bp, Homo Sapiens
gggacttccggggcagtaggaacgccgagtcggctgccgtggctgtgctgagggtggcggccggatagggacccagaactccatttgacagatgaggaaacggcgaggcagacagctgatgttctaatcatgtcagataaagatgatattgagactccactgctaactgaagcagcccccatccttgaagatggaaactgtgagccagccaagaattctgagtctgttgaccaaggtgccaaaccagagagtaaatcagaacctgtagtttccactcggaaaagaccagagaccaaaccttccagtgaccttgagacttcaaaagttctccctattcaggataatgtttccaaagatgtaccccagaccagatggggttattgggggagctggggcaagtccatactctcctcagcctcggctacagtagctacagtaggacaaggcatttcaaatgtcatcgagaaggcagagacttcccttggaatccctagtcccagtgaaatttcaactgaagtcaagtatgtagcaggagagacaaatgccaaagagaatgaaaactcctccccagtggctggggcatttggtgtattctctaccatctctactgctgttcagagcacaggaaagagtgttataagtgggggtttggatgccttagaattcattggaaaaaagacaatggatgtgatagcagaaggggatcctggatttaaaagaaccaagggtctgatgaaccgaaatgctacactatctcaggttttacgagaggcgaaggagaaagaagagatacggacctccaatgaggttaccgtggaaacagacaagaaaactcattatgggctactctttgatgaatttcaaggcctttcacatctagaagctctggagatgctttcccaagaaagtgaaataaaggtgaaatctatccttaattctctgagtggagaagaattagagactctaaaagttgaattagagcaactcaaagaaacattttctctagcagaattttgtgaagaagaggaagaagagaaaaaaggggatgaagattttaccaaggacataacagagctgttttcccagctgcacgtttcctccaaaccagagaaacttgccagggcaagaaaaaccgcccaagaatggatcaggaagtctctgacca

SEQ ID NO: 6013 - DNA, 277 bp, Homo Sapiens
gcggccgccggctcccctgaggaaacagcaaataatttgggcctcagaggcacagactcttgggttccttatgacctggtgcctgacggagaaagaagtgcgccgcctttttactgtctggaaaatgggttgcaggcggaacagaaaggctgcggcgaataggagcggaccagaccctggtgtaggggtcttctggatgctttagagacttcgtgccttcccggttcccattccctgctcctttggacgagaagggaactagtatttatttaacttt

SEQ ID NO: 6014 - DNA, 468 bp, Homo Sapiens
ttttatttgttgtttgttttccatgaggttatcggaccatgggctgagctcaggcactttctgtaggagactgttatttctgtaaagatggttatttacctcctccaccccatcacggtggccctgagggctgacccggaggccagtggagctgcctggtgtccacgggggagggccaaggcctgctgagctgattctccagctgctgccccagcctttccgccttgcacagcacagaggtggtcaccccagggacagccaggcacctgctcctcttgcccttcctgggggaagggagctgccttctgtccctgtaactgctttccttatggcccagcccggccactcagacttgtttgaagctgcactggcagcttttttgtctcctttgggtattcacaacagccagggacttgattttgatgtattttaaaccacattaaataaagagtctgttgccttaaaaaa

SEQ ID NO: 6015 - DNA, 1457 bp, Homo Sapiens
gggaaattgcaggatttggtgaataggaccccatggaagaaatgttgtttctctggggatggggaatacatcgtggcaggttctgcccggcagcatgccctgtacatctgggagaagagcattggcaacctggtgaagattctccatgggacgagaggagaactcctcttggatgtagcttggcatcctgttcgacccatcatagcatccatttccagtggagtggtatctatctgggcacagaatcaagtagaaaactggagtgcatttgcaccagacttcaaagaattggatgaaaatgtagaatacgaagaaagggaatcagagtttgatattgaagatgaagataagagtgagcctgagcagacaggggctgatgctgcagaagatgaggaagtggatgtcaccagcgtggaccctattgctgccttctgtagcagtgatgaagagctggaagattcaaaggctctattgtatttacccattgcccctgaggtagaagacccagaagaaaatccttacggccccccaccggatgcagtccaaacctcccttgatggatgaaagggctagttcagagaagaagaggcagttctcagcagatgggtcccagccacctaagaagaaaccccaaacacccaatataggaacttcagggagtaccaaatgatgaagtccatccactactgggtgtgaaagggggatggcaaatccaagaagaaacaagcagggccgccctaaaggattcaaaaggtaaagagaaagattctccatttaaaccgaaactctacaaagggggacagagggtttaccttctggaaggatcagcgaagggtaaagtgcaggcggaactcagccagcccttgacagcaggaggagcaatctcagaactgttatgaagaccttcgaagttcttcattctttctcactttgccatcatgtggcctctggacactgtggtcagtcatttgaaaattgactttaatttaaaacaaaggcctgtgcctcccacccaggaggtgggagggtgaattttatgtttaaatgaagaagtgaattatggaagaagagtatacgaccttcccttccctttcaagcataagtccaaatagactctcaggaatgaagatttgtgaagacatcagataggaattttgactcatttaaactttgatgcttagttatgttgctggagaaaagatacttatgttttgctcatctaacttcattgtaccccagcgtcattttgacatgtcatttcctatctcccatttgccttcggtcctcaatgcatgtctttgagtgacttcttatctgaaattttgctactgggatcctaggaaagcttttgttggatactctcattttaaacttctcctctccccagatacctcctatatttccatattgtgtgcaaaggaaggggcaaaaagaaagtgccttgaagaatttcaatc

SEQ ID NO: 6016 - DNA, 563 bp, Homo Sapiens
gtacctgtggctgaatcccctaaactcacgtctctgtgacttctttgaccctattgctgaccatatccacagcgtggagatgaagcagggccgtactttgctgcactgtgctgctggtgtgagccgctcagctgccctgtgcctcgcctacctcatgaagtaccacgccatgtccctgctggacgcccacacgtggaccaagtcatgccggcccatcatccgacccaacagcggcttttgggagcagctcatccactatgagttccaattgtttggcaagaacactgtgcacatggtcagttccccagtgggaatgatccctgacatctatgagaaggaagtccgtttgatgattccactgtgagccatcccacgagcccctgcattggagtcagaggtacagatctattgttgatcttacaccaagatccaaacttgaacattctacttttgttgatacagaaaaaaacagatgatgccttttatgagcacaaaaaagagttgctgtagcttttaactttataatccattttttttcagattaaactaattgtgagatggtg

SEQ ID NO: 6017 - DNA, 676 bp, Homo Sapiens
aacaggctgatgctgagaatgatgattttctttcctgcagataaaactattagaaagggtcttagatagtggcaggtaggctttggagcaggcgccgagacatgtctgagcatgaggacgagctacagcagctcctggggtggggctgcctgcgggatggcgggagaggatgccctggagaaccgtcctcccagtgtggaaggcccttttccctgaggagtgggcattctgggccagccggcgatggcttcgtgccgccacgtgggccagccccagctgctccgtgtttcctggcgtaggcaatttactgtgctgctgagtgtgaggtcatctccggagcgttttcagcagcccctggctctgcggcgtctcttccgggctgtgggcatgcagggaagtggctctgaggcagtctgcgctgtggccctgcctctgcccaggcgagaggccgtgggctctggacaagccgaccttcaggctggggtagcagcctcgtacaagcaccgggaagacctccaggctgatcccttgagcagcagtcagcacagaaggagaagtgagtttgccaaggatatggggcaggaggctccctctgctgaccccctgtagtctggagccagcccgggtactgtcctggggtgcagggcaggtgaacaaagctgctgcggtgactgtc

SEQ ID NO: 6018 - DNA, 451 bp, Homo Sapiens
  misc_feature (70)..(70): n is a, c, g, or t
gtccccagccccacgcacgaccccaagcccgcggaggcaccgatgcccgcagagcccgcaccccccggcncctgcctccccaggcggtgcccctgagccccccgcagcggcccgagctggcggaagccccacggcggtgaggtccatcctgaccaaggagcggcggccagagggcgggtacaaggctgtctggtttggcgaggacatcgggacggaggcaaacgtggtcgttctcaacgcgcccaccctggacgtggatggcgccagtgactccggcagcggcgatgagggcgagggcgcggggaggggtgggggtccctacgatgcgcccggtggtgatgactcctacatctaagtggcccctccaccctctcccccagccgcacgggcactggaggtctcgctcccccagcctccgacccgaggcagaataaaacaaggctcccgaaaa

SEQ ID NO: 6019 - DNA, 557 bp, Homo Sapiens
tgtgcatcctttcactaaaatgaatatcaaaatgggattgaggcatcttttggttcgagtgttgctttgcaaagaaacattgtccagctgctgctttcttccttcagatatgacatttcagcctggcctctacagtaccatgaaacctaaattacttacttctctccagcttaatcctaggtggaggaattctagctgtggtttgtgaatgtacacaggtcagagaggtttagcaccttttgggaggaggaggtcagaatgcggtggtgaaacctctcccactgtgaccaacaaaccctcatacttaaaaagaagcatgcacctctggcttaaggatctggatgctactggaatttttgtctgtttcaattgtattcattagctttgaagaggagagagatggtggtggttaacttttttgttgcattctttcctgccacagaaaagctttcaggaacttggtgctgaagacttctcaagccagtctcatggaagcacatttagttctcagatgtgttcacgctcagcatcagcctggggatgctctagagcgctac

SEQ ID NO: 6020 - DNA, 435 bp, Homo Sapiens
  misc_feature (287)..(313): n is a, c, g, or t
ttcaaattttatactgatagggctttactgtttgtggctcattttaaaactggtgtcttctcttcatgagacacattaattggtaaaactcaaattgagttttcaaagatgtgatagtattaaagtgcaccaatatttgactcaaatttgcttgctttattttgttaggagtaaacagaaagtagcctgtgtttagtcccaaagatagcagtgattttgaataaaggagttttgtgtgcctggatatatgaatttctgtaaataacttctgttggttaaacatgttnnnnnnnnnnnnnnnnnnnnnnnnnnnttctgtctctatattcaggacgttcagatgtcttttattagtggaaacctgtgttttatctattctgcagcttacatttcatagggtagttcatacatgcatttccaaggggagtgggtcat

SEQ ID NO: 6021 - DNA, 570 bp, Homo Sapiens
agctgaaaggctgatgctgtcggggcaatagccctgcaaccagccggacttactgtctaaaagtattaaccgtaatttcaaagacaaaccacaccccttccttttcccctaatggcctcagagatttgtaatgtactttggaaaattaacttctaaggcagagtggaagccaacctcaagtcctgccacttggactctgtgtcttctcttcgaggaagcagcattgtgcacccagcaggggcagatgctgaggcttgccttaacatctcagcagctacaaaatgaaatccactgatacagaaccccttgctgtgagcagtgaggagagagagctgtaaacagacacaaattgagatttttgcacttccaaaaaatacgaggtgaacattagtgctaaacagagagaatgttctaggaagggagaaatctgagaagagaaaagtaagatgagagagaagaaacatgatttttctaatgtacttgtttgagatcaacactttaagactactgataaaactaaatttcgtggggatagacagtgagcagtgagcatcagcctgtaatggaccg

SEQ ID NO: 6022 - DNA, 2690 bp, Homo Sapiens
  misc_feature (2214)..(2267): n is a, c, g, or t
  misc_feature (2482)..(2494): n is a, c, g, or t
cggcggtggcggcggcgaactgctgcggtgaaggaggaggaggagccgagcgggcgctggcaccgaggcctgaccatggacgaggaatacgatgtgatcgtgctggggaccggtctcaccgaatgcatcctgtcgggcatcatgtctgtgaacgggaagaaggtgctgcacatggaccggaacccctactacgggggcgagagctcctccatcacacccctggaggagctgtataagcgttttcagttgctggaggggccccctgagtcgatgggccgaggccgagactggaatgttgacctgattcccaaattcctcatggctaacgggcagctggtaaagatgctactgtatacagaggtgactcgctacctggacttcaaggtggtggagggcagctttgtctacaaggggggcaagatctacaaagtgccgtccactgagactgaggccttggcttccaatctgatgggcatgtttgagaaacggcgcttccgcaagttcctggtgtttgtggcaaacttcgatgagaatgaccccaagacctttgagggcgttgacccccagactaccagcatgcgtgacgtctaccggaagtttgatctgggccaggatgtcatcgatttcactggccatgccctggcgctctaccgcactgatgactacctggaccagccctgccttgagaccgtcaaccgcatcaagttgtacagtgagtccctggcccggtatggcaagagcccatatttatacccgctctacggcttgggcgagctgccccagggttttgcaagattgagtgccatctatggggggacatatatgctgaacaaacctgtggatgacatcatcatggagaacggcaaggtggtgggcgtgaagtctgagggagaggtggcccgctgcaagcagctgatctgtgaccccagctacatcccggaccgtgtgcggaaggctggccaggttatccgcatcatctgtatccttagccaccccatcaagaacaccaacgacgccaactcctgccaaataatcatcccccagaaccaggtcaacaggaagtcagacatctacgtgtgcatgatctcctatgcacacaacgtggcggcccagggcaagtacatagctattgccagcactactgtggagaccacggaccctgaaaaggaggtggagccggctctggagctgttggagcccattgaccagaagtttgtggctatcagtgacttgtatgagcccattgatgatggttgtgagagccaggtgttctgttcctgctcctacgatgccaccacacactttgagacaacctgcaacgacatcaaagacatctacaaacgcatggctggcacggccttggactttgagaacatgaagcgcaaacagaacgacgtctgttggagaagctgagcagtgattgtggccgcccccagcccctgctgccccagcctgtgtctgttctcctcgagggctccagcatcctctgcttcccccaccacgttcccatcacccacctcattgatccactgaccaaatccttaaccctagcgatggcttgggagatggggggttggatagcatcctctttcttggcccttccttatcctaggaaaagagggttcctctccttgtgtgtgtctcttccccccacccctaattcttctgctctgtttgggaagacgtggaggaaaaggtgacttctgcccccaccgctcttacccccactgtagtggcctttggagatgcccccacctcccccccaccaactctcgcgtgttggagagaaggggccctcccagcacaaagttgcattcctcccccctaatttattctaatttattaactttgacccaccctttctgagcctgcagccttcccgtgtggcctgagggctgtcgagtgagctgccccagcccctcccagcccttgcccagcctgggggagtggggaaggcttgggcatggccccgttggaggttgatttgctgttttgtttcttgtctttgtgttctgtggtacttgctgagagaaaagaaaagtgagccaagcagaaggaggtgggaaaacggacccaaaccccagtgtgccctgccccatgcctttcctttagtggtgggaaacccttatcttgcaaagtgaatgtgtccccttccccaccctctagtgtatttcacagaaaacaaaacctcccaataaaacggttgaaacctgnnnnnnnnnnnnnnnnnnnnnnnnnnnnnnnnnnnnnnnnnnnnnnnnnnnnnnggggggggggggccaaaagagtatctcccccaagggggagcgccaaagtataagcagtacaccaaggtttttgtggacaaagggggcgcccaaaaaagggagaggcgaatattaaagagaaaaggacgcggaccgggagttatacaaagcggagaaggggagaaaacacggtggacagggggagggacccagggagagagggcccccataaaccnnnnnnnnnnnnncacacatattgtggggaagagatcaatccaggtaagagaggtattaaagaaggcattgaggaggagaattatgagagactgtaacaggtgtgaatatgtggttgtgtaaccacgaggtggtaaattatagaggtctgagtagaaaaaggtgctggcacaacgggggagtattgttataagagaatttttatcccgg

SEQ ID NO: 6023 - DNA, 685 bp, Homo Sapiens
ggtgctctagaggatcgctgtaacggctgatgcttctgagaaagtcttttcctagtatttaacagaacccaagtgaacagaggagaaatgagattgccagaaagtgattaactttggccgttgcaatctgctcaaacctaacaccaaactgaaaacataaatactgaccactcctatgttcggacccaagcaagttagctaaaccaaaccaactcctctgctttgtccctcaggtggaaaagagaggtagtttagaactctctgcataggggtgggaattaatcaaaaacctcagaggctgaaattcctaatacctttcctttatcgtggttatagtcagctcatttccattccactatttcccataatgcttctgagagccactaacttgattgataaagatcctgcctctgctgagtgtacctgacagtagtctaagatgagagagtttagggactactctgttttagcaagagatattttgggggtcttttggttttaactattgtcaggagattgggctaaagagaagacgacgagagtaaggaaataaagggaattgcctctggctagagagtagttaggtgttaatacctggtagagatgtaagggatatgacctccctttctttatgtgctcactgaggatctgaggggaccctgttaggagagcataaatcatgatg

SEQ ID NO: 6024 - DNA, 1077 bp, Homo Sapiens
  misc_feature (537)..(593): n is a, c, g, or t
  misc_feature (636)..(651): n is a, c, g, or t
  misc_feature (762)..(772): n is a, c, g, or t
agcctttggtaagtcacttcagatacttttcctcctttttacaaagagagggctggcttagttatttgccaaagccccttccaggcctgaattccacaagtacgatttactgtagtgtcttatcactctttcatgtcacaatagcgtggagcattagagaaaagcctagacttttagttgatagccagttgaaatatcattgatagaattttagttttaggaaaaattggtttgatttctagctttattactattaggtatgtgagcttgggcaaatcgcttaatctttgagtctagttttctctcaaaatgagaacattaggctaaatgatttccgagtttccagctagtcctagagttctatatttctacatagttgaattattttatcatgctgttgctggggaatatgactaacccttttgaagctactaattttatgtcgagctttaaagtccataattgttatcttcagaaaatattatttgacctacagtatgtccaaatcaatttaataaaatcgctttataacagggnnnnnnnnnnnnnnnnnnnnnnnnnnnnnnnnnnnnnnnnnnnnnnnnnnnnnnnnncgaaccgacacgaccccataaggttaagaaaaaacttttgcgnnnnnnnnnnnnnnnnaaaaattttttaaaacctttctttgggcgcggggccccaaaaggaaaagagaaggggacaaaccttttcccaagaaaacccgggcaaaaaatagggttggaattcccaccnnnnnnnnnnncccccggcggggaaaccaaggggttttagaaaaaatccaaaaggggttcctggggggctattatggggattctttaaacggggaacccaacgagacccttatatttaaatttaaccccccgccccgtgaaattttatggaaaaaatgggtgggaaatcacataaaccttttccgcccccacagggaaacccccttccccaaaccggtcttgggataaccctaatttcctcgccggggtttccaccacccttggcccctctgggggataaaatatattccccccacggggggaaaacgcggggggg

SEQ ID NO: 6025 - DNA, 386 bp, Homo Sapiens
  misc_feature (251)..(251): n is a, c, g, or t
  misc_feature (354)..(354): n is a, c, g, or t
  misc_feature (360)..(360): n is a, c, g, or t
caatattgatgtcacttgaagacaagtctctgaatgttcgagccaaagcagcctggtccctgggcaagcctgacagaccactctgattgtcaacatggaaacaccagacccaagtttccaggaagagttctctggtctcctgctcttgaaaatgttacccgatcagctatagaagcatccaaggataaagacaaggtaaaaagcaatgcagtcccgggcccttggaaatttgcttcattatctgcaacccntctcatatagaaaaaacccacatttgcagaaattcatttgagggagtctatccagggccctgaattttctactgttctaacagaagcttgccatgaaagtccngatggnatgcttgttatgcaattggggaaaag

SEQ ID NO: 6026 - DNA, 825 bp, Homo Sapiens
ggaacagtgccaatgcccatacccatgcccatgcctatgccatctgcaaatacgcctttctcatatccactgccaaagggaccatcagataacaatgaactgccaatggggacttatcaagcctttcccaatattcatccaccacagataccagcaactcccccatcgtacgaatctgtagatcacattaatgctgataagaatatctcttctgcacagattgttggtcctggacccaagccagaagcctctgcaaagcttccttccagacctgcagataactatgacaactttgtcctaccagagttgccatctgtgccagacacactaccaactgcatctgctggtgccagcacctcagcatctgaagacattgactttgatgatctttcccggaggtttgaagagctgaaaaagaaaacataggtctcttaaaccaggcaactttcacgttttgggagttgagactgagcaatttctccttgtaacaaagaatctccatgaaattctgtttcatctgttaaccgtcactcagcacaacactccctctgggctctcttcctgctcctccagattctgctgctttccagttctctgttgatcctgagactaacaattggagactgaggccagagcaactggctcctggcagctgtgcttgtccgtttcctgtcagagtgatcccaggtttcctcctggcccgtcccatggtccctccatcaggagtgtgagaggatgggggaagcactgtgggaagaccaccaaagatgcctggacagtgggagagagcacgttgtgaacatccagcctgcaggatcctctaga

SEQ ID NO: 6027 - DNA, 437 bp, Homo Sapiens
tcgaactttctgagaagcgcggcctggctaccaagcacttctgatatcgtaacatgcaggcggcctgcaccgcctcagacacgttaccagcattaggctcgcaccagaaaacgtggcactcaaagcgctggttccccgtgtccatgatgaaggcaaatgtgttggacgtccttcccaacacccatgaaggacaggaatcgcacacgacattccactaagacttcctcttcattcttttcactgatgacagtcacagtggcatcagccacgttcatgttcactgacagccagtcctccttgttggatgaggtcataagattttctatggcactgttcaaaatatccattccgactggtttgtctacaggtaacatgcccaagtactgcacgtggaacttctgaccagctcaatctctggtgttggaaatctactgcta

SEQ ID NO: 6028 - DNA, 746 bp, Homo Sapiens
ccgggatcccgccctggggaggcgcgcagcagaggctccgattcggggcaggtgagaggctgactttctctcggtgctgtccagtggagctctgagtttcgaatcggcggcggcggattccccgcgcgcccggcgtcggggcttccaggaggatgcggagccccagcgcggcgtggctgctgggggccgccatcctgctagcagcctctctctcctgcagtgtgcaccatccaaggaaccaatagatcctctaaaggaagaagccttattggtaaggttgatggcacatcccacgtcactggaaaaggagttacagttgaaacagtcttttctgtggatgagttttctgcatctgtcctcactggaaaactgaccactgtcttccttccaattgtctacacaattgtgtttgtggtgggtttgccaagtaacggcatggccctgtgggtctttcttttccgaactaagaagaagcaccctgctgtgatttacatggccaatctggccttggctgacctcctctctgtcatctggttccccttgaagattgcctatcacatacatggcaacaactggatctatggggaagctctttgtaatgtgctcatcggctttatctatggcaacatgtactgttccattctcttcatgacctgcctcagtgtgcagaggtattgggtcatcgtgaaccccatggggcactccaggaagaaggcaacattgccattggcatctccctggcaata

SEQ ID NO: 6029 - DNA, 425 bp, Homo Sapiens
acaggctgatgcaggcacggcaggttcagtagcactgtgcttcctctctaacccagaggaagaggaaatggggcagccactcaggctgtgaaagaggctgtcatcagccctcccggaaccagcgctgtgtgcaaggtgcaaacccacctcattccactgggcccacatcaatagtgtggtcctgagaccaaacctaagagctgctgcccgggcactcgctgcggggacgctgttctgccctggcttcggggacacctgtgatgcctccccgtgcccgtgtgggctgtgggagggcaggccggaccccatgtgtctgtcctagaacctactggactccaagtccctgaaactcatcatcagcatgactctgcacgaccgcaccaccaagtccctactgcacctgcacaagaagaaaaagccaccaa

SEQ ID NO: 6030 - DNA, 503 bp, Homo Sapiens
gatatagttttaatttctctctacagttttttttgtttggtttgtgggctgttggaattgtaatttttaattgccttctaaaaaatggaaatttaacaatgtctgatctcagctgaacaaattagatgtttcagttgctcttgggtcaactggcttacagatttacatgtgcacacacacacaaatttcttatcacattttcgacttcttcacttgacctaactgattatgcgaaatacccaagattcatgctactgtaccacagatttgttttcacagcaataaatcttcagttctttgtttatgattccacttaacaaaaggcctgcagaagtgatttattatttgggtatttggagataatacatttgatggttttttggaaaacctttttcactccatactcagatatgcttcattgtcaaatgcatatttagattagattattgaattgtaatgtttatctgctgctttttttaaataaaatttgactgaaaatgtta

SEQ ID NO: 6031 - DNA, 753 bp, Homo Sapiens
atattctcggctatatcagatgaaaagagatgcccaatggtgattgcttgtttagaggatctgaaatatcgtgtcatcagagatgatttatcacaaacagcagatgaacattaagtaactccccaggatctgtctgtgtccagagtcatttgtggcgctgtatggttttccttttccttcgtttgaaaaaacagcagcacttggtttcatccatcacttctacttcagtaggggctgtgatgggtgcatttgaacgtcctgcggtggggtcatctgtgtttaactctccatttgtagaacttacaacctggtttttggattgttgcatcttatctctgtgttgatgtgcttctctgtttgatgacagagcaggatcttgctgaactgcacccactggagtaggcaactgtttaccaatccagtcatatgcataatcaaacatatatccttttcgatcaaacaagtcagtaaaaagctttcttaagtagtcatagtctggtttttcaaaaaaatctagccttcttacataacgaagatatgttgccatttcttctggaaaattttcacataacacttctattggtgtagcccgttttgtatctccaattttctgatacctctcctttaatgtgtcagcctttaagccttgccaaggaagactgcctctcagagaatatatcaacatatgacttaaagcttctcaatcgtctctttactttgatcttttcctaaatgtgtgttatgctatatatg

SEQ ID NO: 6032 - DNA, 1186 bp, Homo Sapiens
taagaagcgaggaggagatccaacaagcaggcacaggcatctcgtacaaagcggctataatcggctgccccttgtttactgcacagctcctgtagcctgcgcttttcagcactgtcactggtatagtccacaagggctcgcaaacatgcctttttaggaattgcacggatttcaagacaccaggtaaaaatgaactggagagaacatcccgcaggtatatgctggggtaaggtagctcctttcttctttgtgtctgcctttatttcaaaaaggacgcagtgctctcttttatcttcaagctgcagtctttggagtaggctttgtacctcagaatcactgttagggcagatcacgctgaaggcatctccaggctgataggaaaagtctgtatttgaaatgtccaattctaccagcagagtggtttttatggcatcattcgtagtaagttgaactgcctttgaaattggcacttgaaaaactggatctgctgaagtcacagatacttggctttcctcctggccaagagactcctgcagatgtacctgtaaatattctgggggtaaaccaggaatattcagagaggcttgtgagagtgggggtaccgaacgggtaagtgaggactcaaagtcttcaattacaacattggattggttgctgttcactgcattttgcttcaaaacctcagaatcctttcctcctgaatcatcgaatctcagaagctcgacttgagattcaatgtgtagcagctctgacttcacaaggtctgtcctcgaggatgcaggtgatgccaccgggagtgcgccacttatctcctcttgtcctctgcttgacctaaaatgctttctgagggctggccagagtccagcaatccacggctcaaccacaagttgctaaacctacacagtcatctgcatgtccagtgtcatagaaatgccgggctccaagctcttgaagtcgtttatcaattatcttccccccattgcaaaagtaggtgtattctgaatcaccgagaccttatcggattcactaatacagtgaagatctgcagaaaatccatgtaccacagcttgctcacatatttcttctgcgatggcctttgcctgtccctgctgtgtagcatatagtcaacagaaacctcctcatcacttcaaggcatgtaacagtgaaaccacgccgcgccagccgg

SEQ ID NO: 6033 - DNA, 1033 bp, Homo Sapiens
gggtccggaattcccgggatctccaagggtcagcacctcccctccggctccctccgctaccgcgggccggaacttttgtcgataggaacgggtttgcacagttgagtgttgtcggccggcgtgaaggagactagggggccatcctcttcctttcgccgtcgccgccgcggagcggagtcgagccgagctgatttgatcgaggagcgcggttaccggacgggctgggtctatggtcgctccgcgggccgctccgccggctggtgcttttttatcagggcaagctgtgttccatggcagggaacttttggcagagctcccactatttgcaatggattttggataaacaagatctgttgaaggagcgccaaaaggatttaaagtttctctcagaggaagaatattggaagttacaaatattttttacaaatgttatccaagcattaggtgaacatcttaaattaagacaacaagttattgccactgctacggtatatttcaagagattctatgccaggtattctctgaaaagtatagatcctgtattaatggctcctacatgtgtgtttttggcatccaaagtagaggaatttggagtagtttcaaatacaagattgattgctgctgctacttctgtattaaaaactagattttcatatgcctttccaaaggaatttccttataggatgaatcatatattagaatgtgaattctatctgttagaactaatggattgttgcttgatagtgtatcatccttaatagaccttggctccagtatgtgcaggacatgggccaagaagacatgttgcttccccttgcatggaggatagtgaatgatacctacagaacggatctttgcctactgtatcctcccttcatgatagctttagcttgcctacatgtaagcctgtgttgtacagcagaaagatgcccaggcaatggttttgctgaagctttctgtggatatggaaaaagattttggaaataatcagggttatttttaaacctttatgagccggggaaagaatttcgag

SEQ ID NO: 6034 - DNA, 1188 bp, Homo Sapiens
ggttgctttcagcaaacaaccgggggttccccctgtgcagggccaagagggcatcatgcccaacccattaggcatggtccccaatcaggagggaagaaaagggggaaagggttgtacagaccagctggacagggtgtagctcaaagctttagtttggtccaagttccagagggaattgaaaatcttatgcagatcactggtgtttttcagaatttgctcgatgaaggtgtcccactccgtgctcagttcttcctgagaacagttctcataagctagggaaacaggtccattgtaaaaattaaagaatccaactagctgatccagaaaccgcttgcagctgacatcagggagctccacagcacagcccagcacctcaaaggtaatctccatcaacttttatggcaaacttcagttttctcagacgaacaagagtaggaggagagtcagaaatgtcagaaacacagcggacaactccagcaatctgtccacaaagcaactcctgttggtctagcagggtctgggaaggataaaagtaacaaatgccagctcttgttggatcgccttcttccctttaccttggaaccatcataaagaaaaaaataattccaccacgaggctgactttgcctctgtggaggtagaggtggccatctactgtgcagtcatcctcattctcttcatttaggttttcttttccggtatcacttctttctccctagctgtgaccgttcctctatcccccaatccagtgaatctggacgtggtaggtttcagtgttttcagtcacaactgccacttggttagttttcactcagcatggaaagttccacttcccttccttgcaggttcttcagtttcatgtatatttccatgcctcttacaactcagggagaaactataacaaagaatcctagcagaaaagtcaaatccattcctctggtttcctgagtatcactgtggctgtctgcagaaccacctcttcaagctcctctccaggaaagccaaaagtgggagatgcatgctagagctggtgttctaaagaaatttctagcttgtctagttcaaacccatcctgaagactcttattaaacgttttgaagtttccagttcaaacatcagtgccttggctctgcgcgcgcggcagagaggccttaggtcacgcgccgccccgcctacctccccctccccc

SEQ ID NO: 6035 - DNA, 638 bp, Homo Sapiens
agcaatggcggttcccggcgtggggctcttgacccgtttgaacctgtgtgcccggagaagaactcgagtccagcggcctatcgtcaggcttttgagttgcccaggaactgtggccaaagaccttaggagagacgagcagccttcagggagcagtggagacaggctttgaagacaagattcccaaaaggagattctctgagatgcaaaatgaaagacgagaacaggcacagcggactgttttaatacattgcccagagaaaatcagtgaaaacaagtttcttaaatatttatcccaatttggacctattaataatcatttcttctatgaaagctttggtctctatgctgtcgtagaattttgccaaaaggaaagcataggttcactgcagaatgggactcatactccaagcacggccatggagactgcaattccattcagatcacgtttcttcaatctgaagttgaaaaaccagacttctgaacggtcatgcgtacggtcaagtaatcagttgccacgttcaaacaagcagctttttgaattactttgttatgcagaaagtgtaagtttttaggtgtacttcaacttttagaactatgtatttttttatgaacaataaagattcctgtaaaataaaaaa

SEQ ID NO: 6036 - DNA, 828 bp, Homo Sapiens
ggggccccggccagtccctaagcacgtgggttgggttgtcctgcttggctgcggagggagtggaacctcgatattggtggtgtccatcgtgggcagcggactaataaaggccatggcgccagcagaaatcctgaacgggaaggagatctccgcgcaaataagggcgagactgaaaaatcaagtcactcagttgaaggagcaagtacctggtttcacaccacgcctggcaatattacaggttggcaacagagatgattccaatctttatataaatgtgaagctgaaggctgctgaagagattgggatcaaagccactcacattaagttaccaagaacaaccacagaatctgaggtgatgaagtacattacatctttgaatgaagactctactgtacatgggttcttagtgcagctacctttagattcagagaattccattaacactgaagaagtgatcaatgctattgcacccgagaaggatgtggatggattgactagcatcaatgctgggagacttgctagaggtgacctcaatgactgtttcattccttgtacgcctaagggatgcttggaactcatcaaagagacaggggtgccgattgccggaaggcatgctgtggtggttgggcgcagtaaaatagttggggccccgatgcatgacttgcttctgtggaacaatgccacagtgaccacctgccactccaagactgcccatctggatgaggaggtaaataaaggtgacatcctggtggttgcaactggtcagcctgaaatggttaaagggggaatgaatcaaacctgggggcaatatccatcgactgtggaaac

SEQ ID NO: 6037 - DNA, 493 bp, Homo Sapiens
ggaatgtgcgcttgagatcaaacagtactgatgcacaactgggtggacagtctttacccagcgatttcggaaatataccctgagaggtcttgcctggggattgcctgcttctacatatggatgtaaataatcctttatgtagagatcagcagcactattagaatgggtgcaaatgagaatcctaatctcctgttgctgcagaatatgtttgacagcctgagctagagtgaacgttttgcctgtcccatagggtccgatgataagcacaggcggcagctggattgcaagtggagtggtaatggccagaacagcctctttctgttttgcatttagtcgaggatccaactgttcatcccattgtctgttaggactccatggtatggtgggagtcatactgatgtctgcaaacaaaaccccattgtccctgatcctgtctagtgcatagtgcatttcacagaggggtaatcgatttaattgaaactgaagttcaacc

SEQ ID NO: 6038 - DNA, 843 bp, Homo Sapiens
cgtacaccatgtgtgtgaaaaggatggtcatcccgcatttctcggcgtcctctggagttggctgcctgtgcatcctgcctcactgtccaggacaactggactctggagcttgaaagctcccaggatatccaagatgtgctggatgcaaacaagtcattgcctgaatcctcactgaccgacctgctcagtgacaatttcacagattccttggtgtctttctccgctgagattttgtcacggacactatgtgaaccccttgtggcgtctctctggatgaaactggggaacacgggggccatgagaaggtgtgtgaagctaacagtcgctcttgagactgctgaaagtaaattcccccctcacctggatgtatatatagaagacccaccagcatacctccctcacataggactacttccaggacgcccgggtccacttcacgccagttggacgaaaacggtttccagatctcacaatgtttattgtagtttccggtcatccacttatgtccaggtcctgagttttccccctgagaccaccatcagcattcacctgccccacatctacctggctgaacttctacagggtggtcagtccccattccaggccactgcctcttgcacatatcgtctactgtcctcagccttcagactcttcctgggtgtgtgcttatagtaccagcatctgccggcagggaaagtgcactcgcctgggctccacttgccctacgcagacagctataagccaggccatcatcaggctcctggtggtggatgggactgccgaagccgtggtgacctgtaggaatcaccatgtggcagcagcaatagggctgtgtcctagaga

SEQ ID NO: 6039 - DNA, 666 bp, Homo Sapiens
tgctgctgcagggacagagcaatcaggtagtcctagggagaacaagagttgtgcagtgggctgaggcccagagccgtagatattcaggcaaggtttccaaatcagtactcccacatccctcaaatactctagctctttctccccacagagcagcacacacagccaaatgcattatctgtggtgccagagaatacacaccaagtgaggagacggtctgaggtaacccagagagagaggcatgggttcacatggccgtcatagcagattaaacatgtatgcatgtaaataagcatctctgacggcacaatgtgcacatctgacacttttcctaacgtgccctacacaccatggtctaccctgcagcatgcttttcatggggagccactcccaccgttctgctccaggccccttgcccagggaatgactcaggtgaaagtcagagtcacaaaagcagctgtctccatccacattgtgcaggctctcccatacgacttgctcctcctgtagaaagccctggtcagtgaccagtaggtataagtgactctacaaagaaaagaacaggagctcattggggggacagttgatacggaggcagtcactgccagaaatctcggtatgagcatgtggacattttttttcttggagatggagtctcgctctgtcatc

SEQ ID NO: 6040 - DNA, 619 bp, Homo Sapiens
caccgtgaggacaggcagcttcctctgatgggcacaggcaccacttggcttgttcagggctccagaagcagctggtctctctcttctaagcctgcacaggacccggcctaggacgcagctcagagggcatctggtgcattcacggggacacaggaacgactcggtcttttccaccccagatggtgagcctggcctctgtcctcattgcttgggtgccctctgggtctagaggagacactctcaagggggcctctgccacgctgaaaatgtgccagtgtcaaacccatcaggggacagggacagctgggccactcctgccaaaagcttatcaaacggcctgccctggacatagtgagtcctgtctggagtgaatactcatggctgttcccgaacactcgactacaaaggcattcggagagcattgcctagaaaagtttaaaaaccagaagtaatccacatactcaacaataggggccacgcacagccttgagaaaggacagtcaaggaatagtttaatgacttgaaaagaatgtgcggaaacaggctgctcgaaaagggtatgcagcatgccacgtttaaaaggcgcatacactacagctataaagtgcatcagcctgtc

SEQ ID NO: 6041 - DNA, 488 bp, Homo Sapiens
tgaataacagactaggcgatgtgtagcttatctggggacatgggtggctcaattacccccaatcaaacctcatctaggccatgctaaaattcctgccattggcaccactcctaaaaagtatcctacgtggaaagcagtaaagacatgcggctactcctggcagggctgctatctctgcagccaaacccaacccagacaaaggccagtccacaccccaacatgaccaacaaagctaggagaaagtgtcagagggtctggatgattacaccccagtgagtccacttcgaaaacactgtggcccttcctctgaacgctaactgggcccccttccaaaacaccagtcccttcatggaattcctggcaagcagtgtttcagcccctgcttaaatgcacccagcgacagggtgctcactgcctacaggccagcaccaaggaatgggaagtccttctttattaatttatttgtttttgagacagagtttcgctct

SEQ ID NO: 6042 - DNA, 889 bp, Homo Sapiens
gtcgtagcttaaccaggctgatgctcatgtacctgttggtcaggtagatgccctgggagagctggcacagcggcgtgtctgaggtgtctcgcagggagtgcagcacgaagggcaaggtgcacagcaggcagaggtcggccaccgccaggttggtcatgtagatgcgggtctccgtccactgctgcatgcggcagcagaacacccagagcgccaggctgttgagcagcaggcctagcaccagcaggacgcccaagtaggcgtagaagcccagcttgatcgctgggggccaggtgaggtcgctggagccacaggtgttgtaggtgccattcatggtcctggggcagcacagggagccggaggtcagcagagagcgagcagggggagcaaggcactgcccccactctgcccacctctgggcagggatgtgggaggaggtgagccccgaccccacacccacaaacacaaaactcctcaaagaaagcatgggtgccgtaaagaactccaagtcacccttgaggtctaacccctggacagatcctcttcccatctcctgagctcttctctcctgggatctgcctgctgtcatggggcaggaaaggaggcagaaggagctccacgttcccctccagtccccagcccagcaagccctaccctccagagcgcaaatcctggacagggagcccaaagggccaccagccttacccagcacacagctcttagcagggagggctcagaggcagcagcacctgtcagcccaaggacgggaagaccaggctcccggacaaagcccagggtggcccctccacccctcctggcacccggctgcaggaggcacccacattgactccacacctgcatcagcctgttaaaggggatcctgctagatcga

SEQ ID NO: 6043 - DNA, 458 bp, Homo Sapiens
aaagggagacagtgccagcctgtccaggagtacgggggctgggaatagttagaagaagacaagcacacaagaaaaccagtctctttaccctgcagtcagggaccctctcccagggtccttcccctaaaaagaccactctgatgtttgctaacaaagcaagggtaccagaatcagaagatgtccgtgctgaagggcaccatgggagacacacctatttcattttacatagaaggaaaccaaggaccagaggggctatcattttatccagggttctgtggccagtttagaggtagaagacctaggtttgcatcctagttcaaatttcaattcaaagctctttctctgcccaaccgttgccagcagccatcaggaaatatgaatgaatgacagaattctgaagctataaaaaaagtcaaacgtgagtagacaggtagcagcatgggtgagctgttgtaact

SEQ ID NO: 6044 - DNA, 553 bp, Homo Sapiens
ctttatagcaccgtggtactgtagagctgcaaagatcaacatttcttcctctgtgcaatcaatttcttctaagagaatggcccacctggcttgctcatagagttggtttattcggacagcatcatatttaggattcaagtcgaagaaagaataatatttaaatcgtaagagcagctgctcatcctcttggatgccttgttccataagggagcgtgaggagtctagccaacctgcattgagcttggctttatcagccagagaccgaggctggtacatatccgcaagtgcttctggggactgggggggttggctgaatgcgaggatgctgcagttttgttccgtcaaagggctgtcactgaaccaagtcatggtggatgatgctggtgttccattgatggggtcatatataggggtcatggttttactgtataaaccaggacttactgatgaacctgaagctgttggagaactctccaggttgagaaatatcttcaattatgggttccttattatttttgtcttttttcttcttcttcttaaaatagtcaccaga

SEQ ID NO: 6045 - DNA, 483 bp, Homo Sapiens
ctagggcagccctgggagggtggtctcctctcctggccctccctgccccatttagaccctgctgacccccgcagacaccctggctcgctctaataagacatctttggggctgccaaccttcctggttaggaccaatttcccacagctgatcttagatcacagccctgggaaaaaacacttttcccctgggatgggggaaggtactgcacttcctgtcccccttgtgagcccagccacctgtccctttcagaaaggagaacagcctggtggttgaaggcagtccctggtgccgcaaggcctgagtttaaaacccagggcaccacttgagaatggcgtgaccttgagccggttactggaattcgtcgaatcccagtcccctggcggatgcaaaatgagtcattcatgtaaggaccaaaagcagctgccaactattactgaaggaagccaagaatgtgaggcatcttgtgggccagataccaccat

SEQ ID NO: 6046 - DNA, 926 bp, Homo Sapiens
cccggcgccatcttcccgaccgcgagccgtccaggtctcagtgctgtgccccccccagagcctagaggatgtttcatgggatcccagccacgccgggcataggagcccctgggaacaagccggagctgtatgaggaagtgaagttgtacaagaacgcccgggagagggagaagtacgacaacatggcagagctgtttgcggtggtgaagacaatgcaagccctggagaaggcctacatcaaggactgtgtctcccccagcgagtacactgcagcctgctcccggctcctggtccaatacaaagctgccttcaggcaggtccagggctcagaaatcagctctattgacgaattctgccgcaagttccgcctggactgcccgctggccatggagcggatcaaggaggaccggcccatcaccatcaaggacgacaagggcaacctcaaccgctgcatcgcagacgtggtctcgctcttcatcacggtcatggacaagctgcgcctggagatccgcgccatggatgagatccagcccgacctgcgagagctgatggagaccatgcaccgcatgagccacctcccacccgactttgagggccgccagacggtcagccagtggctgcagaccctgagcggcatgtcggcgtcagatgagctggacgactcacaggtgcgtcagatgctgttcgacctggagtcagcctacaacgccttcaaccgcttcctgcatgcctgagcccggggcactagcccttgcacagaagggcagagtctgaggcgatggctcctggtcccctgtccgccacacaggccgtggtcatccacacaactcactgtctgcagctgcctgtctggtgtctgtctttggtgtcagaactttgggggccgggcccctccccacaataaagatgctctccgaccttcaaaa

SEQ ID NO: 6047 - DNA, 1035 bp, Homo Sapiens
  misc_feature (19)..(19): n is a, c, g, or t
  misc_feature (722)..(722): n is a, c, g, or t
  misc_feature (941)..(941): n is a, c, g, or t
  misc_feature (986)..(986): n is a, c, g, or t
ggatgggggaggacactanaaattattagggttcattttcatctaagatctttattctctaacgttcttggtcctattgaaacattgcagtatgcaaaactactgcaatgttaaacccaagagaaaagccattatcatgtgtatgctggtcatcatgatcagtgtggtacaatttttaaaaataaactatcatgcccttcatgccattatttgtctttatttctatgatttataatcctgatatgtgatgtgtttgtaacacagggtgtgcacttgagcctggttctactgtttttattagacagactcgctcatacgcttgtactgtacctctcactaacttttctctacagccctccgctcgtcttcctgctctccctccctccctgctttctccccttttcacccctcttccttccccttattcagccctgccattctgtattccacctcctcctcccccccaccctcgcgctcccacactaccttccctgcttcctcgctctcctgtacttatccacaccccctcgcccgacgcagaacctcaccgcctccctatcctctgctcacaccttcccccctcatatccatatacaacctttcacgatgctgcctcagctcctctcccctctgcacttctacactttctccagtacatgcccttcaccctcacgcgctatacacttctccctcctcctccccttcatcacctacccttctcncctttttcctctgacctgactcttaccccggattactgaatcgaccaccatgtcaccctccctatattcacaatccaacacaacccacgctgcatccgtaactcccagtcctctcatccttctccacctgccctttgcccagcgtcctacccttattttgaaccagcacgcgctctccagacgacccacgcggttatattaacactccccctccttccntccctcgcagcattcacatacttatatctatctcacccatgtatntccagcgctcctgagaagattacatcatacgcccgctagatagtaacta

SEQ ID NO: 6048 - DNA, 1279 bp, Homo Sapiens
  misc_feature (178)..(178): n is a, c, g, or t
tttcctgcaagaaaatagttgccttattgtctcacctaaaggtagttctcttatcctcttaaatttaactggggggccgtatatatctcggtagagttttccaaatgttctgtcacttcacttgatccatccatgttccctctgtcctggaactctcatctgtgggctggtctccatncaggcaacatgtgccttagtgccatcattgtgagcatatgtgtccctgctcctccacttggaagctctgtgaccttgggcaagttccctagcgtctctgccacctgtgtatgggtactgttacttattatccctattttactcaaagacggtaaaataaactgcccaagcctctgcaggtgctgtctggtggagatgctcatctggctcttgaggataaaatgagtgcaaacacagactgcacaggacagtgcctggcactggccaggtgcttgctcagtgttgccattagcagcagctgcagtattttttcttggttcagccccttgttggatgttatatgtcatgcgaggggaattttctgagtcttttccattatgaaaatgattttattaacaaaataccttaagagtttggcaataaagccttttcatccttctgcaaacaattttcccataccattgcttcacatgcaccgtaactggaagaggagcacagagtgtgctcaagaggggaggattcccagcacagaggatctgatgcgaggagcttctgctgaggagctcttggcgcagtgtttgtcgagcagtctgctgctggagaaagaagagaacaagaggtttgaagatcagcttcagcaatggttgtctgaagactcaggagcatttacggatttaacttcccttcccctctatcttcctcagactctagtgtctctttctcacactattgaacctgtgatgaaaacatctgtaactactagcccacagagtgacatgatgagggagcaactgcagctgtcagaggcgacaggaacgtgtctaggcgaacgactaaagcacctggaaaggctgatccggagttcaagggaagaggaagttgcctctgagctccatctctctgcgctgctagacatggtggacatttgagcagcctgacctgtggggagggggtctctcccgaagagtttctgtttttactcaaaataatgttattctcagatgcttgatgcactgttggaaatgtgattaatttaatcatgcagataaaccatttaaatgtcagtctcccagtttttcataatgaaaagttgttttcccgc

SEQ ID NO: 6049 - DNA, 797 bp, Homo Sapiens
  misc_feature (76)..(87): n is a, c, g, or t
acgaacaattcagccaacatctatcaccaaacaaatttaagggaagcaaatttcctggttaagaaaggtggggtgnnnnnnnnnnnntctattccatgtaggcaagcagtttgtgatagggggactaatattccaaatctcactctagtactaatctcatgctacttggtataaataggtattctaaagtgaaacatttagcattccctaggagattcagcaatacaaatattggccactcctagaaatagactttggacctagaaacagtgtttggtatgttaatgggaatagtgggaagaaaatacattggcggactatacaaatattagaaagaagataaatatcttcactatcttatgtcaggacttacaagctaaatgttagaagtttcctctttttttgcctaaaacttgaatgccagaatgagctgagttacaatgcagcacggaaaactgatcactggttaaagtgtggtttctggatcttgttactggatattaaagctctttggcaatgccttcatatctgtttaatgactagaaaacaattcaagaaaagtgacgacaaagacaataattacaaaataggctgataaccagagttaattatgattgccaaacagaagaaatgtttttttaagaaatgatgtgttaatatgatgtgttaatatcagtagatacaaaggatataatctggttgactaaaatcaaactgaaatttcactgacatagtaaagtatcactttacaagatagtcaatttgaccagttcattgtgaaaaagagcattattccc

SEQ ID NO: 6050 - DNA, 433 bp, Homo Sapiens
aaaaatatgtataaaaatcctagccaattcaccaaaaatgcccctagaaatatagattttaatcaccattacataatgacaaaccttgttaaaatgcttccacttccagtggcaaatgccactagggaaagtaagttgcactcatgtaagtatcaaactatataaaaggaggccttgtgcatttcaagtttgcaaagtacctgtgtacttaaaatatgtgtggagacctactgtacagtagttttgcccctttaattggggcacattcatcttaaatcttatagtatttatccacccaaaccccagactgagatactgctcccaggggcctaggtagctgccagtccgtgattttaattgctgtcttgaagttaacaagtgttataatgaaataatctacctgatgctaaataaaggctttagaatgttcccc

SEQ ID NO: 6051 - DNA, 936 bp, Homo Sapiens
  misc_feature (697)..(697): n is a, c, g, or t
  misc_feature (699)..(715): n is a, c, g, or t
  misc_feature (842)..(852): n is a, c, g, or t
tatgatgaactgtgagcgagtcttcaatgtctactagcttatatggcaatgtggagaaagtgaaattcatgaaaagcaagccgggggccgccatggatggagatggctgatggctacgctgtagaccgggccattacccacctcaacaacaacttcatgtttggagcagaagctgaatgtctgtgtctccaagcagccagccatcatgcctggtcagtcatacgggttggaagacgggtcttccagttacaaagacttcagtgaatcccggaacaatcggttctccaccccagagcaggcagccaagaaccgcatccagcaccccagcaacgtgctgcacttcttcaacgccccgctggaggtgaccgaggagaacttctttgagatctgcgatgagctgggagtgaagcggccatcttctgtgaaagtattctcaggcaaaagtgagcgcagctcctctggactgctggagtgggaatccaagagcgatgccctggagactctgggcttcctgaaccattaccagatgaaaaacccaaatggtccatacccttacactctgaagttgtgtttctccactgctcagcacgcctcctaattaggtgcctaggaagagtcccatctgagcaggaagacatttctctttcctttatgccattttttgtttttgttatttgcaaaagatcttgtattcctntnnnnnnnnnnnnnnnnnaaatgctaggtttgtagaggcttacttaaccttaatggaaacgctggaaatctgcagggggagggagaggggaactgttatctcccaagattaaccttcacttttaaaaaattattgtacatgtgannnnnnnnnnncctgttcatacatttgtgctgcccatgtactcttggcacatttcaataaaattgtttggaaaataaacacagcacttgctgcga

SEQ ID NO: 6052 - DNA, 788 bp, Homo Sapiens
catgttggcaccttgtccctgggttgttctagtgggagtaagtggccagaacagcagagtttaagaaactcaaactctttcttctttggatgggaaagccactgggggactgaatccttcctgggactataggatttatgtttccaatgggagacccccacaagtggaaaagagcacttctcccctccctcccccaaggccaaaggaaagcaaagaagatgtctataatgaagaacatctatacatatacccggagtttttccttttatttacaaagcagtaaaccaaattcctgtgtgaacataaatatccaatataatataatattgcgtatgccatttcccccctcaaatatgacttcaattttggccagttgttctgacttaagccaaaaattagtttcatctatatgaacatatgatggtaagtaacctatttattaccttaaaatgtttccccacataaaggaaatggtagagagtaaggggaaaagagaaataagagatgtgataaaacctattccaccatctttatcttcatccacagcatgtcctagacattcagtgcctgggccagtctctatagtaaacttgggctgatctggaaacgtctccacttagctctgtaaggatggcacccttcaggctgcttcagaggaaacttactgaattcaacccaagtgtcccgaaagaaaatgaagaagtaactcaaagagctgaactttaaaacaaggagtagctgagggtgaggcatatcctatcttgactttctgagcactctggtacccc

SEQ ID NO: 6053 - DNA, 1068 bp, Homo Sapiens
accattatcaatcagtgaggaggtgggcacacagagtcagcatccactcgattcttgttccatttcccagagcattttacctctcagagtgtacttgggagcagagggaagttggcaggatacacctcattccacaaactagattaattcaataactgaagggtattaactgagggcctattatttatctagtataatgtgaggaatcttggaaaaatgaactgcttctgaaagtcatgttatagatgttttgaaaataaaattacatctttaacattaaggacatgaattattttgtaaagaaatattcactttatcttaggaggtgaaggactaagtcacactgatttctcagagttttatactgagtaacctgaattcctaaaatccagaaagcaagatcacattccaacagaaacaatgaataagaaccttttccccagtggtggttcttggtagcgctcttataaagctgcaagttggtggcgtgggaatcctagcaccacaaaacaccctcttactacatcacatccctccccacaatacccagagggctgcatttttccaacctttctgcctcagctcaacttcaagagttacagcatcttcaaaaacacctcaagggtaaggatacaaatggtgacccctgcttttctattcagggagaggggatgaaaatattctctgtaactaatcatatagactcttgaattctttcctcctgtgagagatgtaactctttaacaaaaaaaggtagaagaaaaaacagttatgtcttttttccccctttggatttactttggattctggtagaaatcattatgtctcttatcctaaactgaggaggtgaggggtgagggtgacacgtgacaaacaccaaactcaccaccagccctcgtttagaatccaatcctaaagctaccggaaaccagaacactgacttgagccttaagagtgttgtgacatgattaaactgtcttttcaggtgttctcaaagaatttctaggcagaaagcctctcctttcttccatacctcttcaccagccacgtgtaggaagtccccacata

SEQ ID NO: 6054 - DNA, 287 bp, Homo Sapiens
caggctgatgcacattgaggtctcttgctttaggaactgatgacgcttgataatgtggctggggacttcagggaagagtgggttacctggacactgcttagagaatcctctccaggaatgccacccagcacagttagaagaatgggctctcaaaggaatttccaggcctagtgtaatctcccagccggagcagagagaagagccatgggtcctaccactccaaaactatgaggcgaggaagatcccgagggaagccacacagactgtgagcatcagccgttacaggg

SEQ ID NO: 6055 - DNA, 507 bp, Homo Sapiens
ctgatgctgaagcagcccaaagtaaaggcctcttggaagtaactgactctctgccaccagaggcaatatgaaatcaccagtaggctaccttttggagagaagatcccagcaaatacttcaataggattttggccatgagacattcagcaaattatttaaactctccatgctatgccttgtcggaaatgtgaggagataatagtattcactttgtatggttagtgtgagcattaatgacaatatatagatgcaaaacttttgggacaataacatcaacatagtcagtgtctactaaatggttgttgaattcttcccagaaagtgctaggtcaggagaaatgtatatctgtttggggaaagtgcacagtatttgagaagaaattgcttattgtttaaagacatacaagaggctatgatccaagaatgagacttgggttccatgatccggtgcaacagtggtttcttgggagcagtggctcgctctggtaggattaaggcatcagcctgt

SEQ ID NO: 6056 - DNA, 500 bp, Homo Sapiens
aacaggctgatgctgtgatgtggtatgagatgattacgtgcataccatctttaattgccattccattttgacttttctttttgatggtcacaagtgctgaaaaccctaatgtgctcaaaagcaagcttccacaacttttgttctgttagttgtatgcagcctgtgctacaaacaccagaattctctaagactgagagctgagtggttcatgtgtgtcctgtatctttgaaagtcaataaggtcatctttgcagaagtctgcatcattcatacaggattgcaccatccgggatgtaaggctcacggatgcagaagaaggtgaattacagtaatacgtggagctcactctcctcctctgcagcaggaccagaagtgctggctagcatcacagacactctactggcatacagagcacaaacacctcgtccagcatgttttgcttggcttagacatgttatcatttaaaaaacactttcagaagaggtacataaatcttttttt

SEQ ID NO: 6057 - DNA, 618 bp, Homo Sapiens
gagatccccctggacaggctgatgcacatagttgataactatttcttgctgtaaaacactggaaagcaggtaacaatgaatgacataactgatctctcctgaacaagaaaaggagacatagtagcacacagtccacccctttcagatggtaaaagccattttggatatctgtaggcagctgatgtcactcagtgatttgctccattgcttagtcaaatcccgattatttaataatggctcagctactacctggaattatatgtctagccccctctaaaacacactgggtatccaaattctaatacaagctaaactctttcaagataaaaagttttcaacatttaagggctttgtttgccaacacatcatacacataaaattctgaaaaggtggatactatggacttgaatcaagtttcctccctgctgttccaagtatcctcttctcttgacacttcagcattagcaggcaaggataagcaacaatttttacctctccaagattaccaaatctacctctccaaaggcacaaaatattttcaggtttaaaaacaaaacaaatacaaaaccctacagataatattatagctcagtaaagtacttttgtgcatacaagcag

SEQ ID NO: 6058 - DNA, 544 bp, Homo Sapiens
agtgagtctagaggatccacaggcgatgctatggtcacagggactaggcctacatagctagcaaaaattaggctcaccgggcacttaaaaacagatatacagtatgccctgatggaagatgtgtgacatcccctatatcttcacttgtcctgtttagagcacttgaagatgctgctattccaggctacctcagcccaccccttcttatccatccattcatccatcttttcatcaacccactcatcacatcatttgtccatccatccttcccctaaccacctacccatctatccagctacttattcatccatttatcacatgcacctacatatctttccatccatctacttacccatccatgcatcatcctccacacccaaccatccacccataacatctttttatcaagccactcatcacatcatttgtccatccatccttcccctaaccacctacccatctatccagctacttattcatccatttatcacatgcacctacatatctttccatccatctacttacccatccatgcatgggtacc

SEQ ID NO: 6059 - DNA, 723 bp, Homo Sapiens
ctttcagaggcccccagacacaacctgacccccttcgtccacacacctggccccagcctggatggatggggaggagttttctctcctcccctcaacccaagatccattgaggggaggctgaagcagaaggtccagcgagctccctgcgtcagtgccgccttcctcccacccaggtgctgctgtttagttctgaagaggaacggggcgcctttgtgcagcagctatgggacttctgcgtgcgctgggctctgggcctccatgtggctgagatgagcgagaaggagctatttaggaaggctgtgacaaagcagcagcgggaacgcatcctggagatcttcttcagacacctttttgctcaggtgccatgacctgtgccttttggagatgggtccagccccagaaatggaggaaacctgggctgcatagaacgcccctgtgggtgaactaagcttccgctctatggcctggagagaaatagccttgtttgaatcctggcattgccactttacttagctctgtgaccttaggcaagtcacattatcactgttctgtatctctgtttcctcatctataaaacagtgatgaaaactgtatccatcccattgcattgttgtgaggattcggtgagatcgtgtacatgagtggtacacagaggttggcctctggacccgagagcatcagcctcacctgggaacatgttagaaatgcacctacccagttaga

SEQ ID NO: 6060 - DNA, 201 bp, Homo Sapiens
agcttcaaatcatatcacagtgagatttcataaaataaaggtatccctggttagatttatgactgcaccatcatataaagccaccctttatctggtttatcactgtttgttagtagaagctgtcttcagcaactaaggtagcatttcaataaaccgggaagcagtatcaccaacttatttaaagagaatacaacctcgaac

SEQ ID NO: 6061 - DNA, 1247 bp, Homo Sapiens
  misc_feature (763)..(766): n is a, c, g, or t
  misc_feature (768)..(768): n is a, c, g, or t
  misc_feature (771)..(775): n is a, c, g, or t
  misc_feature (780)..(781): n is a, c, g, or t
  misc_feature (793)..(793): n is a, c, g, or t
gggccttctcgcctctcactccgcagcacttgggcggtagccagtggccatgtgctcccaaccccaatgcgcagggcagtctgtgttcgtgggcacttcggctggaccccatcacgatggacgatgttccctttggactctagggcttcgaaggtgtgcaccttggttctcccttctcctccccagagttccccggatgccataactggctggcgtcccagaacacagttgttcacccccccaccagctggctggccgtctgcctgagcccatggatgctttctcaatcctaggctggttactgtgtaagcgttttggagtacggggccttgagcgggtgggagctgtgtgttgaagtacagagggaggttggggtgggtcagagccgagttaagagattttctttgttgctggaccccttcttgaaggtagacgtcccccacccggagagacgtcgcgctgtggcctgaagtggcgcaagcttgctttgtaaatatctgtggtcccgatgtagtgcccagaacgtttgtgcgaggcagctctgcgcccgggttccagcccgagcctcgccgggtcgcgtcttcggagtgcttgtgacagtccttgcccagtatctagtccccgtcgccccgtgcaggagacgtaggtaggacgtcgtgtcagctgtgcactgacggccagtctccgagctgtgcgtttgtatcgccactgtatttgtgtactttaacaatcgtgtaaataataaattcataatgacttctannnnanacnnnnnccccnnacaccccacaanaaaaaccccaaaagcgggcacgccgcgagggtcccccgggcccaggcggcatcgctcgcccccggcgccgcggggaaaacgcgacgggagcctcgcccgggcgcgcggcttcgccgctggagaaggctcgccgcccccgccctctccggtggggccgggtaaagccgccagtgccggtatgcccctcccccgtctgtggcggcgcgtgaggtatgccggcctccgcgccgccgctcgccggtgacagggagccgcgggtggggcgctgggagggggtcgcccccctccccggggagagggagcgccggcgccggccgctgtgccgcgagaggccatggtgatggccgcggcggtgctgctctaccataggaggccccgggggcgggccgcgcgggctggatgaatgcgccggggcgaccatatactggcggctttgggcgcacaccttcgacct

SEQ ID NO: 6062 - DNA, 386 bp, Homo Sapiens
atggcatgtagtgaggacacagagcacgtggccagagtcctccttcagcacatagaagtgaatggcatcaatctggtaagggggcagctccctgaatggaaaacctgaggtcttggtcccattcacaccaggtggtttctgtaattttttctgtggccaccctcccacttccagtccttctccagggccactctctaaggaggccagaacttccaatgctcaccattaaacctactgaagaacaaacacacctttggatatctttacgatcttgtgtgagactgaataactaaattatcagtgctcagatagaggcagaagttttttctaaactgtgtcctccttaacaccctcaagcccccgcctttgtcctcactacatgccat

SEQ ID NO: 6063 - DNA, 820 bp, Homo Sapiens
  misc_feature (186)..(186): n is a, c, g, or t
gggtggaatgttaaatttatgggtcccttgttacaaaaccacgttttggtaaaaaggcctattttaccagtgtaccatggctggagccatgccactaatttatagttacaaaaggataccctgcccagtttaattaccaatagaattaccacagttgcctgaaaaatggtgaaaacatctcacacnatcatttaaatcaatataatttcaagcaggaaacgtttctttatttgaccacaattgcaataattacatgaaaattcttataaaaacatgaatctccttcaagaaatggatgcatattctacgcactacaggttaaggcagtaaaaaaatgtattcctgataactggaggtgttgacaatgtcaattaaagctgtctgactctagtttttcattctccatcatataccaaaagtttgtgaatgatttcatttttaaagtcaacaaagtattagtaactaagaagagttgaagctggaaaaaagtaattgctagggaagggaaaaatgtaaattggattttgcctgaaagttttcaaatcataaacaatagcattatttatgagtctaagccttaaatgtataaaacaaatacatatagttcacttttcttaatttaaaatatactgtactttgaacaattcaagtaatgtaagactatcaaaaataacttcataagccatacacaagtgtcaactgcattttcagtattttaagaactttttaaaaattgtaaactaaaccatgacagtttagttaaacaaatgataaatgactttttatttgcacttgtgatttctttaatacaaattgctac

SEQ ID NO: 6064 - DNA, 1413 bp, Homo Sapiens
  misc_feature (121)..(121): n is a, c, g, or t
  misc_feature (177)..(177): n is a, c, g, or t
  misc_feature (187)..(187): n is a, c, g, or t
  misc_feature (209)..(209): n is a, c, g, or t
  misc_feature (283)..(283): n is a, c, g, or t
taactttcaaaaagtgggtattcttggcccaggtgtggtggctcacaccctgtaattccccagcaccctggggaggctgagtggggaggactgcttgagacccaggaattcgaccaccagncctgggcaaccctagtgagattccccatcttctattcgttaatttttctaaaaaangtggtattcnttaagtccaagttactaccccntgattggatgacagggagagagacccaggaaacccactgtgttgtaatcccttaggaaaccttacacctttacnttgctttattatcaggtaatttccaggatgtaagccatacagccagaaggcagggtacaaaggagaggaggcagagatggtacactcatacagaagcttctcctgattgtccactgaatagaaggcaagctttccctcctcaaggttcagccagatgcccaccaccccaggtctgtctgagccaaggacagtttccttgaccatgtgccatgcagagagctggctagtccccttccattccacacaacaagagtccatagtccttcccaggacctggtcgcggctcatctcccaggaagccaccccaactgcccagtggctgcaattcctagtgtccacttcccagtaatgctttccagaagacagggcctgggaacataagacctggctggtagaaaacctctcacagctccagcgatagggttgtgggcggtgagacacagtcactgtacgggaatccttggacacctccaggctgcaggaaaggctcttcaagttaaaggttggatggatggcccactgagcaaaccgagaagctctcctgagtgcagggtggctctggtcaggcaatgggcatgaggaggaagacggggcttccaggagttctccctgcatttgtgcttcaggagcctctttccaggtgacgctttcttgtaatttttcctgaatttcttctaggtcatggagaatatctctgattttccctgcagctgtgtcggaagtcaccagctttggagaagccatggaaagatccaccccagaagaaaaagccttgcccaggatgctcagttcgttgtctggtccagattctgataggggcctctgattctgcaggcttctgacaatgtctacaagatgttccaccagctctgtcagctcctgagcaacttctgtgatgctcttctctactgccacccgctgcagttccgggcggcgccggggcctcgcggccgcgctggagagggaactggagcccgggcaggggcagtgggcagggtcggagcccgcctgtatctcgcgtgcggcgcggcggtacttgtcggccaggtcctgcagtagcgtgttcttccgcaggtgcgactgctgcgcggcgccctcgtgccgattaacacccagtcctcgtacctagc

SEQ ID NO: 6065 - DNA, 850 bp, Homo Sapiens
  misc_feature (109)..(237): n is a, c, g, or t
  misc_feature (394)..(481): n is a, c, g, or t
attatcattagttcttataggtttggggataggtgtacaagttacattctcaagggcgggggaggaatatatggtatcagttagcgtggggcaggaacaaatcacaaannnnnnnnnnnnnnnnnnnnnnnnnnnnnnnnnnnnnnnnnnnnnnnnnnnnnnnnnnnnnnnnnnnnnnnnnnnnnnnnnnnnnnnnnnnnnnnnnnnnnnnnnnnnnnnnnnnnnnnnnnnnnnnnnctcctatcttccgatttgaaattggcaagatgttccttgggctggttggtctgaggaccgtgagatcataggtggatctccgcacggagtgagggcgacaacagggcactggtctcccaaaggagtccgcctgtcctgggtcttcagcaccaaatgnnnnnnnnnnnnnnnnnnnnnnnnnnnnnnnnnnnnnnnnnnnnnnnnnnnnnnnnnnnnnnnnnnnnnnnnnnnnnnnnnnnnnnnngttctccccagtgactgcccaatctttagtgtgttttgctgactcctggcgctctggcttttccataagaggcgtttttgcacgattgcagacaggaataaaaatgagctctgcctactgggccgtcctggttagcaaggtctacaccacctcaaaggcagctatggactaagagcccacaaagaatctcggattatgagggaggggctggccgtggagacggctaaagcgcctcatttgtcttcccagcagggaagcgatgggacctcggcgggcagggaacgcgatctccagcccgtctggaaaactctctgagttccggagcactgttcgcgcccgactgaatggcatgcccgcgttttccccctt

SEQ ID NO: 6066 - DNA, 959 bp, Homo Sapiens
  misc_feature (70)..(70): n is a, c, g, or t
  misc_feature (87)..(87): n is a, c, g, or t
  misc_feature (112)..(171): n is a, c, g, or t
  misc_feature (228)..(228): n is a, c, g, or t
ttaacatttatttaaaaaactttattttgctttaaaaaaacaattattcaattcatgaagattaaccaanaatacaaaaccccatcnaaagtttattacaataatctttcannnnnnnnnnnnnnnnnnnnnnnnnnnnnnnnnnnnnnnnnnnnnnnnnnnnnnnnnnnnctttagttttagtgactaaaataaaagcagataaataatcttcttccacagggaaanaaatacttgagggaaaaaacaatggtataacatgtgtaaagcaggaaatttaaatatcagcttagttcctcattgccaacatggcatttatatcccagatgagatttcgtaattgatccataatttgtttcagctgttgattcttctgtttgagttttttatttacttcagcaatttctcgcctctcttcactagcaaaacgaggtgggccagcccgatcatcattctttgagccatcttcttccacatatggaataagttgctcgactggaatgggatccatcccaccacagttttcattgcatttgtcatataccaatctcagcttcctgaagagaactgaaagttggcgaagattatcctgtagctttgttaaccggtcttgatatgttccagtgtggtaagtgacaccatttggcagctgcatgttcctcaggagctggaagatctccatggtgcggtacacgatgtcctgcactgtctcctgcccgatgcggcacagcgacgccgtgttgacttcccgggcggcctgctgagcctggggcccggcgaagggcccgggcgccatccccgacgcggccaacggaggggtggacatggcgcggctgcagcttcaggccggaaggggccagacagcaggtgtcaggggtctgcccggaattgggaggctgtggggcctcagcgttggaaccagcttgagagaccccccgcggcccgatttcaaaaccccc

SEQ ID NO: 6067 - DNA, 938 bp, Homo Sapiens
  misc_feature (761)..(790): n is a, c, g, or t
ggcttcagcataaaagctgatccacaaacaagaggagcaccagacctcctcttggcttcgagatggcttcgccacaccaagagcccaaacctggagacctgattgagattttccgccttggctatgagcactgggccctgtatataggagatggctacgtgatccatctggctcctccaagtgagtaccccggggctgactcctccagtgtcttctcagtcctgagcaacagtgcagaggtgaaacgggagcgcctggaagatgtggtgggaggctgttgctatcgggtcaacaacagcttggaccatgagtaccaaccacggcccgtggaggtgatcatcagttctgcgaaggagatggttggtcagaagatgaagtacagtattgtgagcaggaactgtgagcactttgtcacccagctgagatatggcaagtcccgctgtaaacaggtggaaaaggccaaggttgaagtcggtgtggccacggcgcttggaatcctggttgttgctggatgctcttttgcgattaggagataccaaaaaaagcgacagcctgaagcagccacaaaatcctgtgttagaagcagctgtgggggtcccagtggagatgagcctcccccatgcctccagcagcctgaccctcgtgccctgtctcaggcgttctctagatcctttccctctgtttccctctctcgctggcaaaagtatgatctaattgaaacaagactgaagggatcaataaacagccatctgccccctacnnnnnnnnnnnnnnnnnnnnnnnnnnnnnncctgtcgggcgccctcggccctcaaaaacctttctaaaacattccgtttggcccgcggggccacataagggaaagggaactgggcccaaacctgtttccccaggaaaaactcggggcctgaaaaaagggttggagatttccccccaat

SEQ ID NO: 6068 - DNA, 2537 bp, Homo Sapiens
tcccgggatgtggcgccgcctggtgtggtggttagtcgggctaacaagcgcagcggcgcggggccgggaggcagcggtggcgggggagccagaggggcggaggaggaaccgccgccgcccctacaagcagttctggtggccgataacttcgatcgccgcttcttccccatctccaaggaccagcctcgggtcctcttgcccctggccaatgtggcattaattgactacactctggaattcctgactgccacaggtgtacaggaaacatttgtcttttgttgctggaaagctgctcaaatcaaagaacatttactgaagtcaaagtggtgccgccctacatctctcaatgtggttcgaataattacatcagagctctatcgatcactgggagatgtcctccgtgatgttgatgccaaggctttggtgcgctctgactttcttctggtgtatggggatgtcatctcaaacatcaatatcaccagagcccttgaggaacacaggttgagacggaagctagaaaaaaatgtttctgtgatgacgatgatcttcaaggagtcatcccccagccacccaactcgttgccacgaagacaatgtggtagtggctgtggatagtaccacaaacagggttctccattttcagaagacccagggtctccggcgttttgcatttcctctgagcctgtttcagggcagtagtgatggagtggaggttcgatatgatttactggattgtcatatcagcatctgttctcctcaggtggcacaactctttacagacaactttgactaccaaactcgagatgactttgtgcgaggtctcttagtgaatgaggagatcctagggaaccagatccacatgcacgtaacagctaaggaatatggtgcccgtgtctccaacctacacatgtactcagctgtctgtgctgacgtcatccgccgatgggtctaccctctcaccccagaggcgaacttcactgacagcaccacccagagctgcactcattcccggcacaacatctaccgagggcctgaggtcagcctgggccatggcagcatcctagaggaaaatgtgctcctgggctctggcactgtcattggcagcaattgctttatcaccaacagtgtcattggccccggctgccacattggtgataacgtggtgctggaccagacctacctgtggcagggtgttcgagtggcggctggagcacagatccatcagtctctgctttgtgacaatgctgaggtcaaggaacgagtgacactgaaaccacgctctgtcctcacttcccaaggtggtcgtgggcccaaaatatcacgctgcctgagggctcggtgatctctttgcaccctccagatgcagaggaagatgaagatgatggcgagttcagtgatgattctggggctgaccaagaaaaggacaaggtgaagatgaaaggttacaatccagcagaagtaggagctgctggcaagggctacctctggaaagctgcaggcatgaacatggaggaagaggaggaactgcagcagaatctgtggggactcaagatcaacatggaagaagagagtgaaagtgaaagtgagcaaagtatggattctgaggagccggacagccggggaggctcccctcagatggatgacatcaaagtgttccagaatgaagttttaggaacactacagcggggcaaagaggagaacatttcttgtgacaatctcgtcctggaaatcaactctctcaagtatgcctataacataagtctaaaggaggtgatgcaggtactgagccacgtggtcctggagttccccctgcaacagatggattccccgcttgactcaagccgctactgtgccctgctgcttcctctgctaaaggcctggagccctgtttttagggaactacataaagcgcgcagccgaccatttggaagcgttagcagccattgaggacttcttcctagagcatgaagctcttggtatttccatggccaaggtactgatggctttctaccagctggagatcctggctgaggaaacaattctgagctggttcagccaaagagatacaactgacaagggccagcagttgcgcaagaatcaacagctgcagaggttcatccagtggctaaaagaggcagaagaggagtcatctgaagatgactgaagtcacactgcctgctcctttgggtgtgattgagtgccctcctggctcctgggctgggacaagtgaggaactagctgcagagggatgagtgaccaccatccaggctgagactgaaaggagcagaggctggaactacagtattctttcccctgctagcaaccatgtgcctcccatcctgactgtggagttgggatgtggaagtggggctggaacaaagcttctgcctagggaggagctaagcaggcccggcagttggaggaaggccagaggaacagctttgtgctccggctttccctcagggaacagcagagagcagttggctctttctgctgcttgtatatgttaatattaaaagagagagtggtgtaaaaaaa

SEQ ID NO: 6069 - DNA, 1034 bp, Homo Sapiens
  misc_feature (179)..(179): n is a, c, g, or t
  misc_feature (187)..(187): n is a, c, g, or t
  misc_feature (244)..(244): n is a, c, g, or t
  misc_feature (249)..(249): n is a, c, g, or t
  misc_feature (333)..(333): n is a, c, g, or t
agctgctcagctctctacacaagcccagccatctaatcagtctccgatgtctttaacatctgatgcgtcatccccaagatcatatgtttctccaagaataagcacacctcaaactaacacagtccctatcaaacctttgatcagtactcctcctgtttcatcacagccaaaggttagtnctccagtngttaagcaaggaccagtgtcacagtcagccacacagcagcctgtaactgctgacaanagcanaggtcatgaacctgtctctcctcgaagtcttcagcgctcaagtagcaagagaagtccatcacctggtcccaatcatacttctanatagtagtaatgcatcatatgcaacagttgtaccacagaattcttctgcccgatccacgtgttcattaacgcctgcactagcagcacacttcagtgaaaatctcataaaacacgttcaaggatggcctgcagatcatgcagagaagcaggcatcaagattacgcgaagaagcgcataacatgggaactattcacatgtccgaaatttgtactgaattaaaaaatttaagatctttagtccgagtatgtgaaattcaagcaactttgcgagagcaaaggatactatttttgagacaacaaattaaggaacttgaaaagctaaaaaatcagaattccttcatggtgtgaagatgtgaataattgcacatggttttgagaacaggaactgtaaatctgttgcccaatcttaacatttttgagctgcatttaagtagactttggaccgttaagctgggcaaaggaaatgacaaggggacggggtctgtgagagtcaattcaggggaaagatacaagattgatttgtaaaacccttgaaatgtagatttcttgtagatgtatccttcacgttgtaaatatgttttgtagagtgaagccatgggaagccatgtgtaacagagcttagacatccaaaactaatcaatgctgaggtggctaaatacctagccttttacatgtaaacctgtctgcaaaattaaaattttt

SEQ ID NO: 6070 - DNA, 476 bp, Homo Sapiens
  misc_feature (147)..(147): n is a, c, g, or t
ccaaccataaatagttgccacaaacctagcaggcaggagctgggatgagcactacgtgacagagtaagcaggacgcctcccaacctgccctgtgtgtagatcacaggcaagctactgtcatctcccccaacgtctgtaattattgcntataacagcaagaggctaccactaggacagggatggtgacgcggggctcaggctaagcttgtctgacccagtgaccggtggggtaggaacagaaaccgagcagggggatcccatgtcctgcagtcagtcactacatgcctcctcacgtccccctcttatttcttctttctctggtgtcttcgtagctttcctccctatcctgtaaggcaagaaaggataggtattctgaagactgaaaactaatttcaggaagattaaactaacttattttgatatggaaatatcaaaatttgattaaatttccactctcaaaaggtttattaaaaatt

SEQ ID NO: 6071 - DNA, 242 bp, Homo Sapiens
ttagagtattactacacactactgtagatgccataaatactgcatacttaggctacaagaaacttatgaaaattatttttctttcttcaataaattagccttaccttactgtaactgtatttcaaaaacgttttaaatttttaaagctttttgactcttttgtaataacacttagcttaaaacagtgcatagctgcacaaaattttctttctttatattcttattctataaactctttccta

SEQ ID NO: 6072 - DNA, 735 bp, Homo Sapiens
  misc_feature (122)..(122): n is a, c, g, or t
atctcagctgtgggcatccttgtgttactggatggctgtgtgttaactgttagcagctggaataagtgaagagggtctcgtcctcatactcaaagtcctttgctcatgcccaaggccagagntactcatgctgaaacattaccatctccctccaaagtgcagggtttagtcactgagtactgggtggagcacatgactggatcccagttaatccctcccagcttaccagtaaaacctcaggattcatgctttcctgggagccaccttcggccactaagataggagcggggttcagacatggccaggcgctcctaatctcagacccaaagtgcaatttttgggcagcctgcatgagaaggagggtgggaggaaaggtggctagaaccaagggtagcagcctgggggcttgagaggaaacccagcacagcccatcctaccctgtctcacgagcagcccgtcctcctcctgactccccttaccccacacaccgagcgccattctcttgctgcctcatctattctggttaggtacttactgagcatcaggtgctaggcaagtggctggggagagacaacgtttaatgactcagtctccgcctgcacagagcctttgagtctagagggagacacagacttactgacaggctgggttgtgtaataagtgctacgggaggaaaagctgagagtgtctgagaatttatgagatgtgtgtctcatcagacttgggcatcaaaaa

SEQ ID NO: 6073 - DNA, 557 bp, Homo Sapiens
atacctgaaacaggctgatgcactctgggttaaggacagcttctgtcccagaacaaggctcttagaagacagaatggtgaatccatcccctggcccatcttcagaggtggaatttgaagttccttctttatcgctgtcctttggtttggactttttggacgtccgtggtttggcagccttggatttcttcccccccttcttgcctgacgtggccttcctgcctcttttctctgggggtggggagaggatcgtttccgacttgcctttggtccctcgctttttggccagcagttcggggtgaattctgggcaggacgcctccactggcgatggtcactccttttagcagctggttgagctcctcgtcattggcaactgccagcaagatgtgtctcggggctatccgggccttcttgttgtccctcgcggcattgccggccaattctagaatttccgctgccaggtactcaatgactgccgccatgtagacaggggcgcccacgctgatccggtacttgaacgtccctttcttcagataacgcatcagcctgtaaaagg

SEQ ID NO: 6074 - DNA, 654 bp, Homo Sapiens
  misc_feature (461)..(527): n is a, c, g, or t
taacaggctgatgccaagagctcactaggcaacatgatggcaggttgcctggctagctggttccccagagggcactactcagacaggcacagcagtgcctggattcacgctggggccaggatctttccacctgctctcccttaggaccaaccacattcatttgaaaaatggccagtggggttaaaggtgaagtcagtagccaaggcatcaatgctgacctggcaaccccgctgtgggttgccaactgctgtacgggagatcccattctgctgcagcccaacgttctctctgcccattgaatgaatgctcagccactggtgagggtggaggcctcaaggaccagcccaaccactcaccgccaagtgaggaaacacaagtcctggagtgcagggcgtctccaaggccacagagtcaggagctggagcacccaagtttgaatccctgcacagtctccccatctnnnnnnnnnnnnnnnnnnnnnnnnnnnnnnnnnnnnnnnnnnnnnnnnnnnnnnnnnnnnnnnnnnnagccctagcatggccaggtgtaggtgcagtggtggctcacgccagtaaactttaataattataattaataacgagactgtgatgggacccagagagcagctcttcctcccttccatgcccaacatgg

SEQ ID NO: 6075 - DNA, 519 bp, Homo Sapiens
gagcattgggccgctggaggcagcgtatgctccgagcagataacactagtgccatagtaatctgcatctctccagaagtggacaatcagggaaactttaccaatgaagatgagttatacctgaacctgactgacagcccttcctataatagtcaagaaacctgtgtgatgactccttccccatgttctacaccaccagtcaggtcactggaggaggatccatggccaagggtgaattctaaggaccatatacctgccctggttcgtagcaatgccttctcagagaattttttagaggtttcagctgagatagctcgagagaatgtccaaggtgtagtcataccctcaaaagatccagaaccacttgaagaaaattgcgctaaagccctgactttaaggatacatgattctttgaataatagccttccaattggccttgtgcctactaattcaacaaacactgtcatggaccaaaaaaatgtgaagatgtcaactcctggccaaatgaaagccctagaaa

SEQ ID NO: 6076 - DNA, 254 bp, Homo Sapiens
aagcaacaccaaggagggctaacaaaatctacctgaagaatgccctcaagaagatccataaaacaccaggataccttagtattgggtaaaaatggaatcaagaccgctcaactcagtcatacagcagattgattcagacccaaatgcctctcctacaaagaaatatctcccacctactaaacgagtctaggacacaataagaaactaatctaaaaggaatactaagaaataaatatttagcaaaatttaagtcc

SEQ ID NO: 6077 - DNA, 745 bp, Homo Sapiens
  misc_feature (107)..(203): n is a, c, g, or t
taggaggaaaatgcctaaaaaggctgtttaggggagtaataatgaagagagtaagaaatattggaatataattaaaatcctagcctcagccgggcatggtggctcannnnnnnnnnnnnnnnnnnnnnnnnnnnnnnnnnnnnnnnnnnnnnnnnnnnnnnnnnnnnnnnnnnnnnnnnnnnnnnnnnnnnnnnnnnnnnnnnaaaaaagtgtacgtcactttttaaaataacatctggaatgtaaaaggggcaacacttttacaacattattcttttgtgtttaacttaattttttgaaaaccccagtacaacaggagccaattttttacctaaggaaagatgtttttctgtctcgatttactgctttgtgtatatcattttgtatttcctatagtgtgaagcctcagtttaggtcatctggtggttcagaacactcaacagagggctctgtatccttgggggatggacagttgaacagatatagttcaagaaactttccagctgaacggcataaccccacagtaactgggcatcaggagcaaacttaccttcagaaggagacttccactttgcaggtggaacagaatggggactatggtaggggcaggtaagaaaataaagtacctgaaaacctttgataataatgtgatcatcctgaataattgaagaacgtgatcttcataataattaaatgagcatttaattattggtatatggttatattaaataaatacgttattttc

SEQ ID NO: 6078 - DNA, 854 bp, Homo Sapiens
  misc_feature (135)..(147): n is a, c, g, or t
tctgttcttaaagatcactaccgttttgtctcttatctgctgccatgtgagatgtggctttcaccttcccccatgattttgaggccttcccatccacgtggaactgtaagtccaataaacctcttttgttaattnnnnnnnnnnnnntcactatttaagatactaggatggacttgtgactgttgaggagtacttacagtatcctacatttgactacattatttccaaaccaagtattccatccaaaggaacatactgctatcatagagaccaaggagggactgtttaaggttgccaaggtgaagcgagctgagaggctttgtcctcgtgccagtaactctgaaatctctcttaattcctgctgtccaggcagcagaatgccatggtttccccaagtaggtagctgctttagcagttaaagcccaaatgtctgttctgttgatcagaggtctctgaatttctgaagtggtgtttcgtttctggtgactgagttaatcctttacaatccctcttgtaaagtgtgctaatagaaagaatccacctttcaaagctgcagaaccagaccgtgccctaaattgaccaacgtagctgatgtgcctcaggaagtctcttgccagctgtccctgtgaagaccccctcctcccccccagctgctgccttgcacactgaagcatctcagactgtgcaaagccgtgtagtcatcaagacagtaaatcccagggcttggttaagtgctgtgtgataacttgtttggatgagacttaacttaaaaccacttacaataaacttgggaaactaaattccgaaaggaaaaaaaggcggccgctctagaagtatccctcgagggatcacgg

SEQ ID NO: 6079 - DNA, 449 bp, Homo Sapiens
agacataaagctgggcatcagcaactggcctgtggtgatgcaaagctgctttgctctgtatctggctggactgatctgtctcacaagaagccatgaggccatagggagaagctccctctccccttcatcttctgctccaaaggtggtagcaagaggagtacccagttaggggttggagcccccatataacatcttcctgtcagaagactgatggatctttttcattccaaccatctccctttcccccgatgaatgcaataaaactctgtgacaccagcaaccattgctctttagaaatgggttttctgatcatatggctgatgtgttatgggcagtatggatgtcttcatttgttgcttctgtttttcatcttttttgttttattaataaaaatttatgtatttgctcctgttactataataatacagggaataaattattcaatccaa

SEQ ID NO: 6080 - DNA, 1104 bp, Homo Sapiens
gggatgatttggcatcttgcaaagatgagactgatgaaagctcaaaagaagaaactgagcctcaagtgctgaagtttagagtcacatgcaacagggcaggagagaaacattgctttacctcaaatgaggctgcaagagattttgggggtgctgttcaagattattttaagtggaaggccgacatgaccaactttgatgtggaggttcttttgaacatccatgataatgaagtcattgtgggcattgcattgactgaagagagtctccaccgaagaaatataacacattttggacctacaactcttagatcaactcttgcctatgggatgctcaggctctgtgatcctctaccttatgatataatagtcgatccaatgtgtggaactggggcaataccaatagagggggccactgaatggtctgactgcttccatattgctggtgataataatccactggctgtgaatagagcagcaaataacattgcatctttattgaccaagagccaaattaaagaaggcaaacccctcctggggcttgcccatagatgctgttcagtgggatatctgcaatctgccattgagaactggctctgtggatattattgtaacagatttgccatttggaaaaaggatgggatccaagaaaagaaactggaacctttatccagcttgcctacgggagatgagccgtgtctgcacacctaccacaggccgagctgtactacttactcaagacacaaaatgctttaccaaggcgttatctggaatgcgacacgtatggcgaaaggtggatacagtctgggtgaacgttggtggtcttcgtgctgcagtttacgttctgatacgtacacctcaagcttttgttcatccttcagaacaagacggagaaagaggaactctttggcaatgcaaagaatgaagatgactaatagtacttgtacttcccaccactggaaatgttagcataaaagaacttggagaggaaaaaagtattaacaaaactgcagtctgcactctttaaacctgtttaaggctcttcatcctggttagcaaaaggtgtgaatgtaatgtgatggaatttaaaagttttatgagaccagga

SEQ ID NO: 6081 - DNA, 673 bp, Homo Sapiens
  misc_feature (218)..(218): n is a, c, g, or t
ccagtggaggttcctccaaaaattaaacttacaactaccacttcatctaacaattctactactaagtatactttcagtgcaaaagaaatcagtttatgcaagaggtatcagccatcctatgtggactgcagcactattcacattcgccaagataaggaataaacttacctgcccatccacagatgaagggataaagtaactgtggtggacatacacanagagaatagtcttcagccagaaaatcagaatgaaatttcatcatttggagccatactgttgaacctggaggacagcatggtaaatgacctgaaccaggtagagaaagaaaaacattgccacatctcactcatgtagaacccaaaataaaaggctttattgcaatagatctagagagcacaacagtggtttccagagattggaaggaagcaggggcatgggcagggatcagaaataggtacaaaattacacttagatgagaggaatgaatcgttcctctctgttccacagcactgtgaccagaggttaacaaaacatcacagctttttcacaaaatctggaaaagaagattccaaattttttcaccacaaataaattaacaactgtttgtgataacagagactctaaatatcctgattttaacattcctctgtgtctgcattaaccaaaatgcccc

SEQ ID NO: 6082 - DNA, 1225 bp, Homo Sapiens
ggggcctcctcagtcggccgctcaggctgcggctcctcccggggccggttcccgctgtctcagccgcggcgcagagggcacatcggcctgaccgactagccggctgccagtgccgggagccgccgcgtccatccccgcccgcctggccggggacccaggactgagtcgtccagctgcgcccctcgcccatagccccagcggtcgccgggcgggcgagcagctcttcggcccttcccggacagcgacgcagtcgcagcgcgcgccctaacacagatgtgggaagataaatgaaggggtctagatgtaaatgtcagtggaaaggagagctaccatcactaagggctgaaaacacagttaaatcactttcaaagttaaaagactattaagaacacaagatggggactcctgcttctggaaggaaaagaacacctgtgaaagaccgattttctgcagaagatgaagctttgagtaacattgccagagaggcagaggcaaggctggcagcaaaacgggctgcccgggcagaagcaagagatatacgcatgagagaactggaacgacaacaaaaagagttggatgaaaaatctgacaaacagtatgctgaaaattatacaagaccttcatctcgaaattctgcctcagcaacaacccctctaagtggaaactcatccagacgaggaagtggggacaccagcagcttaatagatccagacacttcattaagtgaattgcgggatatctatgaccttaaggaccagatacaggatgtagaagggagatacatgcaggggcttaaagaactaaaggaatctttgtctgaagtggaagaaaaatacaagaaagccatggtttccaatgcacagttagacaatgagaagaacaatttgatctaccaagtagacacacttcaaggatgttattgaagagcaggaggaacagatggcagaattttatagagaaaatgaagaaaaatcaaaggagttagaaaggcagaaacatatgtgtagtgtgctgcagcataagatggaagaacttaaagaaggcctgcggcaaagagatgagcttattgagaaacatggcttagttataatccccgatggcactcccaatggtgatgtcagtcatgaaccagtggctggagccatcactgttgtgtctcaggaagctgctcaggtcttggagtcagcaggagaagggccattagatgtaaggctacgaaaacttg

SEQ ID NO: 6083 - DNA, 559 bp, Homo Sapiens
  misc_feature (300)..(338): n is a, c, g, or t
cacgttataaggcacaggtggcatggaacgaaatcattccattttcatctcctccccttactgataggcgtctggttaccaaaagagtcatcaggcccttggattaccttcttgaactgatcttctagatcgcaagtcaagactgccatcatgttcccccaaatgcaaaaagccttgttgctccacctctctcctttcaagaagcaggaactggccagttcctgcttcttgaaatctagagagagaaagacctataacctgtatgagacttccccttccaaagctgtattgtctacattnnnnnnnnnnnnnnnnnnnnnnnnnnnnnnnnnnnnnnnggtcagaaatgtcatccttaaaccctttgtttttcagcagtttgccctcagagttctggcataacacataaagttgtcaggcaactttagtcctcctccaatagtgctataatcagactacgacagttctcttatagtatacacacgcacacacatggaccgaaccatacacgccgtggaagctgagccacacacaccccggtttcaagaagcagtactgg

SEQ ID NO: 6084 - DNA, 332 bp, Homo Sapiens
gactcatacaggatccccccagttcctgcttcttgaaagagaggctccagcaccttccagttttgtgttccaggaagaaagctaaagaacaatcaatagatggtaagacactctaggagcatacagataaagaggtgtcagtggaaactgtatccattctgtcaaagactgaggggactcaagaggctgaccagtatgctgatgagaaaaccaaagacgtagccatttttcgaaggacttgaggggtctatagacacaggcatgacagccagtcgggaaaaggtcactgaagttgcccttgaaggtgaagggacagaagaagcaggaactgg

SEQ ID NO: 6085 - DNA, 1048 bp, Homo Sapiens
  misc_feature (23)..(23): n is a, c, g, or t
  misc_feature (304)..(304): n is a, c, g, or t
taggccaagcagcaagccttcantttccaccttggcatgcctcctgtccaaagcggttgtgggagagataaacctgaagtgattgaagcccggtgcccgcccttgggcccaggattcccggaaagtcttgcaggctttggggtgaatcatcttgagccttggccatcttggatataagacctggaccttaacagtgttctgaggatccttgcacatgcttccagggttgcatcaacatccagggcaaccaccaacccagaggtaaaccgcaaagggttgtctgactcgcccgctggctcgatgnatggtggctgaggctttgtggatctgctctggaagcgggagatgcagaaaggcactctgtcgcagcatggtctgtagaattttgaccacttctgcaggtttggatgtcatgagtcggggcataaggtcaaggagttggtccacaaagctgtcctgcaagtggggcaaatcagcgatgaaatacctctgaaaaaagtctacttcctgtaaaaatttttcacacatcccaaataaggggtcaagtcctcgtgtagttcgtgcggttactataagttgcaaagctttggcctgcagcctcatgtgatgtataatcaccacctgcttattctccacaccactgtacatgaattccattttgtaggtctcttccataatctgtttcgctgctgctgaggccaaatcactctgcttcaaatacaaaggggcagctacattccacaacttttcctgcaaggccttgatgagaagtagttgacagcgaagataggtggcagagaaatcagctactcctgccaattcagattgaagttctccaagtctttgcagatccctgatggtgaattccagcagctcctgggctccctgagggtccaagtgctgaagactatacactctttcaaggctctgctgcaggaactgctgggaaggatcctcttgaggtatgatgctgggagaaacagctgatgacaccagttttctacctggtaacctcaaggcaggaacaagatgagaaagactgtctcgg

SEQ ID NO: 6086 - DNA, 411 bp, Homo Sapiens
ccagttcctgcttcttgaaacctctggtctggcctaaatcgagtgtcagtaggtggcaataaagactttgatgatggatccatttcatttaattccagcgcaaactgtgtgaagctatagtattgctcgtagcctttcggcataggatttgctctccatacacaggcagaagaggagccgccgccacagtagatgctttcatgccatttcccaaacagccgatgaaccgcttttccactcctgtcaaacactgtgccttcaatctcatgggcattagtgctccagtattttgcctttataaaattcactttcaagaagcaggaactggccagttcctgcttcttgaaactgtgttctcagaagtgctgacaagagaggagtggctgaaattgttcgataatatcttttcca

SEQ ID NO: 6087 - DNA, 671 bp, Homo Sapiens
accagtactcccctgccgtcgctcttctcgacccaggtaaggagagcaccctgcattgtctgcttagggccgacctgtcctgcaaacacaaatccctgaccttgggggaattcacagtcagatgcaggaggcagccaggttacagctgtcacaagctcaggtgacatgaatgctcatggaggaagcccagggcatcggatgggctcctgaagtcatctgatgcaccctgggggatcagggacaacagaggacctgccagaacagtcttgtaggaaaagccgtgtggatttcccagcacagagagcagcgccagcaccatttcagccccgactctctgaggcctcagtcatagaaccagccagttccctctggaaggaagtgtgctgggaagttggccactcagacagtgtgggaccccctatggagcagactggctggatctatgggcgagggaaagtttcttccaccctaggatgagtgaaaggttggtggggaatggagcacaagtcatcaaggtcagggaccacgttttctgaaggcctcgggcctcagaggctctggaaggccgtggaggcaggatggccaggagctggggatggcagaacactagagctccaggcctgccctgaggactatggcgaggagtagcatcagcctgtttcaggtaccgg

SEQ ID NO: 6088 - DNA, 723 bp, Homo Sapiens
aggtcggtacctgaaacaggctgatcctggtagggggtggatgctgcttttcgagcctctgagtcagcttgggggttccccaaggcaatcgaggtagaagctcgctggtgtcctctgcagtgcatgagccacctttgggggcttccacactgcctctaataattgcaggatctcttgctgatactttatgtcttttctcccagcgttcaacagggctttttccttgtagaatgccccacgcagttggagagttaaaaaggcacaccaagagtcagtgtaaatgtttacagtcttaccttcacttagctcaaaggccagaattaaagcaatgagtttggtcttgcgggctgaagtgccctggggcaacgattgggcttcaatgacagcatccaggattaccatatcctacacacctctcttcttgtgggtcgacaaagctgctcccgtccacgtacagctcccagtctactgttgtccaaggatggtctcggaggtcgggcctgctagaataaactgactgcaacacctctacacagttatgttcaacttggctctctgataccaggagcaaggtggcggggttcaggctgttgcaaacttcaatggttatgcggggattctcacagagcaagctttggtacctagttagtctagcattcgttagccagttacgtcctttggtgtcattagtgttccacagcatggggaggccttatgtttttc

SEQ ID NO: 6089 - DNA, 604 bp, Homo Sapiens
ggcagctgcgactctgagaggatgcccccttgaacaggctcgatgcccagtgcactgaaggatgctaagacgacagaaggtagtagagtcacagaagaaggttgttcagagactggaggaacacttctaggtgaggagcagctcggaagccaaacacgatggacatggagtcacagggcggtgagctgttgaaggtgacccatgagaatatcctttcagaaagtttgatgtgaagacacagattgtatctcaacctggtcacgggaaggttattgaggaatgcattggcctgtttgcagattgaggagtgggtcagctggagggggagataactaatggtgcaggtgttgggggaagtgagttgagacaggtcaaggaaaaagaagagacatggagaggagcgtacaggtgacctttctatgtaaggaggagcagataaggggatagtgtagatatggagacattttgaggtggagaggaaaaatcaagggaccccttgtcagatgccctgattgctcctgtagaacaggcagttgtcaagcatggagtggaaggaattcagggtgaagcactgtggtgtctttgattgtgcctcttctgagca

SEQ ID NO: 6090 - DNA, 793 bp, Homo Sapiens
ccacacagaactatgatgccgaccagaagtttgggttctgccccatggctgcccacgaggaaatctgcacaaccaatgaaggggtcatgtaccgcattggagatcagtgggataagcagcatgacagtgggtcacatgatgaggtgcacgtgtgtggggaatggtcgtggggaatggacatgcattggcctactcgcagcttcgagatcagtgcattgttgatgacatcacttacaatgtgaacgacacattccacaagcgtcatgaagaggggcacatgctgaactgtacatgcttcggtcagggtcggggcaggtggaagtgtgatcccgtcgaccaatgccaggattcagagactgggacgttttatcaaattggagattcatgggagaagtatgtgcatggtgtcagataccagtgctactgctatggccgtggcattggggagtggcattgccaacctttacagacctatccaagctcaagtggtcctgtcgaagtatttatcactgagactccgagtcagcccaactcccaccccatccagtggaatgcaccacagccatctcacatttccaagtacattctcaggtggagacctaaaaattctgtaggccgttggaaggaagctaccataccaggccacttaaactccttacaccatcaaaggcctgaagcctggtgtggtatacgagggccagctcatcagcatccagcagtacggccaccaagaagtgactcgctttgactgtcaccaccaccagcatccagcacacctgcgaccccggctgtg

SEQ ID NO: 6091 - DNA, 833 bp, Homo Sapiens
cggtgtcagttcccttccattcgggagcccaggtgcgtcactatgtctaaccactgcactctccagaggcagccgatcttttctgtccttaatcatagactcatcacttatcggaaaggcttcagtccccacgtgaacaagtgacatttgttcttttggaactgagtctgtgggctctctcccctcattagtgctggctacgtgctcctctgcagagttcacactagatgacgcaagtgttgcagtaaacggtattccttttccatctctcactttaagtccttcatcactgttctcggtggagctgtttatacgcatttcttctgctcctggccctcccgtctgcacatcatccccagcacacacttttacatcttcgtcatcgtcaagagctctcttaatggctgaaagagtccggggtgatatggagccttcgtctacagcagcaggtgcgttcctcccacgggcctgccttcgattttcactctccagctcctcttctgagctacttccccagcagggcagcttgcatagctagtaaagttcttggagaaggaggggtagcatcaggctctttctctgtcttcagtttttcacatggagttgacttcacgtcaaaagacatgccgtgcattttgctggaagaaggaagagactctgaatccacttctgcaactgtcttagcttgaatgccttttatcaagatgtaatgtgaagtgtcttcagagaccactctccttgactctacctccttcagaaagcccccttcatcttcatactgccttcggatgtgtcctgaatgttgctgattcatttccttttggacatgttcc

SEQ ID NO: 6092 - DNA, 765 bp, Homo Sapiens
acgcttaaaggccacggagcttctctcagctcatctcacatgagattaaaacatacagaaactaaaaaacaaggcccagaaaaacaattgagggcaggagggaagaacccacacggatgataccttccacaagcaaaaatcatcccatactattatagatggtgaaaacaggagaaccttagaataccagatttggtgcccttagagatcatccatttcaaagaactcattttacagacagggaaactgaggctccaagaagacaatgactcacccaaggtcacacagcaaggaagtaaagccatggggaaaaaaatccagcttaccagactggtagtttaatgttctctcattctgagggcaatagtgtctacttcataaaggtagcctttgaaagaggatcccttctttgaattgacagaatgctaaagaaaaagcactgccaagaatatacaattcttttcaacttccccatgtgactggtataaggaacctaaccaatttatttacgtggctttctgaaaagtttgctgcattttgaactatataaagctgaggccctcaatgcgtatgtacgtatcacctttcctccagcgaagtcatcatgatagtcgacttgcagaaatccggggcccacttctgtaggaatgcatcagcttggtaaagtgcgatgcctcctccatgggggatggagaaggaggaacaggagggagtagtctcacgtaatgcctcgtcatggagctagtgctgttccaataggtagca

SEQ ID NO: 6093 - DNA, 512 bp, Homo Sapiens
actaaacaggctgatgcgcgacaccacaacaggagtcttcgaaaccgtggggaggaattcagccttcttctcagaccatccagcctaaagtggagactgatgctgcccaggcggcgtgtgcagagtgcatttgcagttctgttgactcagttaataaaggctcagcagtcaaagcagaaagatgtgctactagaagagagggaaaatggatcgggacatgaagcgtcattacaactcaggccacctccagaacctagcactccggtgtcgggacaagatgacctcatccagcatcaagatatgaggatcttggagctaacgccagaaccagaccggccgcgaattctgactactgaccaacgacctcccgagcctcctgaaccaccaccagtcactgaggaagatctagattatcggacagaaaaccagcatgtacccaccaccagttcttcattaactgaccctcatgccggagtgaaggcagccctgttacagctgcttgctcagcatca

SEQ ID NO: 6094 - DNA, 746 bp, Homo Sapiens
tgggtccctgcagtgagccagtaccaggctagacggctctatgcatgtaattcacgagcttcaggtcgtcactttaaggcctgtctacttgttgggaagaacaagccctagaagtcctgagtgaaaagcagcatggtgagaacattccagtgcacagcaagggcctcgaatccaggccggtgaagagatcacgcatgggcagcagagccgcacgtgccgctcaggtgacccgttgctagtgggtcctggcaaccacacacggggctgttatgctttggtcaccatggaaattcccgggaggtgccaagtgtctgggctttgttttccaacagctgaaagacgatgcagttgccctggtagatgtgatcgctcctcctgactttgttctggactcaccgattggcagagccgacggcgaggtaaagggaggacagggcctcacgggagtgccccaagggttgatgggcatttctgcggagctgagatgctcctgtgggtcaggggtctggtgtcttctggaaagtggtcacacatggaggagcttcttggggagggcccgggacaagtcaggactgtctcactctggtgcttccccatgctggctctgtggttgcaggggacttgcccatcccctgcctgccttttcctcccgagatggggtggtgcactgcccgcctgcacaggcagaggttggaggtccacacactgtgacctctgccctcctgcatcagccttttaggcgacgg

SEQ ID NO: 6095 - DNA, 501 bp, Homo Sapiens
aacagaaaccctgtctcagatgagtaattttaaaatttcctgtggaatcaagttcttcagtgacgtgtattacactcaagaacaatcttaagcctaagatcctcagttcagtacaggagacctctcatgtggcattttagttttctggactttccagtcagccacttgtgttcctaaaatcttcctgccatttcctctttgagatgccgccctatttcttcctctacactttacggttttatgttacgcagccagtatacctacatgcctctatccctgaataccccgagtactactgatcacatctacttaactggcacaatgaacacagtaggtacttttagcttatgttggcctttgggagtgggtgtccaagatcagcacttccctcgcgctgactgcgtaattccccaagttcaatttcattagcattctaatatacaacttccaacttccggccttgaagtactgctcacttctggtgaatacagcatcagtgca

SEQ ID NO: 6096 - DNA, 739 bp, Homo Sapiens
cagttctgcttctgaaagctgcagcccccgtagagaagatcctagagcagaaggagcacaggctgggctgccatagcatggacccccaaaaagccactgtcatgaagaaatatcctgtgaagaaaatctttgcagggcacctgaactcccaaagccactgaggagaaggtaagggagtactttggtgagttaggggaggtgaatttctccccaggatatggtttatgctccccaccagccaccagtggatgcttttttctgttttccttggctggtggagttgtcagtggagctgctctcacctcctttcttgcctttggagggccgccttttctgagttccctttagggcctgagccaggggaaggcattggccctgagcttagcctgtgtttccagatggaggccattgaactttcagtggatccaaagtctaacaaaagacaatgtcttgttttcgtcaccccccaaagaagaggaacctgtgagaaatattctggagaaatttaacaccatcagtggaagcaaggtgaggagtctctacctccatgcgcctcccctcctgcctctggagaggtagccctttggttaatggcaacccaatagggtaaccaaccatcccattttagcattgagagcattgtgtcctgggagacccttccctggaatgtaaataatcctggttttagaaacaaagtgtggaaggttggaggaaatgcacaaaacccgtaagttttaga

SEQ ID NO: 6097 - DNA, 918 bp, Homo Sapiens
  misc_feature (608)..(745): n is a, c, g, or t
ccagttctgcttctgaaaaaagttttgaactgaaaacacaagactatgagaagcagattcagtctttgaaagaagaaattaaagctctcaaggatgagaagatgcaactccaacacctggtggagggggagcacgtcacttctgatggcttgaaggcggaagtggcccgcctgagcaagcaggtcaagacaatctctgagttcgaaaaagagatagaactacttcaggcacagaagatagatgtgaagaaacatgtccagtcacaaaaacgggaaatgagagaaaagatgtcagagatcaccaaacaacttctcgaaagctatgacattgaagatgtaagaagcaggctctctgtggaagatctggaacatttaaatgaggatggagaactttggttggcttatgaaggactaaagaaagcaacacgtgttttggagagccacttccagtctcagaaggattgctatgaaaaggagattgaagctttgaacttcaaagtggtgcatctcagtcaagagatcaaccacctgcagaagttattcagagaagaaaatgacatcaatgaaagcatccgtcatgaagttaccaggctaacatcagagaacatnnnnnnnnnnnnnnnnnnnnnnnnnnnnnnnnnnnnnnnnnnnnnnnnnnnnnnnnnnnnnnnnnnnnnnnnnnnnnnnnnnnnnnnnnnnnnnnnnnnnnnnnnnnnnnnnnnnnnnnnnnnnnnnnnnnnnnnnnnatgatcccagactttaaacagcaaatttcagaattggagaaacagaagcaagatcttgaaatccgcctgaatgaacaagctgagaaaatgaaaggaaaactagaagaattgtctaatcagaaacatcgcagtcaagaggaggaaggaacacaaagaaaggcctggaagcccga

SEQ ID NO: 6098 - DNA, 800 bp, Homo Sapiens
ccgctcatcaaccctgagcatttgggcactcagtcataggaaagaaaacaaatagaggaagaagatctaatcatataccagaggaagagtcttcatcatcctccagtgatgaagatgaggatgataggaaacagattgatgagctactaggcaaagttgtatgtgtagattacattagtttggataaaaagaaagcactgtggtttcctgcattggtggtttgtcctgattgtagtgatgagattgctgtaaaaaaaggacaatactcttgttcgatcttccaaagatggaaaatttacttcagttccaagaaaagatgtccatgaaattactagtgacactgcaccaaagcctgatgctgctttaaagcaagcctttgaacaggcacttgaatttcacaaaagtagaactattcctgctaactggaagactgaattgaaagaagatagctctagcagtgaagcagagcgaagaagaggaggaggaagatgatgaaaaagaaaaggaggataatagcagtgaagaagaggaagaaatagaaccatttccagaagaaagggagaactttcttcagcaattgtacaaatttatggaagatagaggtacacctattaacaaacgacctgtacttggatatcgaaatttgaatctctttaagttattcagacttgtacacaaacttggaggatttgataatattgaaagtggagctgtttggaaacaagtctaccaagatcttggaatccctgtcttaaattcagctgcaggatacaatgttaaatgtgcttataaaaaatact

SEQ ID NO: 6099 - DNA, 427 bp, Homo Sapiens
  misc_feature (416)..(416): n is a, c, g, or t
ccagttcgttcttgaaaccagttcctatataccaattacatcattaatgatgattagaatgagctgtagagaccttgattctgaagacatgtatgtgcaggtgtagacgcaatctgattgcaaacactgacacagtagcggatcaaatcaaagaaagagaaaacctggaaagaaaagagacattctcagcacccgtttaggctctccctaagcttcctgaaagtaaagaggactggactctgttctctctacagattcaccttccattccataaaataattcaatttccttgcaatctttccttcacatacaaactctttgttagagagacagatggcaaatattttaagctttatgggccttattgtctttgtcacagttgcttaactctgccattgtaccatgaaacgctctcnagtgatcttat

SEQ ID NO: 6100 - DNA, 508 bp, Homo Sapiens
cgagctcggtacccccagttcctgcttcttgaaatgtacacgagtgtgttcactgtggcatgtttcatcttatgaaaagcctaaacatggatataaattacaagcaggaatttaattctaactaaagtcctgtggcgatggaatccagcctacctcaaatccctttaaaggtaggattaatttttcaaccttctctaggttaactacaaaccagtaggcggctttggccttcagcactgctccaaactcatacaaatgaaacatccatttccatcttcttttacttccccaaaaagtaagcttctcagcttgtctttacaggtatacacaaaaccaccagctgctgtgtctgcattcatgagtggatgtacttgtcttaccagatgtttgtagctcaaaggagggcctttttcaaaaagatggaaccaggaacaggaaactgacaagaggtcagagtgggtgccaagtgggatgggaagcaaacaggtacaaatggccggacgcgtgg

SEQ ID NO: 6101 - DNA, 411 bp, Homo Sapiens
ccagttctgcttcttgaaaaagagccaggtttatgcagaggcattcggtatttgtcgtagtgaaaggatcatatttgtctgcaatgacaagtagatcgggcacaggatacactctcaaagcatagtcatatgcccaatacactgggcagacataaagaggtaggggagtcagatgtccttgggataagatagtctttacaaagtgattaggaatagccaaattgctgctaggaaaacggacgcagtttctgcacattttatttactaagtcttcacggaagacagtaatttcctgtgtacagtactgaattctgcaaggattagtagtaaaaactgaaaatggtaccctttgtctgaattcattagtgatgctttcagcaagtggtggccttggtaggatggaaccaaatc

SEQ ID NO: 6102 - DNA, 755 bp, Homo Sapiens
  misc_feature (48)..(92): n is a, c, g, or t
  misc_feature (541)..(550): n is a, c, g, or t
tttgtgcgttgttggccaggtgggccacagggtggaaagccaattcgnnnnnnnnnnnnnnnnnnnnnnnnnnnnnnnnnnnnnnnnnnnnngatttttgttttaggaagctcatattttaagaaactaaaatatattctcatggttgaggacataagacattgttatagaaactaggtcaacttctcaatacctttatcaaagcacctgcagttcccatttcattgcaagtgaagtaaatctcattgaaataaagtagctggtgtatattcagtacacttttaaaatagcctattttaaaagagaaattggtgccagtctgatttatttcctgctttgttggaatgggggaagttctgtaacctcattgctgttctgctctctatgactactttgttaactggggcacagttggcctcttggatgtctaccgtgctgaaggtcagccaaataggcaggtaagactacctaggcctcttcataggcctaactaagatcacagttggacaaaacaacgtatagaaaaagaaacgaacgtggnnnnnnnnnnctaaaattacctttttggtttccttggaagagggaggtaaaccatctccattcaaaagaatttggagagtctgttaatgccatacactgaagtacaccattaaccaaaatagccctatggttggttctcaaagagctaccatcctagtggtgagagacaattaataggcgagtaactatgtagtagggggaaccgaagctcgaat

SEQ ID NO: 6103 - DNA, 605 bp, Homo Sapiens
gggaggcttgagggaagcatggaggtccatggcaagcccaaggctagcccgagttgttcgtcgcccacccgggattcctcaggagtcccagtgtccaaggagctgctgacggcgggaagcgacggccgcggaggtatatgggacaggttgctcatcaactcccaacctaagtccagaaagacctccactcttcaaacagttcggatagagaggagtcccttattggaccaggtacagacatttctcccacagatggcacgggcaaatgaaaagctaagaaaagaaatggcagctgcaccacctggtcgtttcaatattgaaaacattgatgggcctcatagtaaagttatacaaatggatgtggctttgtttgagatgaatcagtcggattcaaaagaagtggacagttcagaagagagttcacaagacagttcagagaacagttcagaatcagaagacgaagatgacagcatcccatctgaagtcaccatagataacattaagcttcccaattctgaaggtggaaaaggcaagattgaagttttggacagtccagcaagtaaaaaaaagaaatagtcaaataaattatctgaaaagaaacaggt

SEQ ID NO: 6104 - DNA, 686 bp, Homo Sapiens
gggggcctgacttctccgcctcggtgggctgggtcggcggctggagcattacccctactgcgggtcccgctgctggcagcgctggaaactgggtggacggcatgggttggtctcaggatttgttccgcgccttgtggagatcgctgtcaagggaagtgaaagagcacgtgggcacggaccaattcgggaacaaatactactacatcccgcagtacaagaactggagaggacaaactattcgagagaaaagaattgtagaagcagcaaataaaaaagaagtagactatgaagcaggggatattccaacagaatgggaagcttggattagaagaacaagaaagactccacctactatggaggaaatactaaagaatgaaaaacacagagaagaaatcaaaataaaaagccaagatttttatgaaaaagaaaaactccttagtaaagagaccagtgaggaactcctgcctccaccagttcaaactcaaattaaaggccatgcctctgctccatactttggaaaggaagaaccctcagtggctcccagcagcactggtaaaacctttcagccaggatcctggatgccacgagatggcaagagccacaatcaatgaatgcattatggtcaaatcttttcatgtatatggatgtgactattttaacaaataaaagaagtgaaaagttaaaaa

SEQ ID NO: 6105 - DNA, 240 bp, Homo Sapiens
ggggtccttcctctcctagcctaaggcgtgcaaacagagcgccactgggaggctgaaacctttaggccgatgcctgcttgcaaggtcaggcaagctggattctggtccccacctttgcagagagaacagcgatgttgtgcgcccatttctcagatcaaggaccggcccatcttactacctccaagagtgcttttctctctaataagaaaacatctactttgaaacatctactgggcgaga

SEQ ID NO: 6106 - DNA, 1820 bp, Homo Sapiens
  misc_feature (1119)..(1119): n is a, c, g, or t
aaatgccaggctggtacggtcggaggtggttaggatcatagcagcagtcactaaattggaaacaaaaggttgcaacgtgacaaaaaaaattgtgtagtatttaccagcaccattcagtaatacagccttaaccatacctccttgaactacttcataacttgtcaagaaaagcagtttgcagcaagggcatgtggtgtgcacctagtattaaaattgctttgtcttaaaattgaacatgaggatattaaaaatacattgtgaagaagactgcttatctcagagtgaagatactgcggctgaaaagcactagtttgatataaaattaaaatgaccaaaaccctccaactttgaagctaaagaaggtaaacctttccattattgcattacatgttgtggaatctctcgagtgcaaagactgtctagttatttatcaggctatttctactgatgaactgcttcaggtgggggagggaaacttatttttatttgcctgatttaagtgtctgagaaacaaatctttgttctcttaggctgcaatggaacaactttaccagggttttggcatttcctttcctttcctttataaaacatgctcagcaaactgcaccagttaactacagtttggtaaattgttatgttaacaattatgacatctgcaatgttttataaagcaactaatttaataaaatcactgttgtgaggacttaaattttgtgttacctcccaagagatactttttgagagtatagaacacagctcttgggagtacagttctctacgttctctactaaatcttaataaatgcttgacatagttacagctttaaaacatgagtgatgttgccaggtccttatgttgtcaccatagagcaacaaaggtatagggctgccttcctcttatttatttggggacattattttgttatttagataccaaggcctaattaattaagtacctataagaactatttatttggagtaactgagcctgtaactcaggtttatggctgttaagtatagattggggaatctttattatgtcttctcctaagcagtttaaccaaatgtgtggttagtgtttttttattcccctaagacagaaagaacaaaaaatgttttnaatttctcttatataggaaataataggaacgtcaaagctctgtatacctactaagtggaaaacaagaccatcatctaagtgatttgagaaattaacaaaagtagtgactacacagcaataattacagtaaattaaataaagattccctttaagggcagacaagggctaagatttccttagcagtaataatgacatacactgaattgaaaatctattttattacagaaagatcagtttctaacaaatgaaaatgtatcacctgttccttaactgtgtaaataataattaaatttctttgaaactggaatctgcaggtacaggtattctttaatcattattggatcatctaaagtagaagctgtcctgaggaagaggaagcttttgatcttaatactagtatctatataaaatggtgtggatgaacaatcatctaaaatcaatctattttaaataggaatttcctcctgaaaagtttcttacttgctacctactacccacaaaggactgatatggtacagtaccgggattgttcaactttagcaaagatctccaatgcattcttcttctcatcacatctgtcagaatctgctaacagtacaagaaaacagacacctatgaaatcatctaacctgctagcatggcctttagacagcaacctgtctgaggatccttcagaagcacatttacaatttcataaaact

SEQ ID NO: 6107 - DNA, 818 bp, Homo Sapiens
  misc_feature (618)..(647): n is a, c, g, or t
cgcacacaccaggtttaatagatcctggcctcagggtctcctttctttctcacttctgtcttgaaggaagcatttctaaaatgtatcccctttcggtccaacaacaggaaacctgactggggcagtgaaggaagggatggcatagcgttatgtgtaaaaaacaagtatctgtatgacaacccgggatcgtttgcaagtaactgaatccattgcgacattgtgaaggcttaaatgagtttagatgggaaatagcgttgttatcgccttgggtttaaattatttgatgagttccacttgtatcatggcctacccgaggagaagaggagtttgttaactgggcctatgtagtagcctcatttaccatcgtttgtattactgaccacatatgcttgtcactgggaaagaagcctgtttcagctgcctgaacgcagtttggatgtctttgaggacagacattgcccggaaactcagtctatttattcttcagcttgcccttactgccactgatattggtaatgttcttttttgtaaaatgtttgtacatatgttgtctttgataatgttgctgtaattttttaaaataaaacacgaatttaataaaatatgggaaaggcacgnnnnnnnnnnnnnnnnnnnnnnnnnnnnnncatgtcggcccgcctcggcccctcgagaaacctttcctaaaccattccttttgggcgcggcgggccccagtaagggtaaggtggaacatgggcccataaccttggttttcccttaggaaaaattcctgggctcattggaccttagtggcttgagaatttcttcacccaaat

SEQ ID NO: 6108 - DNA, 1141 bp, Homo Sapiens
  misc_feature (565)..(573): n is a, c, g, or t
gggaggcggcaggaggcgggtgggtcaaggtaactctgggctacagagtccttgctgggggttcggggagcgcttggaccccggcttctgggacgcgtcaggagaagggagcactggctttgctttcatcaggccaaagatgcctttctttgggaatacgttcagtccgaagaagacacctcctcggaagtcggcatctctctccaacctgcattctttggatcgatcaacccgggaggtggagctgggcttggaatacggatccccgactatgaacctggcagggcaaagcctgaagtttgaaaatggccagtggatagcagagacaggggttagtggcggtgtggaccggagggaggttcagcgccttcgcaggcggaaccagcagttggaggaagagaacaatctcttgcggctgaaagtggacatcttattagacatgctttcagagtccactgccgaatcccacttaatggagaaggaactggatgaactgaggatcagccggaagagaaaatgaagaccccagagacatttattggggagtaggatgtggctgagtgcnnnnnnnnnggccagactagcggattcagtcctggaagagagtatcatataatgagacccacaggcactggcacccttgggttggcaatagaaggtgacatggaatggagaaaaccaagattccagatggggatagtaactagaaggtgcttcagatgcactgcctgcgggtgccagtctgaaaaccagaccgcacagaggcctggggctgctgatgagctttttggtgctctccacacacaagctcgcaaacacacatgtcccagaatagctctgttgggttgtgttgggagaagcggctggagttcattctctcacccccttatgttggtgtttggcgtgtgacagcagttctacagagctctgtgttggggtcatggatgagcggctctcttggctcttaaaggcaggcctctctcttcttgcctttaaagaatcctccttcctcacacctggcctcctctggcttcagcttctcagcagcaagcaccagccttccacaacaacactatatttttatgctactttcctgtttgcactactacttttttattaaacgatgttaaataaaaaataa

SEQ ID NO: 6109 - DNA, 996 bp, Homo Sapiens
  misc_feature (160)..(178): n is a, c, g, or t
tgctgggattacagacgtgagccatggcgcccggccaatgaagcagctctttaaagaaataagacatgaaaataggtctgtcctggtatactacacataattgaaatgagtaacacctggaagaccaatattgttacgctatgttctgttaggatctttnnnnnnnnnnnnnnnnnnnctcagatatttagtagtccattcgtgcttaaaatattcatatgcatgagaagcctaaagaaaaaaaacacctgtgtacatgatgatcaaaagaaagttataaatttttttgaaatggcactgttatttaaaccactttcctgaagtcagaccctccttgtagctggcacagtttttcaggtcaattggcaacctggggaggcccctctggtattagtgaagtaaagaaggtggtgatgaaagaccaagctgaagccattaatccaggcctttgaattgcactggcatcttcacctccatcttctccactctcatcttcaagcccatcatccataagacgctccatttcttcaagttccaagttgtttgcattttgcccatcattgttaactatcggcattattgttgggagcctgctgatgacctccttcttgcctaaaaggaaaccatccagcctggtgtaaataaaccagtagcatggctcccattaccatgataaaccgactaaaagaagaatagaagtatacaatgctaaggagaatcgcagctcgtgagaacgtgtacatccagtctagccagtctcgattgaagtcttcttcatttagtactggacctccctgtgcattcatttgaacattctcattcatgggtcgattttcttgggccactaggtttggagctggtgggggttcttctccaggaacatgtgccaaatttagaggctgtgaagtagtaggctgggttgggttgacatttgatgtggcctgagctgaaactgcagcttgatactgcatataatactgatgagcgttactgctg

SEQ ID NO: 6110 - DNA, 1147 bp, Homo Sapiens
gggtcccattcaagtttctgggctagtcccagcactaagctgggtgctggccagggtggataggagccccatcctcagccctgtgctgacccacttggtactagtgagaccctagggcagggtggcagtgtgatggtggggttagcaagaggtgcagctcagggaagctgcgagcagccttggctgcttccttggattccctttctccataggttcccagaaggccatggctccaacccctgctctcatccttggaaccacagtcccagggtgaagggaggcagcttcagtcctggggccaatagcacatccgaggaaatcagggccctggaacacagcctgcgggactgggggcacatctgctgcccaatccagagcttgaatgctcctggtggtaagggaggtaggagtggagtgagatgtcccagggcctgggaacccacgaagaacgcaacaaacctgcccctgcctgcaggagctactaggctcgccccaggaagccagtcaggctggccaccagctaagccacagggaagccagcagctctagctacccatgaccagtggcaggcctatctgtggctggtgtgtgggaagggtcacccgaggggccaggagccgatccctgggacctctgggtacaggaccacagcccagtaacatccctcataggaaggctgcggggccagggcccagtaggcaagtatgaaaagcccacaggaataggggggacacatggccccaggcagggactgggaccagggcccagccagtccaccctgtggagccagtcctaaggtcacagcagttccaccatcagcagcattcttgccatccagtgtcccttgagtctagactctcatttcttccttcttcactgccacagagaaaggataacaaacagcacttccccatggcagatgcttcacagtccaagactcggggccttgaatggtgagtcacaaactttgcaaaacgcgtgggccatgacagccccagaggccaacagcaggtccacggccgagccacaggagtcctgtggcacaggagtcagggcccaaggagcacacgttacagataggccagggtggtggcgttggccagcatctcgatgtgctcgctgcctggcagctcctgcagcaacactt

SEQ ID NO: 6111 - DNA, 715 bp, Homo Sapiens
gcaaatgccacggccccttcttgggctgctggcatctggccattcagcccaggagttgcagccaggagcagatgtcccttacccaggtgctggcgtcgccactctagcccaaagggagggggacccggagccagagatgaggcggcctcggaggtggggggcatgtaggcaaagctcaagtccagcagagcatcttgtcccagtctcactcgaggggcaggggtgtgggtgaggacagtcagtaccactgttgccatggtgatgagaacaggctcctgctgaggctctggctgtggtcgcaagaggctggagaggctgaggactgggctggatatgctgaccatcagccaagccccatccagggcccgcgggcagttctgcgcgggggtcaggccgctggcccatttcgcagaggcggggagaggcacgaagcggctcatctcgcagtgtggtgcgggggcgccccggggataccgcctgaaggcagcctggagagcgcccgcggggtcgtgtacactgagatagagctcagggtcgaggtccggccggggcggcggttcccccggtccctggcgcaacagcagtgcaccgggtctcttggccaggccctttccgctcgcatcctccacgaaccaacactcgatcaccgcgggtcctgctgagacggcggtcgccaggcccaaagccacggcgaggagcagagacagggacttca

SEQ ID NO: 6112 - DNA, 935 bp, Homo Sapiens
ggtaataaaatatttcctcaatccctgtctgccgtgattggccaaaagcaggaggcagggcagcgtcatatattttcatctccagggagacaggtgcagttagggtgtggtagggcctcttcaaggggtccagaagagtgggggcccctgtcacaggtccgtggtgtccaggccagcgttggtgtaggatggcccctccagctgtccacttgcgcctgcctgccgtcctaacaggaccacgctcaggggctctggatctggctctggtggtgtgtgtggtggcctgtgcttcttgaatttcccgactgttcttgcccacatccacagagatgtcgtccagggagttgacgctgacagagtccaggtcattggagggagagaggtactccaagcccaggtctttgttggggaggttcagcatggggttggctcgctcagtgttgtacatgttagtccctgggatggcaggggctgagggcatcacccctgctgctgtcttcctggcctccttggcagccttcatagcttgaagcttccggttgtagctcttccgcacacacacgaaggccatggtcatgatcacaaggaccagcagcaaagccactcccaatcctatgatgacactgatgagctgtttcgacaggtctgactcctggctctcctgggagcccagcaccaccagccccagctgcagcagctgcgtcagcgagtcctgatcattccggatcatcacactcagctcatcaagggtcagggctgacccattggggaagacaaagtaggcatcgaggtaggagtgaggtcgggcccgagctgcagaatctatgtcctgaatgtccacaatgtatactgtagtcctggttgcctgggtaagagccctcctccttcggtgtggagaactgcagccgcgagcggtaactctgtcacgtgaagac

SEQ ID NO: 6113 - DNA, 925 bp, Homo Sapiens
  misc_feature (873)..(873): n is a, c, g, or t
agagtcattgatcccaggaaacaagagatgttgctgagaaggagaaagcacatgaaggagcaagacccatgagagccatcttcctggccgatggcaatgtcttcaccactgggttcagccgcatgagcgagcggcagctggctctctggaatccgaaaaatatgcaggaaccaattgctcttcatgagatggacactagcaatggggtgttgctgcctttctatgaccctgacaccagcatcatttacttatgtggaaagggtgacagcagtattcgctattttgagatcacggatgaatccccgtacgtccactacctcaacacattcagcagcaaggagcctcagagagggatgggttacatgcccaagaggggacttgatgttaacaaatgtgagattgccagattcttcaaacttcatgagagaaagtgtgaacctattattatgactgttcccaggaagcctgaccttttccaagatgacctgtatcctgacacagcggggccagaggccgcgctggaggcagaagagtggttcgaaggcaagaatgcagacccaatcctcatctccttgaagcacgggtacattccaggcaaaaacagggatctcaaggtggtcaagaagaacattctggatagcaagcccactgcaaacaagaagtgcgacctgatcagcatccccaagaaaaccacagacacggccagtgtgcaaaatgaagccaagttggatgagattttaaaagagatcaaatctataaaagacacaatctgcaatcaagatgagccgtatttccaagttagaacaagcagatggcaaagatagcagcctgaaggtcccacccccacccctacagaaaaaatgggagcaagancttgtgcttgggaactggttattggtgtggtcctagggaagggcggaaaggg

SEQ ID NO: 6114 - DNA, 863 bp, Homo Sapiens
tgtgagtcgtcatctgagtcattcaagcaggcaccagtgatgttgaacactataccttactgcctcgtggtatatgccacctgttgaaacatggctttgtaatcatcttcaccccgagagaattccaccaggcggatctccctggccagatctttaatgagctgtacggttcgcactgtctccgggatctcatcctcatggtctggcagagcttctttccttgtccaggctctaaaggccaagttcaaggctttgccaccatggaccaggtaggaggcagggtgtctcctgttctctcgcaaaccgcgaaagatgtccaggatgtgctttcccacataccaacagatggtctcaaagttggggaatctgaagaggtctgctgtgctcagccgcttctcaatctcataggctttgagctgcatctcgatgttaaggctgtgtaagaagttccctccaaaggcaaggcagtccacaggcgtcagcacagcatggatccaccctgtgggaatgaaaagtgtctgtccttgcttcacggaacacttgtagcacttgtccacctggtccccaaagaacatctcattctgattagaggaactgctccagcactcaaagagagtcagattggcatttgttgggcggatcaggtagaagatcttttcacccttgagtacatggtaccagacagaggtgccaccaaagtcaatgtgaaagtctgtatagctatctcgcacactcatgaggcagtacttctgtacattgggtctctcaaagacacattcctctggccacaagttttcgacccatgacagctttcgaacaatcttcggtgtctccacaaggttagaaagtctggtatcagagaa

SEQ ID NO: 6115 - DNA, 449 bp, Homo Sapiens
gccttggcgctgttcaggcgaccacggccctgacaaacagcaccatagagtatgagcacctcgagtctgaggtctctgccctgcacgatgacctctgggagcagctcaatttggacacccagaatgaggtgctgaaccggcaaatccaaaaggagatctggaggatccaggacgtgatggaggggctgaggaagaacaacccctcccggggcacggacaccgccaagcacagaggaggacttggcccctcagccacctacagctccaacagcccggccagccccctcagctctgccagcctcaccagccccctgagccccttttcactggtgtcgggctctcaggggtcccccaccaagcctggctccaacgagcccaaggcaaactatgaacaaagcaagaaagacccccaccagacattgcccctgtccacccacaaaaagggccga

SEQ ID NO: 6116 - DNA, 785 bp, Homo Sapiens
gggcatcaggacaagtgacaggtgggcatggagctgccgcagcaacatcagcatcagcaggacaggctcctgaggacccctcaggccctggcacaggcccctctgggacttgtgaggctccggtagctgtcgtgaccgtgaccccagctccggagcctgctgaaaactctcaaaacctgggctccacgtccagcctgggacctggcatctctgggcctcgagggcaggccccggacacgctgagttacttggactccgtgagcctcatgtctgggaccttggagtccttggcggatcatgtgagctccatgggctcagattcagagataaacgggctggccctgcgcaagacggacaagtatggcttccttcggggcagccagtactcgggcagcctagagagctccattcccgtggacgtggctcggcagcgggagctcaaatggctggacatgttcagtaactgggataagtggctgtcacggcgattccagaaggtgaagctgcgctgccggaaggggatcccctcctctctcagagccaaagcctggcagtacctgtctaatagcaaggaacttctggagcagaacccaggaaagtttgaggagctggaacgggctcctggggaccccaagtggctggatgtgattgagaaagacctgcaccgccagttccccttttcacgaagatgtttgctgctccaggggggcatgggcaacaggacctgtaccgaatccctaaaggcctacaccatcctacgggcctgaacgaaggttactgccagg

SEQ ID NO: 6117 - DNA, 513 bp, Homo Sapiens
ttccaaatgctttacccggcaaccaccagtaaaggaacgacccacagttacggatactcgttctggctcatactgctcgtcattcttctaaatatagtcactgtaaccatcatcattttctaccagaaggccagataccagcggaagcaggagcagagaaagccaatggaatatgctccaagggacggaattttattctgaattctctttcatctcattttggcgttgcatctattgtacatcagccctgagtagtaactggttagcttctctggacaattcagcatggtaacgtgactgtcatctgtgacagcatttgtgtttcatgacactgtgttcttcattgatgctgtactcctgaaaatttttcccacaaggttggggaaatgaatgggaaatgtcgctggtctgtgtggtattcaaagcagtagtatcatgatgagcgtaacgacccttctgacctggtctcacgatctgaaataataaaaggctgtgtcatgtttcttttcaaaa

SEQ ID NO: 6118 - DNA, 480 bp, Homo Sapiens
aacctggcgccaagagggtaggagtcattccttaccttcataaagtaggctatccgccaagaatgaaaatgtcaactcaaagctatgggctgttttaagcaaggtggaagataatataagaagcatggtcctttcttcagacatactgccttgacagcacagaattcatcttatttccctcatctcccaagttatttgtatttccctgagatcagctcagaaacaactctctttaggctctctacaatgcggtagagcatgattagaaaagataaaccttcaaacaatagtgatgtccaagacacaaccctcacttatcccaggggaacccacggaatttcttaatttgtattaactcctgacatggcatggaagaagaatttttatcaaatacccttggcatcttatatcagactaaaggaccattaaatacactgaggtaaaattggcagagagtatagttgatgagcgttacttctg

SEQ ID NO: 6119 - DNA, 827 bp, Homo Sapiens
  misc_feature (708)..(712): n is a, c, g, or t
  misc_feature (714)..(722): n is a, c, g, or t
  misc_feature (729)..(730): n is a, c, g, or t
  misc_feature (733)..(733): n is a, c, g, or t
ggggtttcagtcgtccgtgggtttcccgccagccgcagtcttggaccataatcatggtggacatgatggacttgcccaggtcgcgcatcaacgccggcatgctagctcaattcatcgacaagcctgtctgcttcgtagggaggctggaaaagattcatcccaccggaaaaatgtttattctttcagatggagaaggaaaaaatggaaccatcgagttgatggaaccccttgatgaagaaatctctggaattgtggaagtggttggaagagtaaccgccaaggccaccatcttgtgtacatcttatgtccagtttaaagaagatagccatccttttgatcttggactttacaatgaagctgtgaaaattatccatgacttccctcagttttatcctttagggattgtgcaacatgattgatcttgatggattttcatacgattgtaaatgagctatattaaagtctattaaaggaagcccttcttgtttgagggagagatttctgtgctttctcatatttaatttgctgtttttaagatattccaacctagagtttttgatggaactgatatattgacagttctcaccgaagtccttttataaagaattgctactccaatatatggtcagattagatgcaagaataaagcagttgtccgagtctaagtttctattttattaataaaaactaaaatggtacgtggcaaannnnnannnnnnnnnaaaaaannaanccttgtcggccgcctcggcccctcaagaagctttcaagaccattccttttggcgccgcgggccccagtaagtaaagtgaccatggtccatacct

SEQ ID NO: 6120 - DNA, 900 bp, Homo Sapiens
ggggtggattgtggggtccgcctggagtggggccccgatgatcgacaacagtcaccatacgcacctgcagaagcagcttgtggggacggtcagttcaaagatcctagaactcgcccggaagcagaggatgaacacagacatccggagaaacatattctgcacaataatgacaagtgaagattttttggatgcttttgaaaagcttctgaagcttggacttaaggatcagcaggagagagaaatcattcacgttctcatggattgctgccttcaagagaaaacttacaatcccttctatgctttcctggctagcaaattctgtgaatatgaaaggagatttcagatgactttccagttcagcatatgggacaaatttcgggacttggaaaacttgccacctacgaatttctctaatttgcgtccatcctgggggcccacttgttgaagacaaaatcgctttccctttccatcttaaaggtaagttgaattcagggaattggaccaaacccagagtccgggttttttacgaaaagtattaagtatcctattaatggaaacagaagttgaagacctcagtttaattttcacaagagtatctgacaacccaaagctgggggtgttacgtgagggtttgaagcttttcatcagccacttcttgctaaagaacgcacaggcccacagaagcgccgacgaagccaacgtgctgagagagaaagctgaccttgcaacgaagtgtctgcaaggaaaagcttccctgagaatgtagtcagggaaggaaggagggcaggtggccctttgactgtaaaatgtccttggtaaacccaaaggcttattctgttgcctgcgtgtgaatgtttggtagagctatatcattgtctgttaatgtattatattttgaga

SEQ ID NO: 6121 - DNA, 874 bp, Homo Sapiens
ggcttggaggattagacaaattttaattgaattacatggtatgacttcagagcgccagttctggacagtgtctaataagtgggaagtaccttctgtctatagtggtgttatcctgggaattaaagacaatttaacaagagatttggtttatattcttatggccaaaggtttgcactgcagtactgttaaggacttttcccatgctaaacagctctttgctgcttgtttggagttggtaacagagttctcaccgaagcttcgtcaggtcatgctgaatgagatgttgctttgggatattcatacacacgaagctgggacagggcaggcaggagagagaccgccatccgaccttataagtagagtacgaggctatctggaaatgaggcttcctgatattcctcttcgtcaagttatagctgaggaatgtgttgcctttatgttaaactggagagaaaatgaataccttacactccaagttcctgcatttttgcttcagagtaatccatatgtaaagcttggacagcttttagcagctacatgcaaagaacttccaggccctaaagaaagcagacggactgccaaagacctttgggaagttgttgttcaaatctgtagtgtgtccagtcagcacaaacgaggaaatgatggcagagttagtttaataaaacagagggaatctacgttaggtatcatgtatcggagtgaactgctttcttttatcaaaaattacgagaaccactcgttttgactattattttatcactcttggtgaaacttcacaaggtgcgggaggacattgtgaatgatattacagctgaacacatttctatttggccatctccattcccaactccagtctgtgactttgaagctg

SEQ ID NO: 6122 - DNA, 1150 bp, Homo Sapiens
cagagaaccttctgcggaagggaaaggagcgctatacctgcagatactgtggcaagatttttccaaggtctgcaaacctaacacggcacttgagaacccacacaggagagcagccttacagaagcaaatactgtgacagatcatttagcatatcttctaacttgcaaaggcatgttcgcaacatccacaataaagagaagccatttaagtgtcacttatgtgataggtgttttggtcaacaaaccaatttagacagacacctaaagaaacatgagaatgggaacatgtccggtacagcaacatcgtcgcctcattctgaactggaaagtacaggtgcgattctggatgacaaagaagatgcttacttcacagaaattcgaaatttcattgggaacagcaaccatggcagccaatctcccaggaatgtggaggagagaatgaatggcagtcattttaaagatgaaaaggctttggtgaccagtcataaattcagacttgctggatgatgaagaagttgaagatgaggtgttgttagatgaggaggatgaagacaatgatattactgggaaaaacaggaaaggaaccagtgacaagtaatttacatgaaggaaaccctgaggatgactatgaagaaaccagtgccctggagatgagttgcaagacatccccagtgaggtataaagaggaagaatataaaagtggactttctgctctagatcatataaggcacttcacagatagcctcaaaatgaggaaaatggaagataatcaatattctgaagctgagctgtcttcttttagtacttcccatgtgccagaggaacttaagcagccgttacacagaaagtccaaatcgcaggcatatgctatgatgctgtcactgtctgacaaggagtccctccattctacatcccacagttcttccaacgtgtggcacagtatggccagggctgcggcggaatccagtgctatccagtccataagccacgtatgacgttatcaaggttgaccagagtgggaccaagtccaacagtagcatggctctttcatataggactatttacaagactgctgagcagaatgccttataaacctgcagggtcactcatctaaagtctagtgaccttaaactgaatgatttaaaaaagaa

SEQ ID NO: 6123 - DNA, 1033 bp, Homo Sapiens
  misc_feature (995)..(995): n is a, c, g, or t
aattccccaaaggcccctctatgtttcacttggccccccggggaattctccccctaaggggaaaaccagggttatgggccccatggttcccctttacccctactgggggccccgcggcgccccaaaaggaaatggtcttggaaagtttttttcgagggcccgaggcggcccgacaaatttttgtattcttgtcgcggtgggtgggtggcgggttacgcaacaaaaaaaactttattgaattacaaattttaaaatggatcacttaaaagtgagattattttattctgaaacattatttcaaaaatgtactttgtttttgaaataaaacaaaatcttcaactatgaactgacaaaatagaggtgagttggtaccagtgggccaattcttaacacggacatttaaaaatgctgctttctgtattacaacaaaatgatatgcaataagaaattggaaaaagggagcaaaggagagtgcaaagcatgtactgaggtctttctacgggtgcctgacagaatgcagattcagcataaaatgtagactttgcaacagtggcctttaaagtatgctagagcaagtgtaccctagggaacctatgtcaaaacaatttttgtcttactccaaacagaaaaaatggtacacactttaacaaaagcaaaacttaattgtaagatctgtactgtaaagctacttgctatagcccatatattcagtttgttcaacaatctcactcatgacagaaaaagtcagcaaataagacttgggacaaaattattttctatcagtctccacatggaaagaccacagctttaatgaattatacaatccttaagattaatccttggtcagtatagattaccgaatcaaaatctaagtcatgaactgtttacaaatagctatactacactaagatgctaaacattttctttccagtatgtcttcctaagaggggaaaaaaatagtgggaagttttcatctttgcctatgaggggatttntgaaaagccttctaaactacaacagtgttcttctgcaa

SEQ ID NO: 6124 - DNA, 859 bp, Homo Sapiens
  misc_feature (719)..(728): n is a, c, g, or t
  misc_feature (731)..(731): n is a, c, g, or t
gggcagacgggacatgcagcctcttccgcctgagccccggaagggtgatgtggctgcggcatcgccggcctcgctatgtctgccattttcaattttcagagtctattgactgtaatcttgctgcttatatgtacctgtgcttatattcgatccttggcacccagcctcctggacagaaataaaactggattgttgggtatattttggaagtgtgccagaattggtgaacggaagagtccttatgttgcagtatgctgtatagtaatggccttcagcatcctcttcatacagtagctggggaaaatgccagaatgtagttgccatcagatttgattgtgaacaaggactgactgcagaaaataatggaaaggatgtttaactcttttatctccgaacattgaatgagataaatttccagatgctgttctctattttaatgttattggaccaatgttctgtataaacaattaagatgtaaccatttaatagtctgtaacaatcaacctcagtactgtcactacaatattacattctgcaaatggtattctgttgtatcagatacaaaattttagtgaggtatctctaaggcacatagtagaaaacaaaaatggttaattactcaagttcctttcactgtgatttggaaatgatttaatctttatagaatgagaacctttttttggactaactttttttattaaaagggctcaatttgtggnnnnnnnnnntcnagggcaaaaaaggaaaatcttggtcgggccgcctccgcccctcaaaaaagttttcaagaacattccgtttgggcccgccgggcccaatacggtaacgggaccctggtccataaactggtttcctcagg

SEQ ID NO: 6125 - DNA, 360 bp, Homo Sapiens
ttaaagaacaaacgtgctatcatcgatacatactgttaggttgtctttttttaaaaaacctaatgtaatttgttcatctttttatatctgtaaatatagctcaacacagttatattctttttgtgaatgtattatatctacaatttaccttttttcttagattttacatgcattttcccaaatctttgtgtttgcctatctgtaaaggtaatacattctgattacaaaaaatgaaaatgttacatagaaatgtaccgttatccatctaccagataactattattaataatgtgtatttatttttccaggaattaaaaaacatctatcatataagtattgcaaataaaacttaaaaagcaa

SEQ ID NO: 6126 - DNA, 1437 bp, Homo Sapiens
  misc_feature (13)..(13): n is a, c, g, or t
  misc_feature (36)..(37): n is a, c, g, or t
  misc_feature (46)..(47): n is a, c, g, or t
  misc_feature (501)..(592): n is a, c, g, or t
  misc_feature (726)..(726): n is a, c, g, or t
tctggtggcaagnacggagagcttcacatgcagacnnatctgcagnnacatctagttctgaagtggttaatagagcaagataaaaagatgaaagaaaatgggagagaaggttgttttgcaaaaccacttgtagagcatgttggtatgaagaacctgaagtcctgggctagtgtaaatcgaggtgccattattctttctagcctcctccagagttgtgacctggaagttgcaaacaaagtcaaagctgcactgaaaagcttgattcctacactggaaaaaaccaaaagcaccagcaaaggaatagaaattctacttgaaaaactgagcacataggtggaaagagttaagagcaagatggaatgattttttctgttctctgttctgtttcccaatgcagaaaagaaggggtagggtccaccatactggtaattggggtactctgtatatgtgtttcttctttgtatacgaatctatttatataaattgtttttttaaatggtnnnnnnnnnnnnnnnnnnnnnnnnnnnnnnnnnnnnnnnnnnnnnnnnnnnnnnnnnnnnnnnnnnnnnnnnnnnnnnnnnnnnnnnnnnnntctctcaaaataaaatataccaagcaaagcgattctccgtccctttcaaattcacgttcacgcgcgattggcccatcgtacaaatcattctatctgttttagtggctcggagcgcatccgtaatgtgaactctntactatgaattttctttggctagctacgtgaacctaccaggagtatacctgaaaggaaccgtcagaccacttcgcctacgggaattctcgtaaaggcgctaagactcgggcgtcttttaaaccttaattgtttaatgaacacaacagccgagctatggaaaacaccgacgcgagtccaattattcaactaggctcagcaagggtgacgcgccgggatgtttggtattggaggccgctcccctgcgcgaaacaatgctcgacacgcacacatacctgttaattgatagattgttatagggcccgccgctactctcgcccaagctcgccctataacgacacactcgagtgaactaatatggcatctgtcggagtacttgtttgttgtccccagtgaagtgccgcacatacctgtagagaaacctactcaacataaaattattgaacacttattttagtttcgaccccaatgcacgttgcaatctgcgccgagccgctggtgtgtggtagggccctttgcgccgcacccgaggagtgtcttcctctccaccgcgcatgacgtgcggcagacattagagcatttggtgcatgcacgtcagaatgaatagcgccttcctattcatctcgagtgcgtgagcacgcgcacctcacttcttggctcacttattcttcgtcaacgcggctctatgatcgcatatgataatctgcgttgtg

SEQ ID NO: 6127 - DNA, 851 bp, Homo Sapiens
attcttaaatatggtttaatactcttctccatttctgtacatcacaacaccaagattttgctgcttagtatctctctgcagaggctatagagaatgcaaaggctacggttttcaccccctcttatatgtgtttgtatgtgtaagggtaatacatatcaatatatattgatacacacatcaatatataatgcaatatatatcaccgaagagaacacatggattaaagaaatacaaaaatttggcatcatttccaaacttaaatagtaaaaataaaaactacaaaaggagctgcataccctaaatgtatcatgtgaaacaacaagcatattcaaaaatgtaaatttacatccaatttctctggtcttgtcatatcacatcagacccatttacaatggcaaaaccctaaggtactgctgtgaagagagcatgtttgctcgctcttgggtgttctgcaaacaaatagcagagcccaaagcaaaaaagcctgttccggtgaagtctcccacgttggtgaacaccaaataatggactcttctcacagggggttgagacatcaggttacacattgacagacagtatttggacctcagagtacagtgtgagaaccagaaactttacatttaagacatactcccttcattcaagtgaaacaggattattggaacgataggcaggtctgtaacctgggaacaaggagctggttcagaccaataaagctacgagtgactgaatcaagtcagtaaagaacagcagtcaggcactaaagtgttaaaagtacccaatttgaaaaccaaatgcaccccactaccctagtcagtgtggaggtgataccaattgacttttaaaacccc

SEQ ID NO: 6128 - DNA, 1388 bp, Homo Sapiens
  misc_feature (143)..(143): n is a, c, g, or t
  misc_feature (248)..(248): n is a, c, g, or t
  misc_feature (260)..(260): n is a, c, g, or t
  misc_feature (278)..(278): n is a, c, g, or t
  misc_feature (288)..(288): n is a, c, g, or t
  misc_feature (401)..(401): n is a, c, g, or t
  misc_feature (579)..(579): n is a, c, g, or t
ccgcgtggtctcgatcacaggctgcgtcgccgcggccgatgcgctgatcatgtaaagccttcgtgaccgttcgatccgcgggggcgctgtggtgggttaatttcctctgagtcagagctttgttgtttgagcgtcgcggaaancgtatgcccagggtcacggggggtataagtagggaggcggcgggggagcgtgggataagtgttggggggaggcggccgagccgcgcgcgcaatgggagcggtgangagtgagtctcncgcacctataacctccgncttgtgtgancgggcggggcttatatcatctatggcccggcagcgccggtgttagccaactatagtgtggcgggttccgcagcgctgtcaacgagcatgggtgtggctagcaattcttattantacagacactggcggcgtaccggagaaggctcacaaggcgtgcttctgcggaaagaggggtaccaaagaggtggggataacagacggtgggcgccgtgtgtgtgttgcgcgtccctcggggttttaccgcagaaggacgcagcccgccatcatagaggggaagagtttcggggaggancgtattggtaatgtggggaagggggccggcagtgtggattacagagaatgggtgcgtgcgtggcattctagggggacgatgacagtggactcgccccggcgcaagggctgcttgccaaagcacgtttccgcgggatggtcccctaggaattgggggaatttggaccgtaacagtaggctcccacctcgtatagagggggagcccggcggcggcgaagtaagcggaacatcgtttcatgaatactcgtacttcgcgcttgtatgcaggtccgtcccgggcgagggcggaccggcgaggacgggatggagatcgcgccacagggcgatgccgggaacccaaaggctcttgcagcacaggaggttccgaggttcaggttcatttcgtgaatcgtggcgattggcatatttgcgtttgcgaggagtttgtccagtggagcgtcgcctcttgcaggtcctggtgctaaattactcatgtttatttataacagactttcagccagtacagtacaaaacttacagtagtatatctccgttacacaaatatttacttacaatatattacatatacaaaatgctttgcaataagtctcaaaagctagtttaactccccttgagaaaggagaaaaactctttaaaaaagggggggaggggaatcagaagaagagaggaggaggtgaaggggtaaaggtcaaaagagacaccaaacataggctacaaaggaaaccctaggagagagggagaagagaggtggtattgcacttgcttctgtgtttattttttctttttgttcttcataacttctgattaaaa

SEQ ID NO: 6129 - DNA, 1257 bp, Homo Sapiens
  misc_feature (135)..(158): n is a, c, g, or t
  misc_feature (181)..(223): n is a, c, g, or t
gtgggggagcccaacccttttccttgcccggattttcttggaaaaaagttaggccctggtccccttccctatggggcccggggcccaaagaaaggttttggaaagtttttgaggggcgaggcgggccaccagggnnnnnnnnnnnnnnnnnnnnnnnnaaaaggttgggggcgctggttgnnnnnnnnnnnnnnnnnnnnnnnnnnnnnnnnnnnnnnnnnnnacctctgaaatagctttttattaaacggcaaagcagaactgcaacacaatttaaatgtctgtaaattaggtcacaaaagggatgcaaaatgtttgcagtttgactattatatattcacacagctaaagtcattcatcaactcttacaccaatacataagattattccatgattaaaagcccaaatctaataaccttaagctacattagtggatctcttttcatattataagattttagcaatacttccaatattgatttccttaccaaatggaatctagaagctaaatttttaaaaattgttaaaggatgactaaaactcttcaaacccagtagcagggtttacagaaaattctagaacaagtgagataaaatactgagcaagataataagtatacatgtataactttcccattttattcactattctaatactaatacaccattacggaattttgcagaagttgacccactgggtacaaatcaacttagagaccaaactctttgtaactgttctcatccagatgtggctaacataagggtagtcaaacttaatccactttcatatatatttcccaaaagatctactctgtgccagagaaaacacaaatctggagtgaaaataatttggttactactgtaataccgagtacttatccaccctataaccatacaacctcaaaatatctataataacatacacatgaccagaaattatatatgatcagataatacaaaatgagtcatttgggcaaaaagaagtaaaaacaacaaatattccaagtatatacagttcaaagaaaaccttcatcacaagcctccatcaataccccccaactcaccaaaaccctaacacatcctatcattaccactatacatacaccactcaccacccccatcaccttacaaaataatatctaacacaagcataacatttcacacactaacacaccaggattactctacgagatgacactcactgctaaacaactatcgttcacaaatattatacaccattttatacatataagaagga

SEQ ID NO: 6130 - DNA, 2018 bp, Homo Sapiens
  misc_feature (579)..(579): n is a, c, g, or t
gggaaggcatggaggcatagtttggttagtttcatcactaggatgtataaggtgacgacacaaaccaaatacctttctttcatcacttaactatacgtactttatctctggtaacactagaatgctgtggtcttgagggaatgttagcaaggaacacatagaagatttggtgtttcataagcctgtctaggtgtggcaggttttgtgtggtacactgatgtttaccataagcaggtacaagcttcatgaaccgttcttaatgaactataattgaatagataccaaaaatagaatgacaaatgtattttaatagcagatgaggcagttttaggatgaattttccactgttgattttacttcaagacatagcaagagaaacaaaattttgttttcaagacatttccactgcagtttcaagctgtagtgggcatatgcttcatttacttccaaagaggcaaaagcagctggaattggcttacagcacatgctttgtttcatgttatgggtgaggacctacatacactcttactttagcagtcacttaaccttctcccagcaggcagttgtggggttcactangatttagtgcctgatcttttttttgggaaggggcgggaatgaatgtgttggggctgggagggaagcagaagaaaatgggagtgtgagtgagtgtgcatgtgtctgaagttcaccattgcccccacctgcacctagcaaggaacaggtgtttgatgtattttgctcatgactgcagtatgcatgtatttttttccttctctgtgttttctaaacttacactaaaggattcatcaaatcatcttgttcagatggctcaggattgtatttattttgcttaccccgtgctcttgggttctatagtatttctataattatgtaacgagaatagtgttgcactgtaatctatcatatagagctatatgtatggaaaattttgatcaattttttaagaaatgtatcctgtttgcaaaggcacagtaaagttgcatcttatagactataggcaataaagctaacaataaaccttatttaacacaaaccacatccatatcctctgttcatttgattttggaaaaagtagcatatccagtagtttcagggaattcattttaactttaagaattctgatatatttaatttataaatttcggactgatataatagagttttggaaaactataagaaatgctttgttaatgtgtgtattcctatgtaaaacacatggcttttcctgcgtatatttttaaaaattaaagaaatgcacatttaccagaacaccaccctctttgtcccccccttatctcacttattacacaccaccacccatcccttccctaccctcccgccctctcacccgtccttttctttacttgtattcccccccaacaccacctctccattcccaccgccccgtacaacaactccctagtaccccaccctctacatatcctctccacccacaaacaaactccctctaaccgattcagtagaacgcgtgtaaatcaccaccaccaccaatttataacatacttctctccctgttgccctttcctccccgcctgccccctactgccgtgcgtattaggcgcggacccgacatgactcactctagtcatcctcccgcccactatcacagcaccacataccactactcgaagacgaatatccataactgtgtggtgtccgcgcctgttaccctcgatggcgcccctgcggtatgctccagtcccgcgcttgtcttcctcccctgtgcctccgcgcccccgtccgtactaagtgccccacccccccgctgaggtgccgctatagattatctcgcaatgattgcagacagttttcccgcgctgctgtctgccacattatcccctatcaatggcgcgcccccgtcatcgtgtggacgagcaccgcatcgccgccgagggctgttgtgcctcctcccccatgtttttaggcccccacaagagatggcgggcccccccgcgccggccccgcgcatctta

SEQ ID NO: 6131 - DNA, 900 bp, Homo Sapiens
gggagagcggacagggcgatggcaggttcgccgggtgtgaggcttcacagcggtccggtgaccaagtcgaggatttttctggtggtctagtctcagagattacatctgtagtcagcacaatgattcccttccaagcccagtggtgcccagttgcctccaggtcccagacctttatgtggacaagaaaagcttacagaggaaatggtaattctccacttgcacactgaggtgtccagttgcagcccatggagatccagttcaattatgaatctcaggaacaccaccttctgtcagatggtgagaacaagaccaagattggaaagccagcttcagaggagggaattacagcaaaaattgaaccattgacagaagagtctagcagtctcagaatgttctccaggattctgaaggcaaagaatgctgtgaattgggggataaattaaatgaaaaagatcagaacgtctttaaaaggagacctcataactgtgacgaatatgggcaaagctttgtttggagaacaagcctgtttagggcatcgaaaaacgcactggtgagaaacctttatgagatgggaataagtggtggaaaagggcccccctggggggagaaaaccctctattcccctggtaattggggggtaattaaaaaggtttccaggttgggaagcctcccgaacccttaatttaagaccggggtacagggcagacccgagatcatcaccagccgtcctcagggggacccgcggaatgatcacgagttaaacgcggagccggccctggctctaacccaacctcgccgcacacaaaaggctccagcacccacctaactacacgcaattatatactcacaagaagcacgaaactgtccctttttctttcgggcccgccgctctttgctcac

SEQ ID NO: 6132 - DNA, 1549 bp, Homo Sapiens
  misc_feature (192)..(212): n is a, c, g, or t
  misc_feature (544)..(552): n is a, c, g, or t
  misc_feature (600)..(600): n is a, c, g, or t
  misc_feature (626)..(774): n is a, c, g, or t
  misc_feature (1422)..(1430): n is a, c, g, or t
ggtgaggttactatatatgtagcgggggtactgttggcccgctgggttgtgagggcgcattgaggttaggttattatttgcgctatataagtaggtgggggggtgggttgcagatgttaggggcctgcgaggagctgtcccaaaacggttatctcacccaccaacgcgtgtctgtcaataacttaagttgannnnnnnnnnnnnnnnnnnnntagtattatgtgttatttgtgattgtgtcggcgctttactaaagagcgtcctgttgtgttgggggagatacgcggaagggggagtccctgcccttggtactcgtccgacgacggtgggattttgtggtatggtcacggccccatgggtgggtctcccccgccagggggctacctctttgtttttgtggggggagggtaagtcaccaaacagatgattgtgatttgcagggctagtgttgtttgggggaggaaaggaggggaggagcgctttccccccgtcacccctcggcgaagcgctccccgggcgcccgccggggtgggaatataggaannnnnnnnncggcgggaggggggcgcccgcacttttgtattttttttgtgtcgcttnggttggtcgcctctgcgctgtgttcnnnnnnnnnnnnnnnnnnnnnnnnnnnnnnnnnnnnnnnnnnnnnnnnnnnnnnnnnnnnnnnnnnnnnnnnnnnnnnnnnnnnnnnnnnnnnnnnnnnnnnnnnnnnnnnnnnnnnnnnnnnnnnnnnnnnnnnnnnnnnnnnnnnnnagacaaggatattgcaactatcacttaaagtctggtggcacattctttagtaggtccttaaggcaatatatttaaattaatttacaatttgatttgatgttaaagtttttttaaacatcacctcaaaatagatgctcaaaataatgccctcacaatagcctttgtaaaatgtattcagatgtttgataaaaaataatggtggctttatattacagtagtgctcattagcaccactataattaagggtctaccaagtttccagcaaaaccacctgtttcttaggagtttcaccataaaaggatcacattggctttaaccagttgggtagcgcacaaaaaagcaatttttatcagttgctggtgctttttttgtactactatattatcaaaaaatttttcattagatcttcaaaatccagcttctataaagtaaatcaaatcacctcatgacttagattttagaacaaagtagagacatctgcagttatcagtaaattgccacctttaatccatcctacagtgccctgtgaaagggtcacagaaagacagttatgactgtatgaaaatatgattcttgatacagaatcaaaagttactttcaatttcctttgcttttataaagtccacgataacaatacttaaatgcacnnnnnnnnncctgtgatataattaaaacccagtgttatttcagttgaacttaaaatagagtccctggtctgaatcagactttaaatcatactgtaaacatatatttggtataatttattgatcatcat

SEQ ID NO: 6133 - DNA, 799 bp, Homo Sapiens
  misc_feature (668)..(691): n is a, c, g, or t
  misc_feature (762)..(762): n is a, c, g, or t
gggagaggccacgcccccggaagcggcggtgcagaacccagggaccatgggcgcctccaggctctataccctggtgctggtcctgcagcctcagcgagttctcctgggcatgaaaaagcgaggcttcggggccggccggtggaatggctttgggggcaaagtgcaagaaggagagaccatcgaggatggggctaggagggagctgcaggaggagagcggtctgacagtggacgccctgcacaaggtgggccagatcgtgtttgagttcgtgggcgagcctgagctcatggacgtgcatgtcttctgcacagacagcatccaggggacccccgtggagagcgacgaaatgcgcccatgctggttccagctggatcagatccccttcaaggacatgtggcccgacgacagctactggtttccactcctgcttcagaagaagaaattccacgggtacttcaagttccagggtcaggacaccatcctggactacacactccgcgaggtggacacggtctagcgggagcccagggcagcccctgggcaggagacgtggctgctgaacagccgcaaaccatcttcacctgggggcattgagtggcgcagagccgggtttcatctggaattaactggatggaagggaaaataaagctatctagcggtgaaaaaannnnnnnnnnnnnnnnnnnnnnnncttgtcgggccgcctcgggccctcgaagaagctttcctagaccaattcgtttgggcgcgcgggggccccgntagggtaaggtggaacaatgggtcaataagctgggta

SEQ ID NO: 6134 - DNA, 1679 bp, Homo Sapiens
  misc_feature (1205)..(1219): n is a, c, g, or t
  misc_feature (1350)..(1350): n is a, c, g, or t
  misc_feature (1512)..(1512): n is a, c, g, or t
ggggacgtcatcgccgcggggcggaggcgacagtgtctagcgggagctccgcgtgtagctacgccggccgcctggctttgagacaacgtgattctccgcagctggtcgcctacccgtgatgttctgcccacgtcgagacctgagctgaaatggcagacgatctcggagacgagtggtgggagaaccagccgactggagcaggcagcagcccagaagcatcagatggtgaaggagaaggagacacagaagtgatgcagcaggagacagttccagttcctgtaccttcagagaaaaccaaacagcctaaagaatgttttttgatacaaccaaaggaaagaaaagagaataccaccaagaccaggaaaagaagaaagaagaaaattactgatgttcttgcaaaatcagaaccaaaaccagggttacctgaagacctacagaagctgatgaaggactattatagcagcagacgcttggtgattgaattagaagaactgaacctgccagactcctgtttcctcaaggccaatgatttgactcacagtctttcctcatacctaaaagaaatttgtcctaagtgggtaaaacttaggaagaaccacagtgagaagaaatcggtcctgatgctgatcatctgcagctcgggccgtccgagccctggagctcattaggtcgatgacagcattcagaggagacggcaaagttataaaattatttgcaaagcacataaaggtccaggcgcaggtaaagttgctggagaagcgtgtggtgcacctgggtgtaggaactccggggagaattaaagaacttgttaaacaaggtggccttaatttgagccccttaaaatttctggtttttgactggaactggagagatcagaagttgaggagaatgatggacattcccgagataagaaaggaggtattcgaacttctggaaatgggagtgctcagtctgtgcaagtcagaatccttgaaactgggccttttctaagtctgtgtcctaatgaagattccagttttcacagtagaagttgcatcttatttaatgactctgatacattgcaagcactcagtaaatatcagcaaatagtttatgttaattgtgtcaacagatggatcactggaatgtggggattctgaaacagaaatgaaactgtccttttgacaactctcttatataataaagtatcaccggcttgtgtatgnnnnnnnnnnnnnnntataaggatacaatatagataatactaaaatagatgaatcgaaaagaagagggcgggacctataatagatgtaacacactcagggggaggcccatgaattataggagcgtcaaccaactattttagagacnagaaagggggctacaccataaatgaagaggacacaaaaatcatatgacagaacgagtctaggtctggagctgcctatacacaacccagcttgtctcgtgtaagtgaataaacattcgattagtcctgttagaagtatatctatggggagaagaaaacaacanagttcattgggtgtgagagaaataagggtgacaactaagtcattgataagagtaaagggagctgtagaggtataagattaagtgtaaatcagttcttgacttagtatacgctagacagtgttggtactgaggtgtaactgtgctaagtagagtatgatgtaaaacta

SEQ ID NO: 6135 - DNA, 1539 bp, Homo Sapiens
  misc_feature (662)..(701): n is a, c, g, or t
  misc_feature (979)..(991): n is a, c, g, or t
attctacaatagctgatgagggaacatggactttggaggacagaaaaatggttcgtattgttcttacaaagacaaagagagatgcagcaaattgttggacttctctactagaatctgaatatgcagcggatccttgggtgcaagaccaaatgcagagaaagcttacattagagagattccaaaaagaaaatcctggttttgacttcagtggagcagaaatctcaggaaactacactaaaggtggaccagatttctcaaaccttgagaaataactgctttttttcctgcattctgtggatcctagcagatattgccaacttaatcagataaacagattatgtaatggaagaaaaatgcggatgcctacagttaacagattgcaaaatgtatcttaaaatggttctaaaaattgcattcaaacataatttacataggaaatgtactgtgggaactattctatggatatatggtaaagttgttttggacttgtttttgctcagcatgaagttttatatgctgcattttactaattccatatttaaccatatttttaatacaaaagaacattagagtatagatcatgtgaaatgaagggtgcctttggggaaaattaactttttcttttgataagtatgatattcaataaaattttctaaataggnnnnnnnnnnnnnnnnnnnnnnnnnnnnnnnnnnnnnnnntgacacccgcatcacaccaccaaaaaaatttctaaaccatccgtttggaaacccggaccaaaaaaagcaatctaccttgagacatacctgctcccttagaaaacccttgtacaaactttttggtcctggacccctccccaaataaaaaacggcccgggtgggaatccattcggttttcgaccgaaactccctagccccaccccttggggccctctactcgccccccaatacaaaatagggatctccaagcgacaacatcggattttcccttttaccannnnnnnnnnnnnggggccgtcaccagccgcaaattactctgccgcgacactttccattcacaggcccctctccagtccggggattcggggaatatcccatattatattactccgcgccctttgaagtgagaacacacttcctacttccgcacacagcggtgggagcataatgcctccctctaaggcccgcttttctgccccccaacacataacccctcgccccccacggcaacaaaggacccgtgcgagccacacttgtaattcctcgccgctgttgtttctctccgaccaacctcttaaaactcggagataatgagaaatatcatcccgtcccgcgccggtatttagaatgttcagcgccaccacaacaaataatttgcctccatatatatcgcctcttcactgtaaaacgcaacgccccggggtgtatctactccattctacgcggctatctgcggtggctgaggagaaaataaatcgtgcttttccttacacacatcacacttctcttaggtgaagtagcagcagccaggttccctaacccgtacatatcctccctc

SEQ ID NO: 6136 - DNA, 834 bp, Homo Sapiens
ggcaagaatgcgattgcatctgattcagaagcggatagtgacactgaggtgccaaaagataatagtggaaccatggatttatttggaggtgcagatgatatctcttcagggagtgatggagaagacaaaccacctactccaggacagcctgttgatgaaaatggattgcctcaggatcaacaggaagaggagccaattcctgagaccagaatagaagtagaaatacccaaagtaaacactgatttaggaaacgacttatattttgttaaactgcccaactttctcagtgtagagcccagaccttttgatcctcagtattatgaagatgaatttgaagatgaagaaatgctggatgaagaaggtagaaccaggttaaaattaaaggtagaaaatactataagatggaggatacgccgagatgaagaaggaaatgaaattaaagaaagcaatgctcggatagtcaagtggtcagatggaagcatgtccctgcatttaggcaatgaagtgtttgatgtgtacaaagccccactgcagggcgaccacaatcatctttttataagacaaggtactggtctacagggacaagcagtctttaaaacgaaactcaccttcagacctcactctacggacagtgccacacatagaaagatgactctgtcacttgcagataggtgttccaagaccccgaagattagaaatcttgccaatggctggtcctgatccctgaatggccacgccccggaaatggtttaggaaagaaagagcaaacgtttgaagggccttccctacgttaggggaatctccaccaaccgcccaattgagaagagaaaccgc

SEQ ID NO: 6137 - DNA, 778 bp, Homo Sapiens
  misc_feature (623)..(640): n is a, c, g, or t
ggggcagttggcagcttcacctcagagctgcaggaaggaacggggcagtgaaaatcgaatcgggtgtgatcctaggccaagctcatggcccagcagggccagcaggggcagatggcaagtggagacagcaatctcaacttcaggatggtcgcagagatccagaacgtagagggtcagaacctgcaggagcaggtttgccctgagcccattttcaggttcttcagagaaaacaaggtggagattgcaagtgcaataacaaggccatttcctttccttatgggcctccgagaccgctccttcatctccgagcagatgtatgaacattttcaagaagcttttagaaacctggtcccagtgacaagagtgatgtattgtgtactcagtgaactggagaagacatttggctggtcacatctggaagcattgttcagcaggattaaccctgatggcctatcctgatttaaacgagatttacagacccttccagaatgaaaatttatcatccagtgcagtcctgggtcaacttgtttctccaacaaagactggagaagtcacgaagagagcctagcacatactggtacccctgagaggagctgcctgtgaaagctataaagacagaaaannnnnnnnnnnnnnnnnnccttttcccgacccatggggtttaaatttccaaacttgtggggaaggcaaggctgatgaagaacttgaccttttggaacaaaagaaaattgaaagcggcatttcttggcaaagggtttttgcacccccctggggggtc

SEQ ID NO: 6138 - DNA, 1045 bp, Homo Sapiens
  misc_feature (833)..(849): n is a, c, g, or t
aactactccatttgaggattgtaattcccacccctctatgcttcttccccactcacatctaccagaacctcttacctttggccttctactccaatacataaaggacacagacaagtgaacttgctgaaagggcaaccatttcaggatcagtcaaaggcagcaagcagatagactcaaggtgtgtgaaagatgttatacaccaggagctgccactgcatgtcccaaccagactgtgtctgtctgtgtctgcatgtaagagtgagggagggaaggaaggaactacaagagagtcggagatgatgcagcacacacacaattccccagcccagtgatgcttgtgttgaccagatgttcctgagtctggagcaagcacccaggccagaataacagagctttcttagttggtgaagacttaaacatctgcctgaggtcaggaggcaatttgcctgccttgtacaaaagctcaggtgaaagactgagatgaatgtctttcctctccctgcctcccaccagacttcctcctggaaaacgctttggtagatttggccaggagctttcttttatgtaaattggataaatacacacaccatacactatccacagatatagccaagtagatttgggtagaggatactatttccagaatagtgtttagctcacctagggggatatgtttgtatacacatttgcatatacccacatggggacataagctaatttttttacaggacacagaattctgttcaatgctgttaaatatgccaatagtttaatctcttctattttgttgtcgttgcttgtttgaagaaaatcatgacattccaagttgacannnnnnnnnnnnnnnnnatttaaaattggaaattctgaaaaaccaatgaaacagaagaaataatgattctatggcgggcgcctcggcccctcaaaaccttttcaaaacatttcgtttggggccgcgggccccggtaggtaaatggacattggccatagcttggttccaaggaaaatcctgggcaataaactaatgctttggattccccccact

SEQ ID NO: 6139 - DNA, 1397 bp, Homo Sapiens
agcggaccagcgacatttgcactccaattcctcccgctcccacgcgtgcttccaaattattcttcgagctaaagggagaatgcatggcaagttctctttggtagatctggcagggaatgagcgaggcgcggacacttccagtgctgaccggcagacccgcatggagggcgcagaaatcaacaagagtctcttagccctgaaggagtgcatcagggccctgggacagaacaaggctcacaccccgttccgtgagagcaagctgacacaggtgctgagggactccttcattggggagaactctaggacttgcatgattgccacgatctcaccaggcataagctcctgtgaatatactttaaacaccctgagatatgcagacagggtcaaggagctgagcccccacagtggccccagtggagagcagttgattcaaatggaaacagaagagatggaagcctgctctaacggggcgctgattccaggcaatttatccaaggaagaggaggaactgtcttcccagatgtccagctttaacgaagccatgactcagatcagggagctggaggagaaggctatggaagagctcaaggagatcatacagcaaggaccagactggcttgagctctctgagatgaccgagcagccagactatgacctggagacctttgtgaacaaagcggaatctgctctggcccagcaagccaagcatttctcagccctgcgagatgtcatcaaggccttgcgcctggccatgcagctggaagagcaggctagcagacaaataagcagcaagaaacggccccagtgacgactgcaaataaaaatctgtttggtttgacacccagcctcttccctggccctccccagagaactttgggtacctggtgggtctaggcagggtctgagctgggacaggttctggtaaatgccaagtatgggggcatctgggcccagggcagctggggagggggtcagagtgacatgggacactccttttctgttcctcagttgtcgccctcacgagaggaaggagctcttagttacccttttgtgttgcccttctttccatcaaggggaatgttctcagcatagagctttctccgcagcatcctgcctgcgtggactggctgctaatggagagctccctggggttgtcctggctctggggagagagacggagcctttagtacagctatctgctggctctaaaccttctacgcctttgggccgagcactgaatgtcttgtactttaaaaaaatgtttctgagacctctttctactttactgtctccctagagatcctagaggatccctactgttttctgttttatgtgtttatacattgtatgtaacaataaagagaaaaaataaatcagctgtttaagtgtgtggaaaa

SEQ ID NO: 6140 - DNA, 1019 bp, Homo Sapiens
  misc_feature (774)..(887): n is a, c, g, or t
ataactttaaccgaaggaagggtttggttccattcaactccacattcattgtgcctttacttgcattagatttctgtgctttcttcctttccctctttgaagcaattaaaatcttccttgataactgctgtttctttctactcttgtttctggcaatttagtgggttccttctctagtggtcttaaatctcattccactggtggcaagatggggcctagccttcttttcacatgtctaatcttttcctttctcatggtgccctccatggaagtcacagtcaacactgaataaatgactagaatgcacacgtgttgcgtgcgcacgcgtgtgcgtgtgtgtgttcatctgtctgcatgtggatcaatttcttttagaaaataatttattgtatgatttattttggagttatattctgattacagtgctccctctcccaaatagcattgatattttcccccctataaaatgtataatctggtctcaggttggattctttggtacatttctctcttctggatgccatgcagcttaattaaaaccttgcttaaaaacaaaaagtgaaaattgtgtactcttgtctggaataccgcctcaggtggtggcacagagaggggagaaaacctttgcctcataatttgggtaagtgtagtggtttgattccaggtcccttgaaaaagtagatctactgaattgggcagactcatctatagctttctgaggggtcttctctcctcctctccagctgtattttgaaaattacagttctagttggnnnnnnnnnnnnnnnnnnnnnnnnnnnnnnnnnnnnnnnnnnnnnnnnnnnnnnnnnnnnnnnnnnnnnnnnnnnnnnnnnnnnnnnnnnnnnnnnnnnnnnnnnnnnnnnnnnaacccccgtcttctactgaaaaataaccaaaaattaaccccggcggtccttgggcgcaatggccttggtgggtccccagatcttacctcggggaaaggcccccaaggctacggaaaaaaatacccccttttg

SEQ ID NO: 6141 - DNA, 617 bp, Homo Sapiens
cctttgggagaatgacatatctttagtatttacgtagcttattcttctatatctacatatgcaaagctttccttaacagtaaagggtacatatgcatagtgggaggagatcagacctttacaagtgaaggaaagcaacttcagaaatgaattattttctttgctttattatttttaccaagacagagaagtattgtattgagagataatctattttcataatcaatatgtgcctaaattatatttaaatcatttcactctgtactatattttcaggaattacagaatgtggtattcattcacttaaaggtacctctgtagaaataacctaaaactgcagaaggatctgaaagatctaaacatggtgtgcttagaaactgcagattttagatctaatgtatactgcattaataaatgatataaagtgtttgttgaaaaggagtttcttctcttccttttgaaaatcatcactttctgtattttgcttacatttcttcaatatgtgttgacaaccagccctgtggttctgggtagcaaaggaaatacagtataacttaatttgttatggattagtctttttgaaagcaccattaaagtaaatttatttctttaaacatg

SEQ ID NO: 6142 - DNA, 819 bp, Homo Sapiens
acccctatgcaaagtgtccaagtattcatcagtatttatcacataatcactgtcatttgctctgtgtccataaggaaagtgtatatttgaggtcaagtggatgcaagatgagatgtggggaagaacccaggaaacgtttttaaatttaaactctctctggccatctgggatgcattcttaaaacattacatgcttatgcgaatggatgaagacagtatgttctgccatcacatgtataaatataaatgatctatttcagaattgttactctgagcctaacacagtcttccccactttcagatctccgccaatgacttcattgcccagaagagaagaaaatgcatttaagtggaaatcggacctctaatccaagcatattgcttgctattaatcgccaaaacaggactgctgatgaggaatgtatttgcatatgtttgccaaagctgaatcattgaaaacgtaccttgaaactctctatctctggacactccagggtagagaatgaagggtatggaagtagtccggcttttgaaacttaggtattttatatttttcccctcaagaacttttttttaagagacagatttgccatcctccttaatttgcaggactgccttggtggctttgtttgctgggacaaggcccacaacctgtgcctctcctattgacccttactttgaattcaaagaatctatttaagagtttaatatatgaggctttctttgattcctcctcagttctacctagtttcacagaggaaaaaaatactctttgaataaagtgaacagaggctcatttgtttgtgcctcactttactat

SEQ ID NO: 6143 - DNA, 429 bp, Homo Sapiens
gaaaattgtgcaaagcataggtaaatatttttctttattaagcttctcactgagaagccctctttattttggtaaatgtcactctgtttgttaggagatgtctgcttttccatgaaatgaaatagtggctaaagccctgaaagaggcaagactacaatgggctgaaacagttggtatagcaaccccagagaagtgcttcattttctttttatagtagaagcaggtccatgtcttttgtggtttcctgcacatctttggagtagttatgacttctcagtttttccccccttaaactgcattgcctattcttttttcctgacatgctatcaggtatcagtgtgttgaatacataatgcttgtgtatcagacttacgttactgtcatcaccattaaaagaattgcagccttgtgccccatgaccttcaaaaa

SEQ ID NO: 6144 - DNA, 422 bp, Homo Sapiens
  misc_feature (21)..(21): n is a, c, g, or t
aagccacaaagggccaaccanggaggcccctggagcccagatctgttcatctggtgctgccagctgtgctcactctggttttctgctcagggtctgaagcagctgctgtctccctcctctgcccccatcccctggctctcccctgggcacagtgccactcccttggaagggagggaaccacccgtgagccccagggcttgggaagcctgaggcgggcctctgcctctccctgcccccagcacaattggcagagatgaggcgggtggtggacggctgggctgtcgtggcagggtctgcacagggccatgtcctggctgtaacccaggcagtgggaggtctgcagcctggtcatggcctccacagcaggtccctgtggacagacatatctgcatatttatcaataaagccttttgctccttctc

SEQ ID NO: 6145 - DNA, 1606 bp, Homo Sapiens
  misc_feature (1412)..(1412): n is a, c, g, or t
  misc_feature (1440)..(1440): n is a, c, g, or t
  misc_feature (1485)..(1485): n is a, c, g, or t
  misc_feature (1499)..(1499): n is a, c, g, or t
  misc_feature (1511)..(1511): n is a, c, g, or t
ctcccaaggtcctctcagttctctcccttcctctctccttatagacacttgctcccaacccattcactacaggtgaaggctctcacccccatccctgggggccttgggtgagtggcctgctaaggctcctccttgcccagactacagggcttaggacttggtttgttatatcagggaaaaggagtagggagttcatctggagggttctaagtgggagaaggactatcaacaccactaggaatcccagaggtgggatcctccctcatggctctggcacagtgtaatccaggggtgtagatgggggaactgtgaatacttgaactctgttcccccaccctccatgctcctcacctgtctaggtctcctcagggtggggggtgacagtgccttctctattgggcacagcctagggtcttgggggtcaggggggagaagttcttgattcagccaaatgcagggaggggaggcagatggagcccataggccaccccctatcctctgagtgtttggaaataaactgtgcaatcccctccgccaaacaaaaaacataaccccaatcactaatcccccccagttcccctcattccccttacaaaattccgagccccttgtggcccccttgggtcctaaaaaccttttccacctattccctttggtcggcccggcccccataagtacaatgaacccttgcttccccttttgccccctctaagcgaccccctgcgttaattaccctcgctggccctggcaccttcccctacaaaatcccaacactatcccgctcgcggctctcaccccataagcgctctccccaataatataacccccatatagcgcgatctccttggcccgcccttttcacccgtgtaatctccctcgttaacactgcgctccctcaaagatgccgcgctcccacatattcacaccctttaaccgctcccacgtgtcccgttggtccctctctccacgctcgatagaacgtggtggttctgtactctacacctcataattctctctctttttcccccacttggcgggacgttccttactccgagcaccaccggcgctcgtagggacactctcgtccaacttcgcgtagcggcatagctacacttatgattcacctcttggtccgcgctcctcttgatgtatattatctacattcttacgacccctagcgaacgccaccacgcgcccggccctcctacaatactaattgtgtctctcctctcttttcgctcgcccccatttcactaacaccgccacgcaccggcggcgcgaaacaatagcttcatacatcacgccggtctcactgttgtctctatgaccaacactcaacacaacatattctatgtctcgttgtcctagtatagtacccgcccgcatctctcttcgtgctatcataataacgngctcatactatgtactactcctcctcgncgcagatcatcctgcacgcgacgcgcacgttcctcctagcaccgnactaatcatcactngttggtgtaganacacacaacacctatgtctctcagatatatcggcggcgccagcggctgttaatcacgcgcctcctcagtcgatctatgcacgcacacgattcctt

SEQ ID NO: 6146 - DNA, 1020 bp, Homo Sapiens
  misc_feature (543)..(543): n is a, c, g, or t
aggcacataagtcaacaagggctttatgtggcgggtaagagaaattatttactaaatgcactatgtataaaggtgaaagatagtttacttatctgactttgatattagatggctgacattagtgcacataatgcagagtttaaccttgattcttcaacagagtccagatttaaatgtctacttagttaattagttagctgatattcttccacaattaatatattcaatttcccatcagtatatcactttaaattttatgtttttctaaggaaactttccacagaattttaaacaactgatgcatccatactcagggtgtagggagaatactttgcatttaaaaaccctgtccacctgtcaccagcacaagagaattagagcttcagtgagaatttagaaaaattatactaaagagagatgcattttttctcattttcagcaagactcctctaaccatttactcatttactgtattcctgctctgaagatgtggatacagaatcagtcactcttggcactttatttatttattgggtttttttnaaccatctgtgtacattcctttcatagggtagagttctagttctagaagttcttattttgtttttgttgtaatgtttgaatactatttaatatccggttttaatattgctggatttgctacctttggttacttgtgcagtgttaaaagtaatccactttcttgtttaatataccagatacatagcaaaagcagcttggaataattatagctgtttatttggctgtgctcagttactatattaagatcttgtactgtgtaacagtaactcttttttgcttttcagtaatttaatatgttcacttaacaaaatacgaactttgagatgcactaaagttttgtttcagcagtggctcaaaaaatttcagaaattacttttgtaattatttgcaattaattgttcttttatcttacaattgtttaagcctgtgatctttcttctcccagctaagagttcttcaataaatttaagaaataaa

SEQ ID NO: 6147 - DNA, 1313 bp, Homo Sapiens
  misc_feature (49)..(75): n is a, c, g, or t
aagttttgtctttattgagatccttatttgttgaattattgtcattgcnnnnnnnnnnnnnnnnnnnnnnnnnnnaacttcaggagtacacgtactgtgtgaacctcaccctgggggatgacacaagcctggctctcacgagcaccctgatttctgttcctgacagagacccagcctcgcctttaaggatggcaaacagtgccctgatctccgttggctgcttggccatatttgtcactgtgatctccctcttggtgtacaaaaaaacacaaggaatacaacccaatagaaaatagtcctgggaatgtggtcagaagcaaaggcctgagtgtctttctcaaccgtgcaaaagccgtgttcttcccgggaaaccaggaaaaggatccgctactcaaaaaccaagaatttaaaggagtttcttaaatttcgaccttgtttctgaagctcacttttcagtgccattgatgtgagatgtgctggagtggctattaacctttttttcctaaagattattgttaaatagatattgtggtttggggaagttgaattttttataggttaaatgtcattttagagatggggagagggattatactgcaggcagcttcagccatgttgtgaaactgataaaagcaacttagcaaggcttcttttcattattttttatgtttcacttataaagtcttaggtaactagtaggatagaaacactgtgtcccgagagtaaggagagaagctactattgattagagcctaacccaggttaactgcaagaagaggcgggatactttcagctttccatgtaactgtatgcataaagccaatgtagtccagtttctaagatcatgttccaagctaactgaatcccacttcaatacacactcatgaactcctgatggaacaataacaggcccaagcctgtggtatgatgtgcacacttgctagactcagaaaaaatactactctcataaatgggtgggagtattttggtgacaacctactttgcttggctgagtgaaggaatgatattcatatattcatttattccatggacatttagttagtgctttttatataccaggcatgatgctgagtgacactcttgtgtatatttccaaatttttgtacagtcgctgcacatatttgaaatcatatattaagactttccaaagatgaggtccctggtttttcatggcaacttgatcagtaaggatttcacctctgtttgtaactaaaaccatctactatatgttagacatgacattctttttctctccttcctgaaaaataaagtgtgggaagagacaaaaaaaa

SEQ ID NO: 6148 - DNA, 809 bp, Homo Sapiens
gggaactgtcctggattgtgaggagaaagactgggacttctcgatgaatctcaatgtgcgcagcatgtacctgatgatcaaggcattccttcctaaaatgcttgctcagaaatctggcaatattatcaacatgtcttctgtggcttccagcgtcaaaggagttgtgaacagatgtgtgtacagcacaaccaaggcagccgtgattggcctcacaaaatctgtggctgcagatttcatccagcagggcatcaggtgcaactgtgtgtgcccaggaacagttgatacgccatctctacaagaaagaatacaagccagaggaaatcctgaagaggcacggaatgatttcctgaagagacaaaagacgggaagattcgcaactgcagaagaaatagccatgctctgcgtgtatttggcttctgatgaatctgcttatgtaactggtaaccctgtcatcattgatggaggctggagcttgtgattttaggatctccatggtgggaaggaaggcaggcccttcctatccacagtgaacctggttacgaagaaaactcaccaatcatctccttcctgttaatcacatgttaatgaaaataagctctttttaatgatgtcactgtttgcaagagtctgattctttaagtatattaatctctttgtaatctcttctgaaatcattgtaaagaaataaaaatattgaactcatagcaggagaatagtttttaaaataaatctcgattggtgtagcaaaaaaatggaaggatagagagtggaaggaaggaacaaagatgagagaccaagaagagaggggg

SEQ ID NO: 6149 - DNA, 683 bp, Homo Sapiens
ggatagattccttgagtggaatagtgggctatataccgaaatatttccattgtttcccttttttgcagagcatgtggaagttaaacctgcttgattctactatacatcttgggcaactagttaccaaatgaattgtgccaccataactgattttaattttgcattatttatgattttaaaatatttgttgcccaggtgttatgaaagaataaagcttttaagtatagactaccttagcatgaagatgctcatgcctaagaatgaaaattgttgaggttatctcccattcaatcatgtagcaagaacttaaagaaattcactactgcagtttttatttttaaaaaacagtaattgagatattgaagacattacaatttagtttgtgtggtctttttttaaattgctgtatcgttcagtctcttgtggcaatagcactttgaagaaaatagagaatttaatatatggtgattgggatatgtagcattcaaaaaaagtgaattgccaagatactggtgtcatgtaaattcccactttacataaaaacccatcaggacagaatgatgctcaatattttaaaattctaaaaatagggtgggatttttcattgtctctactttataattatcaaaacttattttgtattgctactaccttaaattgaaataaaatgtttatacttacgg

SEQ ID NO: 6150 - DNA, 1675 bp, Homo Sapiens
ggcgtgggcagcacaagccgtgcgctcccgggctgcgaggtctggctaggctacgggccacgcgccgccgccgctgccgccgccactgtcctcttcggaggcgcgggcccgacggaaaccatgtttgtggctcgcagcatcgcggcggaccacaaggatctcatccacgatgtctctttcgacttccacgggcggcggatggcaacctgctccagcgatcagagcgttaaggtctgggataaaagtgaaagtggtgattggcattgtactgctagctggaagacacatagtggatctgtatggcgtgtgacatgggcccatcctgaatttgggcaggttttggcttcctgttcttttgaccgaacagctgctgtatgggaagaaatagtaggagaatcaaatgataaactgcgaggacagagccactgggttaaaaggacaactctggtggatagcagaacatctgttactgatgtgaagtttgctcccaagcacatgggtcttatgttagcaacctgttccgcagatggtatagtaagaatctatgaggcaccagatgttatgaatctcagccagtggtctttgcagcatgagatctcatgtaagctaagctgtagttgtatttcttggaacccttcaagctctcgtgctcattcccccatgatcgccgtaggaagtgatgacagtagccccaacgcaatggccaaggttcagatttttgaatataatgaaaacaccaggaaatatgcaaaagctgaaactcttatgacagtcactgatcctgttcatgatattgcattcgctccaaatttgggaagatctttccatattctagcaatagcgaccaaagatgtgagaatttttacattaaagcctgtgaggaaagaactgacttcctctggtgggccaacaaagtttgaaatccatatagtggctcagttcgataatcataattctcaggtctggcgagtgagttggaatataacaggaacggtgctagcatcttcaggagatgatgggtgtgtaagattgtggaaagctaattatatggacaattggaagtgtactggtattttgaaaggtaatgggagcccagtcaatgggagttctcagcagggaacctcaaatccttccctaggttcaaatattccaagtcttcagaattcattaaatggatcttctgctggcagaaagcacagctgagtacaagctaactggagtaactttgctgttttgctgcttgttgcatgcacacaggaatggaaagcgagctccttttccccttccccagcgccgtttgacctctcccaagatacaccagcagcctgcttactactaaacgcaatccaaaaggcctttaaaaatacagtgtatattttttgtactagtcagtttattgacactatttgaaacttttgaaatataaacggagaggctttctgttgagacattgtcaccaaaacaattttttgaaatgttcctgaaactaatttgggtttaaagattaaaagggttgttaccattcttatctgagtagttgggaggaggggaataccactttagttcatttggaaaatatagacatatttcttttgctttcttaaaacagcttaaaatgatgaacttttataattttaatttgaagattgaataaatattttttataaagacccac

SEQ ID NO: 6151 - DNA, 763 bp, Homo Sapiens
  misc_feature (81)..(81): n is a, c, g, or t
  misc_feature (86)..(86): n is a, c, g, or t
  misc_feature (117)..(117): n is a, c, g, or t
  misc_feature (150)..(150): n is a, c, g, or t
gacatgcgcgtgcagcttcagcattcatttggttcaagcacagttctggcaacgacgtgtcttgccacatgtcttgatgangagcncgagaaggatgctcaggacagatcactcatncaggctctgacagctctccaggagtaactgacnaagctgtaccatggccgggaactcgcaaagaagcagctgcgagccacccagcagaccattgccagctgcctttgcaccaacctcgtcatctcccaggggcctttcctgtactgctctctcatggagggcactccagatgtcatgctgttctctaggccggcatccctaagcctgctcagcaaacacctgctcaagtcctttgtgtgttcgacaaagaaccggcgctgcaaactgctgcccctggtgatggctgcccccctgagcatggagcatggcacagtgaccgtggtgggcatccccccagagaccgacagctcggacaggaagaacttttttgggagggcgtttgagaaggcagcggaaagcaccagctcccggatgctgcacaaccattttgacctctcagtaattgagctgaaagctgaggatcggagcaagtttctggacgcacttatttccctcctgtcctaggaatttgattcttccagaatgaccttcttatttatgtaactggctttcatttagattgtaagttatggacatgatttgagatgtagaagccattttttattaaataaaatgcttattttagggctccaaaacacacacaaac

SEQ ID NO: 6152 - DNA, 1055 bp, Homo Sapiens
  misc_feature (696)..(813): n is a, c, g, or t
  misc_feature (836)..(992): n is a, c, g, or t
gggcagtcacccgcagcaggcgtgcagtttcccggctctccgcgcggccggggaaggtcagcgccgtaatggcgttcttggcgtcgggaccctacctgacccatcagcaaaaggtgttgcggctttataagcgggcgctacgccacctcgagtcgtggtgcgtccagagagacaaataccgatactttgcttgtttgatgagagcccggtttgaagaacataagaatgaaaaggatatggcgaaggccacccagctgctgaaggaggccgaggaagaattctggtaccgtcagcatccacagccatacatcttccctgactctcctgggggcacctcctatgagagatacgattgctacaaggtcccagaatggtgcttagatgactggcatccttctgagaaggcaatgtatcctgattactttgccaagagagaacagtggaagaaactgcggagggaaagctgggaacgagaggttaagcagctgcaggaggaaacgccacctggtggtcctttaactgaagctttgccccctgcccgaaaggaaggtgatttgcccccactgtggtggtatattgtgaccagaccccgggagcggcccatgtagaaagagagagacctcatctttcatgcttgcaagtgaaatatgttacagaacatgcacttgccctaataaaaaatcagtgaaatggtcnnnnnnnnnnnnnnnnnnnnnnnnnnnnnnnnnnnnnnnnnnnnnnnnnnnnnnnnnnnnnnnnnnnnnnnnnnnnnnnnnnnnnnnnnnnnnnnnnnnnnnnnnnnnnnnnnnnnnncctttgccgccccccccgccccnnnnnnnnnnnnnnnnnnnnnnnnnnnnnnnnnnnnnnnnnnnnnnnnnnnnnnnnnnnnnnnnnnnnnnnnnnnnnnnnnnnnnnnnnnnnnnnnnnnnnnnnnnnnnnnnnnnnnnnnnnnnnnnnnnnnnnnnnnnnnnnnnnnnnnnnnnnnnaggggttttgggggcttttctgggattaataaaagggagcccagggaatttaaaaataaaata

SEQ ID NO: 6153 - DNA, 905 bp, Homo Sapiens
  misc_feature (393)..(436): n is a, c, g, or t
  misc_feature (544)..(553): n is a, c, g, or t
gtgtggggtgcgatgagaggatagtgccacacaagcacgcggctggtggcggataagagtggtgacgcgccccgcacgtgttcttctctgcttctcgagagtttgaacggcgccgctctgtgttgatgagccccccgactggtttttgggctctctatctatgtcatgtgtatcaaagaggtgtgggaggttgcgcatgcgtatacccccccaacagggggggagaatagtgtcgttatatataagaagaaggcggtttttcttgtgagtggggggcccacgagaataggtgaccgccaccccccacaagggcggggaacggctctggtgggcgggggggtaggtcgttgcgtgtggcgcggcggcgggggaaagtcgacatgagtggcggtnnnnnnnnnnnnnnnnnnnnnnnnnnnnnnnnnnnnnnnnnnnntgctggtatatatggctccccggcggcgggccgagcgtgcgtttggaggttgggccccgggggttaggagtaggtgaagggtgttattttttttggagggcaaagacnnnnnnnnnnaattggacttggctttgacgagtactgacaaaccctgcagacactagtacaatttgatcgtaaacaaagtccttgccagcatagtccagcaaattctgataaaacacatacaaaagttaaaagacagctcgatttcatcttcctcccaacacctgcaactgtttccagattttctgtgtagtcttctttgtgctttcagttcagtaaaaattagaaaggataacaaacttgtaaagtcagatacctaattgtacaaaattgactagaccatggagaagggggaagcatcattttacaaaatattgttaagatcaccagcattaatttaaattattttcctttctggacttcc

SEQ ID NO: 6154 - DNA, 519 bp, Homo Sapiens
caaaaaccctttactctggagaacctttcccgtttacggtttttccccccctgtcttcccacaggctttatttaaccgtagaaccacagatttgacatttcgctcaggaaataatttgagttgattcagaaatcctggcatgtgacaattttgttaaattaccaagtttggtttttaataatttctcaatattatgcgccaagatctaattttaaaactgtatgaggactttgtgctgaaaatagagtatttttttaaagtaaggctgtcttggtttaaaagcagattacagaaatgtaagtcaacttaagaacagtgaatgaatgtaaaaacattcagtcgagaccatatgcattttctgtgctgtttgtacttgaggtatgtaacatttgtatacctgaacttattttaaagatgaactgaaatgcacatagccaagtcttgagatacaagattgaatgtgtatttcttaaaaatacaactttgtgttgtactttgaaataaatgatgcttttttcc

SEQ ID NO: 6155 - DNA, 549 bp, Homo Sapiens
catgggagcacgtgagagagaggagttgccaaaagaaatacctaagcaggaccacattcacagagtgaccgccttggtgaatgggaacatagaacagatgggaaatggattccaggatcttcaagatgacagcagtgaggagcaaagtgacattgttcaagaagaagacaggccagtctgaagaagaggatggtccatggttgtcttgctctgaaagcttggagagctacattgaagacgagctcttcattcagctttgactccacctgcacccctggcgggggcttgcactaacaatgtttgggtctcagcaaaaaacaaaaccaagcacacacatctttccttccatgtattgaaaaacattggttggatgttgctctaagttttcccaatgatgtttaaaagctttgagaaggaaagctgctttggtgtctgaggtgccacttctgctgtgaatcctggctttatccaggttgatctactgtgatagatgctgatttagagggaacagaggtcagggaagcactgggtcttggtgccttttgccgc

SEQ ID NO: 6156 - DNA, 777 bp, Homo Sapiens
  misc_feature (230)..(338): n is a, c, g, or t
  misc_feature (413)..(650): n is a, c, g, or t
gggagggctagtggaagacttaagatggcggcgtttgcacggagtgcaatcactgcgtccttacgggggttgcaaggcgtccgaagtatgagtccactaacaaaagtccagaaactcgccagttaatagtattgtgtctcttcaaaatatcggagaataatttctttctcgctgatcgcctaacttctactgacgaagcttggaagttgcagaagatggagttcgctctnnnnnnnnnnnnnnnnnnnnnnnnnnnnnnnnnnnnnnnnnnnnnnnnnnnnnnnnnnnnnnnnnnnnnnnnnnnnnnnnnnnnnnnnnnnnnnnnnnnnnnnnnnnnntactggctcctgtatcacccagctctggagttgaaagagctcttcattcctgagtctcctgtaccactgagaatnnnnnnnnnnnnnnnnnnnnnnnnnnnnnnnnnnnnnnnnnnnnnnnnnnnnnnnnnnnnnnnnnnnnnnnnnnnnnnnnnnnnnnnnnnnnnnnnnnnnnnnnnnnnnnnnnnnnnnnnnnnnnnnnnnnnnnnnnnnnnnnnnnnnnnnnnnnnnnnnnnnnnnnnnnnnnnnnnnnnnnnnnnnnnnnnnnnnnnnnnnnnnnnnnnnnnnnnnnnnnnnnnnnnnnnnnnnnnnatgaaccacccgcgtccaccaagaaataggtggattttccaacttgggaaacatttccgaaaattattcgcctcccattttccagaattgagtaagtcccccaaggaaaatttccgggaaatctcca

SEQ ID NO: 6157 - DNA, 1296 bp, Homo Sapiens
  misc_feature (104)..(104): n is a, c, g, or t
  misc_feature (948)..(1070): n is a, c, g, or t
tccagcaatggacggcagtgaaagcctcagcttggctttaaccgtgaccggaggcctgtgcacctggatcaggcagccttcaggactttgggccatgtgatgcnaagaggctcaggaactggcatttacagcaatgctgcaccaccacctgtgacttaccagggaaacttatacaggccgcttttgagaggacaagcccagattccaaaacttatgtcaaatatgaggccccaggattcctggcgaggtcctcctccccttttccagcagcaaaggtttgacagaggcgttggggctgaacctctgctcccatggaaccggatgctgcaaacccagaatgcagccttccagccaaaccagtaccagatgctagctgggcctggtgggtatccacccagacgagatgatcgtggagggagacagggatatcccagagaaggaaggaaataccctttgccaccaccctcaggaagatacaattggaattaagcttttgtaaagctttcccaaatcctttcatcattctacagttttatgctatttgtggaaagatttctttctcaagtagtagtttttaataaaactacagtactttgtgtatttcttttaactgtgtatatttctactgatctgatctcactgtttatgttgctttccaaagatgtatgttgcataatacagtggatctgaatttattattgcttataaaacacatttgatggaataggagtactggtttttcataatggttaaaaatgaaaccagctgtggatttcaaaacacagtgtattctagatcatctaagatccatgctgatttttattgcacaagaattaggtttgaactcttgagctggaacctcagcaaactagagtatatattgttcagtatttctttggaaacatttcattaatgtacttgtcttacagaaatttctgaactttagtnnnnnnnnnnnnnnnnnnnnnnnnnnnnnnnnnnnnnnnnnnnnnnnnnnnnnnnnnnnnnnnnnnnnnnnnnnnnnnnnnnnnnnnnnnnnnnnnnnnnnnnnnnnnnnnnnnnnnnnnnnnctttctcattcgacacaagatcccaagaaagaaatggaactagctactatgtgttcccagggaccacctgataaagtatgcatgcttgatttcctaccatataaaaaccccggggagaaaccgggcgcctatgaacctaaccaaaagaacccccgatgatttaactggttctatcaagcggatccataacgagctcggattcaattgggccccgcgcatgccactc

SEQ ID NO: 6158 - DNA, 454 bp, Homo Sapiens
ggcggatacggcggcggcagctccagcggaggccacaagtcctcctcttccgggtccgtgggcgagtcttcatctaagggaccaagatactaacaaaaccagagtaatcaagacaattattgaagaggtggcgcccgacggtagagttctttcatctatggttgaatcagaaaccaagaaacactactattaaactgcatcaagaggagagagtctcccttcacacagaccattatttacagatgcatggaaaacaaagtctccaagaaaacacttctgtcttgatggtctatggaaatagaccttgaaaataaggtgtctacaaggtgttttgtggtttctgtatttcttcttttcactttaccagaaagtgttctttaatggaaagaaaaacaactttctgttctcatttactaatgaatttcaataaactttcttactgatgcaaactaaa

SEQ ID NO: 6159 - DNA, 668 bp, Homo Sapiens
  misc_feature (56)..(69): n is a, c, g, or t
  misc_feature (115)..(123): n is a, c, g, or t
ggggccagaggtagccggagtgtgtcacagcccctcagatgcctttccttccaccnnnnnnnnnnnnnnaagaatcccaaataactcactgaagtgtctaaaaggcgaacaagtnnnnnnnnntgaatcctttttcagttaacagatcaaatggatgagttctgagcctctcaagttcctttccccagttagagtggggaactgggcaagtgttaactgtgggactcactgcagcgtcctatcctaaaggcacgagaagacggaaatgcaacctgcggagctgggcttggttcccaggtcacagtttggcccccgctacaggatgctgccctgctcagagagagatttaatagggagctgaaggaatcgttagggggccagggagatgtgactgaggctggctttccacgtgaatgagacggggtcggtggagggtttggtgctacagccagtcagaagatttgcaaatgcgaacacattcctgtgtgaggcacgttaccctttgtcagttgttgtgaatatgtgtattttaagcaataagattcagctggtcagacttttctgggcagtctcagtgacgcatttcctgtgctgtgattgttctgaagacagagtggctctaaccactgtgagaagcccaaataaaaattgatcccaaaaatgctccc

SEQ ID NO: 6160 - DNA, 1288 bp, Homo Sapiens
  misc_feature (628)..(686): n is a, c, g, or t
gggaagaggaagagagagaaactacaggaatctgcatcaggtacaggtccaagaatgacagctgcctacatctgaaacatggtggaaaacgaagctcattcccaacgtgcaaagccaaggcagcgaccccaggacctcttctggagatggaagcttgttgaaaacccagactgtctccacggcctgcccagtcgaccccaaaggaacactgacatcaattttaccctgaggtcactgctagagacgctgatccataaagacaatcactgccaacccctctttcgtctactgcaagagccaagttccaaaataaagcataaaaaggttttttaaaaggaaatgtaaaagcacatgagaatgctagcaggctgtggggcagctgagcagcttttctccccccatatctgcgtgcacttcccagagcatctggcatccaaacctgtaaccttgcggcaaaggacggtaacttggctgcatttgcctgtcatgcgcaactggagccagcaaccagcacatccatcagcaccccagtggaggagttcatggaagagtccctctttggttctgcttcattttactttcttttcttttctcctaaaagcttttatttaacagtgcaaaaggatcnnnnnnnnnnnnnnnnnnnnnnnnnnnnnnnnnnnnnnnnnnnnnnnnnnnnnnnnnnnctggtatatttggctagctatgagcttttaaataaaattgaacgttccggaaaagtttgaaataatgacataaaaagaagccttctttttctgaaacagcttgtctggtaagtggcttctctgtgaattgcctgtaacacatagtggcttctccgcccttgtaaggtgttcagtagagctaaataaatgtaatagccaaacccactctgttggtagcaattggcagccctatttcagtttatttttccttctgtgtacttctttgctttttttaaacagtaaaccttaacagatgcgttcagcagactggtttgcagtgaattttcatttctttccttatcacccccttgttgtaaaaagcccagcacttgaattgttattactttaaatgttctgtatttgtatctgtttttattagccaattagtgggattttatgccagttgttaaaatgagcattgatgtacccattttttaaaaaagcaaggcacagcctttgcccaaaactgtcatcctaacgtttgtcattccagtttgagttaatgtgctgagcatttttttaaaagaagctttgtaataaaacatttttaaaaattgtaaaaa

SEQ ID NO: 6161 - DNA, 572 bp, Homo Sapiens
  misc_feature (218)..(227): n is a, c, g, or t
gggatgcctagctcatcctgggtttgcttctgaccttgtcatgtgtgtgccaccaaacacgttattggcacctttttaaataagctctcatgatcaagatggtgatggtagagaagctgcccggaataaactgaatttcatatgttctaaaatgactagcaatggtttaaaaaggaagaagagtggaaggtgaagaaggtggtataaatgctgtcaannnnnnnnnnaacccaagtattttggtggggaaaagcaagtatctattgcttagcatatgtaaagttgtagtctatatttatggggccattgcttaaagattataaattatgtaaatacattaataaattctaagtttcatttgacattccattgaatctcgcacccagtcttgcgtatgcctgcccagttttcagcctcttaacgggagactcaagcacattggtattgtataaaggtatagagcacttagcttacaatctttaaaggtttctctgccttcccggctacccacccgcctcccaccagatcccatctggaaatcataataaagacatatgccactttgaaaaaaa

SEQ ID NO: 6162 - DNA, 770 bp, Homo Sapiens
ggcagccaagccgcagtttctgaacacagccaacgtttactgaccgtcctgcgtcttggaccagcctacttttgacccagtgaactattttcacttgaagccagcacagaaggttttcaggcccaggatgctgtctaaatcgggttgatggacaaagagaggctgtttgagcctctgagccaggtgagtttgggatccacagccctcagaaaaccttcaccccttaggaacagagaccaaactgaaataatgacctgtggaatgattccatgcctgctaaaaactcgagggacaaggaacagactcataaattattaattggcctttgtttatgtttcaaagtaaatggtcgttttctttatgctaagtctttgtacctggcacccccatccatacacttttttaaggtaggttagatgtggttaaaaatgacagtaaacccaccagcaagcaaaaataatcttagaaagtgagaggaggtcactgaaacctggcctgaggtttgaagaagatggagaagagttatatttattgagaaccggctctgtgccaggcactagatgttcctccacttacgatggggttacctcccgttgaaactattgtaagttgaaaatatggtaatttgaaaatgcacttaatacccctaacctactaaacatcatggcttagcctagcctaccttaaacatgctcagaacacctaaagttgagcaaaatcatctaacagaaagcctgttttataataaaatgttgaatatctcatgtaaa

SEQ ID NO: 6163 - DNA, 412 bp, Homo Sapiens
gcgggtgggggggagttgggctgtgttggaatgggcctgcagcccaacaaacaagggaactaggaccgacagtgacttcaccagcttgctaggtcagaatgagagactggtgggtctgtctacctgtttcttctacaagatccctatttgactgtaaaagtagctaatactcacatgttctccaatcccaggtagccatggtagagttgggtagagttgagcagctgccccaggatccaaatgtggtgtctgaaatggaaagaactaaggcaaccaggaaggcactgatctgccttataagcacagtcatctgaaagtcaggcctgctgcaggacaggatcccccagagaccccatttgcctctcaacactcagaccttcaactgttttttaataaatctactttttaaaaa

SEQ ID NO: 6164 - DNA, 496 bp, Homo Sapiens
ggaggggaagaaatttgtggcaatgaaagtagttaaaagtgctgaacattacactgaaacagcactagatgaaatccggttgctgaagtcagttcgcaattcagaccctaatgatccaaatagagaaatggttgttcaactactagatgactttaaaatatcaggagttaatggaacacatatctgcatgggatttgaagttttggggcatcatctgctcaagtggatcatcaaatccaattatcaggggcttccactgccttgtgtcaaaaaaattattcagcaagtgttacagggtcttgattatttacataccaagtgccgtatcatccacactgacattaaaccagagaacatcttattgtcagtgaatgagcagtacattcggaggctggctgcagaagcaacagaatggcagcgatctggagctcctccgccttccggatctgcagtcagtactgctccccagcctaaaccagctgacaaaatgtcaaaa

SEQ ID NO: 6165 - DNA, 582 bp, Homo Sapiens
ggccaggagagtccggtggagtccttcatagcctttctacttattgagttggcttgtggattatactttcccagcatgagcttcctacggagaaaggtgatccctgagacagagcaggctggtgtactcaactggttccgggtacctctgcactcactggcttgcctagggctccttgtcctccatgacagtgatcgaaaaacaggcactcggaatatgttcagcatttgctctgctgtcatggtgatggctctgctggcagtggtgggactcttcaccgtggtaaggcatgatgctgagctgcgggtaccttcacctactgaggagccctatgcccctgagctgtaaccccactccaggacaagatagctgggacagactcttgaattccagctatccgggattgtacagatctctctgtgactgactttgtgactgtcctgtggtttctcctgccattgctttgtgtttgggaggacatgatgggggtgatggactggaaagaaggtgccaaaagttccctctgtgttactcccatttagaaaataaacacttttaaatgatacccaggaccgccgcaag

SEQ ID NO: 6166 - DNA, 788 bp, Homo Sapiens
gaaggccggggaacaactctaatccttttggggcaggagggagggtttttttagggttgcggggagggaactgcaagtgcctgaggaccagagtggcctctagccccgaattgaacacttttaaacctaaagagccttattattattagctcgagaaataccacatgccagtcttcccaggaaggtgacctgcctgaccatgaagcaacaaaagagcataggcagacttaaagttggatagacctgggttcaaatcatagttcagctttcaataactgtatgtatgattttggctaaaggatttgactttctctcaactgcagttttcttaatctttgaaatgcaaataatgtttatctcagaagactatttctaggattaactgagagattaaaggaacagcagcacttaggctcaaaatcgcccctacaaagcagtagttgtttcttaattgctaagtaatctgtttgcactctaggaaaagtaaatggagaggtaaaagaaaggcattggggacaaatgaaagagatgatgtagatttttcggatgggtgggtatattttattttccagtttattttcatatttctttactgtgttatttctggaaactttaatggtttaaacctcttttataaaattcaatgacgactactagaattctattcttttcaaaagttaacttatctccaaagtggctgaaaaatattgtttaccattacatgattatgaaatgactgtgaagaatataaaattaaacttagtgacttaattagtcactgccttgct

SEQ ID NO: 6167 - DNA, 721 bp, Homo Sapiens
taagccagtctttgagggatggggctttcaggtgggggcgtttcagcaggtgccgacgagcgctttacaaacgactggctgaacacctttcctcccaggcctttctgccccagcatcactcaatctgctcagtcctcgactgctgcaggggaatgcgtgctcagagagagatgacacttctgaggtggcccccagctctgggtgcagaggagccggggtggggtattcaggccacacttccctgtggccacaggggaaaggaccaggggaaaaaatggggcagggatggccaggctaacaagggggcctttggcctttgtcctttgtactggggagtgaatttgcgcatctcagcagggagggtctcgtagaactgatgttcccttgggaccaggggcttgcacagggttgtctcattgaagcggagcacgcatgagtgccccccgacctggtggacaaagggctccagaaggacgcctttggcgcggggctccacatccatggccctgaaggctgggctcatcctccgggcgcagatggcggggagatgggggaggcagcggagtccagcggccagtacgtcttctgtctgttgtttgtccgtgtgtccctctcgtcttggctccttggcttgttctggccaggatgctctgctgccgcctcagccgggttcctcggcgtttccgtcctattgtttctctcgcaccaaaatggctgcccc

SEQ ID NO: 6168 - DNA, 1327 bp, Homo Sapiens
  misc_feature (584)..(584): n is a, c, g, or t
  misc_feature (1112)..(1112): n is a, c, g, or t
  misc_feature (1114)..(1114): n is a, c, g, or t
  misc_feature (1118)..(1120): n is a, c, g, or t
agagaggaaatgcccatgtccacagcttgtacacactgccccctcactatcttgttatccagcggcatgccaaaggagaactgaattagcttctgaggcttctgctgtaaatcagaagtgtatgttagtcaagagtaaacaagatgcacccagtatggtgggagggttttgctgtcagtagctcaaagtatggtgtagaaatggcctcctccctccatcctgggaagtcccagtcccatcctggtgtgagaatcaaccaggctttcctgctccacctgagataaccaactccctcccgtaatcaggaagccaaatgtcaccttcccaaagaaattttattttcacgtagctgaagtgcaaaacatagatgaccatttttaataagcacaatcaaatttttaaccacagaatgtctacaagaattatagctttaaaaaatacaaccaatttttatatttcaaaaatatttgaactcaaataaattaatttcttaaaaagtacacttctcatactatgtgtttggcattgactctggttaactcttgtgcagcaacacctacgagatgctatcacacacgcgccantgcactcctgcaccagccgctgcaacgactgcacctcacgtggtggcggggactcacattcacaagacgggacgggaacatgcagtaataaaatagctttttaaaaaaaataacacatataaattcatcacataggattatgcttttcactgcacccttgaaggtggcatttatctcaatctgtgactccagctatttagtggcagacaatcccggtgaggcagcctgtggtcccaccttgtaggtggcagcccctgcaatctggggtctagcctgtcggcgtttgctttattgtgggtggagcagctgctgcagaatctgtgagttgacccaacagtcccttacagttctgctacccaaagtggtcttcaatttaggggccctgacccccttccccagctgggagacaagctgccatctccagggctcgctgtaaacagcctccactcctgccctgaataagcactcccaagaagctgggcccctaccaacagattaatcggctgcagagtgctcatccccatcccnanaccnnnatccacccctgcctcctcctcctttccactgctttaaccaaaccttaatgaggtaaggccaggctaggtcagggctcaaaggaaaatgggctcaggaaaacttagtttgcccagccttgtcagctgagattggttttgctttccagccagaagtagaaacttgatgctttttcctttttgcagtgttaaaaaccgtatctccagttt

SEQ ID NO: 6169 - DNA, 557 bp, Homo Sapiens
  misc_feature (521)..(521): n is a, c, g, or t
  misc_feature (527)..(527): n is a, c, g, or t
cccatccagctaccaccacggccaccactgcagccgggggctggccttctcctacttagggaagaaaaagcaagtgttcactgctccttgctgcattgatccaggagataattgtttcattcatcctgaccaagactgagccagcttagcaactgctggggagacaaatctcagaaccttgtcccagccagtgaggatgacagtgacacccagagggagtagaatacgcagaactaccaggtggcaaagtacttgtcatagactcctttgctaatgctatacaaaaaattctttagagattataacaaatttttcaaatcattccttagataccttgaaaggcaggaagggaagcgtatatacttaagaatacacaggatattttggggggcagagaataaaacgttagttaatccctttgtctgtcaatcacagtctcagttctcttgctttcacattgtacttaaacctcctgctgtgcctcgcatcctacgcttaataaaagaacatgcttgaatacnccccancaaaccccccaaagaaattacaacatggtc

SEQ ID NO: 6170 - DNA, 887 bp, Homo Sapiens
  misc_feature (223)..(233): n is a, c, g, or t
  misc_feature (272)..(297): n is a, c, g, or t
  misc_feature (678)..(728): n is a, c, g, or t
gtccgtaacctgtagccgagctaccactaggaaaattagagtggtagtagtcacttatttaagaattcattcaggtaaacagctgcaccctctgtaccccttaagtggcaaagaagctgttatagtcttctgaaaattatcactatgagtgctataattctgaatataatgtctcttaattagaattcatacaagaaccacgtgtgagtgttgttgttgttgnnnnnnnnnnnaatcaaatgcaagtgtgactataaaggagtgtggctgannnnnnnnnnnnnnnnnnnnnnnnnnaaacagacagcagaacttttctatccaaatgaatgccgtcccatggaaagtggctgtcctgggaggctacacgtttctccaatggtgatgctgttgctcagaacttgctagaggtctttagggaacctccgtgagagctgcagcacctttttaattttctcggtgtcatcctctgagtatggattttctgtttttaaacagcccaaagtttagaagggtattttctaatgtggctcataaaccaccttttaaggcctttcctcaaacaggagttctaaataagtctccaacaatagtagttttgttggagctaaggatgtaactactttgagggagaaatgttcgtttagatttctacattctgttatgttggttttattnnnnnnnnnnnnnnnnnnnnnnnnnnnnnnnnnnnnnnnnnnnnnnnnnnnccttgtcggccggcctcggcccctcggagaagctttctaagacccactcgtttcggcggcccggggccccatgtaggaaaacggaacattggcccatagctggttttccttaggaaaatcctgggtcatgaactaggggctggggattcctcaccaaat

SEQ ID NO: 6171 - DNA, 1056 bp, Homo Sapiens
ggggccccatctcacatgactgtgaagggggtgtggcatggcagggggtctcatgaaggcacccccattcccaccctgtgccttccttgcgggcagagagggagagaagggctccccagatctacacccctccctcctgcatctcccctggagtgttcacttgcaagctgccaaaacatgatggcctctggttgttctgttgaactccttgaacgtttagaccctaaaaggagtctatacctggacacccacctccccagacacaactcccttccccatgcacacatctggaaggagctggcccctcagtcccttcctactccccaacaaggggctcactatccccaaagaaggagctgttggggacccacgacgcagcccctgtactggattacagcatattctcatctctggccccgaggctgcctgtggggcgagtggagacctcccatcactgagacagatcacagaccacgagtgcctttcccggacctggacgttgcctccagagcaggcaccagctctttccctctctagacagaaatatttttgtaaggttctggggcagggagggagcatgaagtacgaggaaaacttgaattccagatttttaatgcaaagtatttatcatttctaccagaaataaacgttttaagtttttacttgactaatgagacccagagtttggagaaaacttttggccaatgctgccacctgatgtcagaaagtgtccccacaccctagcagtggcctatcttggaacaagaacttcgaaagcacctactgtgtgctcagccatttgaggaaggaaggaggagaaggaagatgttactagggaaggatgagataaaacttctgcacccaagacaatgagacagacataactgcaaccgtagtaagccagtcagaaatagccagcgcgaaggcaagagatggggtggagattggaaccccgcttcagatctgggctcggctacttacctgctgtgcagccatgggtcaagttgcttgacctctctgtgcctccactcccttagctataaaatgagcttactt

SEQ ID NO: 6172 - DNA, 567 bp, Homo Sapiens
gaatctcaccacatatactttgttagatgtgtgtattgtagggtgtttgttttgtatttttgtattgtatatgaactttttttaaatgtgacagttaaacacatctttaaaagcatagtcacagacaaaagcatacagtataaaaatttccttgaaaactcctacaatattatatttggaggcagcttcagactgttttattggtggtagctgcttgctgaggtcttttagttggtaataactccagagaagcagcctgtgtatattcctaacactttgttcactagcatttaagtttagaataagcccaagtaagacaatggaaatgtatatagaactcttagttcttacatgatttaattatatcgatacatgaatttaacttactttaatgtaggcaaactatcaattttttgtccattttcctgtttgttaaaataacatacctctcctacgtattattttcttgacccaaatgaaatattaacctaaggtcaagctgggagagagaaatgactgagatgaatgtctttactaaagtaccaataaatttgtcaaactcaaaaa

SEQ ID NO: 6173 - DNA, 673 bp, Homo Sapiens
ggatgccacaacagaaaaagtcagaagaagcatctacagttgtttagatgcacagttttatgatgatgaaactgtaacagtagttcttaaagacactgtaggacgtgaaggaagagatagactcttggtccagctgcctttgtctttagtatataacagtgaagattctgcagaatatcagttcactgggacttattctacaaggctagatgaacagtgtagtgctattcccacccgtaccatgcatttcgagaagcactggagattactggaaagtatgaaagcacagtatgttgctgggaatggttttcgaaaagtgtcctgtgtgttaagctcaaatcttcgtcatgtgagagtatttgaaatggacatagatgatgaatgggagctcgatgagtcttcagatgaagaggaggaggccagtaataagcctgtaaaaataaaggaagaagtgttgtcggagtcagaggcagagaaccaacaagctggtgctgccgctttagctccagagatagtcattaaagtggaaaaacttgaccctgagctagactcctaatctagcttgccattattgtgtgtgtaattatggccaaaaggacataggagatggactaagatgtcttggaccacctttgtgtaacaaagaaataaacagtaaattttattttttcaa

SEQ ID NO: 6174 - DNA, 1351 bp, Homo Sapiens
  misc_feature (392)..(432): n is a, c, g, or t
  misc_feature (839)..(960): n is a, c, g, or t
  misc_feature (1009)..(1018): n is a, c, g, or t
  misc_feature (1043)..(1135): n is a, c, g, or t
  misc_feature (1194)..(1205): n is a, c, g, or t
ggatgtccagtgagcagtgttgcgtttttccttgtagcatttggaaatgatttactggaattacaaaacctatttttcctttaaatttcagctttggctctggctgctttttagaataatgcaagataaaaatcacacctgagggctgaaaacggagagggaatgggagacttgatatttaagcagcttgaatggtttttcttttctttatttttaaagaaatgcacttgcctatgatactgtctctccagtgaaatgattactcctccattactctattgatacaatattgtgcatgctagtgttgtatttctatacagtagcttgaaattgattaacttatactgtaggtgttatgtattcctatgacaaaaaaaattaagtcttcaaannnnnnnnnnnnnnnnnnnnnnnnnnnnnnnnnnnnnnnnngggggtaaagtttgctctaccaaatagtgattgtaacaaattgatctgttttggatgttgctatagtgacatgcagttatatattttgtttttaaaagggggggagcaaaagaaacaccagtgttagcttaatcttaatgtctggtgtttgtcatggtgaaattataactattacagtgttggagaacaacaaatatgttctctgaatgagcctttgtgctttttgtcatgttatgcagtgaactatttttaaggtctaatcagtgattatttttccagctccgtgtttctctaaggaattatttcacacacggaccatctttagcagtttcctcagtgatggaatatcatgaatgtgagtcattatgtagctgtcgtacattgagcaaataaacttacagatctgnnnnnnnnnnnnnnnnnnnnnnnnnnnnnnnnnnnnnnnnnnnnnnnnnnnnnnnnnnnnnnnnnnnnnnnnnnnnnnnnnnnnnnnnnnnnnnnnnnnnnnnnnnnnnnnnnnnnnnnnnncctggccggccccccccgcccccaaaaaatttttcaaaacattttgttnnnnnnnnnnccccaaaaggaaagaaaaaggggcnnnnnnnnnnnnnnnnnnnnnnnnnnnnnnnnnnnnnnnnnnnnnnnnnnnnnnnnnnnnnnnnnnnnnnnnnnnnnnnnnnnnnnnnnnnnntccaaagggagttcgggggcctttctgggatttatcaaaggggggccagggcacctttnnnnnnnnnnnncccccgcccccgtgccatctgtgcgaaaaaggggggaaaccccaaaaaaccctcgcccccacccggggaaccccctctccaaaccgggtatgaaaaaacccagaaccccccccgggggtaatccacccccgtgggggcgcttgggg

SEQ ID NO: 6175 - DNA, 853 bp, Homo Sapiens
  misc_feature (134)..(134): n is a, c, g, or t
  misc_feature (821)..(821): n is a, c, g, or t
gggccggcacggaaaaggccaggcgacaggtgtcgcttgaaaagactgggcttgtccttgctggtgcatgcgtcgtcggcctctgggcagcaggtttacaaaggaggaaaacgacttcttctagattttttttncagtttcttctataaatcaaaacatctcaaaatggagacctaaaatccttaaagggacttagtctaatctcgggaggtagttttgtgcatgggtaaacaaattaagtattaactggtgttttactatccaaagaatgctaattttataaacatgatcgagttatataaggtataccataatgagtttgattttgaatttgatttgtggaaataaaggaaaagtgattctagctggggcatattgttaaagcatttttttcagagttggccaggcagtctcctactggcacattctcccattatgtagaatagaaatagtacctgtgtttgggaaagattttaaaatgagtgacagttatttggaacaaagagctaataatcaatccactgcaaattaaagaaacatgcagatgaaagttttgacacattaaaatacttctacagtgacaaagaaaaatcaagaacaaagctttttgatatgtgcaacaaatttagaggaagtaaaaagataaatgtgatgattggtcaagaaattatccagttatttacaaggccactgatattttaaacgtcccaaaagtttgttttaaatggggctgttaccccctggaaaaaggatgaaggatggaaaatggatgggtttgaaagggttaccattttttaaggaaaatgggaagaaaacttctntaaaaaattttatttattcaaggaacacgggc

SEQ ID NO: 6176 - DNA, 932 bp, Homo Sapiens
cggcccgactccggggtaaagagccccggagcggagcagcgctggccgcgtcccgcctccggagccggcagcccccatggctgggggttatggagtgatgggtgacgatggttctattgattatactgttcacgaagcctggaatgaagccaccaatgtttacttgatagttatccttgttagcttcggtctcttcatgtatgccaaaaggaacaaaaggagaattatgaggatattcagtgtgccacctacagaggaaactttgtcagagcccaacttttatgacacgataagcaagattcgtttaagacaacaactggaaatgtattccatttcaagaaagtacgactatcagcagccacaaaaccaagctgacagtgtgcaactctcattggaatgaaacctcagaaaaagagcaacagaagtaattgtttcaagctcctgattctttctactaaatcatgaacagctttaaaaacatttctgtctgcataaaattattttacttgtaacttttccccaattgttctgtgcattgttttgcctttttaaattacatctccaagtggctcaaaaggccttgacacagggaacctgcacatatccaggatatgtgtaaccagcgatggtgacttgaccttgccaagacctgtgattccttcaggatacaatcagtgagaaataaaaacacatcttgggaagtgggaatcctggagtttatgccatttgcaatattaaaaaataaaaatgcaagttattatttcactaataacttcctgtttcattgtattctgtgagtgataagtgtcagatcaataaccgattaattggtggttaccgcctcttttggagagtatattggaaacagagtttgtggcccaacacgggagtgcagtggacaaactctttggtccacggacatttcccccttc

SEQ ID NO: 6177 - DNA, 529 bp, Homo Sapiens
ggcagtatggactgaccaaaaacttctcttccctacatctcaactctagggacagtggcttttccagtggcaatactgacacctcttcagagaggggtcgatactcagacagaagcaggaacaaatatggacgtggtagtatatcactcaaattcttctcctagaaggaagatacagtggaaagagtcagcattccactccttcaagaggaagataccctggaaagttctacagggtttctcagtcagcactcaatcctcaccagtcgcctgacttcaagagaagccccagggacctccaccaacccaacaccataccagggatgcctttgcaccctgagactgactcaagagccagtgaagaggacagcaaagtcagcgaagggggctggacaaaagtggaataccggaaaaagccccacaggccatctcccgccaaaaccaataaagagagagccagaggggaccaccgtggatggagaaacttttgatgaattgaactacatagcttttctaagcaggttaaaaaa

SEQ ID NO: 6178 - DNA, 469 bp, Homo Sapiens
  misc_feature (414)..(423): n is a, c, g, or t
gggggcgttggtccggtgcgtcctgttctacagctatggccgggccagctgcagctttccgccgcttgggcgccttgtccggagctgcggccttaggcttcgcttcctacggggcgcacggcgcccaattcccagatgcctacgggaaggagctgtttgacaaggccaacaaacaccacttcttacacagcctggccctgttaggggtgccccattgcagaaagccactctgggctgggttattgctagcttccggaacgaccttattctgcaccagcttttactaccaggctctgagtggagaccccagcatccagactttggcccctgcgggagggaccctgctactcttgggctggcttgccttggctctttgagctcccttttgcttaattactgggttttctgggcagnnnnnnnnnnaaagagttggagtaagaagaggattaaaaaggaaaggcaaaggaaa

SEQ ID NO: 6179 - DNA, 1102 bp, Homo Sapiens
gggattcctactttggaagcaataggctggctgactttagtccaacaagcccatttagcacaggaaacttctggtttggagatacactaccatctgtaggctcagaagacctagcagttgactctcctgcctttgactctttaccaacatctgctcaaactatctggactccatttgaaccagttaacccactctctggctttgggagtgatccttctggtaacatgaagactcagcgcagaggaagtcagccatctactcctcgtctgtctcctacatttcctgagagcatagaacatccacttgctcgaagggttaggagcgacccacctagtacaggcaaccatgttggccttccaatatatatccctgctttttctaatggtaccaatagttactcctcttccaatggtggttccacctctagctcacctccagaatcaagacgaaagcacgactgtgtgatttgctttgagaatgaggttattgctgccctagttccatgtggccacaacctcttctgcatggaatgtgccaacaagatctgtgaaaagagaacgccatcatgtccagtttgccagacagctgttactcaggcaatccaaattcactcttaactatatatatacataaatactatatctctatatggactcgtaaaggcatgggtataatggtaccccccagtaaacttcctaatgatttcttatgactgttatcaggctttattgggattaggctaaagttgttagtaaacttataaaaggctgctatggtaacactaaacctaagtggtctcttgtctattagtttggtttgaattattagtactatcctgtagacccagagacatagtttatataagaattgctaaagctgaagttcaacttggctgagtgaagataatcataggttgtgtgagcctatgaaaaagtgtatacgtctaaggatttcaaaacaatgggtcccaaagcctaaccactttaagagtttatggagggtacttggcattacagacggattcatacacttccagtgctgccttctttacactgccagttttgacaaaacaggtttgttttttattttacaacaacatatg

SEQ ID NO: 6180 - DNA, 805 bp, Homo Sapiens
  misc_feature (781)..(781): n is a, c, g, or t
  misc_feature (791)..(791): n is a, c, g, or t
agtgacgagcagggaagaggtggatgtccgaagagaagaccttgtggagcggattttctccatcgtggaacagagactagaggctttggaggagaagatacggaccacggagacacaggtgcttgtggcatctgcacagaagaagctgctagaggaaagactataagcttgtctcagaactgtgggatgctgggatcaaggctgagctgctgtacaagaagaacccaaagctactggaaccagttacagtactgtgaggaggcaggcatcccactggtggctatcatcggcgagcaggaactcaaggatggggtcatcaagctccgttcagtgacgagcagggaagaggtggatgtccgaagagaagaccttgtggaggaaatcaaaaggagaacaggccagcccctctgcatctgctgaactgaacaaactatcagaggaaaggaagtgggactggcactatttgaggttaagacaaactgcatatgtacttcaattgctttgcacttttccgtttcagcggaagacctgaagagtggtcagaacagagcctttgatttttattatggttattttattgattattactggcaaaaacggccaggtacaacacctttttcatacaaggcccaggaggcttagtccagtctgtgctcctgggctacaaggacccagcctgagatggtcccatctgcagggccccgcaccagttggagcagatgcctccccaccaccaattgccaaaggtccaataaaatgcctcaaccacggtaaaaacccntccccccccnaatacaaaaattgt

SEQ ID NO: 6181 - DNA, 190 bp, Homo Sapiens
ttagataaggttatattgaaaacttaaggtccaactaaactatactgtacattgcataatgcatataaatataattgatccttgaattaaaattgtttatagccaggcatggtggctcaagcctgtaatgctcagcattttgcagcgctatagcacggaggagtcaatttgcagggatcgtcttcgttta

SEQ ID NO: 6182 - DNA, 1050 bp, Homo Sapiens
  misc_feature (680)..(680): n is a, c, g, or t
  misc_feature (818)..(818): n is a, c, g, or t
gtgtgagaatgatcacatgtggcgtcatgctttgtacagagcctcagaccactgggccttgtccagtgagagtcctctctggcgacatcacacgcggagcagccaggggccaccttagatctcagatctctcagagcaatacttttctgaactgccactgtgcctgggtggttgggtttggtgtcatgcttctgactagagtagatcgcgcatgtccaccagtgatacgttgagtccttacagttccccccatggagtcccataagcagctccatcgagatctgtcagcaagttgcaggaccccacaatgttctgacatgttaagacccccttacatgacgagtagagaggcagctgaggccacaaccgtgtcttcctcttgaatggagctaactcggaaccccccgttttctcttcctttctgcccaccactgaacattgccttttagataactcagtgtttcttctagatgtcatagcaatagactttcactttcatgaagtttgggtacgatttggattctcgcttaagtacatatatttatcaatatttttataaggcaaagttcacttaaaaaatcttcacaagtagcagtgtgcctaagatggcaaaatactaaaaactggtgtttcctgctcctgttgtgtgtcacctttcaagccgattgaaatatttctgngtcttagggcattactttttaactatctcctttaaaaacgatgttctgtaggtttagtgtctttgttcatttccaaaagagtccagacaactgtgtctgcccctgcagaggctgtttgtccaaaggcagcatgccgcnttccaccggaacgcagacagcaggggagcggaattctaaagcagcgacttaaaatgaggaatccccaattgcactaaatggtttcaggattgactaatcattgtcttaacattaactcagattttcgatgtgtaaagagctgtgtgacttggcgtctgagagatccctctgctttgctttgcttcagagtcctcgcacccgcatcctcagaactgtggggcatggtgggctc

SEQ ID NO: 6183 - DNA, 949 bp, Homo Sapiens
cgcaggaaggggagtggggagccctgagctggggtgttcctggaagaggtcggggagcggggggagaggcattccaggctggaggcctggaaacgtttggaagctttgctaaccttggagaccatgtcaggaaagaagcgtacccaggccgtctgctgtgtgcccaccccgatccccatcagtgccccacgcactcgagctcttcttcggcgtctgcagcctcttcatccgcgcggagaggcggaggtctcccggaaacagtgtccgactgtggcaccccagagcgtccaatgcgagctcaggcctttcccgcaagtctggagttttcttatccagttgaggccgccttcgctgtactcactctctgcctcccaccccatcttctgccacccgacctccatctttgatggttagcgccttcagccctcaacagcttcgcacaaccaacccctagaagccgtggagtcagaccggccagggtgggacctaggttttaactcgggttctggctacacacgctgcgcctccatacagtttgtcccaggtttggcagcaggccggctaccttcaggaattctttgctttggcttctgtctgttcctgtctgttgggcaagtttctagctaccccactgagagaaccatagaacaaggaccctggcatggcatacagacaaggaatgtttgctgaattaatggagctggtgccttgcagcttcccttttgttccttgaagttgcccttgctctcctccacatcagctccctctcctcctcagccacttattccccaccctggcttcttctagtcgcagtccccaagtacttgctgaatcctgtatggacagcctaagcctccatttctgacaattcctgtggccccactacatttgttttttagacttctccctcctttttgtccccatcccccaagttataaaactataatgc

SEQ ID NO: 6184 - DNA, 457 bp, Homo Sapiens
caatcatgagccaccgtgccccgcccaaatggtagtttttatacctttacacatgtaagcaaagatacttgcccagaaaaattcgattgtacctggagcgtcactcagaaggacaatatatatagggatttgaacccagaagacatgtcatcaagtacgatatttagggcatgtggttcttcaaagactctctacatctactgtttcttagcttcttggatgctcagtgatgcttgcaaagaaaaatctccatcccagcacattctacaacatgtcagcgtcactgcgccattcattacagttcttttcttctcgcatctttctttaaaaacagcagctacagaaggagtcgcatgcctgtgttttataactcctttctctctcctgttgacttcctggcaagtgtttgatttcattatgacatggagaatcaactttgaaccggcggtgcggcgtg

SEQ ID NO: 6185 - DNA, 130 bp, Homo Sapiens
attacaggcgtgaaccaccttgtctagcctggagtcactgttaatttcttctgttggtccatggcaaggtttacagatgactttgtgttggaaagcctgaatctgtttttaaaagcagggatggggagtg

SEQ ID NO: 6186 - DNA, 489 bp, Homo Sapiens
agaaaaaatttagtggaactggcagagttagaactgaagcatgcaaagggtaatctacagttgctgcagaactgcctggcagtgttaaatggagacacataagccacactccgccttcctgttaaaaagggctgccttccttcaaattttatttttgttttcttaatgatgttaagcatttatgctcactggaaacaaacaaaaagcagctgaaaaagtgcatcaactcctctttttctgagaaacatggagcagcgcacgcccaggcgatgccagtctgtgtgccgtgatgccgcactgtgttccccatgacagtgatccatcatcgtgcactcgtcatactcagaagtccaaagttcattcttctttaaagtagcctctataactctgtttattttataaatagtattccttatggctgccactcttatttacctttaaataaatttctgaaatttaaccttttcagaatgcattgttgaaacaagg

SEQ ID NO: 6187 - DNA, 291 bp, Homo Sapiens
gtctctgaggatccctcacactagtcaaagtggaagatcttcagctgccagctggcaagagaaaagacaacaagtttataagttagaccttgaaggacagcgactacaaggcaatcatgcaggaattccagaagcaagaactagaacgagaagaaaaacgagaaagtagaagaattctgtatcagaaccttaatgagccaaccacgtggagcttaaacagtgatcgaactagaacattgggttcttcaacagaaaatagaaggagaaacaaaagacatcaaactaccgcta

SEQ ID NO: 6188 - DNA, 660 bp, Homo Sapiens
  misc_feature (360)..(394): n is a, c, g, or t
ctgacccgaggattctccacactagtcaaagttctgtcaaggtatcacatactacatttggttctttattatagactttttaaatatcgttgtataccattgtgattctatcgtctcctttaataaagaggagaaccagaaaaatgacaggtcataagaggaatgaggtttggagaataggtgaaaaaaaggcatcataatgtttataataatgtttgcctgttcagagaaacaagaatcacagataaagtcacttatatgtagataagagaatgctgtattacttttggctattctattcactgatcattaccctaagaactctgtatgcttcttgtttaactcttatgtcagcatgtnnnnnnnnnnnnnnnnnnnnnnnnnnnnnnnnnnncattcatgctttactagaaattggttgatgagggacataaacctaggccggtgtgattttagattgcttcttgtaaccattgtgttgtattgccttatatttctaagtaatttatgttcactgagagcaaataatagtctagctatgacttagaaaagtaaaataaagatgttgggcagaaaaccattttattagggtttttttggaggagcagataattgtttctgtattctttggactagtgtgaggatcctctgggtcgcctt

SEQ ID NO: 6189 - DNA, 505 bp, Homo Sapiens
gttgaggtacctagaggatcctcacactagtcaagctaggtgagaccaggtcaccctccaagcccgggttaccagtagggggtaggtgccaaactgaagagtagactgtgatgaatgcgtagcagagatggcagaggacatggctcatcacctggggtcggggaacccgatctcagcagctcccttccctgagtgccctggcatttggtgtgtctgtgtgttcgcgaggcccctggcatgccactgcggcttcaaaggtagcctcctgggcagcggctcatcagcttccagcacagcctttgttgttctataaatctgttaatgtttgtgctacctagaataagaaggaaggagtcattctacagagaggatttattcttccagtgcgccaaaaccttgttccttacgattatgtcctgttctttaatggggtcccctgtactccacagtgtcattcggctccacactagatgtccaaacaatgctgtgtatactcactgatttt

SEQ ID NO: 6190 - DNA, 464 bp, Homo Sapiens
acagtggaaatgacagtacggcgctcgcacgggtcttctttcagaaaggagcttggggaaaatgcacaatgctttacagagaggcagttaaaaccacaacagtcagtctttggtcagagcaatgaggtgacactttgatgcaaaactttgcttggtcagcaatctttataactggtactttctggatatgggatgaatttttaaaagatctgggcacacaacaggtaagggggcaaaaaaggccagcagtatgatttttttaatggccatcaacacaacatcagctcatttaaatatttgttattacacactcactcacatagatcccacagaagtgacacataatacaacaacaaatcagttgcacaatgctgatttacagcatgccataggcttctttcaattatgacttatcaccccaggagaactgaacccggacctgctcactagtggctagatgaatt

SEQ ID NO: 6191 - DNA, 317 bp, Homo Sapiens
taaagcttgcagagtaaaatcaagttggatctaagcagcttgacagtatcactgaatggtagggaaaaaaagacagttgggatgaattaaaatgttctaaggacactggaaggagttaagtcccatttctcaccaaaatgtcccctcatgttactaacaggctgtaactgatcagctggattaaggaaaaaagctccataatctagatgcattaaaggctgctgctaaacagattttgtgaagagtttaatacaagagactaacctcagtgggaaccacggtcattagctacatcttggagacctgagcaagccagg

SEQ ID NO: 6192 - DNA, 260 bp, Homo Sapiens
agacagaccctgtcctttctcccagtgctgggatttctccatgtgagggggcagcaggacacccagggatctagcgtgggggaggagaggagcctaatgagaaaatgaccatctaaagccggcccgacagtggtctggttcacgtctccaaaccagcttggatggtagcagagacttcagggtgctccagccaaacgtatttgggcatcaccatgacctgggaggggaagatgcactgagacgtatgagcttcagcctat

SEQ ID NO: 6193 - DNA, 123 bp, Homo Sapiens
cggcaaggctcagacagctcccagaatatctaagccccaggaaagaagaacagaaacttccagagtacagctgacgtgctttctgcatggtaagcactgggcagcctggtgaacaaggcagtg

SEQ ID NO: 6194 - DNA, 389 bp, Homo Sapiens
ggtgttagaatccaatcttggggggtttatggttggtgctttccttattttttaggtcaaggtaactcctcttagggaaagcagtgtagaagaaaagggctttgtgcctgtataaaaacctgaaataactggaagcaggtactagaaaaatggaatcacaaatacattattgctctattgagcatacgtaaataaatctgaattaagaagggtaagggaggacatgaatcattattgagcaattactgtgaggaagacacttccacagacattgaatggcgcataacgtaatatcgtatggttgatattagtagcatgtgatatgcttaccagcggagcatcatgtgctcacgcagtggaataagtaacgccggtgaatatctgtctga

SEQ ID NO: 6195 - DNA, 636 bp, Homo Sapiens
  misc_feature (374)..(444): n is a, c, g, or t
cgtggggtccgtgccctggagtgaccttgcgatggaaaggacagtgtgggaggctgggggagctgtgtcctgcagttcccaggaccccatcctctcagaaggtaggggaagggcgggaggattgagaagggacaagccaccttgaccgtaggggaaggaggaatgtgggctgggggaagatgccctcaactcaccccctacacacacatgagagagagcccccacccagttccttggcctaggtctcccctccaggctgagggcctctctacttccccagatgcctgggtgcaaagaacggcttggcttggctcctcctctggaggttaaaatatatagtcattctaactgcacttgggaaaccaagcaagggnnnnnnnnnnnnnnnnnnnnnnnnnnnnnnnnnnnnnnnnnnnnnnnnnnnnnnnnnnnnnnnnnnnnnnntgatattaagttattaactgaggctgaccagaggggaggaccccccctttaccaccccatgcactttgcgagctgccccttcttcccccacatcagagagaaatgcccccacaccagagccccaagggtagggctgccgatcagagctgtgagttaacacaacaggttcctggccaccccccttgccatacc

SEQ ID NO: 6196 - DNA, 394 bp, Homo Sapiens
ctcggtaccgcaacgtgggattcatgggcggtggagacagtgtgtggcctccgctcgtggtcgtgggtgccgtgggtgtggagggtggggccgtgctggtcatctcaatggcaggtggtagggtactcagaagggtggttgactccgtgagaggggaagaggtggaccgagaggtctgaggggttgaggactcaggcggaggattggatgtggtcaactcagcaatcggtgctgtgcttgtgtgggtggggggccccgtgcttccagtggtgggtgttggggttggggtcaccgtagtggtggtgctgatgggtatcatggttggggtctgtgtgccggtgggtgttggggttgcggtcaccgatagttgtggtggtgatgggtgtcacgggtt

SEQ ID NO: 6197 - DNA, 323 bp, Homo Sapiens
ctcctccagaccccctcccctcctgtgtcccttgtaaatagaaccagcccagcccgtctcctcttcccttccctggcccccgggtgtaaatagattgttataatttttttcttaaagaaaacgtcgattcgcaccgtccaacctggccccgcccctcctacagctgtaactcccctcctgtcctctgcccccaaggtctactccctcctcaccccaccctggagggccaggggagtggagagagctcctgatgtcttagtttccacagtaaggtttgcctgtgtacagacctccgttcaataaattattggcatgaaaacctg

SEQ ID NO: 6198 - DNA, 446 bp, Homo Sapiens
cagcacaagcggatgccactgctggatgtcaagacgtgacctgacccccttgccccacccttcagagcctggggtcctggactgcctggggccctgccatctgcttcccctgctgtcacctggctccccctgctgggtgctgggtctccatttctccctccacccaccctcagcagcatctgcttcccatgccctcaccatcacctcactgcccccaggccttctgccctttgtgggtgttgagctcaccgcccacccacaggcactcatgggaagaggctttccttctgggatggcggcggctggtagacacctttgctttctctagccctcctgggctgggcttgggcacaaatccccaggcaggctttggagttgtttccatggtgatggggccagatgtatagtattcagtatatattttgtaaataaaatgttttgtggct

SEQ ID NO: 6199 - DNA, 627 bp, Homo Sapiens
tatgcaagactgagatatggaatagataggaagagatatgtactgctgggtacatggacagtaagtgtgttttcagatggagtaccagcaccgaaaatgggttgagggaggatgggttgtatgtatgtttctgcccactaattttgagcagccatattatgaattaaatcgtcacagccaagtaataacccaagaatggtatgagtttcatgtgtaatagctcaaatggaataagcatgaatgctggagtggaccattatcctcaaatattctatgtcacttctcatttaaagactcttgttatgaactattagaaactttaggcaaaatcaaaagtatttgcggcaaaataaaggcctattctactcttatttaaagtgaaacactgtatacttgtttctctccaaagcgaaattaagtatttataatttcaattgcctcgataagtttccaagtcactgaaatctgctgaaggttttactgtattgttgcacaactttaagataatttttgtctcaatgtcaacttttttcactgaataaaaatttaactgggtcaagaaaacacctctttgaaaatccactgtctctgtgtgtctcgagctgttctttagagcgcaataaatga

SEQ ID NO: 6200 - DNA, 449 bp, Homo Sapiens
  misc_feature (92)..(109): n is a, c, g, or t
tttttgaacctgaatgcagagaataaatactttattaactgattacagttgaaagtcacaaacaaaaaagggggtatattaaggcaaagccnnnnnnnnnnnnnnnnnngtatagacaaatccaaagattgttacttctttacattttaataacctctgcatttttcttttacacatttaggcagtgtgctttcttttctcctcagttaaagcaacaccttggccaatatttctaaatcatattttgatgacaacttacaggatcagtgattgagacaatgactagtgtatcaaacgctatctgatagttttcttagcatattccgtgtgtggtggtacatttattgtggtgtgcaaaatctgacaactgacgatttttctctgtcagcaaaactaacaaatttttaaaaatgattttaatagttataactaaaataagcttagacttc

SEQ ID NO: 6201 - DNA, 432 bp, Homo Sapiens
tttgaatgtaaactaacaaataaacctgaccaccaaggagattgtttgcccagagtttcaaagcacattgtctacaaatggaaattgaaataatttataaaatattgacgttactatgttttttaaaaagttcctaattttttcactaaatggaggaaactattagttttattgttaaatatggtagatattaatattcctcttagatgaccagtgattccaattgtcccagtttgaaataagtaccctgtgagtatgagataaattagtgacaatcagaacaagtttcagtatcagatgttcaagaggaagttgctattgcattgattttaatatttgtacataaacactgatttttttgagcattattttgtatttgttgtactttaatacctggtgtacagttccagaaataaaaatctgggaatcttt

SEQ ID NO: 6202 - DNA, 1872 bp, Homo Sapiens
ccagctggaacaagaaggttgtgtcccccttcctctgggtgtcttgtctcctgctatcaggacacagtcctcaggatgtttcggggagaataggagccagaacctgagcccctaagccattcccctcaccaatgatggggtccccagtgagtcatctgctggccggcttctgtgtgtgggtcgtcttgggctgggtagggggctcagtccccaacctgggccctgctgagcaggagcagaaccattacctggcccagctgtttggcctgtacggcgagaatgggacgctgactgcagggggcttggcgcggcttctccacagcctggggctaggccgagttcaggggcttcgcctgggacagcatgggcctctgactggacgggctgcatccccagctgcagacaattccacacacaggccacagaaccctgagctgagtgtggatgtctgggcagggatgcctctgggtccctcagggtggggtgacctggaagagtcaaaggcccctcacctaccccgtgggccagccccctcgggcctggacctccttcacaggcttctgttgctggaccactcattggctgaccacctgaatgaggattgtctgaacggctcccagctgctggtcaattttggcttgagccccgctgctcctctgacccctcgtcagtttgctctgctgtgcccagccctgctttatcagatcgacagccgcgtctgcatcggcgctccggccctgcaccccaggggatctactatctggcctgcttcagagtgccctggcagtcctgttgctcagcctcccttctcccctatccctgctgctgctgcggctcctgggacctcgtctactacggcccttgctgggcttcctgggggccctggcggtgggcactctttgtggggatgcactgctacatctgctaccgcatgcacaagaagggcggcacgcaggacctggcggactaccagagaaggacctgggcccggggctgtcagtgctcggaggcctcttcctgctctttgtgctggagaacatgctggggcttttgcggcaccgagggctcaggccaagatgctgcaggcgaaaacgaaggaatctcgaaacacgcaacttggatccggagaatggcagtgggatggcccttcagcccctacaggcagctccagagccaggggctcagggccagagggagaagaacagccagcacccaccagctctggcccctcctgggcaccaaggccacagtcatgggcaccagggtggcactgatatcacgtggatggtcctcctgggagatggtctacacaacctcactgatgggctggccataggtgctgccttctctgatggcttctccagcggcctcagtaccaccttagcggtcttctgccatgagctgccccacgaactgggtgactttgccatgctgctccagtcagggctgtcctttcggcggctgctgctgctgagcctcgtgtctggagccctgggattggggggtgcagtcctgggggtggggctcagcctgggccctgtccccctcactccctgggtgtttggggtcactgctggggtcttcctctatgtggcccttgtggacatgctaccagccctgcttcgtcctccggagcccctgcctacgccccatgtgctcctgcaggggctggggctgctgctggggggcggcctcatgcttgccataaccctgctggaggagcggctactgcccgtgaccactgagggctgatggggccagtggaaaggggtcgggttgcccttccttccccccaaccacaggaatggaggcgggacacagggccagtaggagcaataggattttaataaacagaacccatcccaaaaaaaa

SEQ ID NO: 6203 - DNA, 364 bp, Homo Sapiens
accgcaacgtggatacactgggactcgtccccagtgggcacaacacagcccttggtgggaggggaaggccccagcctcctccacctcccactggaaagcagactgcttgggactgcccagctgtgaattgtatagtttctgtacttattagaactgggtaaattattctggttcaaatctattattccatcaattcagttagaattgaattttctaggtgattatgcagaatcttctgccagggcacgatgctgtcgtaagagatttctgttctctgtactgggcccccttgccctgttccttgagtgaagtgggggctgccctcacctgtcccccttgcctgtgaatcccttccttgtacatt

SEQ ID NO: 6204 - DNA, 359 bp, Homo Sapiens
  misc_feature (23)..(23): n is a, c, g, or t
ccttaagaaacacttgagttatntttacccacgatcatctggatcattgattttgcatcgaactgtgacatcacttgggtgaaaggggaaacgcctatattaagcctaggtttaaatttgtatttacattaaaaagaaaggtcacggaaaagatttttttaaatctgtaaaaatcaagaagtggtagttttcttactggtgggattagacctgctgatttcttctagtgctgccctctaaagatacaaaaaattagaaagatttgacccttttaaaactcaaatatcaaccaagaaagacattgcttttggcagagaagcagaattttaaaaatttgggacatgtttccaacctcgtgc

SEQ ID NO: 6205 - DNA, 147 bp, Homo Sapiens
tacacacactgtctctaggaaaggagaaagctacccatacggaaagaaccaagctacccatacggaaagaaccaagctaccatacggaaagaaccaagctaccatacggaaagaaccaagctaccatacggaaagaaccaagctacc

SEQ ID NO: 6206 - DNA, 478 bp, Homo Sapiens
accggacaaggatgccgacggtgccttcaccgccggccagatcctgcgcgatgacaacctgtactacctggccggcgacttcttcctggccgatggcttcagcctgcgggcgctggcctaccaccacgatgaccgtggcgaaggcctcaactggaacagcggcgcgtggtccaacaagggcaccgcgcaggagattccgatcatcttccgcaacaccatctacaccatcgaccgcgatggcggcacgctgtcgttcgactgggagctgggcgcgcaccgcatcgaaggcggcgtctggtacgagcgcaataccagcagcgccgagcgctaccagaccgccgtggacggcccgcgtgacctgagcggcatgaacaccctgccctccgatgtcggcgtgttcgcccagcgcacgcgctagaagacccaccagttcttcctgaaggacacctggcgcctgcttgatgatcgcctgaccctg

SEQ ID NO: 6207 - DNA, 432 bp, Homo Sapiens
taaccatttacaaatatgtttaatagcagcatttctttaaagaaaaacaaagttcaaatgcccaataataattatgtttaacacttggtacacatataaatagacaaaaggctgcggagaacactggatttaaataaaggtgttatgggtataattaactataatttattttatgaataaataagaaaaaagtccctggctataaaggatagtggaggtttatttcccaatattcttccatttggactgaacccctgccaactaagcagacatcccactattacaccaaaaagactgctctccctgcgagcaattacaatacatgacaccactaggcccaatggctcagagggaagagtggcctgtggctcttcaatctttatccaaacctggttctagcttcaggagcctttggtcacctgagacttttta

SEQ ID NO: 6208 - DNA, 429 bp, Homo Sapiens
  misc_feature (64)..(72): n is a, c, g, or t
tgtggtggtgttgccttcaaaaaagagaagttttgtgtcattaacatgacagaagaactttttnnnnnnnnntaactgtcaactattctatttgcatttaggagactgttcatctatgctagattgtcattttccctccttctcccacagaagtttactggtagtccatgtcatggctcgtagctatccctctaaccataccatggaaatgcaggcacccaatgtgaaaaggagcacttgctgggcatcactgacaccgctcatgttttacacatagttgagtaatcagcatatctagaattatcttgcattgcctaaatcatatgtatatagtgaatgttatataatatacctggcaggtctgttttaatttaattgaataaagatacaaatactttgtttggctggcatatattaaattattatatg

SEQ ID NO: 6209 - DNA, 492 bp, Homo Sapiens
ggacactcgaaaattaaacctgaaagactggttcaggccatgatgggaagtgggagtcgaacatgcctcatcataccctccagcattaacatcaacacagaccttaaggctgataagaagcatttacaatctattctctctgaagtcttctacctggaggcttcatctgcatgataaaactttggtctccacaacctcttacaacccaggcattcctttctatcgataattactctttcaaccaattgccaatcagaaaattgttatatctacctataatctagaagcccccacatcaagttgttttgcctttctggacaggaccaatgtatatcttaaatgtatttgattgatctctcatgtctccctaaaatgtataaaaccacgctgttccccgaccacctggagcacatgttctcagggtctcctgagggctgtgtcacaggccatgttcacttacatttggctcagaataaatctcttcaaatatta

SEQ ID NO: 6210 - DNA, 246 bp, Homo Sapiens
gaaataaaactataatataaattctcctattaaataaaattattttaagttttagtgtcaaaagtgagatgctgagagtaggtgataatgtatattttacagagtgggggttggcaggatggtgacattgaacatgattgctctctgtctcttttttcagcttatgggtatttatcttctattagtatttgtatcttcagttcattccactttaggaaacagagctgccaattgaaacagaagaaa

SEQ ID NO: 6211 - DNA, 1029 bp, Homo Sapiens
tggcccccgggccctgcttcgggggccgcaccttggaggagatctggagggcggccaccccgacgctgaccaccttccccaccatccgcgtcggcagcgacgtgtggggcgagcgcagcctggcggcagcgcggcgcagggcgcgccaggtcctgcgagtgaacctggaacccatggtgaggctccgccgcttcccggtgccccgggcatgaggtgcggcctccagggcgcctcctgccggccccgaccttgggacaggccttccgcccggaggaatgaacaagtgtcagtcgagtgtttacagatccggccaggaccccggcccccaatgcactttacgcgcgaagaagttgccggatggttgtccctgtcccgggccgcggcgcggtcgtcttggacgctggggcaggtggccctctgctgcctcccgtacccggcctgcggagggaggggacagctggacccgagggaggccctttcttctgacaccgatgagacgtctccaggaccttaggggcagatccgttttctcactgttggactctacctcactggtctggaagtcctcccaagacattatttttccaaaaggaatttggtttcgtgcttgtgtaataaagccagaatttacttgttctttatctccccctttttctatttcactgtcacccctctttgtggacagaagttcgaacatgtggtgttgcactagtttgtgctcagggtattttgaagcccactcgtttcctaatttttactggattccaaagctttgatcgaggatattttttaagaggttcaagcttgtggactgttagtagtgcaaggatttgtatgggctcagtgattacaaacaaagacatgcaaaatacaactgtttaaacattttcaaggtatttttaaaggttttgtattgaaacaatgtttatatttactgagctcctaaaaatggtagaatacacatgaaaacttttgtttaggaaaagttaaactgttaaattcttttgaattgaataaaaaaatgcattg

SEQ ID NO: 6212 - DNA, 1939 bp, Homo Sapiens
  misc_feature (1027)..(1059): n is a, c, g, or t
  misc_feature (1101)..(1120): n is a, c, g, or t
  misc_feature (1170)..(1186): n is a, c, g, or t
  misc_feature (1298)..(1329): n is a, c, g, or t
  misc_feature (1382)..(1382): n is a, c, g, or t
  misc_feature (1463)..(1463): n is a, c, g, or t
  misc_feature (1467)..(1467): n is a, c, g, or t
  misc_feature (1555)..(1555): n is a, c, g, or t
  misc_feature (1558)..(1558): n is a, c, g, or t
  misc_feature (1731)..(1731): n is a, c, g, or t
  misc_feature (1775)..(1775): n is a, c, g, or t
  misc_feature (1805)..(1805): n is a, c, g, or t
  misc_feature (1840)..(1849): n is a, c, g, or t
gtctggctaggtgatttgtgttctgctctccttcgtcttcctacgtggagtgtcccccgtttttgtgtgctccttccccggttctgctgtgttatgctcctgttgtggtcctctgtctctggtcatccctggtggcacttgtttcatcgggggcatctgtagggtatggtgggcttccgtatcgttatgatacgtgttcggcgcctatctttgacaaacttgcatgtaagctctccgcctgggtaaagcctggttgaaagcctgcctgcctggcgccccttggtttgggacagcggtaaggatgccgagggcggctcgcagggtaccgcaagatgaaggagcggctggggctgacggagatccggaagcaggccaaccgtatgagcttcggagagatcgaggaggacgcctaccaggaggacctgggattcagcctgggccacctgggcaagtcgggcagtgggcgtgtgcggcagacacaggtaaacgaggccaccaaggccaggatctccaagacgctgcagcggaccctgcagaagcagagcgtcgtatatggcgggaagtccaccatccgcgaccgctcctcgggcacggcctccagcgtggccttcaccccactccagggcctggagattgtgaacccacaggcggcagagaagaaggtggctgaggccaaccagaagtatttctccagcatggctgagttcctcaaggtcaagggcgagaagagtggccttatgtccacctgaatgactgcgtgtgtccaaggtggcttcccactgaagggacacagaggtccagtccttctgaagggctaggatcgggttctggcagggagaacctgccctgccactggccccattgctgggactgcccagggaggaggccttggaagagtccggcctggcctcccccaggaccgagatcaccgcccagtatgggctagagcaggtcttcatcatgccttgtcttttttaactgagaaaggagattttttgaaaagagtacaattaaaaggacattgtcnnnnnnnnnnnnnnnnnnnnnnnnnnnnnnnnncaaagcaaaacaaacaccctgaaacaaccaaaaaagtaacgnnnnnnnnnnnnnnnnnnnncagaaaagcgaacgcccaacaaaaaccaagaagggggaaaaagccgcggnnnnnnnnnnnnnnnnntttggggggcccgccccgccccccaaaaaattttttcaaaaccctttcgttgtggggcggggcgcccccgaaagggaaaaaggcgaacaggggcaaaaacggggggtccccnnnnnnnnnnnnnnnnnnnnnnnnnnnnnnnngggggtgtgggactccccccccccaatataaaaaaacaacccccgccgggggngggcacacacccacaacgcggttctttattaaacaaaaatactccccaaagaggggggaggcctcctgtgagaggagggtntctntgtacgcgggggatactccataatccgcccgaggcggggcgccccacacgggccggagcacctccatagtaatatagaaaatattacnccncccgccccgcgcgcccctgggggaacactctcttatggtgggaagaatgaagggaggtggtgggaacaacctctcctactataaaacacatttttttcctgcgcaccacgcaaagatggtggcaggcacctcttcactctcacgaaaaagcgggggggagaggatagcgagangaaactcgctgcagatatgcatcgcgcccccgcgcgagagaganttataacacgaccggtctcgtgggtgtggntgccggggcgcgacgagataaataaataatccgtnnnnnnnnnngtgtgggagagacacaaagcggggccgggcgcaaaagaaaaagaacgcggcccgcgccatcaattgttggcgcccgcgccggcttaaaaa

SEQ ID NO: 6213 - DNA, 840 bp, Homo Sapiens
  misc_feature (175)..(295): n is a, c, g, or t
  misc_feature (306)..(334): n is a, c, g, or t
  misc_feature (338)..(340): n is a, c, g, or t
  misc_feature (343)..(345): n is a, c, g, or t
  misc_feature (349)..(349): n is a, c, g, or t
  misc_feature (351)..(357): n is a, c, g, or t
  misc_feature (361)..(363): n is a, c, g, or t
  misc_feature (365)..(365): n is a, c, g, or t
  misc_feature (367)..(368): n is a, c, g, or t
  misc_feature (373)..(373): n is a, c, g, or t
  misc_feature (379)..(379): n is a, c, g, or t
  misc_feature (382)..(382): n is a, c, g, or t
  misc_feature (389)..(391): n is a, c, g, or t
  misc_feature (393)..(393): n is a, c, g, or t
  misc_feature (407)..(408): n is a, c, g, or t
ggatgctttgtagagttttgtcattcagagtcagccaggaccataccgggtcttgattcagtcacatggcatggttttgtgccatctgtagctataatgagcatgtttgcctagacagcttttctcaactgggtccagaagagaattaagccctaaggtcctaaggcatctatcnnnnnnnnnnnnnnnnnnnnnnnnnnnnnnnnnnnnnnnnnnnnnnnnnnnnnnnnnnnnnnnnnnnnnnnnnnnnnnnnnnnnnnnnnnnnnnnnnnnnnnnnnnnnnnnnnnnnnnnnncagagtatccnnnnnnnnnnnnnnnnnnnnnnnnnnnnncctnnntgnnntccncnnnnnnnattnnnancnnctccnttctantcntatattnnncntcccccccctcccnnaatttttttatcccaacaatgcaagatttcagaaaatgaaaaatctgctgataaatccatcactataataaaaccgaaggtgaaaaaaattctgaaaaaattctagcagctatatttgataaaattcaacatctcctagctttagcaaactcaccagctttgcaaaaaatatttttctttaatgtcatctggttgctacacccgaaattacacccggcattcttagctgccaaataaaacattttctcagtcaaatttttacagccaccttacctttctactcaacatgctccatggaaatcgccctagttgcctcccatcctagaaataacacacaggcaatattcccgacctcattctagggcaccgcaaccaaaatgtcctcctttggccaaatttaaataaaaaatcttcccaaactcctaaatcctg

SEQ ID NO: 6214 - DNA, 445 bp, Homo Sapiens
tcacctctccacagcgcaccccgcccgccgctgctcctcattctttccaaacctcgaaaccaaccaaaacgtgagaagtatttttgtaccctgtgtaacaaaatatttatgcatcataaaggatttttcatgtgcgtaccattaattattaaagcgacctcgttcgccctgtcagataagtttaatgtttagtttgaggcatgaagaagaaaagggtttccattcttcagcagtacgcctttgtgtctggcatttgtttaagaaaatgaaatgaaggaaacactgtgcaatgttttttgttttgagcatatcagtgctttactgtcagccgcagctgtgaccgtctggccatttcagacttgggagatgaggcggctgttgtcattgctgatcctgtgagaatgtgaaactggataatatatgaaatgcaaaataaaaccccccc

SEQ ID NO: 6215 - DNA, 286 bp, Homo Sapiens
gagagttaaaaataatactaatcctcgcccggctgaactggaattcttgcagttacaaagttaaaatttcaagtaaacactgtatttttcactttttgtagacagacacagtgcagatacaaacagctgccatatctcacctcagatgaagctatgtgtcaatgcttagggaaaatgatcttagataatttcccaattttatagagcttaaatctttgaaacagcactaatactgctggttgactggctatctacaacagcaaagtgacatggaccgagctcgatt

SEQ ID NO: 6216 - DNA, 152 bp, Homo Sapiens
tctttcttcctggtaccaccacactgtcccaaattacctcttcattacccaaatcaaagaatctttctgtttacccaatcctcaaaaggaatgaagaaaaaccaaagagcaaactcaaaagatgatttttaccataaacctcaaatgtggct

SEQ ID NO: 6217 - DNA, 264 bp, Homo Sapiens
tcactccaagggtgatcctccagaggaggttacactgccgaactgggacattggcaccctggatttgaatatctagagagggcacccaatggtcatactaatgtttgccataacagtctcttctaggtctagacttgaagcatatggaagggtccttgggctagagccaacccaagcccaggctgactcccttttaatacttctaattttccctgaagatctggtcttctccctaccaccactaccctattacataagagaaaa

SEQ ID NO: 6218 - DNA, 195 bp, Homo Sapiens
cttctgctccgggcttggcttgggctccgggttttggggcatgtgggctaagcaggggcctggggaggcaatgatggggcaggggcagaatgaatgggttctctaacttaacacagagaataagacgagtctcagagagaattctgttatagctccttgtgtagctgtgtggcctattccttctgggccttttga

SEQ ID NO: 6219 - DNA, 382 bp, Homo Sapiens
ctcaaaatgacgaagcttgaattgtcctcaagatggatgtgaatcttacattcctttgcatcatttcctttgtaaaaatgacgagtgctgggtttttgttttaagaagcattatgaaggccagacttactcatttttctcccccaagtgagctgcaagaggcccctgttaggcccctgtttcctgagcagtgatgtgctgctcttcttggtggggctttgggctgggaggggaaggcgggtcagagatgggggacctgtggctgccatgcaggagcccctgcgtcatctcgttggactctttaagggagtcaggaatagatgtatgaacagtcgtgtcactggatgcctatttagaaataaagtgtatgctaatgaattgga

SEQ ID NO: 6220 - DNA, 482 bp, Homo Sapiens
  misc_feature (470)..(470): n is a, c, g, or t
acccggcgtcggctggcccagcagatcctcggcgagagcatgtcccgcgaacatcatcgtggcggcgagcgccgacgcgcccgtcaagatccgccgaatccccgaaaattgcgccttcatttccctcacggcccgtttcggcggatttgacctctctcaaggtctcgccgcgccgacttgcttattacgacacacgatcggcccccttgcgatcgacgcgcctcgaaatgagtcgcgcgtcggcgccagcccgtccgcatgttggtccatcggctgcatacgcgcatcgccagcggttgccaagccgctgagaccgcgcgcgtggcccgcgattgcccgcctgcccaagacccgcgcgcctagtcgagaatcattcttagaaaaccgcgacgatttcgccggatggggcctccgcgtcattacgtatcgttcatggataggtaccttgcggtggtcagtcccaagtcggncggggatcctct

SEQ ID NO: 6221 - DNA, 254 bp, Homo Sapiens
cttaggttcccatcacactgatgactccgggtttggcgagcacaggagcgcaaaccttttcacattctttctgtgatccaaatttgttttcgtttccaccacaacctccataccagaatcttgcacagcttttggtgtttggatcatagtaccattttaatatgaaatccctgcaagttccttcgtctgtcggcaacttgcatatatctgtttcagtgagagccaatggttctgtgctcaccattagattgatg

SEQ ID NO: 6222 - DNA, 474 bp, Homo Sapiens
tgggatgttagggattttcagactggcagctctgctccttttccgaccttagggcagaggtgtgacctccaccaccaccaccctctccccactgggtccgtgcgaggtagtgcagaattcggccccttggggcgccttaccacctctctgcctccgtccccgacttccaccccagaccgtcggagggctccgcccagagtctggtaagaggtttggggaagacaggcccctgggaagcagccggctttggggggtggggagagaaggggaggggctcgggcagagggaactgtgcagtccccaggccgccccggctccgggctagaggcaataaataaacccgatcctgccgggcacagccgcgcccgcgcctccggcgccgtccccgggctgacgggggagggagcggagaagcgagcgcagattctgcgtataaatcagctctggagcagacacagcccggctgtgaaaagc

SEQ ID NO: 6223 - DNA, 519 bp, Homo Sapiens
  misc_feature (334)..(342): n is a, c, g, or t
gggggcaaattggcatttgaataaagccctgggaccacctcaacatgcgtagcctcttgtcttaaatgtactccccatggcagcatggaggaggcaagacctgtgggtcaattttgaactggccttactttgatttttaaaacaagagactcagggaaagtactaaaccaaaatctctgattttactttgcgttttctgtagtttttgttttactgagatgcttttgtaaaggaaaataatactgtgacagtttagtaattctacagattcttaatatttctccatcatggccttttacttcacaattttctgaagtctgaattcaattacaannnnnnnnnaccaatttaatctcaaatgttgtttaactgctttaaattcatatacgtagagtattataaactgcagagatgaaaaatgtgttttcacgggatttatattgtgaactaaactaagcctactttttgtgacttatttgtgatgccttgttgataaatatgtgtaataagtatgtttaa

SEQ ID NO: 6224 - DNA, 446 bp, Homo Sapiens
agaaaaaaattgtaaatagacttgctaaagagcaactcagggttggggtgtgttttaattctcctgatcacttgaaataatctgtaggctgagtgcttatgggggtgggggagaagggtgactccagggtccttccattttgtgaagctctgggggtggagtgtgggcatctgaggccctatgatggcactacattgagctgtctgcccttccggaaacccaacctgcaatcaactgcaaatcaaattcttcacattccagctacagtctttctttccccattgaatctcagtccctggccatgtggtcaaggtggctttctgttaagctaccctaatttcgggaatgggaggggagagaggagggccattacaactctgccttcaagactcatctcttaaaaacaaaacgaaacaaaactacaaccaccatcaaaaccacacgca

SEQ ID NO: 6225 - DNA, 642 bp, Homo Sapiens
  misc_feature (367)..(375): n is a, c, g, or t
tccggatctgaatagtgaagaattcagctctgtttggatggtggaaggtctcattttattgagatttttaagatacatgcaaaggtttggaaactagaacctctaggcaccctcctcagtgtgggtgggctgagagttaaagacagtgtggctgcagtagcatagaggcgcctagaaattccacttgcaccgtagggcatgctgataccatcccaatagctgttgcccattgacctctagtggtgagtttctagtatactggtccattcatgagatattcaagattcaagagtattctcacttctgggttatcagcataaactggaatgtagtgtcagaggatactgtggcttgttttgtttatgcnnnnnnnnncttattcaagaaaaaagaccaaggaataacattctgtagttcctaaaaatactgacttttttcactactatacataaagggaaagttttattcttttatggaacacttcagctgtactcatgtattaaaataggaatgtgaatgctatatactctttttatatcaaaagtctcaagcacttatttttattctatgcattgtttgtcttttacataaataaaatgtttattagattgaataaagcaaaatactcaggtgagaaaaaaa

SEQ ID NO: 6226 - DNA, 586 bp, Homo Sapiens
tcttagcttacaggaagctttttgtattaattgcctttgaggttattttccgccagacctcaacctgggtcaaagtggtacaggaaggcttgcagtatgatggcaggagaatcagcctggggcctggggatgtaaccaagctgtacccttgagacctggaaccagagccacaggccccttttgtgggtttctctgtgctctgaatgggagccagaattcactaggaggtcatcaaccgatggtcctcacaagcctcttctgaagatggaaggccttttgcccgttgaggtagaggggaaggaaatctcctcttttgtacccaatacttatgttgtattgttggtgcgaaagtaaaaacactacctcttttgagactttgcccagggtcctgtgcctggatgggggtgcaggcagccttgaccacggctgttcccctcacccaaaagaattatcatcccaacagccaagacccaacaggtgctgaactgtgcatcaaccaggaagagttctatccccaagctggccactatcacatatgcttactcttgcttaaaattaataaatcatgttttgatgagaaaaaact

SEQ ID NO: 6227 - DNA, 876 bp, Homo Sapiens
  misc_feature (516)..(782): n is a, c, g, or t
  misc_feature (785)..(786): n is a, c, g, or t
ccacatgcccaagtacccctgcaggatgaagggcaggccggcccttgatgtgccatttctgaataatagtcactgccgccgagtctaggatgtcctgttctaactcagccctgcctcggatgcaccaccgatctgtgcagagtgggtgtgggagtgtgggtgagggtcgaaatgccaaaggtctactttccagaatcaagtgccttctgcaaatcactttggaaaagtccaaacctggagatgtccctgtgcctccgcccctacccaccccttttccttcagctgtgttaggaaggagaagttttcagaaccctctaggctggtggctttcaaacttcagaccatgatctgcagcaagaaacgtgccttccatcataaatcagtccatttgtttacaactgtgttccaagcaggtttcataaagaaattcttacccttagaacctcggatatcctctatgttttagttttcatttttttaaaatgcttcttaaaattcactaaattgggctaggtnnnnnnnnnnnnnnnnnnnnnnnnnnnnnnnnnnnnnnnnnnnnnnnnnnnnnnnnnnnnnnnnnnnnnnnnnnnnnnnnnnnnnnnnnnnnnnnnnnnnnnnnnnnnnnnnnnnnnnnnnnnnnnnnnnnnnnnnnnnnnnnnnnnnnnnnnnnnnnnnnnnnnnnnnnnnnnnnnnnnnnnnnnnnnnnnnnnnnnnnnnnnnnnnnnnnnnnnnnnnnnnnnnnnnnnnnnnnnnnnnnnnnnnnnnnnnnnnnnnnnnnnnnnctnnaacaagttacttataccaacatctacatttcggccgccttcggccctcgaaaaacttttctacaccttttcgtttggcccgggggcccaa

SEQ ID NO: 6228 - DNA, 525 bp, Homo Sapiens
ccaacaggaacgcaccccattggaagagctggtggtgcagccttcccctccctgtataagacactttgccaaggctctcccctctcgccccatccctgcttgcccgctcccacagcttcctgagggctaattctgggaagggagagttctttgctgcccctgtctggaagacgtggctctgggtgaggtaggcgggaaaggatggagtgttttagttcttgggggaggccaccccaaaccccagccccaactccaggggcacctatgagatggccatgctcaacccccctcccagacaggccctccctgtctccagggcccccaccgaggttcccagggctggagacttcctctggtaaacattcctccagcctcccctcccctggggacgccaaggaggtgggccacacccaggaagggaaagcgggcagccccgttttggggacgtgaacgttttaataatttttgctgaattcctttacaactaaataacacagatattgttataaataaaattgtaaaaaa

SEQ ID NO: 6229 - DNA, 398 bp, Homo Sapiens
  misc_feature (117)..(180): n is a, c, g, or t
cgcagcatgggtgggtaaatgggtgataaatggataggtaggtggatggaggagtgaatgggtggacgggtagatggatggaaaatgaacagatgaaaatggttcgattgatggttnnnnnnnnnnnnnnnnnnnnnnnnnnnnnnnnnnnnnnnnnnnnnnnnnnnnnnnnnnnnnnnnggtgagcgggtagatgattgggtgggtggatggatggatgcgttggcagatgggtggatggatgaatggataggtagttggatgggtgggtggatgaatgggtgggtagataaatgggtgggtggatgggtgatagatagatacccacctcgtaagccatgctgtggtatacagaccaacacaaaaaaggatccctccctgtctgatctcataggtgc

SEQ ID NO: 6230 - DNA, 722 bp, Homo Sapiens
agcaagtggtactatacagcgcttaatcacagcaggctgggtacgcgtcggatatacccgggatatcgtcgaccacgcgtcggggcactccaccggtggatccaaagttggactgggtaggagatgtcttcaccgccacacccgctgaaccccgcccacttacctcacctctgcgccaggctgcggatgaggatgacaaggggatgaggagcgagactcctccagtacctcccccaccaccctatctggccagttatccaggctttcctgagaatggagcccctgggcccccaatctctcgctttcctctggaggaaccagggccccgtccactcccctggcccccaggcagtgatgaagtggccaagatacaaactccaccacccaagaaggagccccctaaggaggagactgcacagctgacggggccagaagcaggccgaaagcctgcccgcggagtcgggagtggaggccagggccccccaccaccacgcagagagagtcgcacagagacccgctggggccctcgtccagggagcagtcgtcgtggaatccctccagaggagccaggggccccaccccgccagggctgggcctataaagaaacctccaccacctacaaaagtagaagagctgcctgcccaagcccctcgaacagggggatgaaacccccaaagcccgcatagccagacccactcaagataaccaaggggaagctaggg

SEQ ID NO: 6231 - DNA, 308 bp, Homo Sapiens
ataaagatgttgcctgctttaaaaaatacctgttaagcacttagagttctagcagtcaaattctcctaatactagccctgtacggcaattgtgaagttggaatggatgcggctcaccactagagtccttgtgctgtaggaactcttcaacaggtgaaatgattcttaacagatggaaggaatcctggtcatccttcagaatcactttccattacccctagtgatttataatgaggtgagttattctttcgacctcatttttcatgctatctactgtcaggaggaccattaaactggcgacaccccgga

SEQ ID NO: 6232 - DNA, 231 bp, Homo Sapiens
catggtaggaatgggaggatgctatgctcgttatgtttctcgcatggaatatcgtgcgctctgtcctcttggctcatccacattttttgaatatgccaaaccccagtcaaatgtccgctacctcctccagggagctcccagtcagaatggttctctcttccttgttgtctccaaatacacatgcctattagttcgatagattctggccacgtgccgtgtctttcatgagtt

SEQ ID NO: 6233 - DNA, 451 bp, Homo Sapiens
gggtgtcgtgatctgtgatacaagtcatcctaccagagggctgcaaagggaacaagagaatgcttccaaagaagttaatattttgaactgtgaaacatcaccagagcaactgaggaactatttgctttttctgggaaattactgcagtcaagagagcttatctgagaaagctgcatcaagggagtaaacgttaagtgagtcaaactttagttgggaagcaaagggaattccttgtattagaagagaacaatagctactttctacagctctgaacaacccaggaagactatttgagactatgcatctcagagatataaaaattggtaagatatagaagagatgacattgaactctgtaaggtctaattctggcttagttacatactaactgtgttactttggacaagccacttatctactatagggtcttgatattcccatctgtaaaatgg

SEQ ID NO: 6234 - DNA, 417 bp, Homo Sapiens
tgtattggtggtctctataaaagctgggggagcctgcaagccagatctggcattgggaggggccctctcttacatctaaggctggctactccctctctctgtgctccctgtcatgccatgtctcacctcactctccctcactccccctagctaaacactcaccaagcctgtctctacctcattctctctccatctctcaattcctctctggctctgtttctgttccccagtgggtaggggctggaggaaaatggtggtgtagtaagggctggcaggcttaggcaggactctcagagatgtacaaacctctgcagaacattcttcctcccagagccccagagagggaggcagcacggtcaaggttagtgagagttgggcaacaggatatcttactctggatgtgtgtgactgatgtcc

SEQ ID NO: 6235 - DNA, 465 bp, Homo Sapiens
ccacttcggatgcaggtcactatagctactttcagatatgaactgagcaaaaacccagcccctcaccagtaagtacttgtcagtactcaccagatacttacaaaggcagtactataacaccttcaagatggggaaaccacggtaaataaacagaaacacatattttccctcaacatggatgcttatatcatatctataacatagtaagagtagagagtcacaaaaacatgaccatatattaaccagacggtgagaaaagcaatagagaaaaactgattaatccaagaaatatccttaaagaaacaaaaaagaacagaagcatacaagggaagccctctcttccaccctctttctcatcacagtttggccctaatcagataagacaggtaggggtaccagggctgtaaagctcatggggtatatcattaggaccagcactgtaaatggaacagctcaaagactgaa

SEQ ID NO: 6236 - DNA, 536 bp, Homo Sapiens
cccgctcagcgtggtacaggtgcgcagctgtgtgcccagctcctcgcggaggtcggcgggcgcgccaggcagcaggtagccccgtagcagtgcgcacaccttggccaggttgggctggatgaggtcgcccttgcactgcctcatgagcctgtcacacggggccctgcagtcgcgcccgtaggtgcagtcggtgctgtgctcgcagcggcggccctgcaggaagcggcgcacggtggcctcgggtgccacctgctgcaggtcggccatcttgaagtcgtaggtggctgtgtagcccacgttggccagtgtggtctcacacatgtagaaagtcccgtaagagccgtggaagagctcctccacgaactccagcaggccgatggcgatcttggcccgccaaggcgagcacagcaccgactgcacctacgggcgcgactgcagggccccgtgtgacaggctcatgaggcagtgcaagggcgacctcatccagcccaacctggccaaggtgtgcgcactgctacggggctactgctgcctgg

SEQ ID NO: 6237 - DNA, 702 bp, Homo Sapiens
tgcgagactcggcgccgacatcgcgacagcgaagcgcgtttgcacgccaggaaggtcccctctatgtgctcgctgagccggttacctggacgcgacgagcccgccctcggtcttcggagcagaaatcgcaaaaacggaaggactggaaatggcaagaccatatgatggccatgaaccacgggcgcttccccgacggcaccaatgggctgcaccatcaccctgcccaccgcatgggcatggggcagttcccgagcccccatcaccaccagcagcagcagccccagcacgccttcaacgccctaatgggcgagcacatacactacggcgcgggcaacatgaatgccacgagcggcatcaggcatgcgatggggccggggactgtgaacggagggcaccccccgagcgcgcatggccccacgcggccaggtttaacaactcccagttcatgggtcccccggtggccagccagggaggctccctgccggccagcatgcagctgcagaagctcaacaaccactatttcaaaccatcacccctacccccacaaccactacatgccggatttgcaccctgctgcaggccaccagatgaacgggacaaaccagcacttccgagattgcaaacccaaagcacagcgagcggcagcagcacccccgggcggcctcgggcggcagcagcaaccccggcggccctggcagcagc

SEQ ID NO: 6238 - DNA, 646 bp, Homo Sapiens
gtcggaccctaaggctgttttacgctatggcttggattcagatctcagctgcaagatttcccagctgcccttgaccggaagcatgagtatcatcttcttcctgcccctgaaagtgacccagaatttgaccttgatagaggagaccctcacctccgagttcattcatgacatagaccgagaactgaagaccgtgcaggcggtcctcactgtccccaagctgaagctgagttacgaaggcgaagtcaccaagtccctgcaggagatgaagctgcaatccttgtttgattcaccagactttagcaagatcacaggcaaacccatcaagctgactcaggtggaacaccgggctggctttgagtggaacgaggatggggcgggaaccacccccagcccagggctgcagcctgcccacctcaccttcccgctggactatcaccttaaccagcctttcatcttcgtactgagggacacagacacaggggcccttctcttcattggcaagattctggaccccaggggcccctaatatcccagtttaatattccaataccctagaagaaaacccgagggacagcagattccacaggacacgaaggctgcccctgtaaggtttcaatgcatacaataaaagagctttatccctaaa

SEQ ID NO: 6239 - DNA, 1405 bp, Homo Sapiens
  misc_feature (838)..(919): n is a, c, g, or t
  misc_feature (1085)..(1139): n is a, c, g, or t
gaagctgctgcctcctgtctaactagtcgctggccccagtgcagtaccccagctcatgggggactcagcaagcaagcgtggcaccatcttggatctgagcccggtcgagcccctgtccccacccttcctgaccgtgtccttttcccacaggcctctgggggcaggtgggcaaggcctggccgggccgttccttcactggccgttagccacctggctctgtctgcagcaggggcaggctgctattcttatccatttccctggaggcgggcccccctggcagcagtactggaggggctacaggcagctggagaaaggggcccagccgctgacccactcactcaggacctcactcactagccccgctttgggccccctcctgtgacctcagggtttggcccatggggccctcccaggcccctgccccaactgattctgcccagataatcgtgtctcctgcctccactcagctgcttctcagtcatgaatgtggccatggccccggggtccccttgctgctgtgggctccctgtccctgggcaggagtgctggtgaggaggtggagccttttgaggggggccttccctcagctgtttccccacactggggggctgggccctgcctccccgttaccctccttccctgcaggcctggagcctgtagggctggactgaggttcaggtctccccccagctgtctcacccccactttgtccccactctagagcagggaggcagtgggggaggagttgtgtctcgtcttctgtctccatgtggtttttgggtgtttttcttgttgtgtcctggattccgataaaattaaagaaattgcttcctcaacnnnnnnnnnnnnnnnnnnnnnnnnnnnnnnnnnnnnnnnnnnnnnnnnnnnnnnnnnnnnnnnnnnnnnnnnnnnnnnnnnngcgagggggggcacgccagaagaataacaacaccagcaggggagagagccaaacaagcgcgcccgcccaagattgtaaaaaaaagagggagcgcacacaaagaggacggcgttacaatacaacacaagggcgacgcggcggcgcagcgctaaaacgaacagacaannnnnnnnnnnnnnnnnnnnnnnnnnnnnnnnnnnnnnnnnnnnnnnnnnnnnnncacaccacctcccagcaagccagggagagggggcgacgaacacacaaatcaagcagcaacaccaaaacccccaccacgacagacgagacgacgcaacgccgcgatccaacgggacaaagaaacagaccccaaccgaaccgggagatgcataactgcgagcgaacaaccacaaacgcaggcaagaaacgcaggcgcgcgcgcgcaaacaatgccgcgaccgcaaacaagcagaaatcagcaacgaaaaaccaaaagaaagcacagcg

SEQ ID NO: 6240 - DNA, 225 bp, Homo Sapiens
aaaaaactcttgtacaaaactgatctaattcttcactcctgctccaagggctgggctgtgggtgggatactgggattttgggccactggattttccctaaatttgtcccccctttactctccctctatttttctctccttagactccctcagacctgtaaccagctttgtgtcttttttccttttctctcttttaaaccatgcattataactttgaaaccaaaaa

SEQ ID NO: 6241 - DNA, 405 bp, Homo Sapiens
tatatatatggaattggaacttattttaaattgttggagttcttttaagaagaatataaattgattaccccttttatttaaagggatagttgattcctggggtgttttgaaattaagttggaattaagttgcttaagcatatttatgttgtgagaaaccttaatatgaggtttatcatgccctttttcaagcagatttatgagcagatttctgtcacataagtcgtcttctgcttgagtatcctaatatttcaatgcatcaggggagcgctccactggataagcattttatttcccgcatggcataatgtttttgcactaaaggctcaaagtgtgagaacctgttctggatttgtttgaaattatttcaccaataaagatcataaataaatgtttctttcaagaa

SEQ ID NO: 6242 - DNA, 489 bp, Homo Sapiens
  misc_feature (187)..(187): n is a, c, g, or t
aaaatgaaccccttggggtggtcgcgtttgtgtttccccgtgtttttccgtgtgtgtgtatggggtcttgaacaagcttgtgctcacctgcctgtcgggggttattacgctgtctagcggctgcccagttctcctgaccctcttagagactgttcttaggcctgaaaaggggctggcaccccccccnaccaaggatggacgaagaccccctccagagcaaggaggccccctcagccctgtggttacagccgctgatgtatctaagaagcatgtcactttcatgttcctccctaactccctgacctgagaaccctggggcctgggggcagtttgagcctcctctcccttctgtgggtcgctcccagagccatggcccatgggaaggacagagtgtgtgtgtccttggggcctggggggatgttgctcctcagctccctccctcagccctgcccctctgagacaataaaactgccctctctaaggaaaaaa

SEQ ID NO: 6243 - DNA, 246 bp, Homo Sapiens
ataagcttgcaggatccagccgttctgacctatccctacgagtccccatagcattgggttccctccggtggctcttagcctggttctcccgtgcagagtatgggcatggagggcttctcttcctaatccttcctaatggtaggatcctaacaggacaaatctgtgtacctatctttctatcctccccgagcaccaccaatacattgagcaccaccaatacaaggagcaccaccaatacagcgagca

SEQ ID NO: 6244 - DNA, 223 bp, Homo Sapiens
tgtattggtggtgctccgtctagacagtgcttcagtgtggctgacacagcagcatggtcttgacaagttttcttcatcctaccacaaaatcccagttggtaatagagactttactcctacctatccaaaccaccaaatgtcccattagggggggacatgttgtacatgttaggatcattcaaataaccaagattataaggtgaggaaagatgcccctaacctg

SEQ ID NO: 6245 - DNA, 869 bp, Homo Sapiens
ttaggtggtgtcgaactggctgagactgagcacgagaacacggtgttaggcacaacatcgagcgcatgaaggaggagaaggacttcaccatgtaagacttcagcaagaaacacctacaacaggagaaggagtgcctcatgtccaagctggtggaggcggaaatggatggggctgcggctgccaagcaggtcatggccttgaaggataccatcgggaagctgaaaacggagaaacaaatgacctgcacggacatcaacaccctgacaaggcagaaggaacttctcctgcagaagctgagcacatttgaggagaccaaccgcaccctccgagacctcctgagggaacagcactgcaaagaggattctgaaagactaatggagcaacaaggagcactgctgaaacggctggcggaggccgactcagagaaagcgcgcctgctgttactgctgcaagacaaggacaaggaggtgggagagctccttcaggaaatacaatgtgagaaggctcaagcaaagacaggctctgagctttctaaatccatggagtccatgcgtgggcatttgcaggcacagcttcggtccaaagaggctgagaacagtcgcctgtgcatgcagattaagaatctggagcacagcgggaatcagcataaggcagaagtggaggccatcatggagcagcgtgaaggagttgaagcagaagggagaccgagacaaagagagcttgaagaaggccatccgagcccagaaggagcgagccgagaagagcgaggagtatgctgagcaggtacacgtgcgactcgctgacagggatctttaggtcgctgaggcttatccactctggaatctggaggagggctacaaccatgtgta

SEQ ID NO: 6246 - DNA, 209 bp, Homo Sapiens
acttggtggtgctagctgtattggtggtgcttcctgtattggtggtgctcaccgtatgaggttcagcacacacaggtctgactccttttctatgccacagttagacaggatgccgtccactttgctgacagcttgctcttcattcatcaggtatcgatggtacagcttcttccaaggaatgaactatgcacgttaaaaaaacacaccac

SEQ ID NO: 6247 - DNA, 333 bp, Homo Sapiens
agcttccgtgacggccagcgcagcagcatcatggacgtgcggtcccgggtggattctaagaccctgacccgtaacacgaggatcattgcagaggccctgactcgagtcatctacaacctgacagagaaggggacacccccagacatgccggtgttcacagagcagatgatccagcaggagcagctggactcggtgatggactggctcaccaaccagccgcgggccgcgcagctggtggacaaggacagcaccttcctcagcacgctggagcaccacctgagccgctacctgaaggacgtgaagcagcaccacgtcaaggcctctggcggcatc

SEQ ID NO: 6248 - DNA, 352 bp, Homo Sapiens
gcttgaagtgtctggagactccgtggggaggtctcagtcagaaggagcggggtcagagaaccacttaaataagcagtctgtctgccccgtggacaggctgggtgtgctacacgtggggggaatccccctcatctggactgccttgactctccagagccagcaggcagagaagactaagatcactgatccatgatacttcagccatccttcctcctaggggctcctcttggggttatcagcgttttgtccataaaccccgggctggggatgctgagattcccacagggaggccctgtccagtgaagaggagtgaatctgggttccaccccatctcgtgagcaccaccaataca

SEQ ID NO: 6249 - DNA, 673 bp, Homo Sapiens
tggtgggctggccgtttggtacataggggctgacagtgacctactgtgccggggagaggaagaaaatatgatgatgagaattgcccagaaatgtaatatcaaccttctccctttaccagatcccattccttctggtctgatggaagaatgtgtggatagggatgtggaagttaaagctgctgtgcatacatatggtatagcaagtgtacctaaccaacccttaaaaaagcaaattcagaaaatagagagaacccttcaaattcagaaagctcatggtgaccacatggcttcctctagaaataattctgtatctggactatcagtcaaatcaaaaaataataccaaacaaaagcttcctgtgaaaagccactcagaatgtggaatcatagaaaaagcaacgtcaccaaaagaactgggctgtgacaggcaatccgaagagcaaatgaagaattctgttcagactcccgttgaaaactccaccaacagtcagcaccaggtcaaagaagctttacctgtgtcactcccccagattccttgtctgtcttcctttaaaatccatcagccatacacgttgacttttgctgaatgggtagaggattatgaacattatattaaagaggggttagagaaacctgtggaaatcatcaggcactacacaggcctggggatcaga

SEQ ID NO: 6250 - DNA, 366 bp, Homo Sapiens
cggccggtaccgtatggtggtctgcattcgtgttggtgtgcgcgtcacgtggaaaggaagttgcagagcaacaaggtcagcaagaaccagacctcagagtgtgtcactcaccacagaagaaaaacacccatggcaattcccgttgggaaagttaaagcttatctcctcggaatgaagttccaaagacaaccatttccacagaagatggaggaaaaaagacaattacatttcaaatctgtaagtcacaaatagacaggcagagttctggcgaaccgtgtcacagttaaccactttgaagacatcagtgtcctcccccacagtctgtaaacacgcagccagtcaatttcctaatgaatgcttccccag

SEQ ID NO: 6251 - DNA, 1016 bp, Homo Sapiens
atttaatgcaaagacattaatattagaatagctatatacaggatacggtagtggcactgaagacaggaagattatttttaacctatgaaaaggcaggaaaagaatgctaaagctgctctggagtttgaaaggtgagtaaatgattggagtcagccagcaatgtttttaaatatctattaataatatgaaattcaggtattgtggaggtaatatctgaatctttctctttgtgtgtaccttcagttctgaatctgaacgtggagtggggctggagctaggggacacagtgcactgatgatttatcctgtttgtttcaggcagaggaacggactagatacttctcagtcttctacctgtccatcaatgcagggagcttgatttctacatttatcacacccatgctgagaggagatgtgcaatgttctggagaagactgctatgcattggcttctggagttccaggactgctcatggtaattgcacttgttgtgtttgcaatgggaagcaaaaatataccataaaccaccccctgaaggaaacatagtggctcaagtttcaaaatgtatctggtttgctatttccaatcgtttcaagaaccgttctggagacattcccaagcgacagcactggctagactgggcagctgagaaatatccaaagcagctcattatggatgtaaaggcactgaccagggtactattcctttatatcccattgcccatgttctgggctcttttggatcagcagggttcacgatggactttgcaagccatcaggatgaataggaatttggggttttttgtgcttcagccggaccagatgcaggttctaaatccctttctggttcttatcttcatcccgttgtttgactttgtcacttatcgtctggtctccaagtgtggaattaacttctcatcacttaggaaaatggctgttggtatgatcctagcgtgcctggcatttgcagttgcggcagctgtagagataaaataaatgaaatggccccacgcccagca

SEQ ID NO: 6252 - DNA, 574 bp, Homo Sapiens
atcagccttctgcctgccctgtccttggctgctccagacccagggcagagaagcagctcccagccctcaccagccatctgctcagcccctgccaccctgacccccaggtccccacacgccagccgtacccccagctccccactccagagctgcactcccagtctctcaccccgtagccatgtccccagtccacaccaggctcttgtgaccaggccccagaaacctagcctggagttcaaggagtttgtagggttgccctgcaagaatcggccgccttttcccaggaccggagctaccaggggagcccaggagccctgctctgtctgggaacccccaaagaggcatcgtgatggttctgccttccagtatgagtatgagccaccctgcacgtccctctgtgctcgggtccaagctgtcaggcttcctccccagctcatggcctgggccttgcactttctgatggatgcacagccagggtctgagccaactccgatgtgagacgtcacgcaggacagataccgctccacactctgcttcctttgagttttttaataaaataatctcatgcggcagg

SEQ ID NO: 6253 - DNA, 777 bp, Homo Sapiens
ataaatttggtgtttccccagggttctgctggaagaagggcctcgaagcaacactttgccccagtgctgggactgaagattgtcgtcattccagggatcttcatttgccttggctgtggcgctttgacatcagctttgaagaaagaataccacaccctactttctcccaccagccttttgcaagcctacatctccggccttgggccttaccatcttcattcatgcacatcttcaagcatgctcagcctgccctcctatacctggtccccgcctgcatcggttttcctgtcctggtggcgctggccaagggagaagtgacagagatgttcagttatgaggagtcaaatcctaaggatccagcggcagtgacagaatccaaagagggaacagaggcatcagcatcgaaggggctggagaagaaagagaaatgatgcagctggtgcccgagcctctcagggccagaccagacagatgggggctgggcccacacaggcgtgcaccggtagagggcacaggaggccaagggcagctccaggacagggcagggggcagcaggatacctccagccaggcctctgtggcctctgtttccttctccctttcttggccctcctctgctcctccccacaccctgcaggcaaaagaaacccccagcttcccccctccccgggagccaggtgggaaaagtgggtgtgatttttagattttgtattgtggactgattttgcctcacattaaaaactcatcccatggccagggcgggccactgtgctcctgc

SEQ ID NO: 6254 - DNA, 539 bp, Homo Sapiens
  misc_feature (96)..(140): n is a, c, g, or t
gcgtattaagcattagccaggcagtaataaagctaaatagccatacagcagctctgacaatgttgtgctggatattgcagtttgctttcaaggtgnnnnnnnnnnnnnnnnnnnnnnnnnnnnnnnnnnnnnnnnnnnnnacgagtagcatccattggcctattaaatcgagtcaggatttgaagggaattgagtttgagaaatgaataaataaaggcaccttggtgcctgaccccctcaatcatgcgtgtgactttgagcactcacaggtgtgtgcagctactcagcccagggcaggtgggttagcctggggttataccttggccctgggaatagacaccattgggcctttggttttgttgggcttccttttgtctttacactccacacaggtggtagaaatctgagttctaaagcacttttgtgaaatacaagctaagtgagaattctaaagaaaatgctttggtttctgctgtctcaaataagtggcatttaaaaacaattattaataaatatttttaatggttttaactcaaaaa

SEQ ID NO: 6255 - DNA, 355 bp, Homo Sapiens
gtcacaggatgctgataagcgcgctgagaggtggatgaaacaccaaagtctgtttccccgtccgcagtgggtgttgcctctttgtgtgtgtcccgatgttcctgcctgtgagtcggccttactccgtttccttagcgcccatgacacgccaagtcccgtttcgcactcggcttctcacccgcccagctcggctagggagggggagtttttagcacctaatatgcttcctgccattgcgcaatctgagcctgagcaactggaaacccccatttctcattagtgcaatgtcatatctgatcccaggaagcctggaaaataaaagacgatgcattataacttgcggaagtacaaaaaa

SEQ ID NO: 6256 - DNA, 759 bp, Homo Sapiens
aaacttttccctggcaatgaagagaattcaggtatgaacattgatgaaggagccattttagcagctaatttagcaacagttttacagaacacagaagaatgtgaacatgttgacattgagaatattgatcagtggttcgactctcggagcagtgactcaagctgtcaggtgctgactgacagtgaaagtgctgaggaccagaccaaggctgctgagcaaaagccttccagtaagagtagaaaaacagaactgaatccagagaagcatattagccataaagcggcacttgaatgggactgaaaatttactggattatcttgaacaacaagatgacatgcttctgtctgataaattggtattaaggaggcttcggaccataataagaaaaaaacagaagatccaaaataacaaaaatcattaataaggctcttaagtatttcagtgtatctgcatctttgtgactatctgcagtgaaactttgcttgtttgaagtcctgtggattccaaagccaaatacattttataaatgattttggaattagatgtcagtttggattacttaaattacaactctttaatgttgactctagtcattgggcattgacgtgtaacttgtctttctactgtttctaatatctattaattagatcataaggtacctgaggccagggatcttgtgtctgtagtgcctgaatttggcgtgtctaataaaggcccatgcacactataggcactcaataaaacttacatttttatgaa

SEQ ID NO: 6257 - DNA, 514 bp, Homo Sapiens
agatgaggtcattgtttgtcattgagtcttctctcagaatcagcgagcccagctgtagggtggggggcaggctcccccatggcagggtccttggggtaccccttttcctctcagcccctccctgtgtgcggcctctccacctctcacccactctctcctaatcccctacttaagtagggcttgccccacttcagaggttttggggttcagggtgctgtgtctccccttgcctgtgcccaggtcatcccaaacccttctgttatttattagggctgtgggaagggtttttcttctttttcttggaacctgcccctgttcttcacactgccccccatgcctcagcctcatacagatgtgccatcatggggggcatgggtggagcagaggggctccctcaccccgggcaggcaaaggcagtgggtagaggaggcactgcccccctttcctgccccctcctcatctttaataaagacctggcttctcatctttaataaagacctgtttgtaacaaaaa

SEQ ID NO: 6258 - DNA, 427 bp, Homo Sapiens
cggattggcgaccatttcaaccacttcagccccctgattgagggcgacgtgggggagtttatcatcgctgctgcccaagacggggcatgggccgggtacccggagttgctggccatggggcagatgctgaatgtgaatatccatttaactactggagggaggctggagagtcccacggtgtctaccatgattcattatttgggcccagaggattccctgaggcctagtatttggctcagttggctcagtaacggacactatgatgctgtatttgatcactcctatcctaacccagagtacgacaactggtgcaaacaaactcaagtgcaaaggaaacgcgacgaagaacttgccaaatctatggccatatccttgtctaaaatgtatattgaacaaaatgcatgctcttgaaatggtcgccaatccg

SEQ ID NO: 6259 - DNA, 837 bp, Homo Sapiens
gaccctcccacagccaggcctacagaaccagagtctccaaaaaatgaccgtgaggggcctcagtgagaccagattgtgtcatttggctccaccttcatcttgcagagccagctgatctcagattgccaagaaactagaagccacttgcacggtgtggccagagcctcagctggatgagaggctgagatgggtggccagcttgtataccagtccctgaactgagctgtttacaggactggggaggctccacccagaaggctttcatttgtactctgctgggagtgactgggaaaaactccttccctgctgctgagtggagagaggcctcatccggctttgacccaccatccgttgcagaagcctccaggagcagcaatcctaagagtgggaggcagccaagacccccttccttcaaaacctcccggaagtggtttcaggccctctagttgccatgaccaatttgtgtgtgtgtttaatttttgcttcaagctctgtagcaggacctgccccacgcacacccctacccctctgtgaggagctgtgggaagtgtgggtttgtctccagaacagaagagaatgatggatattctggctctggggccctctccaccaccactcacagtagccttgctgaagccatcacagatgggagaaggccatgccagccacgtccgccgaggggcgccagcctgaagctgccaggccctgaggttcagaccctggaccccatagctggaggcctgtggtgccagaagcccagattagggtggctgtccatccctggatagctatttgcacgaatcatggacataaatccaagttgaagaagatcaaaaa

SEQ ID NO: 6260 - DNA, 510 bp, Homo Sapiens
ggagacggagaagacaacgaaatgaagtggtagttgaattaaggaaggtgagtctgattaatatggggtacttctaagcataattccaacaacattatagcattatatacaagatgccaaatatatataatgtttttaggtaaaaggtataacctatggtataactaaattttatttactaaatttagttaaactttttaaaatctcaacggctaagcatttttctttagaaaaaggagagatttggactaaatttgacaggcttttgaagttgaaaggatacaactagttacttgttcattatgcagaaacagatataaagaacttaaagtataagtcattgagatacagttgtattaaatagttttgctattaatgggcagtagtaagtccctgaaaagaacttgttgcaaacttcttcaacttttaagtattatagttgagaatatatttataaattgctccaagcattttaagtgaagttgaaatgtcgccaatccggggtcctct

SEQ ID NO: 6261 - DNA, 607 bp, Homo Sapiens
atggcgacatttcaagcaaaaactttaaagggaagttaaaactcatagcattagcatacaacttcctcttagattttaagtgccacattctttacatgcttttgaatccattcgttccattcaattaatatttggtaagcatctattatgtgacaagccctgttttagacgcatgggatacattggtgtacaaaaagacacagagattctgccttcataacactttcatgcaagcaggaaagagagagatgatagacaataagcataatgattagatactataccagaagatgaaattgctgtaggaatataaaggaagaaaggcagattgaaaatttaaatagatggtcagaggtaggcctcattgagaagatgacatttgagcaaagattctaaagagtaagagggttagcaatttggatatctgggagaagagggttccaggcagagggacagtcagtataaagaaaggccttaaggtgagagattgatggttttgagaaacggcaaggaggactgtgtctggaatggaatgagcagggtggggagagtagaagaaaatgaggtcaagaagtcatgaggagggagctcattctgggccactatg

SEQ ID NO: 6262 - DNA, 469 bp, Homo Sapiens
ctgggatcccttcaaggacggcgagcctggagttgggtgaggacgatgatgaacaggaagatgatgacatcgagtatttctgccaggcggtgggcgaggcgcccagtgaggacctgttccccgaggccaagcagaaacggcttgccaagtctccagggcggaagcggaaacggtgggaaatggatcgaggcaggggtcgcctttgtgaccagaagtttcccaagaccaaggacaagtcccagggagcccaggccaggcgggggcccagaggggcttcccgggatggtgggcgaggccggggccggggccgcccagggaagagagtggcctgagcccaagccgcaccggagcagcggctggattgaacgccccagattggggcccgagatgtggccctcggtttcctttcataaaggagttgtgtccccagcccttccactccagtaaagaactgaattggcaaaaaaaa

SEQ ID NO: 6263 - DNA, 881 bp, Homo Sapiens
gatggcatacgaagtgcgcgagatacgtacgtagagggtcctaacactatctctaggacacgtgagtagcctgccgcgttccctctacaggatatgacatgagaactgaagatgcgggctctacacaccctcaagacactcagataggcagacgggtggacaagacagatacccaatagtagagggcaacacaaaagtcccccatccctccataccacaccacccagcagcaccggtaaggaaagagccagaggcgcccatgtgagtgaccggccacacacaacacactggcagcctgagtacaagccatgcagatggtggaggaggacttcctgccctgtctcttagcttcagaaaaggacatcagggcatctgctgggtgccctgggaatccaagcgccattgattacatggaggagcaggcccagaaaggccacaggagcctgatgaggactctggctgctcaggggactggtaaggggagacaggtggcaggccccaaggctgggatggtagagatgagcctcaggtaaaagagaaggctttacagcagaggtgaacattggctgagaagagaggtggcttgtcctgggttctcctgagtctctgctgccagacaaatcacacacaaacacttgggtatcctaacctgggagatcattctgtccagggaaagaagggaggggcatgagcgtgtgtctcctagaggttatttggaaatgtctggagatagttttgattgtcaggatcaagggggtggctactggcatctagtgagtagaggccaaacatgctgctaaacttctcacagtacgtagggtggtccccttgcagcataaacgtgtctgcccaagatctcagcagcttgaaatgtcgccaat

SEQ ID NO: 6264 - DNA, 989 bp, Homo Sapiens
gggacagacgtgaagcctagcagaggactttttagctgctcactggccccgcttgtctggccgactcatccgcccgcgacccctaatcccctctgcctgccccaagatgctgaagccagccctggagccccgagggggcttctccttcgagaactgccaaagaaatgcatcattggaacgcgtcctcccggggctcaaggtccctcacgcacgcaagaccgggaccaccatcgcgggcctggtgttccaagacggggtcattctgggcgccgatacgcgagccactaacgattcggtcgtggcggacaagagctgcgagaagatccacttcatcgcccccaaaatctactgctgtggggctggagtagccgcggacgccgagatgaccacacggatggtggcgtccaagatggagctacacgcgttatctacgggccgcgagccccgcgtggccacggtcactcgcatcctgcgccagacgctcttcaggtaccagggccacgtgggtgcatcgctgatcgtgggcggcgtagacctgactggaccgcagctctacggtgtgcatccccatggctcctacagccgtctgcccttcacagccctgggctctggtcaggacgcggccctggcggtgctagaagaccggttccagccgaacatgacgctggaggctgctcaggggctgctggtggaagccgtcaccgccgggatcttgggtgacctgggctccgggggcaatgtggacgcatgtgtgatcacaaagactggcgccaagctgctgcggacactgagctcacccacagagcccgtgaagaggtctggccgctaccactttgtgcctggaaccacagctgtcctgacccagacagtgaagccactaaccctggagctagtggaggaaactgtgcaggctatggaggtggagtaagctgaggcttagagcttggaacaagggggaataaacccagaaaatacagttaaacagaaaa

SEQ ID NO: 6265 - DNA, 355 bp, Homo Sapiens
gccagaggatcccggatggcgacatttcaaacatcaggaaactcacttccttagaaccctagggttcccccaacaatctaaagaaagtgatgtgttgttctgttacataaaggtgtcgagttccttcacgtttctaaatatctgcttttcacacagtgggattaagaaacgtgggaagcaagactcaaaccaaatttaaagagccactccatttcccaatctttacaaaagcgaaaactagataaaaacagctgtttataagagtaaaggacaaattgctttcatgttctctgccaagtgaatcgcacctggaagttgactacttttcaattccattgaaatggtcgccaatccg

SEQ ID NO: 6266 - DNA, 291 bp, Homo Sapiens
tgtattggtggtgcttaaactgggattcaggacatctttgaagcctttcaaaccttaaaataaggttttgatgattggagaggagagtctagggtgactgccagatttccagcttgcatcactggatgatggtggaagctttaggtgactggaaaggtaggaggaagaatttggggttggggagagggatgatgagctctcatctgacatcctgaatttatgggtcttgaggcacatcccagtgaaaaaaaacagtgcagcaccaccatacgacacaccaccataacagtc

SEQ ID NO: 6267 - DNA, 862 bp, Homo Sapiens
tgcgggtgctcagaggatcccggatggcgaccatttcaacagtaataactaaagagtaacgttatgccatgtggtcatactctcagcttgctgagtggatgacaaaaagaggggaattgttaaaggaaaatttaaatggagactggaaaaatcctgagcaaacaaaaccacctggcccttagaaatagctttaactttgcttaaactacaaacacaagcaaaacttcacggggtcatactacatacaagcataagcaaaacttaacttggatcatttctggtaaatgcttatgttagaaataagacaaccccagccaatcacaagcagcctactaacatataattaggtgactagggactttctaagaagatacctacccccaaaaaacaattatgtaattgaaatggtcgccaatccgcggattggcgaccatttcaaaccttcagtagaggaaggaggaagagtagcatttaaaatgtacactaggactggttaggttgcttttcctagttagcactgatcttagaaagaaggttggtaggcatattccaactgccacagcacccttcctgtttcaaatgtggcaggttattcattttgtgtgcagtttgtctcctccaatgattagacgaaagagttttctgaccatcattcaaaaggaatgtgagaagttaatgaatcctagaggaaagcggctgagaaaaggcatctggcatttggttgagagcctctctatgtggtgctagtcaaactacttttacatggagcctgaattcaggacagaaaacactgctccttctcctcgctctcagttgttgggaaagcatggttacattgaaatgtcccaatccggggatcctt

SEQ ID NO: 6268 - DNA, 270 bp, Homo Sapiens
gtatatttatacccactttaactgcgtgcagatcaggggtggtttatgtggacatttctagggaagcggcagtaactttggggtcatcaggccatgccatggaaaggggcggtaactcccaggtgtgccatggtgatggtaaactggcatgatgcgttggtgggcgtgtcttatggaaggctgcttcctccctgaccctgttttatctagtcctcaatttggtcttgtgtctgagccccacttctggagtcaagttctgcctcttatctc

SEQ ID NO: 6269 - DNA, 540 bp, Homo Sapiens
ggatgggcgacattcaatatcatgcatgcaggaatagggaggacacgaggagagggagagtagagtacaggagagctaccagtggtggatgcagtcagaacacacacatttatgaagttcagccttcatatacggacgtgctctcatggtgccccaaaaagaggacaatagcaacatcgaagatcactgatcacagatcaccatcacagacatgataatgacaaaaaagtttgaaacattgtgacaattaccaaagaaacacggagacacaaagggagtgcatgcagctgggaaaacagcactgatagacttgctcagtgcagggtcgctgcataccttcagcgtgtaaaaaatgcagtatctgcaaagcgcataaaacaaggtatgcctgcgtgtgatgggttgtgggaattggtacgaactgtttgcagtttcatgacaacacgtgggcccttgttattctcaacagtctttcaccctcttctttagattccccttcaggtgttaaactatgtgtttagagtaggtgagtatgtatag

SEQ ID NO: 6270 - DNA, 534 bp, Homo Sapiens
  misc_feature (488)..(488): n is a, c, g, or t
tattggtggtgctcacccaacaaagccgcctaccactccagtgggtggtgggaacctaccttctgctccaccaccagccaacttcccccatgtgacaccggagacctgcctcccccacctgccctgagacccctcaacaatgcatcagcctctccccctggcctgggggcccaaccactacctggtcatctgccctctccccacgccatgggacagggtatgggtggacttcctcctggcccagagaagggcccaactctggctccttcaccccactctctgcctccggcttcctcttctgctccagcgccccccatgaggtttccttattcatcctctagtagtagctctgcagcagcctcctcttccaagttcttcctcctcttcctctgcctccccctcccagcttcccaggcatgcccagctacccccactctttccctcccccaacaagcctctctgtctccaatcagcccccagcatcacangtgacacacccctcttcctgtcacaaatgcttcctcagtacccaca

SEQ ID NO: 6271 - DNA, 295 bp, Homo Sapiens
tgtattggtggtgctgcctgtattggtggtgctgcatgtattggtggtgctcgccgtggtgcaaaactgtagaaagttgcttattcactggcactggaatcattgtctgactggggctcgggcctttgggcatttatttgctgagctaccaccaatcttcatctctaggttccaccttctcactggctctatccaagtctctttctttggtattatcaccttcaactttagatgcatggttttctgcaccctcacttcaacgtccacagagtcagcaccaccataacggaccggc

SEQ ID NO: 6272 - DNA, 924 bp, Homo Sapiens
agaggactccggatggcgacatttcaaacatggcgtgatgctgcatcagagagaaaaataagctcttgcattagacaatgaaatgtctacccatgtagatgacttgtgcttacttccactcagcaagtgattgcccagagctacttacctggctccaatctaccactgggtgtgtacttgcaatctaccatgtacctagaagatgagagaaacaaattattaatgatgaccacaccccaatactaacaacaatggcagaagaatcaatgacttaaacaaaaatgtggccattgaaggaatagaaaatatagtgagtttagtgtaaatttaaaagtgattaataagtaacatacaaaatccagaaactataagaaaacagattcacaaatataaatatataaagctttaaaaaagtttaatgtaacaaaaatggcataaaaggagtcaaaagtttttaaaaaatatgttaatgcagtagattaggtgctaattttcttaatatactaataactcaataagagaaattttgtatctagaagaaaatgaacatggaaataggcaattcacagataatggcattcatctggcgaataaaaaaatgtgtgacattcagaataaaataaaaatgaaatactggtcttcagccatcacttgagcaaaactgcaaagatacaatgagactcaggcattcccatatactgtggatgggagggcaaagaccttcaacctctaattttatttctatttttaaacatgtatgttaaaattttaaatgctaatgtcctcttgacccatataatcttatgtctaagatttgaatctggagataaacttgaacaaatgcatctagatttatgtataagtattaatatagtttagatgtgtgttcccacccgaatctcatattgaatagtcccattacag

SEQ ID NO: 6273 - DNA, 235 bp, Homo Sapiens
tggtgctgtctgtggtgcgatctgaaggggagatgccatcactttgtctttaatttgggtgtctaccttgagtagagtaaacaaggtgttcatatctatgagtgcttgtctagtctctctatatacagttcccagaaagttcaggggtaatgaaagctgaaaaagcagtccattcaccattactagatctcccacagtaagggtaccgccacactcccgactggaccgagccgac

SEQ ID NO: 6274 - DNA, 409 bp, Homo Sapiens
gagctcggtaccccggattggcgaccatttcaaaatatgtgaatgaaatatatgtgggggtaaactatttttatttacttccctaaagaagggatggtgttctctcgggaattctgtgcatagagagcctgtggcttaggcactttgatttatgtatatctcttcctgtgattggctatctagggactgctatctccagcaaatcttctaaatgtctgccatgtagaattcctttctcatctttctgtctcacccccttatctagctgcttctctaaccctagagtgacactgcactccccacaatctcctatgtcctgtatattttaccccatcctaaactccatctctaacacagatgcactttcttgtgctgcctactgcattgtacatcttccccttagttccca

SEQ ID NO: 6275 - DNA, 389 bp, Homo Sapiens
gtagggctattaggaggcacaagggtcagacaagggtcaggccttgaagaatgaagagctgaactggcagagagaggagtgtgacactccagtgtgaagggaggcagcacaaggcagaacactctggaaggctggcatggggaagggacaggaaagccaaatccaacattgattctgccaaaatctttagtagttagcaccaagtagtcaggcttctacttttgttcctttcagctaatctgaatacattactatttatataattatagtacttatagaactaaaattatttgaaacctcaggttattggataaataggttcagtataatcccaaatataaacagcttacttcaggataaaataatttctgtactattggccggtcatt

SEQ ID NO: 6276 - DNA, 211 bp, Homo Sapiens
ccagtgaacagcggggagcagcaggcagctgcggtgggaatttcatgacactagaaaagactggactcctccctcatcctacacctgcagagccccacgcagtcatttaggcacaaacatacactgtattcgcctgcattccatgaaggctccgttctttccatgctgaatttgagccacttcgcagacagaagtggccctgggttctcag

SEQ ID NO: 6277 - DNA, 155 bp, Homo Sapiens
ctggacaagggggggcagggcacagggagggagtttacagagggctgcaggactgcgaggagtaggtggcctagggctgggtctcctcacagcagcaaagctcgcggacaacagaaatcacggcagacagcactgtggccgcgtctatccctcct

SEQ ID NO: 6278 - DNA, 364 bp, Homo Sapiens
  misc_feature (302)..(322): n is a, c, g, or t
cgccgtccgtaatctgcctcggcatttatttgcaaaatagtggtacacgaggtattgtaagtgatatggtacatgtagggagaacattctcttttcagtcccttctaaagtgcttacattgaggagaaagtttcaattagttgctagtccatctttaacacccctctgaacactgcctaatttcctttcaacatagagaaaccctccttaggcttagggccttagtgtgaaacaagaacaagtgtgaatgcctcatttccatgtctgaatgactgcttgctatttatggcaaggggcactcnnnnnnnnnnnnnnnnnnnnngagacagagtctcactccgtcaccccggccttgtccagctga

SEQ ID NO: 6279 - DNA, 572 bp, Homo Sapiens
tcagggaagccaggggcagctgtcaggcctgaggaagacctgtggagctcctctccagcctcctctttccctcccctctggtctccattctcttcagctccctacatgggctggggaggagacacctggtgggcagagctcaggcagaggtttggatttcagctccctcacttccggggctgtgtggctttggcagatgtcagacttctggtcttgcttctccacgtggacagtgagtatctggctcattcttcactgggttcttctgagattgaacctacaggtgtttgccaagtgcctggcccagagcaagtggccactgcttctcccatctctctcctgcccaacctggtagagctgagggcatgagaggcagagtgcacagtggtcaagggtgcagctctgcagcacaggcagcctaggcctgcgtcccaacctgcctctcaccagctctgtgaccttgggcaagggatttatctgtctgtcccttagttttctcacctgtaaaaggaggataagtatatatatatatttcccagtgttgtgaagattaaaggagtttatcgatgtag

SEQ ID NO: 6280 - DNA, 715 bp, Homo Sapiens
  misc_feature (43)..(43): n is a, c, g, or t
  misc_feature (45)..(45): n is a, c, g, or t
  misc_feature (47)..(47): n is a, c, g, or t
  misc_feature (63)..(63): n is a, c, g, or t
  misc_feature (69)..(69): n is a, c, g, or t
  misc_feature (110)..(110): n is a, c, g, or t
tcaaggatggaagtactgcgattctctgagggcagggggagcngncngcagggcccctccctnatcgcngacaagtggccgcgctgccccgccaagctggactcggtctntgaggagccgctctccaagaagcttttcttcttctctgggcgccaaggtgtgggtgtacacaggcgcgtcggtgctgggcccgaggcgtctggacaagctgggcctgggagccgacgtggcccaggtgaccggggccctccggagtggcagggggaagatgctgctgttcagcgggcggcgcctctggaggttcgacgtgaaggcgcagatggtggatccccggagcgccagcgaggtggaccggatgttccccggggtgcctttggacacgcacgacgtcttccagtaccgagagaaagcctatttctgccaggaccgcttctactggcgcgtgagttcccggagtgagttgaaccaggtggaccaagtgggctacgtgacctatgacatcctgcagtgccctgaggactagggttcccgtcctgctttggcagtgccatgtaaatccccactgggaccaaccctggggaaggagccagtttgccggatacaaactggtattctgttctggaggaaagggaggagtggaggtgggctgggccctctcttctcacctttgttttttgttggagtgtttctaataaacttggattctctaaccttt

SEQ ID NO: 6281 - DNA, 828 bp, Homo Sapiens
aatgtcatttgctaatgaattttaaaagcatatataaaacaaaaacaaccaccctgcacaatgtgatatgtgtaatatcatttcataaaaatccctcttcctccaaagcctgggcagaaatgtgctgcaaagagttatatgacttcttgttcatgttttgctaatgctcgtatctccttgattacataatgttagtagcactgagacccccatggtaatgtaacttaattataagctatgtcactaccctcctgtaaaatactattggacagacacagagggacccttggctcctgtgtctggtccacacaccacagaagcttgtattatcagtgaatataaatgtactacatttgcatgccttttgggtttgccttaattcttacctcatttgcatcctatcgatctggaaagagctgttttggatgaatgcagtataaaatgtaaaaaccctgctaaatgacttattgattaagtatatctatctatatatacatatacacaaagatattatttatcgaaagtaaaaaagatggaagtgtattggtttctgtttgaattttcaaaggcttccaatgtggtggcaataaatgtcccaaataaatttataacaattgattttccccctaattcttattttataattttaaaattgcagcagttgctagcaacaacttactaaatctactcttaaatatacaactttggaatttgaagaattaatgacaacaaaagggaaaaaagcaactttccaacttttcatccaggctcccaaaaaagggacaacgaacatggcatgtgaaaagtaaaacagatttgttcattccg

SEQ ID NO: 6282 - DNA, 531 bp, Homo Sapiens
  misc_feature (106)..(106): n is a, c, g, or t
gtgggcggctcccagtcccatgggcagaccgacaataaataagggctaaaaggaagaagtacggcagggcaggagtggttgtctcatcatggagagccctgggggnaggcagaaccaactggaatgaaacactggagacagagaagaccttgtcacagctcagccaacctttgcaactgtaagccaagccttccttgctgaccttctctgtgaagaagcccaggtggccccctgtccctgtttccccaccttcccatcaggcttcactgtgcaagccacagctgggctgtggggttggagtcttcaccagggcatcctgccattcgagtaatgtagccacagggttggtgcagacccgggtggggcctgagggaggggctcggctgggtgtaaaaggcacacttcatcgtccagacgagcctcgtggaagcagtggatggcggttaaacacgatttgaggcgctccctcagggctagggttcgaggggccagattgctgaggcctgaggggcatggaaaatttagagggag

SEQ ID NO: 6283 - DNA, 640 bp, Homo Sapiens
gcagcagaggaatgcagagagctggactacccccccaaataccccagcaagcaggaaggcaagccctttcagctcagcacacccaaccccctaccccacccttaccacggagccatctggaccgaggtgtgggagtgatggagcaggtttactgtgcctgcccgtgttgggggccagcctgagccagcagtgggaggtggggccttagtgcctcaccgggcacacggattaggctgagtgaagattaagggagggtgtgctctgtggtctcctccctgccctctccccactggggagagacctgtgatttgccaagtccctggaccctggaccagctactgggccttatgggttgggggtggtaggcaggtgagcgtaagtggggagggaaatgggtaagaagtctactccaaacctaggtctctatgtcagaccagacctaggtgcttctctaggagggaaacagggagacctggggtcctgtggataactgagtggggagtctgccaggggagggcaccttcccattgtgccttctgtgtgtattgtgcattaacctcttcctcaccactaggcttctggggctgggtcccacatgcccttgaccctgacaataaagttctctatttttggaaaaaaa

SEQ ID NO: 6284 - DNA, 331 bp, Homo Sapiens
catgggaccattcaactgagagtgtggagataacacatgtcagctgggctaccaaaagatagattaacatggtgaaattttattgaatcaaatgatttaactgctcaaaatcagtcatcttctgatgtgttggagtaccttgaacatggttcagtgaatctatgtgcaacggttcaaattctgcacccaaattcaattcatcaactagtgaaacaggtcctggttgtacaaatgcatcatctgacaaaccttctaaggtctcaccaaaaagattggcatcatcaaaaaagtccatcattggatctgtcatcttgaaatggtcgccaatccg

SEQ ID NO: 6285 - DNA, 481 bp, Homo Sapiens
  misc_feature (277)..(291): n is a, c, g, or t
ggcggccggatgggacattcaagtgctcaatagcctgatgtagtcagcagctacatactgcatggtgcaggatgtagaacattcctatccttgtagaagagtctatgatagccctatctaaagaaatggtcacagtaaaaattggtatctgcatcccatgaagtgacataacaatttaaattctcaatattagtatatgagttccaacatcctccccttgtcaacatcagatcaatattctgatctgatagatgagacataatgttttagttagtannnnnnnnnnnnnnnggaaacagagtcttggctcggtcacccaggcgggagtgcagaggcctgactctcagctcattataacctccttctcccgaggtccaagcgaatctccggccgaaaccctcccaagtagcggggataacgggcactggccagggggcccagcggatttggggattttaaagtggaaggggtcgccaaccgg

SEQ ID NO: 6286 - DNA, 463 bp, Homo Sapiens
ttgacatttttataatatttattaagataacaaatttataaattgaaagactcagaggcacatagtttaaaaggccaataccatgggaataatgaagtcaacacagaaaagtaagaagatatgaacagttacaaccaatagaagattttctttaaaagccacattcccctggtgaacacatcataggaatcatccttcaaaattaccatgataaaaagttatttccttcaaagaaaaataattctttctgcctaccgagcctagaaaatcctatttacaatgcagtgtcctgcctttcatcagtattatttaatatggcctcctctattctgccattagaagtatggaaaattttatagctactgtatttacaaatgcacataatatttaaatttgctcttcattgagaacaaccaaatatatacttaatcaaatcacaatacaaatgctttatagtggtgga

SEQ ID NO: 6287 - DNA, 147 bp, Homo Sapiens
cggattggcgaccatttcaacagaattcatacagcggaaagctaaagactacatgcatcagcaagaatgaatcttgtaaacatcgtgaggatgaaggaagcaattacaaaggcatatagccaatacaagcttgaaatggtcgccaat

SEQ ID NO: 6288 - DNA, 151 bp, Homo Sapiens
cagctgctctgccctctgactgcagcacagcatctgcctgggggccgcagagcttgatggccagtgtgtggaaggcagcatgacagcaaccgcccaagatgtccccagccgaatcccaggtcccaggagtatgttcccttccgtgtccagc

SEQ ID NO: 6289 - DNA, 629 bp, Homo Sapiens
tgtaaggaaaggggcagaggcataaatcaaaacggagcaaaccctcaggctcgggcaatgagacggggtgtaggcagaggcctgtggggtgaggggtgagtgcgtctagaggaaatgtacggtttggcagataataagtatggatcagacatgcatttttacctctgctgtgggattttagtctcattacttggtggatctacttggtagttaacctagagaagttaacacagccatggctacagagctttctgccactggagttccagaattccagaatccagtttcctagggatggtggggagtaaaaagaggtatagggtatggtcccggtatgggagcaatacagtctttatggagtagtgtctatatggtctggtttactcaagtatttcatatatacattaaaaaaaccgacaataaaaatgaacatatgaaaacttccttattggtgatacatgagtaaatgtggatgagattagagaaggggtccaaaaaggtttctctgaggatatgagtggagtggcccatcaggatggatggggtagtggatgctgatgtgggcaaacactggaatagacctcagatgctgcatgatgtgcctgtgtaacacagttgaaatgtccaca

SEQ ID NO: 6290 - DNA, 341 bp, Homo Sapiens
aagctgaggtggtaatacctcttgtcagtgtcatgggagaaaagaaacaaggaacgtatactgtctaaactgagctgggcagagggcatggaaactatgaagcaaaatatctgtaaatgtgctcacctcagctggacaagggggggtgaaaatacgccaggcctcacggagctcgtcgctgcgcacgaagtgcatctggctcccgcagaagacgtccaggatgaggcgctcgtaggcgtcagggagcttcaccggacgcgtggttcgacgatatcccggaattccggaccggacccagcctgctttttaacgactgttcatattacaagcccttcttcttc

SEQ ID NO: 6291 - DNA, 372 bp, Homo Sapiens
agctcggtaccccggattggcgaccatttcaaccaaaatgtttttcaaatggagcctccatctcctattatcttaatgtgtgctgagaaagtcagaaacagtcttcaagagtcccacttctgatggcttgaaaatgctcctagagcaagatgccacacaaagggctgtcctcctcctcactactgatttctgagctactctgtcttccctaatggtgatcctggacccacacagtactgagtagtggcaggaaaattaagaaatgagggggaaaataataaaactgtttaaatttccttgtagtcttttcctgtgaactttagtcttcacagcctggagatgtcagcatccctgctttctaaatcacgggat

SEQ ID NO: 6292 - DNA, 208 bp, Homo Sapiens
gataagggaccaccacacaccccgccctcttagggtaaggcagctgcctgggaggggcagccagtgctgcagagtgcaggagaggaggcgggagcaggcagccatacctccactctgtcctcaggactcagctgtgtggcctatggatttctttttgcgggacttgcgccctgcaggacactggtgttggagttggagggtcctatcc

SEQ ID NO: 6293 - DNA, 341 bp, Homo Sapiens
aaaaagttaagtgaaaactctcactggggagaaatctgataaatgttggtaaattggattgcctgatgcaagttaacactcaaaaaatgcacctaagtgaaatgttataccagttataaatattttatgtttatcagtggttcattgttaaagagggtctgtttacttttggtttccacgtctcttgcaagaaaacattgaggtaagaattttgtagatactctttaagccatactgcgtgagttaaataaatagcgtttttgttaagtcagttaatacattttttctctctttattcgaaagtgtgttggatctctggttgaattgaaatggtcgcccat

SEQ ID NO: 6294 - DNA, 243 bp, Homo Sapiens
aaccggggacagatcctgaggagggatgtctgtctgtgtgatttaacagggagcaactcaggagaaaggaagggaaggtggcagagacaggcaagggaaggaggtggtctcggatggggaccaactcaggccatccacaggatgccctggaacatgaaccgcaccatggagtttaccccacatggaaacaaggaggagcagcccttagcacccctgagtcagccagggctggtgcagggtgag

SEQ ID NO: 6295 - DNA, 732 bp, Homo Sapiens
gatcatttcaagcaaagataatgagcgagagtaactgtagttatatccatttgggccccgggaatctcttctgatcatttctttcttggctttgtgccttgggcaggactggtcaagatgtcagagcagctaagtttcagaatatctagtaacacagtcaaccatgattggttgtgcagtatgtacactgcacaagggtgccaggctgcgatagtgggtgggagttgttatggaatccatttgactgtgtccaaggataaaggcattccttttttctttgatcaaaggcctttaccttgctaaatcatctgagtgcctccctgttggcatcgttccagagcgtgtagctttctccaactcacccaaaagtactgttccagatattccacagaattaatgacagtaaagggaagaaaactttaggcttaacttttctcagactgattttgaaagctgaaccataaacctgtctatgtctccattattaaaatggacagtccctttccttcccatatgagtgtctgaatatatttacaagataccaatccttccatctttaactctgcccctttcaagaagatataactgtctagaactcaagaatcagaaatcagtgtttccccctatctagactggatgaatgccaagagcactgagaaaaatggtcagcaaaattatcatttctagagaacccactggcatcaagattttgggaatttcttaaatacttcg

SEQ ID NO: 6296 - DNA, 352 bp, Homo Sapiens
cggtccagctggaaaggcaggcatccctgtgcggatgttcacgtactccccgattcccttgagcttggctgcttggtggaaataggcagcacagatgcacttcctgacgatgtcccagtcagtgccacacgaggccaggctcatccgctgctgcaccatgatgtccttgagttgagctcgcacctaccggaccttccgcatggccttagcatggatgaaatgatcgttacaccagatggtggagtaattattgttcttccactgcaggtaaacattcaggtaggtcaaatgatcgctctcaggaacagcgaacttctcccggatttgatcactctcctcctctcgacaaaag

SEQ ID NO: 6297 - DNA, 571 bp, Homo Sapiens
  misc_feature (144)..(159): n is a, c, g, or t
ctagaggatccccgtgataggcgaccatttcaaaagggggtagcaatagaccccggtatcaaaagatgtgtgtaatggaatattttaaaagacagttccccagaggaggcagcccagtggagaaacatttttaaaaagagaggnnnnnnnnnnnnnnnnggctacgggggggataactttatttcctattaaataacccaaaaaaactatggggcactccccctcgcatcaaggggtcatataaagctcaagcagcagcacatcgggacgcacccatcaatcctggattctggagtcagggcaccagagggctccatggttggagctccagggaaagcagctgggacaagagtgcctttaatcctaagaatatccattaataacccgggcaagccaactcagtcattcggctacacccaaaggattgacccaccacagtgaagctggtcattaaaatacaacatcagagattgggccaagattgggtacctctgaagccaagagcttagaaattataagccacttaaaaccatatctggtccctgcataaaagggtatcacaagccagata

SEQ ID NO: 6298 - DNA, 348 bp, Homo Sapiens
ctggacaaggtggggacgcggatctggacaccaggggcgttggacacgagcccagagctccggttgtagacaaccctgcggggcgggggtgccactcagcagccagtagccaaggggcagcgtgttggggctagggtggagcacatggctgtacctggtgttatcgatccagcagtctaccccaaggggtaggaacatgttgagatccagccagatggtgaagaagtcctctgtcttgcggtagcacatccagttcaccacatctggtttgtccagcttggcttctagctgattccccagcagccgggcactgtgagcagcagccctcactctgacttacattccccg

SEQ ID NO: 6299 - DNA, 340 bp, Homo Sapiens
agaggaccccggaatggcgacatttcaacacatgcttaggatgaatctgctagattcttagagagaggcttaatagctcacagaatcatttatagtttaaaagagttctagaaacagggcactcacaaacatgatggtacatatctacttaccgaagctcttctgccttttccattttgtggccatcaaccagaaccctcatgagaattctcacgtcctagttcggagagttagacacacagagactgtgtgcagtccttcatttggcagaaaagatgactatctaattttaaatacatttcaaagagttagccatgggattgaaatggtcgccaatccg

SEQ ID NO: 6300 - DNA, 178 bp, Homo Sapiens
catagctgtcactcaggtaggcattgctgggcttggccacctttaggtagacaacatcatacgtgttcttcagggctgccacagcatcttcatgcatgacgtcctctagccccacactgtgaccgccagatcttgtctccaatctgcaacctcccaccctgtccagctggaccaggta

SEQ ID NO: 6301 - DNA, 286 bp, Homo Sapiens
ggggcacggataccatatttgggttagcagccggccctatggacagacatagcactgcaccaccttggtcttgcttgcattaagaaatgagatggcttcattggcttactgccctcacgtgtgagggcaacttcctacttctgtcagtgagatttcttttgtgctgccatgagcccaaggtagccctcagggccccagatttgaccagatctctaagccaacttttctcttagagtcttaagactgaaattaactgatctttgaaacagaacccgtccttgtccag

SEQ ID NO: 6302 - DNA, 289 bp, Homo Sapiens
atcgtccgtgataggacgagcgagtgggagaggaactggcaacgcggctctctctagaagtcctgtgctgtccagcctctgcccagtggtgggggaaggccttggactcacagggaagcaatgcaggaagccttggccacctaggctcacagctcatctcagtgaccagaggagacagcagaggacaaaacttcagtgtgacagctgctaggagggagagcagacagcccgcggtgggcaagctgggagttgcatccgcagcagtccgcttcaacccagctcctctcca

SEQ ID NO: 6303 - DNA, 607 bp, Homo Sapiens
  misc_feature (85)..(99): n is a, c, g, or t
acttgggggcagaggaatccgtgggccgagattaacccattgcaattcaacctgggggacaagagtgaaattgtgtttttccccnnnnnnnnnnnnnnngaataaagaaagatgcttaacataaggttaccataagccacaaattcatgaccacttatccttccagtttcaagtagaatatattcataacctcaataaagttctccctgctcccaaactgagttgattcattccatgcgcactgtctccctcacctccatcgtatacgcacctgcagctccttgcctgcttctagcatggagccagcggggatgtgctggtgagtgacaaggaattgtggggcatgtcgacatcagcttaaggctttgttagaaacacctgccttgcagtgtttgtgactgggaaagagctcagtgttttaatacacctcagatcaccacattgatcataactttgtcacctcagttcaatagtttctcctggattcttgtccaagtgagatgacaggtggacgtaacagtgccttttcagtctttacctagactctccagagaatcactccagaatagaaattagagtataggtaggcagtccaacctctgcattt

SEQ ID NO: 6304 - DNA, 692 bp, Homo Sapiens
aacattcacacagaacagctagactgattcgattaattgactcatataggatttgccctgaggcaagattcgcacgaggcatctgcggaggagctgactgaagagcgtccagctgtccctatgactggaaagttgaacaaaaacggtcagagtctggaggaaacctcatttgtcagaaaaattcaacagttggagaaggtgctgccatctcaattgtgagtgggcaacagtcacatacttatgatgatcttctgcacaaaaaccaacagctgaccatgcaggtggcttgcctgaaccaggagcttgcccagctgaaaaagctggagaagacagttgccattctccatgaaagtcagagatccctggtggtaactaatgagtatctgctgcagcagctgaataaggagccaaaaggttattccgggaaagcgctcctgcctcctgagaagggtcatcatctggggagatcatcgccctttgggaaaagcacgttgtcttcctcctcaccagtggcacatgagactggtcagtatctaatacagagcgtcttggatgctgccccagagcctggcttatagagctagcatggaactcacaccacagcttccctggtccacaaaggctctcaccgccattgccaccagtatggtggtatgtactcacaaagattaaaaaagaaatgtattctgatt

SEQ ID NO: 6305 - DNA, 803 bp, Homo Sapiens
ttgttttttcctttgttgtacaagtaacagagaggaggttttttttgtaactcattttgggggtggagggggccacctgggtggcaggggccctggagctctattgacctggtacactgctccgggactcctcccccgccaccctccgcgcatagggtccttggtctggaccctgccccccaaaagtagggccttgctcctctaccttgctctgagcacggagagccctgaccccaccagtaggctcgcccccagaagggcccaagtggccgtctaccgtcaccttccagactcccgcccctaacacccagtggctacagtgcgcctgtcggggcacctggagcgctcacctggttgaattcaaagtcccagaaggccccgctggcgtgaagccggccccttacattttgcgaagtgcattatagtccttgtttttctctccctcgtgggggcaacgacccctcccctggcagtaggggtggggtaggtgactctcgctagatccctccaaagcagaccggtggcgatgtcagcggatgtcacgagctcgttagctgcgttcggggaaggttggggcgtcagggagctctcggatcacagcagcccccgccctctcctaggcctggcccggcagagcccccagagtggaccccccagcgactggggtcttctccccactcctccctccttctggtctgatgcggcagcgcgggggctgcggggcctgtttgggacgaacagagctctcccttggtaagacttattttgttaataaatggaatacttggctatattcaaaaaaa

SEQ ID NO: 6306 - DNA, 862 bp, Homo Sapiens
ctttgttgactatgctaggagtatagagattacttgagttcgattattatggttagtttagtatagtcaatgtgatctatgtagaacatgtcgcggtgttagtgtgtgttatgttgatatgacgcgtttttatttctgtgatgatattttgttgtgtagtttaagagtcaatttaataagtttaaaataaatgtttagtttcattaggatgatgctatcaatattttcttggttacagacacattattaaagttttgggttaattttattgacaattcttaagattctttctcatgcttaataaagcatgctactcagttaactcttgtctacatcagcaaagcagataatacaaaacaggaaaattacaaatcactgatacttagtccttgtgggaatcatgcttttctcccagcagttttacaaggtggctggcattccctgagcatattctgaattgcactgtggggaaagaggttgtgctcagttgtagggtggggggatgcactgcctgaggattaaaaaactagttctgtgaccgtgaggaagtcgtttaaatttccatggtctgttccctcctatgtgaaaagagaaggtgggcttcaacctctaagatcttctccagttttcacattttatggacttttgtagaaaaaacatcaggagttcatgtgggatgacagcaagtcatttctttgaggagagtcttgatcaccaggcaatattcacagtgtagagactgtcagatgaccatggctagcatggaaatgagacccacacatttaaatcacccagcaaatattccgaaggctaattgtagcacattttatgaaagacatttcaaactgtggtcctgaagagt

SEQ ID NO: 6307 - DNA, 587 bp, Homo Sapiens
  misc_feature (47)..(65): n is a, c, g, or t
  misc_feature (535)..(535): n is a, c, g, or t
gcggccgcggagaggcacttaaaagccccgtgttaccctagaccttnnnnnnnnnnnnnnnnnnnctgcgtgtttccacccccgtcggcctgcagtggaagggcccgagcagaaccaacggggcaggggacgctgagcgcgccgtgtttctcctcccgtctgcctggagtagaacggctcgggcggaaccaacgggcagccgcgggggcgttgtgggccgcggcgcgtttccccggctccgtggctctggggcactgaggagcggcgcccgcggggcagcgaggagcccgatgcagggttctgcgcgtcatttccggtcccgcgggcgccccgtgaagcccacctggatccgccagcgctgtgccactccccagtgccgagctccgagctgtctccgcggcctcgcgcccggcccctccaccgcgcacctcttaggccccgcccgccagcgtccctttgttgtgaaggcgccggggcctagcgctatgcctgcggcggagactgcatcaggctctcggtgggttctgcgtgcggngtgctctgctcggtgatcggtgcttggtgctgcgtgctcggtgctcggtgct

SEQ ID NO: 6308 - DNA, 462 bp, Homo Sapiens
aaatcccccaaattttttcataaactccagttttaaactaaactttttttcaaaccacaatctgatttaacaatgactatcatttaaatatttctgactttcaaattaaagattttcacatgcaggctgatatttgtaattgtgattctctctgtaggctttgggtataatgtgttcttttccttttttgcatcagcgattaacttctacactctaacatgtagaatgttactacaatattaagtattttgtatgacaattttatttgaaagcctaggatgcgttgacatcctgcatgcatttattacttgatatgcatgcattctggtatctcaagcattctatttctgagtaattgtttaaggtgtagaagagatagatatggtggatttggagttgatacttatatattttctatttcttggaaaaatgaatttgtacattaaaagttttccatggcag

SEQ ID NO: 6309 - DNA, 781 bp, Homo Sapiens
ctggttttgtttttgactttgctcaagggctgaaccctaatggtagtaccttccttttcttcctgtggctggtgccttctgatggggctggaataactgaggtggatggttctaccctttctgccttctgtttgggacccagctggtgttctttggtttgctttcttcaggctctagggctgtgctatccaatacagtaaccacatgcggctgtttaaagttaagccaattaaaatcacataagattaaaaattccttcctcagttgcactaaccacgtttctagaggcgtcactgtatgtagttcatggctactgtactgacagcgagagcatgtccatctgttggacagcactattctagagaactaaactggcttaacgagtcacagcctcagctgtgctgggacgacccttgtctccctgggtaggaggggtgagaatgggggagggctgatgtgccgccagctggggcctgttgtctgggaccctccctctcctgagaggggaggcctggtggcttagcctgggcaggtcgtgtctcctcctgaccccagtggctgcggtgaggggaaccaccctcccttgctgcaccagtggccattagctcccgtcaccactgcaacccagggtcccagctggctgggtcctcttctgcccccagtgcccttccccttgggctgtgttggagtgagcacctcctctgtaggcacctctcacactgttgtctgttactgattttttttgataaaaagataataaaacctggtactttctaaaaaa

SEQ ID NO: 6310 - DNA, 594 bp, Homo Sapiens
gcggccgcgcggtccagagccatcaccgccaggaggacgcattcggccgaacccagagccagcgatgcgcacagctgggccgtgcagtggctgcgcggcagccagagcgctggtccgcgcaggttggccagcagcggcggcaccacgctagtagtgaagcccgcgtctaccaaggccaggtggcagaggaagtagtacatgggcgtgtgcaggcgcgggtcgcgcaccgccagcagcaccagcgccgagttgcccgtcaaggtcaggaggtagcacaggaggacaagggcgaagaggaccggctgcagggaaggccagtcggagaaacccagcaggagaaagcgctcctctgcgctgtagttggcctaaaggaggaaaactcccagaatgtttggaaggtcgaaataaaaaagggtgactacccacttataagcaaagggaaaaccttggagtgtggggctgggctgggagaaggaatggaatcatatacaaggtcagtttgtggattgtaatcccatttacagatgagattacttaaaaataaactccctaagaataagagcaacactccaagcttggccttgccatatgcaa

SEQ ID NO: 6311 - DNA, 552 bp, Homo Sapiens
tttgaactcatgtaagcagcggtcctgaccgctgtacagcagacagtaatagcccttggttatgttaaagtagaagttcgaagcattgatctgcgacgacagctttaggaacctctcgaccttttggatctcagggaaggggtccctgatgaggcggtcgccgtccacaatgtggatgtggcgcagcgggaaaaagcgcagccagttctgcatgtgcacgtggtagaggctgcggttgagggccttgtagtccacattgagcctgccatcgcgcaccaggaactcctcgatggacgggtagggcttgtgcttctgcatgtggttgtagaacacttgggtgtagtcagatagcacgcgctccgacgggtctcgcaggatgagcagcagccggatggacgggttcatgctgtagactcgctcaggcactttgggcgacgtgaaatacgcgggggtcttctccactgtgagctggtgtggccaggagaagggcatctggctgaggtaccagcccaagccgtggctgtaatgctcctcccagtccaagaagtggac

SEQ ID NO: 6312 - DNA, 739 bp, Homo Sapiens
ttatttcttcaattgtcatagataatcctgtaccaaatggggaagaattaggaaataatcatgttgtctaatggtactctggattcagggcagcaactgccatttaaatgttgtcttgttcatttctaaatctgttcatgaagtttaggttttccctgaaactaagttgaattatttccaaaatgaaacaggcttctcagggacatatccacttcttcccagtctgcctttggattaaagcaccaagcagagaccacattaattccctttgctatactgtgatccttagtatgttaattcttaagaaaccaacatatcactgaaagaaggctggcagaacgcaagtgcattttttcactgtgggaagaaagatcaagtgacgtattattttttcctggttgtcacttaatgggctgagtaaaaagcttgaaaactcagactttcggtcttggttctgccactcattggttatgaggaggcccagagcaggtaagttcaccttcctggccttactttcctgatgtgtaatacggaattacttcacagtagcatgacagtataagacaccagcagtagatacaactatgatgacattccatgagttggtatttttagttctaactgctaaatttgttctctttacgggacagatttctaataaagtgcttggtcttaaatacatggttggacagaggtgccctatcccttaactatgagcaggtgctaccttttgggatat

SEQ ID NO: 6313 - DNA, 437 bp, Homo Sapiens
atagaggactcacaggcactacacaagcgtcctaaattggattctgaatactactgctttggctagtgacagttttttgcatgggactggtgtgcaatgaacttgtatttatccttcttctccgctgctatatttttggtgtgatttttattttaataacatgacctttttaaaagaagctgattttgaaactgcttaatggtattgctgttgctcctaatacttctcatctgagctgatttatttttctctgttacatctctattttttatttattacaatgattttctcccttcttttacagtagcacaaacaaagtagggggaaaagaataagcaataattatgtttttgcttttgttttcagagcaatgggtcagggattacaagaaaaactttgctaaattttacaataaaccaaagtctgataacagttaa

SEQ ID NO: 6314 - DNA, 429 bp, Homo Sapiens
agagaatgcacaggtgttggtgagggcgtgtggctgagcactacatgtcaagtccagagtcagtttctatcccaattctccctgcagcctgaagaacggatccttgtctccaatgtcagcacaaaggaggctttttctgtgctttgacattctagcacttcagggatgagagggagggagaatcctggatgctggatggagtatttctctgaggcccacacaaagctggacacccccaggctctactccatcccattggagtctcttctttttttgatagcgggagggaggaagtacgactaatgttggagcctgaaactatggaaatgctgctaaaatttttatattgacaaacattttcttggtacttcattgtcatttttcattaatcaaccatattaaatttataataaaaaatgcccctcagaa

SEQ ID NO: 6315 - DNA, 486 bp, Homo Sapiens
gggacgcggaccgccaggacttgaacgcaactcccaattgcagaaaattggcaacgtctctgaagagcccttgcttttgcctggacccccagcatcatggtttcccatttcatggggtctctcagtgtcctgtgtttccttctgctgcttggattccagttcgtctgcccacagccctccactcaacacaggaaggtcccgcagcggatggcggcggagggcgcccccgaggacgacggcggcggcggcgccccgggagtgtggggcgcctggggcccctggtcggcctgctcgcgtagctgcagcggcggcgtgatggagcagacgcggccctgcctgccccgctcctaccgcctgcgcggcggccagcggcctggcgcccctgcgcgcgccttcgcggaccacgtggtgtcggcggtgcgcacgtcggtgccactgcaccggagccgcgacgagacgccagcgctggccggtacggacgccagc

SEQ ID NO: 6316 - DNA, 567 bp, Homo Sapiens
ccttctgacagcccctccagtgattcttgcaaatggcctgagtgaggatgaactctgcaggggccctggaaatgtccctggcagaaaccaaaccccaggttccaagttgtcaggaggaagaagacctagctttagcacaagcactgtcagccagtgaggcagaataccagcggcagcaggcccagagccgcagctcgaagccgtccaactgcagcctgtgctagggccctgggcttggggagggaggttcacctgaggaggactgtggccctcacacctctagggtacacagggagaggaggcccggagcaccctggagggcagagacaagcgggagtgatgtggaggtcgccctgggagcctctggaaggccttgctagtgctccagctgcatggaagagagcggctagcaactgttccctggttgggccctcagtggatgctggccaggccctactcttagccccttcatcatgtcatctcccttatgctggagctgccccgatgtggagtgggcaggaaggggcctggaaaaaataaaggatcttggcagttgataaaacgtaa

SEQ ID NO: 6317 - DNA, 1062 bp, Homo Sapiens
gaacacgctcaggaggtgtatagtgttgattggagccaaaccagaggtgaacagcttgtggtgtctggctcatgggatcaaactgtcaaattgtgggatccaactgttggaaagtctctgtgcacctttagaggccatgaaagtattatttatagcacaatctggtctccccacatccctggttgttttgcttcagcctcaggtgatcagactctgagaatatgggatgtgaaggcagcaggagtaagaatcgtgattcctgcacatcaggcagaaatcttgagttgtgactggtgtaaatacaatgagaatttgctggtgaccggggcggttgactgtagtttgagaggctgggacttaaggaatgtacgacaaccagtgtttgaacttcttggtcatactctatgctattaggagggtgaaattttcaccatttcatgcttctgtgctggcctcttgctcgtatgattttactgtaagattctggaacttttcaaagcctgactctcttcttgaaacagtggagcatcatacagagtttacttgtggtttagacttcagtcttcagagccccactcaggtggctgactgttcttgggatgaaacaataaagatctatgaccctgcttgtcttactattcctgcttgagatacactactttggtcagaaacagaggatgttggctgaagaactgcctaacagcaaataaattaactatggaaaacatagacattatgcttttatatgctattcagatttcaaatctttccaatttaccctggaatcagttttgagggagctgataaagactttagctgactcgttaagcctgatacataagccatatttaaaattctaagaaataattaatgttatgatatatcttgtagtatctattaaaatgtctctgggtcataaaatggattaaaatatgggagatcagtaggttatacttatatagatagtgatatatttcatttttaatttgtcatttttgatgtaaaatataatcactgctgtgataaataaactatctattgatcatttatcattttaaaaaa

SEQ ID NO: 6318 - DNA, 579 bp, Homo Sapiens
gccattgagtctcttaatagtgtattaggagatattttataggagtgtgtttgatttctttttttctttctgaaactttttaatgtacatgttatccctttttaaggagtggaggtaagtcacttgagccttaagaatttgaggtttgaattagggagttaggaagggggcccaattttagtattttacaagtatggtgggtggtaatggctttggacatgttgaaattaaggtgaatggcatatagtgttttactcttgtgtagtaaagttagcagcaaatacagaactgagcctaggccagggaactgggattggggttagatctaagcaagatcagcatgtaagtgatagtggagaaagtaaatggagaggtgaggactcatccccttggtggaaattcggaattaataaagcaggaggagagtcaggataatgggctgttgaataaagaaagtaagtgacaaggaagaggtaatgtgtatccaagaagtaggaaagaaatgagacttaaagcgtagggggttaggctgtgtaagagctcagtacccaacaggtgctcagtcaagtaacttgactc

SEQ ID NO: 6319 - DNA, 503 bp, Homo Sapiens
cagaattagccctttcttcaggccatcttgcctcaaagggtacacatgtttggcggttaagatgaaactaacccttatgtttcatcctggccccatgatgtacacatcttagccatgtagtggccttggggggccacagagatttcctttgaggagcatggtagagtccacagccatggctgaagtcagtggacaccgaggggacaggactgcaggccaccaggggcctctgcccagagggaggcagagaggatggcggccacgggtgctctcctggcatcctcatggggtgatgccaggccgggcacttcaaaacaggctcagccgactgggagatcctttgtactttgcacagtttacacacccaaacacaccccccctatcccaagtgtttttgttagacacaaatgtcagcgtgtgattttggaagacttgtcagtgatgacaaaccatgatgcctgtgtttctgagtctttaaataaaaatgaacatggagaaggaaa

SEQ ID NO: 6320 - DNA, 440 bp, Homo Sapiens
cccccggatggcgaccatttcaagccatgtggaagatctcttgacgcttaggaattgctgtggtatttcattgaccgtggccccagactctggaatatgtattaatttatctgggcagagaatacagaaatccacatgcagaataaagtgaactttatgctgaagcagaatattgaagctgggaatggttaattcttaaaaaataaagcatcagcgttaataaatattgaattctaagaaggtattttgcagttggcttcttaaagtactgagataatctgactgggttcccatttaaaagagagaagttttttccctccatgaataatattcgtttacagtcattggtaaattattaatctgcattccagtgtttcatgtttgaaatggtcgccaatccgcggattggcgaccatttcaggagccacaggtaagggtct

SEQ ID NO: 6321 - DNA, 937 bp, Homo Sapiens
gtgctctaacttttcttaaggttttgttgctagcccttcaagtgcactgagctatgtgactcggatggtctttcacacggcacatttggacatttccagaactaccatgagatggtttagacgggaattcatgcaaatgaggggtcaaaaatggtatagtgaccccgtccacgtcctccaagctcacgaccttggagccccgtggagctggactgaggaggaggctgcacagcgggagagcagctggtccagaccagccctgcagcccccactcagccggcagccagatggccccgcaaggcctccagggatggcccctagccacaggccctggctgaggtctctgggtcggtcagtgacatgtaggtaggaagcactgaaaatagtgttcccagagcactttgcaactccctgggtaagagggacgacacctctggtttttcaataccaattacatggaacttttctgtaatgggtacaatgaagaagtttctaaaaacacacacaaagcacattgggccaactatttagtaagcccggatagacttattgccaaaaacaaaaaatagctttcaaaagaaatttaagttctatgagaaattccttagtcatggtgttgcgtaaatcatattttagctgcacggcattaccccacacagggtggcagaacttgaagggttactgacgtgtaaatgctggtatttgatttcctgtgtgtgttgccctggcattaagggcattttacccttgcagttttactaaaacactgaaaaatattccaagcttcatattaaccctacctgtcaacgtaacgatttcatgaacgttattatattgtcgaattcctactgacaacattataactgtatgggagcttaactttataaggaaatgtattttgacactggtatcttattaaagtattctgatcctaaaa

SEQ ID NO: 6322 - DNA, 551 bp, Homo Sapiens
gacacggggtgcttcagtgggtctgtcaccctctctccttgaagcatgttgcttttatttatttacttttactctcaccctgctcctgtaccagcaggggccacttcaaagccaaggtacagggtgataacttgtggtccagcatcagttttctccacttctttctcccactcacccccagcaaggtgcctggggagacttgagcagatgtttcattttggcctggccagtggctgaaagccaggcctccaatgcactgtgacctctggcttccccagcagctttcccagagaggcagaggggccttccacagcccgggttctcctgctgcctcctgcctgctgcagctgcaggcattctgaggggcaacgtggaggaagggccagggatgcatgggattttaattgtttcatcacaccttccccgtggcaaagaaacagtcagtcctcttcaggtgtcttctggatttctggtgatggacagagaaatctttttacagtttcaaattatgttcaacaaataaaaattgcattttttattttgaaaaaaaa

SEQ ID NO: 6323 - DNA, 240 bp, Homo Sapiens
tgatgcccttgcactcgaccgaggagcagagctccacctcctcgtcacggtcgttgagcacctggtgccgcaggatcttgaggggccgactcgtgcgctccagcagctccaggtaccgcgggtgtgacaccacggtcttgccgaagtcgatggagccgtaggtgacgctctgctcctggtcccgctccagaatgccggggatgatggactggccgtgacccggtacccggtaatcaccct

SEQ ID NO: 6324 - DNA, 343 bp, Homo Sapiens
  misc_feature (222)..(232): n is a, c, g, or t
cagaggaccccggatggcgcaaccgggcgacaattcaactctgcctaatcactcactttggctgggattacaggcgtgagccaccatgtccagccacagtatttcttttctaattactacatactttagttttcttcaagtgatttaactttggttatgcaagttcttttcaccacttcaaccaaggcttattagcagtagaaaataatattctagacaggnnnnnnnnnnnctggccataagatttaaatattctacacgcatattttcccttaaggtttggcttggcatgtggtagacatgcaacatgtatatgtgaatgatggaaagggtcgccaatccg

SEQ ID NO: 6325 - DNA, 410 bp, Homo Sapiens
ttcaacatctcatcgcgtcagatggaagttatcgaatattcagcaagggtgcatctgagataattctgaaaaagtgtttcaaaatcgtgagtgctaagtggtgaggcaaaagtattcagaccaagggaccgtgatgatatgtaaaaacttgattgaaccgatggcatcagaaggcttgagaaccatatgtcttgcattcagagattttccagcaggagaaccagaaccagagtgggataatgaaaatgatattgtcaccggccttacatgcattgctgttgtggggattgaagatcctgtgagacctgaggcgccagatgcaattaaaaagtgtcagagggctggaattactgtgcggatggtcactggtgataatattaatactgctcgggccattgctaccaaatgtg

SEQ ID NO: 6326 - DNA, 669 bp, Homo Sapiens
catattataagtgatcagaaagtgcagaataagacaatgatggcagtcttctcttgatggagagggaaaggaatggtgaagccattgatagaagtttacttcgaagccttttaagcatgctgtctgatttgcaaatttatcaagattcttttgaacaacgatttttggaagaaactaaccggctctatgcagctgaaggccacaaattaatgcaagaaagagaggttcctgaatatctacatcatgttaacaaacgtctagaagaagaagcagacagacttattacttacttagatcagaccacccagaagtcattaattgctactgtagaaaaacaacttctaggtgaacacttaacagcaattcttcagaaaggtttaaataacctccttgatgaaaaccgaattcaagatttgtctcttctgtatcagctcttcagtagagttcgagatggagttcaggttcttttgcagccgtggatcgaatatatcaaggcatttggcagcactattgtaattaatcctgaaaaagataaaaccatggttctagaattgctggattttaaagataaggttgaccatataattgatatctgctttctgaagaatgagaaatttatcatgccatgaaagaagcatttgaaacgttcactaacaaagaccaataaac

SEQ ID NO: 6327 - DNA, 337 bp, Homo Sapiens
ggaaggtgatctagaggatcccttcagaagacattcctgtcggagaggagggtggacttcggagaaattctcatactgaagcatgagcttaggagtttctgttagtggtagtggtgttttggacacttcattccttgcaacaccgaggttttgggtgttgacataaagtggaccacacaccacatctgctgccgtcttgacacttttttttgtttggttggttttgttacatcttacattatgcagaactatttttgtacaaattgtttaaaagttatttatgcaaggtttgaatgcataccagtgtttttattgttttgaaatggtcgccaatccg

SEQ ID NO: 6328 - DNA, 324 bp, Homo Sapiens
aatcaagtagcaattccctcagctcctctagtcggtccaaggcatcatagagtttcctccttctttccaacgccagggagccagacttgctgccattgctcaccagtaagtttaccctaggattttgggtttcaattggtgtctgtgacccagagggatacaagcttgatgctggaaagcgttttcttcctgctcgtcccttatccaagactggaatatgggattgtaatgaggaaggatcagcagctctcctcttataggtcttcgttactttatcaacatcaggctgttttctggtcatttcggtcatgagatgttggaagg

SEQ ID NO: 6329 - DNA, 350 bp, Homo Sapiens
ccgacaattcaggagcgaggtagcggggctgcgagcactatgacagaggatgtctcctaaaggcaccttgctgtgacaagctttatacttgtccgcttgtgtcatgataacaatgaagatcatcaactagatcgctttaaagtgaaggaagtgcagtgcataaactgtgaaaaaattcaacatgcccaacagacttgtgaagaatgtagcacattgtttggagaatattattgcgatatatgccatttgtttgacaaagataagaagcagtatcactgtgaaaaccgtggaatttgtaggattggtccaaaggaagattttttccattggttgaaatggtcgccaatccg

SEQ ID NO: 6330 - DNA, 576 bp, Homo Sapiens
gcggtcgtatgtgggcttgttaccgcacagctgaatgaccagcccagggcatggaggtcaggtcctgtgcaaagccagttggagattttcatcaatctgatcaaacagctcaagtgtagacctcgtgaagcgtgtgcacactgcagaactggttcagttcgtggtggatcttgttgaagatgagggccttgtcatagtcagcagtatagttcttcactatatcataaactgcgttcgggaccaggaagttcaccacttcaattctgtcaaagtagatcatcacaccaccactagtcccacaaggtacattcttcacctcatctgtctggagtgtggtctgcacagacttatatgatgtgatgaaagggagcatgagatggaaaccagggccgctggtcgaagtcagcagggcaccgcctctgtaatataccccaatatgtccctcttctatcttgtgcacagctgagaagagagatgcacaaaagaaactggaagccacagccacaactgctcccaactgagccatcagtgagcctttatccaggctgtccctgcaggcgctccgtactcgtccga

SEQ ID NO: 6331 - DNA, 731 bp, Homo Sapiens
ggctggcgccggtggcttcgatgctgctttccggtgacttcgatgctgttttccagtgcggtttcctttttctgtgccagcgccacagcccttcaatcatttggttgctatccagcttctccacatcaagtccaacttcagaaaccccaagcctgtagagaaaagttgacctgtgctgactctggtgatggtgactgtctctcactaatttctttgaagtcttcaaggattaagcagagtagatccatctgagaaagggatcatgaactagacagaatgaacagccttagaggcacagactcttgaacgggacggtggtggtatgactagtgcaaagtgtttagagatcactcagtttttaaagactggcctttatcgtgtctcagtgcagccgaggcagagcctttgaaggatgcgatgttgtcatacttactaatctagtccagccgctgaggtgactttcaacggcagaccgtctcctgagcgccccagagtctccgggaccattatggcagtcaagtggacgggtgggcatttcttctcctgtccttctgcctgaatgcaagtaaagaagggctgctggcttctggagcagagggcggagatctcacggcttggggtgaagatggaactccattaggacacacgcggttccaaggggctgatgatgttaccagtgtcttattttctccctcctgtcccaccaagctctatgcctcacatggagaaac

SEQ ID NO: 6332 - DNA, 148 bp, Homo Sapiens
tcccaccagagccttatgagatgctccatgctaaatgcatggcatagagtaagcatgccagcagtccagaccgttattcccagcatgcgtgctcacagtagatgctctccatcctcaggaggagatacaaagatggccatgagatggg

SEQ ID NO: 6333 - DNA, 197 bp, Homo Sapiens
aaaataattccatgaggcatgacacaaaggtatcatctattgaaagttatctcatgccttgtgatattattttttaaatgccaatttatctccataagataaaagaaagactgtctagtagtggtggcctctgggaaagaactgcaccaagctgtaaggaagtccttgcagagaagggtaagggattgaacagcgga

SEQ ID NO: 6334 - DNA, 153 bp, Homo Sapiens
atcatacatcacagcactaacaataacaaaagtaataaatcgagacggtccttcatatcctgcgtatatgacttttctgactctgacctagggaaggcaccattatccccattttactgctaaggggaactctgctatgagatgttggaaggg

SEQ ID NO: 6335 - DNA, 454 bp, Homo Sapiens
ggtaccctccaacatctcatcgcacttccaacatctcaggcctcacattacccaatgaaacgtcctgttttcaaatccaatgatctcttcattttttcctaaacatcaacaaatcaccttcacctctatcatctgatcattccttcttgaaactcgctgtactcataagctaaagaccctaacacaacactctccattatccatacagtactgaccacatcatatcaactcctcttctgcccattcctatacactggagttccttggaggcagcatcagcccctttttctcctttactgaccctccataaatattttaatacaagctaatgtctttattaccaaatacctgcaacttccatatatttatcacataacagatttctctactaagctacaaacctacatttgggttaccattatacaaggatcatccgcaatgagatgttggaagg

SEQ ID NO: 6336 - DNA, 707 bp, Homo Sapiens
cttcaaacatctcatagcagagatactttgacgtgggtttgaagtaacaggagaggtctaagagaaacacgaacaggaataggagagaggcaaaacagagggctgacatctagaaactctcctgagaaaaataacactgactgacgtgggtaaatctgagggattataaagcaggcagaaaaccccaccaaggaaatgacgagatatccttctttagatgcctccaaaacagaagatgtgctgttgggcataagtgccatccagggcactcagacctgacaggagagtctacagagaccccacagaaccaagcaactggtgttctaaagctcttcccctaatggcccagggctgaggaaaaagcaaagccataacatcctcagggtcacaatagtacactgcataaaagccgctctgtgctgggcactacggagagcagaggagatgagaaagcacttacacaagtggagatggcccccacacaaggggaagacagttgggagggcctcagtgctgaccacagtgtggccccaacacgactcagactccaaggcccagtttctattccccaaaagttggtcacctttagcccaccatactcagcatatttctcagaactgggatttctcagaactggtcagtaaaaacaatttaagcaaagagggaggtgaggatatctgggtggtagagggaaatgggccttttcg

SEQ ID NO: 6337 - DNA, 546 bp, Homo Sapiens
acttattacggtctacatgagcggccgtacttagctcgcaccatcgctctactactatgaacccctcctccgcataccctaccccctggtcaacctcaacctcacccatcctcttgtctcccctcccctctgaatccagcccagcgagggcttctcctgcctccatcacatcacagaagtacctcctgcttctggttttaattagagccttccccgattacattttcctctgaattttttcctatctacatttgatctgtcatgtttaaaccccccacttctaagggaacttctctaatctcttatcctcatccccaaatagtgttttcttcctctgggttcttataatgttggtatcaatctcacagcatttagtgcttcctgcatgaaatgacagttacctgtgtgcatgtgcaatttctaatttaccacgctagactgtgagcttcctaaggcaagaatcatgccttgttgatttctgtattcctaatggaaccaaaaaaagtgccttctacattgaagaagctgaataaacatttttaaagc

SEQ ID NO: 6338 - DNA, 634 bp, Homo Sapiens
gcggccgcggagtggcctaccggggaccctcccccagagggaccggcccggggcggggagatgaacggcttcagcacggaggaggacagccgcgaagggccccccgccgccccagctgccgccgccccgggctacggccagagctgctgcctcatcgaggacggcgagcgctgcgtccggcccgcgggcaacgcctccttcagcaagagggtccagaagagcatctcgcagaagaaactcaagctggacatcgacaagagcgtaaggcacctatatatctgtgattttcacaaaaatttcatccagagtgtccgaaataaaaggaagaggaagacaagtgacgatggcggagattctcccgagcacgacactgacattcctgaggttgatctgttccagctgcaggtgaacaccctacgacgttataaacgacactacaagttgcagaccagaccaggcttcaataaggcccagttagcagaaactgtgagtcgacacttcaggaacatacctgtgaatgaaaaagagacccttgcctacttcatctacatggtgaagagtaacaagagtagactggaccagaaatcggagggtggcaagcagcttgagtgaggatgaagcacatcttaaagga

SEQ ID NO: 6339 - DNA, 415 bp, Homo Sapiens
tctgctgctctcccctgggaaatcccctcatcctgccctctggctgcctcccagctgggcttgttctctgagggaggttccggagactcatggacttggggctctgcctgtaggaaggaggctgggccggagggaccagccaccattgtctctgttcagccaagtgtgcaagtaggctgcccgccaagagggggcctctgctacccgctgctgcctgccggctgacacactgcctccccagccttcctgctaggccaccctcctcccttcccatgcttgtaaccagctctggggcttgcacctccacaaagtaaggttggcccttggaggccatgtttgggtctccggccagggcctagggctaggccatgcacccaatgggtgcacaataaataacaggtcaacaaagaaaaaa

SEQ ID NO: 6340 - DNA, 657 bp, Homo Sapiens
  misc_feature (115)..(159): n is a, c, g, or t
ggtttaataggtgtctaatatcctggggatggatgtgtgtggcattgacctgctgatgaaagatgacggctccttctgcgtctgtgaggccaagtgcaaatccttttcaggagcnnnnnnnnnnnnnnnnnnnnnnnnnnnnnnnnnnnnnnnnnnnnnctttccttcttcccccttcctgatgatgagtgagaagtattgagaactttcggggtcagtgcccttctaaactccccttcccccaataatgcagctgtataatgaatggtaaatgcaccggtttggattcaggcacagccccagtctgcctacagcagacaactaaactggtaggtggcagcagaggaaggaattcttcagattgatggctactgacttaaagtctgcataggagaagagatagagcatgacataccaagtgaagcaagggggacaaaaatggaaacaggactaagattcctgcattttgactctaaatggttcttttgaagtaaccagtgatcttttttgcttaccctcatcaacagaatggatgaagatagatttgactgtgtgctttttcaagtggagaatatgaatatacagaacaagaaagcaataactccaacctgtttgattccgtctgttttctaaataaagacactatgcgctggaaat

SEQ ID NO: 6341 - DNA, 463 bp, Homo Sapiens
ctatacatttttcccacgtttccaacagcacttctcacctattcaataactgaaaaagacattaccatagtgctttacatttttaaagtaatgctacaaggtctggaatccatttggagcagataccgtgttttcgctatttaataagaagttcagtagtgaaatcttactgtaccgcctgttgtatctgggagcctcgtacagaggctcgcacagcagtgatcaagtgtcatcccttacgtgactgggggatgtctgtcctaaaagctgactgctaggatagtaaggatcatcttgcctgggctatgccactgtcttgttaccaattagacatctggaatttcataattagttttcattgtcactgtcaagatatattgcagattacttaaatatggccatcaaaacaaaagttacaacaagtatctcttttcatctgaaaactaatacctggaaaaggata

SEQ ID NO: 6342 - DNA, 1106 bp, Homo Sapiens
  misc_feature (396)..(505): n is a, c, g, or t
  misc_feature (553)..(562): n is a, c, g, or t
  misc_feature (638)..(735): n is a, c, g, or t
  misc_feature (868)..(913): n is a, c, g, or t
  misc_feature (960)..(970): n is a, c, g, or t
cagttggtagaaggaatggtatttgtatggggggagggaggctggaatggagaatctggattctctcctcttccccattctccagagggagggaggtggtgaggaagaggaagggaggggcaggatgggccatggaggtgccccacccccacacctgacaatcacccacactcctggggctcttcctgggtcctggggcagggcgagtccaagtgtgaggctgttgatttgttttcaatatttcttttcgtgctgtatggtgatgctttcttagtattctacacaataagaaaagacaaagtcctcgagattcttatgagttttgtttgaaaactctttcactatatttgttgtaaagaggtttactattaaaagaaaaagaatacacgtttctgnnnnnnnnnnnnnnnnnnnnnnnnnnnnnnnnnnnnnnnnnnnnnnnnnnnnnnnnnnnnnnnnnnnnnnnnnnnnnnnnnnnnnnnnnnnnnnnnnnnnnnnnnnnnnncttgggggccccccccgcccccaaaaaattttttaaaacctttttttnnnnnnnnnnccccaaaagaaaaggaaaaggggccaaattttttccaaaaaaaacccgggcaagaacaagggttggattccccccnnnnnnnnnnnnnnnnnnnnnnnnnnnnnnnnnnnnnnnnnnnnnnnnnnnnnnnnnnnnnnnnnnnnnnnnnnnnnnnnnnnnnnnnnnnnnnnnnnaatttaaatttcccccccaccgggccctttttggaggaagggtggaattttttaaacctttcggccgactgggaaccctcccaacggggttgtgagaactgaaaccccccggggatccaccccttgggccctnnnnnnnnnnnnnnnnnnnnnnnnnnnnnnnnnnnnnnnnnnnnnntttgtcctatttgggcgcccctttttaattaaaaaagggggggaaannnnnnnnnnnggggtttggtggtgtaaaacaaaaaataatattatttctcacaaaaaaacccccctttaaggagaaaaaaagcggccccgggtttttttctccccgtagaaaacaccccccaagtctggttggagcgatatatagt

SEQ ID NO: 6343 - DNA, 909 bp, Homo Sapiens
gggggccaagcggaagtggagatggcggagctgtacgtgaagccgggcaacaaggaacgcggctggaacgacccgccgcagttctcatacgggctgcagacccaggccggcggacccaggcgctcgctgcttaccaagagggtagccgcaccccaggatggatcccccagagtccccgcatcagagacttctcctgggcctcccccaatggggcctccacctccttcaagtaaggctcccaggtccccacctgtggggagtggtcctgcctctggcgtggagcccacaagtttcccagtcgagtctgaggctgtgatggaggatgtgctgagacctttggaacaggcattggaagactgccgtggccacacaaggaagcaggtatgtgatgacatcagccgacgcctggcactgctgcaggaacagtgggctggaggaaagttgtcaatacctgtaaagaagagaatggctctactggtgcaagagctttcaagccaccggtgggacgcagcagatgacatccaccgctccctcatggttgaccatgtgactgaggtcagtcagtggatggtaggagttaaaagattaattgcagaaaagaggagtctgttttcagaggaggcagccaatgaagagaaatctgcagccacagctgagaagaaccataccataccaggcttccagcaggcttcataatcctcggttccccagactcaccggacaccatctcctatgccttggagaccttctgtcacttggctcccttcttaccaccaccaagactgtcccactgggcctgacccacctatgagggaagaagtcccacctgggccagagggagttcatgtgttactcataacatgcatttcaataaaaacatctctgcggtgggccttgggtaggagagat

SEQ ID NO: 6344 - DNA, 423 bp, Homo Sapiens
aaagaatggctctttgcttttagaagaggagatgaagcttggtatgaaaataagggaatgagtcaatgaaaacttgataagaagaataagtgaaagaagtatctaattagaatatatagcctactgaacataaaggaagttttgtgaccagtcttatgtgcagtggggaagcaagggagacaatgagtgagcttgctttaggcttgtcctcatgtttaaaaagatcacagcaagtgaaaatgtaatttgaaagttaaacttgagatgaggtatgaaactgtataagtgtgttgtctgatatcctgaagagcctggtttcatagaataatatgattcttgctttgggattgctattaacttaagcagtgatgttctcatcattcataaatatttggcacattaataaacatattttaataggga

SEQ ID NO: 6345 - DNA, 424 bp, Homo Sapiens
  misc_feature (287)..(301): n is a, c, g, or t
tttcatatcttactcaagtttaatatcccaaaagggctccccattgtcctcaggctgaattctgaagcccttcccaaagcctgcgagggtctgccgcatctagccccagtgacctcttcctcttgggctacagctcatagatgtccttccattctcctagggagccctgtgcccacccacttcgggctcccagggactgtgctgctccccgtcactctccctgcccatctcttcctcctgtgctaggtctctaatcaagtggccactctgggaaaccctccttgacnnnnnnnnnnnnnnngagacaggacacaacagaatggaaagcgaattgacagggagcattctgttgtggaatggatcagttgctccctgtgaatttgctttcagtcctatttaccgtggggtacaaagcctcagtttg

SEQ ID NO: 6346 - DNA, 536 bp, Homo Sapiens
ctgctagtgtcttctgaggacactgatgacactgattaatgatacagacctttgcaggacctgatgagtgacccttctggagctggccaggtcctctgcagcaggcaagaccaatcaatcactgaacctgcctcatggcaccagagtgaacagggcaggcaggtagtaggcccagctggggaaatgggagagttcctgtccccctccacatatccctacatgaaatatgggaaagttgctgctattgattcagggtctgtcttggaggcagaggacccttggtggatagttggtcagtgcctggaaaacctgtcccagtttatcaggaacgcaggcctggggagcccccagtggcggggacagggccagatttcatgttgaccctggggatgctgtgaatttctcctgcaggagagacatcattgaattttttcaactgtatcagtagcacagtatttttgtatgaaaagtgggagacttctgaacagtaattcatttaattgcaaagcattttgaaataaaaaaaatcaaactta

SEQ ID NO: 6347 - DNA, 1682 bp, Homo Sapiens
cactttatttattttttctttattcctaaatatatttcaggcgtggagctttaaaaatacagaagaggaaaaatacttaggatacaatactaaatttggtgcctatcagtgtaaagcatacatacctttttctgagcttagcctaccacatatacttagagtgaaatgatgaggtcagcgacctgcaaatcttccaaacaattgcaagtaacttccaaactggcactaagggactagttttatgcaacaatgtaatgaaggaaagttaaaattaactacaggaaattcttcctcgtgacaaagttgaagagaatactgaatatatcaatattaatttaatagcagctctgtgttgtgattttaaagaacaagataaaatatgtcattcagcagtcatttaaaaaataaaagactacagatacaaggaaataaaaaacacttttaggagatgaaaacacaaagtagtaggatacccaacatgtacacatcccatcttcaaatttaaaatcatattgtcagttgtccaaagcagcttgaatttaaagtttgtgctataaaattgtgcaaatatgttaaggattgagacccaccaatgcactactgtaatatttcgcttcctaaatttcttccacctacagataatagacaacaagtctgagaaactaaggctaaccaaacttagatataaatcctaccaataaaatttttcagttttaagttttacagtttgatttaaaaacaaaacagaaacaaatttcaaaataaatcacatcttctcttaaaacttggcaaacccttccctaactgtccaagtatgagcatacactgccactggctttagatactccaattaaatgcactactctttcactggtctgaatgaagtatggtgaaacaagtaccaatttttagaaacatattgtcttctcagattgaagtggagggtccagaaatgcaacacccagcattctttaaagaaaataatagctagaatctttctgatacagattccaatatagattccattattcaaagtcctccacaaattactgggaaaatgtaagaggtaacttcacaaaaatcacatattgagtggaataattataactgatatataaataaggatttactaaaaaaaggcttcaaggggtgatattttaaatcaaggttttaaatacaaaaggtgtcttgtgttgcttaatcatacagtttcgtacattttgtatagatattcctcactctacagtcacagatttggcaagattccgtgggaaatcaacatcatagcctctcagcacagcaaggtggaaagccagcaactgtaaagggatcacgctgagaatgccctgcaagcagtccactgagtggggcaccttgatcgttctttttgtgttcttaatggtctcagtatcctccttatcacaaattaccacaggccgcccctgccgagcaaccacttgctgaagagcattctgacacttggcataagtgtgatctctcatgatgatcatgatcacaggcatcaatttatccaccaaagccagagggccatgtttcaattcaccagcaaggatgccttcagagtgcatataagtaatttctttgattttcagtgccccttcaagacaagtagcataatgatagcctcgaaccattatcagaactgacttctgatgataaag

SEQ ID NO: 6348 - DNA, 250 bp, Homo Sapiens
cagttgttgaagtgtagcagcagctttttgcagggaaagagggagttgtatttattgcttctccatgacatggttcttttctcattagttcatgggcaagtcaagggaaagagacctaggtagcagctgagtctgtagcctacagatggcctgggctggcttggctcagtcacttcccttagtcacttccacacattccagaaattgtgtttttcttacaggtgacagaggaagttatatatggaaggta

SEQ ID NO: 6349 - DNA, 442 bp, Homo Sapiens
ggtggaaggacaaaactcttggcttggaagcccaatacctagaaagccagcttctctgtatctgtgcccttgaaaatgctgtacctatttaaacagaatatgagaactgctgaactcaataaaacacactaaaaagaagacagaatcatgacaatgcatgtctgctgttggaatctgaagggaagtcacttctcattaagctcgattgtccgcccaagtatagaagcatgggttcctcataaaaagaaaactacaaatggtccactaagacgttaagagctgtctcaaagtggtaacttaagagtgctccttctctctaaaaaaccccggacacattattcattaagggtttcatctgtgaggttccctccaaacatgcagaggttaaccactcaatggactctggcttgtcctaaaataattccatgaggcatgacacaaa

SEQ ID NO: 6350 - DNA, 399 bp, Homo Sapiens
caagtctttaccattttatggtatcaaatttcttaagctcatagggacaacagtacgaggatggggcttttgacctacggtctcatacctcccttccttcagcatcctcgctagacccagccttgaaccctttgtttggcatgaggtagggcctcagtgcctcaggggcattcataattattttctttccatggggaggttgggagagagttgagctcttctctagaggaggggcccaggtaaggctgagagggggctccgagaagctccttcctccacagccctctcccagcagccactgctgtcctccacaaaggcacctctggctcctccacttcctgtgatccaaatggtgggggaagagcagcaggcagggctgctcctcaggccaaaacaacc

SEQ ID NO: 6351 - DNA, 333 bp, Homo Sapiens
agccggtaccttccagagtaggtcgcatctctgtgtgccacacagaacttttagacaagagtagaggggaaaaggttctgcaattcctcacagtaaagtactcacacagtaaatccttaacgaaaactactgaactgtgagtatatgctttataatcttatgcacagaaatgtatctattagtacagaaagttggaaaacatcaagattaaaaacagtgctgtaggaaaaattcacaacagtaaacaaattttgctcactcattttcctacaaatcttcagtttattaattcaagagaaactatattaggaatattcggctgatacccctcta

SEQ ID NO: 6352 - DNA, 705 bp, Homo Sapiens
atctgcccagtattcattcctgctgatatcagtcaataatgaatgatacgtgttttcttcacttttttcattcttgtcaggtagcagactgtgtagacttttctgcacttgcccttttcataacaatctatcttggagaactttccctatgagaacatacagagcttcctgtacacagttgcatgtactgcattatgcaaatgcattatattttatgtaacctgtccactgttggtaggcacttgagttgttttagtcttttgctatcaaacagttctgggatgattaaccctgatttactgcaaaattgaaattgctctgctattctgctggaatggtggtaagtgaactgaaaattccagtcactcttgggctagactcaacgttcttaaaaactatgtggccatcaccaaattagttattttgaaccttaatttcttcacctctaaaatggaggtaatacttaccttaagtggctatgagaatgaagatcatgtgtatgaattgttggtgctctaaagaacagcacaaataaaattattttcaaatttaattttaattgaactatgtgtaatttcttaattttgaaataattttatttgtaatgtgcataatcttatttaatgtataatgtatacattgtaatagaaacagatttcccaaattccagcctggcatgaggtaataaaaggtaatgcaaagggg

SEQ ID NO: 6353 - DNA, 251 bp, Homo Sapiens
tcggtaccgatgtcgaataggtaggttccttctactgactagaggtgtcgatcgtggaagcagcatttttcatttaagactcccaggtccccctcctggggctgtaaggacatctagggcctgtctattctgtattactactgaggctaaagagttgatggtaccgtacattactgccagccaccatgaatatggtacggtaccataaatacttgagccacctgtagtacataaaaacctattcacaatcg

SEQ ID NO: 6354 - DNA, 715 bp, Homo Sapiens
  misc_feature (228)..(241): n is a, c, g, or t
  misc_feature (263)..(276): n is a, c, g, or t
gggtgaagagagtgtgggctttaggagaaaagtgtgaggcatgacccaaattgtaagcatagggacctcagggatggggaagaaacccgagtacgagggtgcagggccccccttcatacacaggagagaacagaactatttagggtgtttgtgtttatggacagtgagggcactgctcttggattcaccagctgttatttttgcttttacttttctcccaccttcagnnnnnnnnnnnnnnccacctccactttttaaaagcnnnnnnnnnnnnnngtatgatggtggtgaataaagaccaaagggtcctctctacctttgaaaactctcctggggtggaggagaccagggcaggatagacagacctctgcagtaagagagtggttgggaaacccagggtgttccttggatctcaggatctgagccatcgagggaagagtggggctgctaggcaagtggattagggggtctggatagggccccacaggtgacagggagcctgcagggcggatctggtgatcatgggagccagagggagtggggacagtgcaggcagtattggcaggagggccagtgcagaagggctggtagctcaggcagtgtgggggaagcactgaagcctgtagtccccacttgggggctaggggtttgctcactcagcaataaataactgtgtcacatcaaatcctaaatataccactacaaagtgagagtt

SEQ ID NO: 6355 - DNA, 729 bp, Homo Sapiens
  misc_feature (71)..(217): n is a, c, g, or t
  misc_feature (489)..(489): n is a, c, g, or t
tcctgggtacaagcggttctcgtgcgttgggctcccgagttagctgggactacaggtgtgtgccaccatgnnnnnnnnnnnnnnnnnnnnnnnnnnnnnnnnnnnnnnnnnnnnnnnnnnnnnnnnnnnnnnnnnnnnnnnnnnnnnnnnnnnnnnnnnnnnnnnnnnnnnnnnnnnnnnnnnnnnnnnnnnnnnnnnnnnnnnnnnnnnnnnnnnntgccattttcatcacttaacccgaacacattcctctattccctccctttcctgcttggtgatcatcgactcttctgacccaactaggtaacctgctaaaccatctttactgttatttgccagaaaagactggaccagagacgtaaataatacacctcaatatacaaacagcttcgggcttaatttctaggcaagaatttcatttgctggccaatcagaagaatatatacaatggagcgtgtttggggaggagatggagtaaggagaacacantcttggtggcaggagaaccttggtgggaaccgtgctgatttgtttacttggatttgccaactggtccgatggatactgggtctgtttgcacttgagcatccaacatccgctttggtcccaggcctttaaagaagcccccaagggaccgctgccgcttctcaggtctcttttggagcttgtccccattctgcagtgagttcgtgtccaccgtggcctgctctgtgcactgggctggttctt

SEQ ID NO: 6356 - DNA, 299 bp, Homo Sapiens
  misc_feature (46)..(59): n is a, c, g, or t
  misc_feature (248)..(248): n is a, c, g, or t
cgatgtgaaataggtaggtgctcaaaaaaataatgcacataaattnnnnnnnnnnnnnnctattttcactcattcttaacttctcgtatggatgtactaacgggaggcctgtgcctgttgggctgtccacagctactcaaaccttgagattagattggacgctatctaatctcatttcctgttacacaataacttctgcaaaggcacttgcgtttaatcatgacaactgccatacactcagctttacnaaatcatgtcattgtggaaaggaagttccctccatctaacattcaaattta

SEQ ID NO: 6357 - DNA, 507 bp, Homo Sapiens
tcacaaaagaggacaccaaactgggtatagtaccaaactggttcagagggtagattagtagattgactattcactggattgctgaagtgtgtgccataggtcacacatccagttctgtgcttgagagagtacaggattcctgcttcttgaaatctttaccttacctttaactacatgctgcttacttatgttgtactgaactttgcttctcaggagaactgatgttagaacctacctattcagagctctagttgaaggttatttagaacacttcatacttgggggtggtggtcctgtttcttagaaatcaccagagacctgagtagaccagggatctgttttcttgtcagctctcaagttttttcttctttcgaattttgggagacagttaggagaaaggggaaattagtagtggcctggagtaggaaatttctttaagatttgatgacagctgactggtggggtatgtaagggctagggctgaatgctttgaaagatgggggtaca

SEQ ID NO: 6358 - DNA, 549 bp, Homo Sapiens
aatagagccgacagtgcgttggcatggtcgtgttcaatgggggatatttaaacacatccaaaatcgagtaacaattggaggacaagtctggtgccagcacccgcggtaattccagctccaaaagcgtatattaatgctgtttgctgttaaaggcttcgtagttgaattgagggcctctaaggcgcaatggtttagtcccatccacttcggatttggtgacccatgcccttgtggtccgtgaacagacatattcagaaacaaaaaacacgggagtggtaccttttctgattataaaatgtcatgcaccccagagggcgccccgtgattttttactgtgacttaaaaaagtgtgaccaaagcagtcaattcgacttgaattagaaagcatgggataacaaaggagcagcctctgggccaccgtttcgccttttgttggttttaaaagtccattgcagactatggggcagtatgacaagcggctgggtggttattccacacacacgcacactccttttttggatgttgtgtcttctgtgtgtgtgcactcgt

SEQ ID NO: 6359 - DNA, 264 bp, Homo Sapiens
gggtacccgatcgtgaaataggtaggtaatgatgacaagtgaaaaaagtgaggtgtcagacaaatgtgatgtagctttctttaaattacttaagtcctctaacataaatgaactagttcttgtctcatgatgaataagttcttttaattactttaagaatagcttgaaaagcagtattataagtttcagtgtgtttagtaagtttcttagctatttctttaacctttctccttcccattaaggtacctacctatttcacaatcg

SEQ ID NO: 6360 - DNA, 420 bp, Homo Sapiens
ggggctgacctagaggttcccaggcaaagctctacagctctaaaaggctaccctcaagttaattgccatgaacatatcatagccctagaaggatgttggctcatttctgtgtcatcctgggtttattctttattgtattattcagccagtcattttaacactatgctagacactttaggagattcagaagagtaacagcgtttcttgttctcatgaaagcttaatcagagacagaaaacatatgagttagatctaattgggaggcaactgaaatatatagtggagttagtgtggttatcagcacataaatgagtgatccatcaacaaaaggagaaattgggagggttttatgggccaaaaacagcatgattaaaatgtgatagagtataatgtcatgtacaaggtgagatgaacattcag

SEQ ID NO: 6361 - DNA, 583 bp, Homo Sapiens
ccgattgtgaataggtaggtcatcccggagaagggaaaaggagagtttggaagtggtaggaatgggagctgatgtcgcaagcacagtgaaggttcatacgaggttagtgatcatatagtaacacgtgatgtgcctagttgtatgattggtctctagcagtgctcagcaacctaggcggattgctggatttagccagagttgaggtttagctagctggtcacaagcaggagggaaatgaggactgaggactgctttgcaggttgttggtctgataagaaattgtgtcccacaccttgtctggacagctactctgatatgactggtgaggtggtgaggtcaaactctagccctgcctgagcatgcatatactatactgctcccacctgcccttggactgccttccatatctaaaatgtattcattcttcagattccagctggcttgtctcactgcccctcaggaacccctgctttcaacaactaatcaagtgtatagactttatgttcctctcttctagcaatgacagtctcccctgctatgaggcatacaagccttcctctctaacctacctatttcacaatcg

SEQ ID NO: 6362 - DNA, 532 bp, Homo Sapiens
cgggggactaacacccatttctgcacccacagctgctcatagtctagaggaaaagacaagaatatctgaactacctcctacaagcctgtccctgcaaggtagatgatatcctatcattccaaaccaaatacctaacaaattctctggaagaagaaattttactgataaacaacgtgtgacacaattccaggaagtttaagaaattaggacagcaatggtgggcatatggatatggaaagattctcgttctaaagattaaaataatatccattctagcacatccagctccccatgggctctatggaaaatagatcttttgcatacattatcccaacaagggtagtggggagttggagggagttggaaatttaagtgagtactgcccctgtgccaagatgaaacactcctgtctctagcaagggctcgttttagttcgagctgttgtttccattctctctggagaatggcagtatataagtggttaagtccatggactttgtagttagtcagaccagggttaatccctgggggc

SEQ ID NO: 6363 - DNA, 1480 bp, Homo Sapiens
  misc_feature (101)..(198): n is a, c, g, or t
  misc_feature (1190)..(1190): n is a, c, g, or t
  misc_feature (1228)..(1228): n is a, c, g, or t
aattcccgggatgcccggctttttcagtaggagccccgcgcggtgcgcgctcacgcacgcgcacggcctcgcctgcgcgctcacgaggcctctcgcggcannnnnnnnnnnnnnnnnnnnnnnnnnnnnnnnnnnnnnnnnnnnnnnnnnnnnnnnnnnnnnnnnnnnnnnnnnnnnnnnnnnnnnnnnnnnnnnnnngagctctgtaatatggcatccaggagaatggagaccaaacctgtgataacctgtctcaaaaccctcctcatcatctactccttcgtcttctggatcactggggtgatcctgctggctgttggagtctggggcaaacttactctgggcacctatatctcccttattgccgagaactccacaaatgctccctatgtgctcatcggaactggcaccactattgttgtctttggcctgtttggatgctttgctacatgtcgtggtagcccatggatgctgaaactgtatgccatgtttctgtccctggtgttcctggctgagctcgtagctggcatttcagggtttgtgtttcgtcatgagatcaaggacaccttcctgaggacttacacggacgctatgcagacttacaatggcaatgatgagaggagccgggcagtggaccatgtgcagcgcagcctgagctgctgtggtgtgcagaactacaccaactggagcaccagcccctacttcctggagcatggcatcccccccagctgctgcatgaacgaaactgattgtaatccccaggatctacacaatctgactgtggccgccaccaaagttaaccagaagggttgttatgatctggtaactagtttcatggagactaacatgggaatcatcgctggagtggcgtttggaatcgcattctcccagttaattggcatgctgctggcctgctgtctgtcccggttcatcacggccaatcagtatgagatggtgtaaggagaagtctttcaagaatgacggaataagagacctgttttaaaaaggaactgcagcaatctttgaaagacttccaaagaatgttagagcacagtacataatacacttgccctgctccctctaccccttaccccacaacgtgcaactgacactcccacccagtctctgctccacctttcagcccacgtcacgtgtagtgtccattttgtgaaagccctgttgtgccacangagtgtagccagggtccccctgcaactagtcctagggnaacctcaccccgaggcccttgcatgggccagcccctccatctgtacttggtccaactgcaactcatcatcggtgactggttatcacaccatcgctggcacctttgggccctgcatgtagtgtgggaggctcctgttagctcctcactgtggtaaatgccacacacctttaagtagataagcagacgactagtatctgttctattgacttaatctcatttcggtttgattttcctctactactaaggctttcg

SEQ ID NO: 6364 - DNA, 376 bp, Homo Sapiens
ggcaagatggccaaaaaggaacagctcccagagagaccaatgcagaaggcaggtgatttctgcattttcaactgcggtacccttctcatctcattgggactggttagaaagtgggtgcagcccaccgagggtgagcagaagcaacatggggcaccacctcacctgggaagcccaaggagttggggaactccctcccctagctaagggaagccatgagggactgtgccatgagagacggtgttatccagcccagatactatgtttttctcacggtttttgcaacctgcagaccagaagattcctacaggtgtctacaccaccaggccccgggtttcaagcacaaaactgggcagccatttgggcagacaccaagcta

SEQ ID NO: 6365 - DNA, 906 bp, Homo Sapiens
  misc_feature (206)..(206): n is a, c, g, or t
  misc_feature (681)..(713): n is a, c, g, or t
  misc_feature (730)..(730): n is a, c, g, or t
  misc_feature (752)..(752): n is a, c, g, or t
  misc_feature (825)..(825): n is a, c, g, or t
tctgaggattaccaggcaaagctcctactcacaatacatataaaataccaagaagatcccatttattcacatattctctaattagtatttgtgcatttcaacttgatctgaccttcagtagtaccttaaaatgcaaatgcaattagtaaaaacggggcagcctgtcgtttcacacttagaaatacaatgtagtttcattacagttngcatttttttgttactcttgaaagagtaaccccttataaaatcagatacataaaaactgcattattccttactttgcaggcatccaggaatggttaaagcaaaggaactctcattcattaattcattcattctgttcccccaatttagatacatttctagtctccagaaacggactccagggcagggaagtggagggcagagaagaggtacaggtcaaggtatgatgaatctctgaaaaagacatccacttttcccagaaggctagcctgaagagaactccgccccatccagtccgatccctcaagtaagaatgcataatttagcttgtccttctggtctcactgccttacaacacctagtattcaatttattaagacaaataaacctttgcattttctaaaagaagcaatttttacccaaatacattggactttggtctcaatgtgaagggcgagtgccctttaacaggtcgtnnnnnnnnnnnnnnnnnnnnnnnnnnnnnnnnnaacggctgctctgggtncctgaaagagggtgtggtgtgnacgatctgggttctgaatcgattttgttgagtctggtttttatacgtccactagagctgcccgagctttgcgncctgtatcattgctttgcctccgacccacccctcagccgagtggtgatggtgggtagagctttgcctggggatactctaga

SEQ ID NO: 6366 - DNA, 112 bp, Homo Sapiens
tcgccctagaggttccccaggcaaagctcctactgtgaaaagcaaatacagactgtatatattatatactagctgttattttttgcttcaattgtattttatctcttttgtt

SEQ ID NO: 6367 - DNA, 1083 bp, Homo Sapiens
ccgctggtaggctggagcttctgggccctggaaaggggtcccgcgcgccccgggtcgggggcagacccctgggtttgggggacatgggcatttggggcgcctgaacccaagacctctggatgagctgccccgttcagaccatggatcctgaggtgaccttgctgctgcagtgccctggcgggggcctgccccaggagcagatacaggccgagctgagccccgcccatgacctgtcgcccactgccaggtggggacgaggacatcactgccatctgggagacccggctaaaggcccaaccctggctcttcgacgcccccaagttccgcctgcactcagccaccctggcgcctattggctctcgggggccacagctgctcctgcgcctgggccttacttcctaccgagacttcctgggcaccaactggtccagctcagctgcctggctgcgacagcagggtgccaccgactggggtgacacgcaggcctatctggcggacccactgggggtgggcgctgcactagccacagccgatgacttccttgtcttcctgcgccgctcccggcaggtggctgaggcccctgggctggtggacgtacctggtgggcaccctgagcctcaggccctgtgccctggtggcagcccccagcaccaggacctcgctgggcagctggtggtacatgaactcttttccagtgtccttcaggagatctgtgatgaggtgaacctgccgctgctcaccctgagccagcccctgctgttgggcatcgcccgaaatgagaccagtgctggccgagccagtgccgagttctatgtccagtgcagcctgacttctgagcaggtgaggaagcactacctgagtgggggacccgaggcccacgagtctacaggaatcttctttgtggagacacagaacgtgcggagattgcccgagacggagatgtgggctgaactctgcccctcggccaaaggcgccatcatcctctacaaccgggttcagggaagtcccactggagcggccctagggtccccagccctactcccgccgctctgaaaataataaacgactttattcttggaaaaa

SEQ ID NO: 6368 - DNA, 847 bp, Homo Sapiens
tctgctacactcctgaacacctgacaatggccatacaaccgaaggaaggaaaatgagacccgcaaaacctgctttgtggcagtggagctggtgtcatccagcaagactctgacatatccgctggacctcctcaagaagcggctacaaggttggagggtttgagcatgccagagctgcctttggccaggtacggagatacaagggcctcatggactgtgccaagcaggtgctgcaaaaggaaggcgccctgggcttcttcaagggcctgtcccccagcttgctgaaggctgccctctccacaggcttcatgttcttctcgtatgaattcttctgtaatgtcttccactgcatgaacaggacagccagccagcgctgagcgcaggaaggaccccaggtcttccctggaggcagcctcctgaaggaaggaagattcagtctccactgagaggtgccgtctggcccttccctgcaggccagctgccccaagcggggtagcagccttgaacccacccagctgggacaccaccagaaggtccagggctctccccatgagagaatcagagggaatgcaggacgtggtctatggtgagccaacgacacagtgagaaggagcaggaagttgctgtttctcctctgaccagcccacactccaaaggaaacagacgccatcctacacctatcagccctgcctgccaggagaacagaacacactcctggtctggatggggctgctgcttgagtgcagagggctgcggtaggccctttgcaggagtcaggtccctacacttggcctgtttttccaacctatttaatagacattaaagctaaacacacattccttatctta

SEQ ID NO: 6369 - DNA, 1258 bp, Homo Sapiens
gcggccgcagctgcggcgctggaatcctggcaggcggcggctccgcggaagaggcgctccgcggctcgacggccgcggcggagggaggcggcgccccgggggagagaggcggcgccccggggccccgaggcggagttcgagtctgacagcggagtcgtgcttcgtcgcatctgggaggctgagaaggacctgtttatctctgatttctggagttcagcactagaaaccatcaatagatgtctcacaaaacatctggaacaactgaagacccctgtggggactctttcagacatctttggaaacctgcatcttgactcattgccagaggagtcagatgtggccactgattctatctcaagagagatcttggtcacaggaacctgccatttgaagtgtgtgtgttacggcattgggaactttgccacctgcatcgtagctagaaaccagctaacgtttttgctgcttttgttggaaaagtgccagattcccagaagtcactgttgggtatatgaccctctgtttagccaacttgaaattgaagtccttaacacccttggtgtgactgttctcagtgagaacgaggaagggaaacggagtattcgcggggagcctaccatcttttacatgctccattgtgggacggccttgtacaacaatcttttatggagtaactggtcagtagatgccctttctaagatggtcatcattgggaacagtttcaaaggacttgaggagaggttgttggcaaggattctgcagaaaaattatccctacattgcaaagattttaaaaggactggaggagcttgagtttcctcagacttcacaatacatggacatatttaatgatacctctgtccactggttccctgtgcaaaagctagaacagctctccatagatattagggagtttcgggaagaaccagattatcaggactgtgaggaccttgaaatcatcaggaacaagagagaagatccttctgctactgactgaactcgttgtgaggtactcagtgttggctgaggtagaagctgccaccagagactaaagggaaggctgctatggaggaactacaaagaactcctttgccaggaaagaacatcaacttggctgtcctgttttgaggacgataccccacatgaggacttggtataaagattcctgccctacgtggcattgtcccgttttacatccttccctcatgacctggcctgatgtggagtagctcctgagtaaagaagttacccttttgaaggtg

SEQ ID NO: 6370 - DNA, 335 bp, Homo Sapiens
ggtggggtagttgaataaaattgggcagctaaatttttcagttccatgtgcctcccaaataaaaaacagaaaataagtagtttttgtgaattgacttgcagacaaagtagaaactgtgctgcatgatgttattttgtaaacagatgacattttctgaccaggcacatgccatccaattttctgtcaatcacactgttgtataaagcagcagaactgaaggggaaaaatgattgttgtatacactgaattgctttgcatggtctcatttgagataattgatgtaagaatcctgacttttttatatttggaaacatcaaataaaaatggaaaaaatg

SEQ ID NO: 6371 - DNA, 651 bp, Homo Sapiens
tgtattggtggtgctggcatcccaagtggcaggatacatgattgttggtctatatatgacacatgacaaatgtccatgtcacaggactcatggctggccagatgacctcaggctggcccaagatctaatttattaatttttaaagcaaatacatatttatagattgtgtgtatggagcagctaagtcaggaaaagtcttccgcccgagctgggaggggagagtgtccatgcactgaccagtccaggggctcaagggccagggctctggaacaagccagggactcagccattaagtcccctcctgcctcaatcctcagcctacccatctataaacttgatgactcctcccttacttacatactagcttccaaggacaggtggaggtagggccagcctggcgggagtggagaagcccagtctgtcctatgtaagggacaaagccaggtctaatggtactgggtagggggcactgccaagacaataagctaggctactgggtccagctactactttggtgggattcaggtgagtctccatgcacttcacatgttacccagtgttcttgttacttccaaggagaaccaagaatggctctgtcacactcgaagccaggtttgatcaataaacacaatggtattccaaaaaacaaaa

SEQ ID NO: 6372 - DNA, 523 bp, Homo Sapiens
gcggccgccaccgggttcccacctagtcccgcagccgctgcagccgctgggttggcggaagagctggacgccgagctagaggacgaggcagagctggacacagctggcggcgtgaattggccactgctgtcggagcccgagctctcccgcactggagaggacttcttcttggctgggcggctcttggttccgctcccgctctgctgctgctggcggcatttggcgcggcggttcttgaaccagacctggactctagactccggcaggttgatcttgagcgccacctcctcccgcatgaagatgtcagggtagcgagtcttggcgaagagcgcctcgagcacgtccagctgtgaacgcgtgaaggtggtgcgctcccgccgctgcttccgcggagtggccggatagcccacggatggatgcaggaggtccatggcgggcccggccaggcccagcccgttcatgccgtatgggggttgtttgaggtaagacatcatgctaacagctgggtggaggcgccccgacg

SEQ ID NO: 6373 - DNA, 282 bp, Homo Sapiens
ttttttcccagagggcactggcatgtaggagaagcggatttaccactagtagatgttaatgaaatttcagcttctaggctcctaacttgcaggacctgcccaaggccctgaacttaattttgttttcatcatttggtatttttttgttaaaagagccaccgaccacctccccgctaccccagaactgcacgtgtttctggccctacaaacccagatcgtcccttggaatatacacagggcaatttgtgtaggatcacactgcgctaaaagtgaggcatggtg

SEQ ID NO: 6374 - DNA, 1256 bp, Homo Sapiens
  misc_feature (436)..(436): n is a, c, g, or t
gggagattcagttgtttgcgggcggccgggagagtagcagtgccttggaccccagctctcctccccctttctctctaaggatggcccagaaggagaactcctacccctggccctacggccgacagacggctccatctggcctgagcaccctgccccagcgagtcctccggaaagagcctgtcaccccatctgcacttgtcctcatgagccgctccaatgtccagcccacagctgcccctggccagaaggtgatggagaatagcagtgggacacccgacatcttaacgcggcacttcacaattgatgactttgagattgggcgtcctctgggcaaaggcaagtttggaaacgtgtacttggctcgggagaagaaaagccatttcatcgtggcgctcaaggtcctcttcaagtcccagatagaaaaggagggcgtggnagcatcagctgcgcagagagatcgaaaatccaggcccacctgcaccatcccaacatcctgcgtctctacaactatttttatgaccggaggaggatctacttgattctagagtatgccccccgcggggagctctacaaggagctgcagaagagctgcacatttgacgagcagcgaacagccacgatcatggaggagttggcagatgctctaatgtactgccatgggaagaaggtgattcacagagacataaagccagaaaatctgctcttagggctcaagggagagctgaagattgctgacttcggctggtctgtgcatgcgccctccctgaggaggaagacaatgtgtggcaccctggactacctgcccccagagatgattgaggggcgcatgcacaatgagaaggtggatctgtggtgcattggagtgctttgctatgagctgctggtggggaacccaccctttgagagtgcatcacacaacgagacctatcgccgcatcgtcaaggtggacctaaagttccccgcttccgtgcccacgggagcccaggacctcatctccaaactgctcaggcataacccctcggaacggctgcccctggcccaggtctcagcccacccttgggtccgggccaactctcggagggtgctgcctccctctgcccttcaatctgtcgcctgatggtccctgtcattcactcgggtgcgtgtgtttgtatgtctgtgtatgtataggggaaagaagggatccctaactgttcccttatctgttttctacctcctcctttgtttaataaaggctgaagctttttgtaaaacac

SEQ ID NO: 6375 - DNA, 1001 bp, Homo Sapiens
tctcctttgaggagccggtccactgcagcccttgttgttccgttgctccccgacccagtcgttgaattgcctgtccttgtccaaccggccataggaggggttccagctgaagagatgcaagccccaggtcttgtagctgctggaggccgtgatctgcttgtcagggatgctgttattcttcaggcccaggggattggcgcatccgttcagctcacagcccagtagctcaaagcgcagagtgcaggccgtgtggcagctcgtggggtacaatctcacgtactgagcctccacaggggtctcaaacaggttgacatgcaccgcgtttttgttccagttacccacaaactccttgtgttttttattaacatcatggatgaaatcgaattcgtgtccattaaggctgtaggccaccttgaaggccttcaggtactcatgactggccaagcggctggcaccctgcgtcaccacacctgttacccacatcctccgcagcaggttcacctggatccaggggttatcgtcattgctgctgggtgtccaggcattgaccatgcctgcgcggttcaggcgggccagctccgggacccaatgctgcaaacccaagaaggtcacacgcacagatgaggcggcgatctgtgagttggcaatgttcccattctccatgcccagtggctcgacacatttcgtctcacagtggttgcccgcgtagcccttaaggcacgtgcaggtgtacgaggggaagacatctcctcgcacttcttgggaaatctcctcgcataaaccaccgttgtggcaggggtttttggaacagatatccagggcgacgaggaggctgggggcgcagagcagcgcgccgcacagcgcggccagcaggcgggggcgcggcatgctgcggggacgcgggcgctggaatgggcacgctgggctgctcagaccccgcggggttctggcgccttctcctctgggaccggaataaatcaggcaggctcagcacctcccac

SEQ ID NO: 6376 - DNA, 558 bp, Homo Sapiens
  misc_feature (478)..(478): n is a, c, g, or t
ttttgaatatcaaagaagtttaatacgctgccataaaataagcgccttgaaaaagctcatggaatagaagtcagtgttagagaaacccctcccacacatcctctggctccacaccgcatccttcaaaaccaaacaagagaatctgaaacaacacaggacatccttccaagcttggatttcagtgagggcccctctaccaataacaagaacacagtttcctacatggcctgataggaaagcaaaacacagaaagcacaagaagtctacaagatttcaattatttaagagacttggtacatattcaaagttaaaataactccaacttttatagctatacatattgttttaaagcaacttaatatattttaaaattttatatatacactcctcaaaggttcttcaggtgaggtatgtaaacattgtctaatgaaaaatttcaatgtttcaaaccaacaaattcacagcatacattgaattntcatccattaaagacacagtatattcctacactcactaacatagtagaaatccaggcccaagagctacagactgatcttt

SEQ ID NO: 6377 - DNA, 513 bp, Homo Sapiens
tttcaaataccggcttgatttaaaccccttcagtctgtcccttttcgtgggccgaacgattggcccctcccaggtggacattccttggctggattgttccggcgtgtgccgggcctgaatggccggggccactttcacagcatgtcagggaaaatcactgtcacacaattccaatggattttgtgcccttttttgaaaacaaaaaattctttagcgtaaacatgaatttttttgcaatgtagcccctggggaatgaatgaaattttgagcttcttcaatacgtaaaattaaatttataccactgagggagagaccctttctgaaagaagtatggccaaaagcactttaatgctgctgacattgttgtttttatgttcatttgctggagcgcaagacgtgctgacacagtgagttttctctgatgtatttaaggtgatgtatttgcttgagttactcctgtatcattgctcataatattggaaactaaaataaaacctagttggaaatccttaa

SEQ ID NO: 6378 - DNA, 1575 bp, Homo Sapiens
gacgctggaacgaggccttggtcaccaacatgttgcctgagcacgtggcacgccatttcctggggtccaagaagagagatgaggagctgtatagccagacgtatgatgagattggagtcatgtttgcctccctgcccaactttgctgacttctacacagaggagagcatcaacaatggtggtattgagtgtctgcgtttcctcaatgaaatcatctcggattttgactctctcctggacaatcccaagttccgggtgatcaccaagatcaaaaccattggcagcaccgtatatggccggcttcaggagtcacccccgatgtcaacaccaatggctttgccagcctccaacaaggaagacaagtccgagagagagcgctggcagcacctggctgacctggccgacttcgcgctggccatgaaggatacgctcaccaacatcaacaaccagtccttcaataacttcatgctgcgcataggcatgaacaaaggcggggttctggctggggtcatcggagcccggaaaccacactacgacatctggggcaatacagtcaatgtagccagcaggatggagtccacgggggtcatgggcaacattcaggtggtagaagaaacccaagtcatcctccgagagtacggcttccgctttgtgaggcgaggccccatctttgtgaaggggaagggggagctgctgaccttcttcttgaaggggcgggataagctagccaccttccccaatggcccctctgtcacactgccccaccaggtggtggacaactcctgaatggcctcgagcctgcaacagtccaaaccggaaggaagaatttattttttgaaactgaaggaagtcccgaccttcctggattgaagtgcacactcatggactttaggtttagaaacctcctcagccttcatttgttcgtggatgtgtgagctctgagggtggccctgctattcctctgtgtgcctgtagtgtccccagcataggggtcttaggcatagggctgaacagtccttccagagccctcgttccaatccctgccgtccttgcccctgagggcccctgaccactgtgagcaggagggtggcagagctgggacaaagctgcctttgccgctgggctttccgggactgttggagggagcacaggcggggaagctccacttcagacagggcttggtggggcaggacatggctcccattttgaagggaggtctccatgtggtccgagtgaggtgagacggccctcgtcctggtgttcctgatcatcttgaaaggttcttctggaactcctgtccccttagtcatgagaacagaaagtgcaatatttcctttcacctggcaggggaggggggatttatttctgaaagaaaaatatataaacagatcttctacatttatatttttaatcttctgttaaatacactttccgatattgccttgccttttgagctcttgctacagtcgcctttgctactgctttaagagaatttacaggtattgataaagaacaagactgttttattaaaagctttattcaacttgaataaagcggacgcgtgggtcgacgatat

SEQ ID NO: 6379 - DNA, 497 bp, Homo Sapiens
tgcggggattacaggtgtgaaacagtgcacctagccataacatgtatttttgcaaggtcactcaccctggcttctgtgaaagaagcctcagaagggtctgtttggggagaccagttagcctttcataataatctagttaagctgtgatgaacactgacctgaagtagtagttagtgagaatggaattgagttttaagagagattcaggatgtagaattgtgggagtacaggcctaggatgtcttgaatgatcataaggtgtctgatttgatatgttatcatagtttgtggtgccatttacttagcagaaataaaaaaatgtttcataacattctgagtttgagacacctacagaacatttcaagctagagatgtcccacagtcaccggaatataaggatctggaacttatattagcagttggagattcaggtgtggtgaccgcagcagcttgtaatcatcgttgtggatgacggctctccccatgagtatacggcac

SEQ ID NO: 6380 - DNA, 399 bp, Homo Sapiens
tctggctgtatgggtggagaacccaccccctgcccaccacaggggtctccttccaggccactcaggacatttttagcttctctcctccccatgttcccttttttctctaaagtcccctgacatcagccctcccaactcctaagagggactacccatgagagtggggttctgaggctcccctatggggacagttccgttcttgaagtgtcagtgttggggaatatctgtggcctatgaggcccatctcaggtttggggatcccccagtccctatgatcagtgttggagtacccccctgggagagcctagtttctttgaggccccaggccctcttttaactacctttgaataggtgttatccctgtatttatggaaataaagttccatttcctcaaaaaaa

SEQ ID NO: 6381 - DNA, 553 bp, Homo Sapiens
gcggccgcatcacccccaaggaccggcgcctggacacctggatctgccggagcagggcccgggccacgtcgggtgccctgaaggctgtggtggggtcaaagtgcacatccacaatggcgcggacggatttgccgggccccaggtcccgcaagcggacactccggaaatccttcttgacgtctgaattccggaagaggtcgtccagggtgctctcaatgctcctggctgtctccccgaacagttctgacttggggtcagccatctcgggcgtgtagaacagctcctggccctcgacgccctccagctccaggacgccctggaacaccttggtggcggggcagttggagccctctgcgtccagcgagggcgtcttcccatcagagcagcagcccaacgcggagttgtagcaggaagccctctcgacaggtgggccaagggtggccacgctgctgccctccaagggctcgagccccccagagccacccccactggcctcctggtccccggtcagttcctcaacgctgcttccatcagggctggccgatttaccaaa

SEQ ID NO: 6382 - DNA, 511 bp, Homo Sapiens
gcgaccgccgggagacctgaccagtgaggaggaggaaggccagagcctatggtcctccattctgagcgaagtgtccacccgcgccaggtccaagctgccgtccggcaagaacatcctggtcttcggtgaagatggttctggtaaaacaaccctcatgactaaactacaaggagctgagcatggcaaaaaaggaagaggcctagaatatctctacctcagtgtccatgatgaggaccgagatgatcacacgcgctgcaacgtgtggattctggatggagacttgtaccacaaaggcctgctgaaatttgcagtttctgctgaatccttgccagagaccctcgtcatttttgttgcagacatgtctagaccttggactgtgatggaatctctgcagaaatgggctagtgttttacgtgagcacattgataaaatgaaaattccaccagaaaaaatgagggagctggaacggaagtttgtgaaagattttcaagactatatggaacctgaagaa

SEQ ID NO: 6383 - DNA, 1742 bp, Homo Sapiens
gccctttttatgtttttttgggggataaatatattagcaaataaatatatttcttaacatagtgcctgattcaagcgtctgtctggttcagatataaatacccatgtgggtacctaggtgctagtctccccactaactgagggaaaaaggttcccaggtggggtcctctgcccactttgccaccacattcacattccaaatgggataatgcctgaggggccaagagtggtcaggctgccctggggtgaatgtcaccctgatgaggcccatcagctcttgtccactcagtgaggccagacttgtgctctaatccactctcctgtgggtccctggcctgtatggcttatactggggagctgggcctctgggctgtccaaacccaagggtcacactttgcttttcctttgttgtccccattttccatccttgctctaagacaaaacttttcccagagaagaactctttgttgtccccgctcagctgtaattctgccttttctaccttcattccatccttcctctgcccagataaagtccagcagaaattcctcctttctacctctctgggactctgagacaggaaatcttcaaggaggagtttttccctccccactattcttattctcaaaccccagaggaaacaaggctgctgtacccacctcagggacagaactccacactatagtgggaaagcttcagggaaccctccttttagtgctcagggctcacctatgatactggtccttttggcaaaaaaggaaaatgatagagccagggttgcccctgatgtagcagccttactgtggaggggccaaagctggtgttcagagctcacccaaggagggaggtgataaaggtgtcatgcgtttctgctgaacccacttggctggtatgaacatgaggcattggggtgagggaaaccaagtaggggttggagaaggagcagcacctttgtaacacctggctacccatagctagctttctgccctcaaaaactcagccttcaagggatccagcccacacacgccacaggcagcagctggttgcctggctggacatggatttgctggcactgcagatgttttctgcagacaaggtctggagctggagcaggaaacggcaccctctcaccctccaccatcaccagtcctcttccagtgcttctaggaagtacggcaaaaagaatggtgtttgctgtggtcctttcctttcccaggagcaggactctgtgccaggtagggcccaaacacatctggagcacactcttggttggagctaggcctgaacatctcacacagcctgttcacacagctcctcgagttcctcctctgagccaggctgggccgacagcacctggcagtgcggataagggcatggcctgccctctgcggtgtcagaactccattcagaaggcccctccccaggtggatgtggttccaggggctggcgaggagtcaggcacaaccacactggctgtgaatttgagtaacaggggcctggggtttctggtagcagcctcttgtccaggcctggaggtccacagatcaaggggtgtgcctctggggaccaaggatatgccacactgggggtgtaatggggaaaaatctggcaagctgggtgcacagttgcatcctggggccgagagccaggggtgggctcggagggacccccccgcctttcggacgcgtgggtcgacgatatcccgggattccgaccgtaccagccgctgtttacccgctgtgt

SEQ ID NO: 6384 - DNA, 1001 bp, Homo Sapiens
caacagcaacccttccagtcccagtgctgcaagcggcgccgcacgtagaccctcagccctggtggcggcagagaagcgggcgaggcactgtggtcgctgagggggttggctgggtctgagtgccaccccccaggccacagtgataccatcccagtgccatgagcccacactccccgccctcaggctctcaggtgaacgtggccgtcagcggggaaacgtgtgtgtcagttggaccatgtgggaccctgatggacctaaaagaccaggatcggtccagctcagatattgagggctctgaagcctagttctgtcttctctggagcagctgtggcttccccgtggctgcttggtgacatggattagcgctacgtgggctgcagcatttgggatccaggctacctagaggggcatcgggccagggaaaacctcggattagcaagcaataaaaacatgacctcactcttcctcaaaggagcccctggtcttccctgtgtgactcagttctttccatctgtttgtcccgctgcaagcctctttctgcgctgactgtgacattggaacgtggccttcctgtcaccccctccgtgccacgcactgaaggccacccccacccacctgggaaactaagaactggatattttgcctcattcacttgtactgtaacaatgtatataatttggttggtatttcactatttaatttttaagaagcctattttactagtgttttatatgaacaaagtactgcagaagttaaacctgtgttgtattttttctgagatgttttgctttaagagatactttttgctcagtttttatatgccagatacagagaatttgtagcggttatttttgtatgatctagtaacttgcaaacagaccaaatggatgagaggcggggaccgtggcagtgtcggtgatgagaggcgacgttctaaatatcttcgagggccagataagcttccagtttttggtccaagtgtgtccattggggtgattatg

SEQ ID NO: 6385 - DNA, 407 bp, Homo Sapiens
cttgaaagtaaataccaacaacaaacagccttttaacagtcccattagatcttctgtggatggtgttcagactcttgctcaaactaatgaagagaaaataatggattcttgcaatccaacttcaaatcaagtactggacacaagtgttgcaaaagaaaagctagtaagggatattaaaacattagtagagataaaacagaagttttcagaacttgcaaggaaaattaaaatcaataaagatcttttgatggcagcacgttgtattaaaatgactaatacgtcttatagtgaaccagctcagaattctaaattgtctctaaaacaaactgccaaaatccagtctggaccccagataactccagtaatgccaggatcagagagactacaccacagtagcgcatccattg

SEQ ID NO: 6386 - DNA, 654 bp, Homo Sapiens
gagaatgtgtgtgtcagtcctagacgcagggtctgtgaactagtcggtaaagggccagatagtgtaatgtaaggcttagtgagccataagatccttgttgcaataactcggccctgcaattacagcacaaaagtagccatgaacaatatgcagactgaaggggtgtagcagtgtcccactaaaattacttacaaaaaacaggtaactgggactgatttctcctagacttatgacccttttataaataaaaaagacttgtgatagtctaaaatatttcatactactatttagttgattcattcatctactgactggaccactttaggatcatttccaaactgtaattttttaaaaacttcttagatttcagtttcaagacaaatacaggatcaacttacagctactataagatgtactaaggcagatggaaggcgacacacaaaagtaaaatttgaagcagcacacaaaacatacttgagtcattgataaagcaaaagagcactgtagtatgagaattgtatcagttatgataattagtatgtctttgtgaagccaaaaaagtttcatttgtaagctatatcgaaatacatcatttttctacattattcctaaattttgcatattatcaccaaaacacaggtagaacatgacaca

SEQ ID NO: 6387 - DNA, 348 bp, Homo Sapiens
ggtgttagaggataataagaagggaagtgtaaggtaaaaattggggcacatctataatgctgttaaaaacagacataactgaaaaatacaccagagaagcaaaaagtaccttctccttgaccattctagaggtgttgcagaagaaacagactttaggtgaagcatatatgtgagtataattatgttgcgcttgcttcttaatgaaagacatgtcaatgaaggactaggcacaaggtagagacgctgataatgttgagtcagctcaggaaattggacctgaagtaagaagatagagattccttaggatgccttgaccctcgagtagcgaatccacttttccggaccgcc

SEQ ID NO: 6388 - DNA, 436 bp, Homo Sapiens
ccgcgcgtgactgcccagaggggggatacaggcatgatcgagcgcatcgggggagaataaggctaggttttggtgaagaaggacacccggtacatacgggtgaccggacgtgaagtgtgggtccagctccgtctgagcataactttggagcccattttctggcaatacatggtagtacccacggaagtccctcactcctgttctagcggtgaccagacctacaccatgcccttaatgtaggtgctcagacctcacagatagtcttttaggcactagagggtgctactagttgggtcttttctgcatcactgctcaccatgacttgccattggagagaccaaatttttcccgtaaccttctgaatttaattcatattcgtcaaaagaagttcgtatggtcggtatctgtttagcataacacacctgttgaaaaggtc

SEQ ID NO: 6389 - DNA, 236 bp, Homo Sapiens
aaacggaaacaatctgggagaggtagtctgtaatacaatttccacagacctgtccatatgtgggtttttattctttttacaatattatttgatcctctcatttgtttcattacatcaatttattttcaaatatgagaactgctattgttttataccatccaattctccatgataatgtaaccgttaaaaatatttttcagggccaggcgtggtggctcacacctgtaatcccaaca

SEQ ID NO: 6390 - DNA, 436 bp, Homo Sapiens
tggggtctcttgctgcttgcctctgctgctctggactgggagagcttctgtcctgtgctgcatgggtatttagactgtgggggagatgccccttcttatagcactggaggaggaaaacaaattcttgtccccctcagaatgagagtggctctttctgatttgcaagggcactatggtcagggcaaaggcatggcccaggtgtttaagtacagggtgacgtgtgcctatgcaatggggtggtaaggcaggcacgaagagtccaaaaaatctaggtggcctctcagctctgccacctctagctgcatgaccttgggcaagctatgtaaccccaattgcctgctccattaaagactgtgaaggtagaatgtttgtaaagctcttaacagtatgtaagccttcaataaatttcagttttccccttgttttcttgaaaaaa

SEQ ID NO: 6391 - DNA, 516 bp, Homo Sapiens
ggcactgagcaccttcttttaagaatataatttgtaattatgtagattcttaattctacttcaaaatgccacacagccttcatgtgataaaatgaaacaattgctcaactgatctcctgggatctctactaaaatgttggcagctcgccaagctggtctggccctggacgtgccttcagggtctggttatgcttcatgacctgcattgtggtcagtgccattttgcagactttgatcacagtgaaacgttccacgggaacttgggccatgagaaacatccttcctaaccacgtgactgcagaaacatccttatcacatcctcctgggcaaaggcccaacagcctgactgcagggacatccttgccatatcctgctgggcagcaagctctaccacccagatccctccctcccagtcccatgattaccccagcctgtgagtggcagttggttctggcactaagctggtttcctcctccccagggttttgctggcaataaagatgttgctgttgaagcc

SEQ ID NO: 6392 - DNA, 582 bp, Homo Sapiens
ccagattcactttcttccggaactcaattcttggggccgaatactgtctccagctatccgtagcctctcccctagcttacagggttctctcgacagcccggtcccctttttccgaggaagagctggattttttcaccagtacgctctgtgccatcgacctgcagtttccctaacctgtttcctcctcccggtcctttcgacccccgcgctccttggccgtctactggaaaaatcgagcctctcccaccctcagtcgcatagacttatgtgttttgctaaaattcaggtattactgaattagcgtttaatccacttcctttcttcttcttctaaaatattgggcactcggttatcttttaaaattcacacagaaaaattccgtttggtagactccttccaatgaaatctcaggaataattaaactctagggggactttcttaaaaataactagagggacctattttcctcttttttatgttttagactgtagattatttattaaaattctttaataataggaaaaggggaaagtatttattgtacattattttcatagattaaataaatgtctttataatacc

SEQ ID NO: 6393 - DNA, 550 bp, Homo Sapiens
  misc_feature (85)..(85): n is a, c, g, or t
  misc_feature (120)..(120): n is a, c, g, or t
tattaagttataaggagatgaataagtatttagatttttttcaataacatgaactttgccaacttctctatccgctactgtaggncttgacaggctcatcaatcatttgctggtacctgnactaaaaagcgcacttgctgacaccaaggcatgttggaattttcttaattcagtggatggaaaaagaaatacttccaaaaatatcccacacatgaaaagggaggggagccttaaatgaaaattccctttgtaccgtagacactttttggaatgcgattaattgccaacacatcattgaacgaatgctgtaaccaagaaattaagattgtgtgtgtgaagggaatatattcttaactgtggctacccaacttgtatagcaaagatttctgatagtttgtgttcatctcatgtgaataataaatactttaccctataagtttgtttattattccataaatacctaagggacttcctaaaccaaaatgaattgatgggctttttgagcctttagacatctaagatactcaattgtttccttgtaacattttta

SEQ ID NO: 6394 - DNA, 983 bp, Homo Sapiens
  misc_feature (641)..(756): n is a, c, g, or t
  misc_feature (854)..(863): n is a, c, g, or t
  misc_feature (931)..(939): n is a, c, g, or t
aagaaacctttccgcgctgcgttattatcatggcaaaggttccgatgaagcgcatgcgccagcatatggacgtgctaacatagcacccagcttacattacgctcagctctatgtggtgaatgtagcgatacatttcacacggaacagcttgactgatacgatttatacgaccactataggaatctgcctgaggcacagaactcggcacgaggagttcctcagctgaaaaagaagccacacaggaaatgacaacgacgctgaatcccagcctccatccccagagcagaagtcccgcaggacagacagacacagacagcgctagtgaccagcacggttctcatgtaaattacaagccccagccgccagccccgccttctcttcctcctcctccgtcttcttccctggccctggtcaggcctgtggagccccagctctgggtccctagcccgggtccaggcagccaggctccctcctgagctgagaaacggaacctcgcgaaccactggtggcacatccttctcctcccccgcccctgatcacccgcccccggatcagaaatatatctatattctcgactaaagtctcatcaggaaatatttcctgtcttttattttaagcatcaaattgttttagttgatttnnnnnnnnnnnnnnnnnnnnnnnnnnnnnnnnnnnnnnnnnnnnnnnnnnnnnnnnnnnnnnnnnnnnnnnnnnnnnnnnnnnnnnnnnnnnnnnnnnnnnnnnnnnnnnnnnnnngggggggcccttaaaaaatccccccggggggcccaattttaccggccccccttttttttggaaaaaggggcccccaaaggggggccttttaaaaagtnnnnnnnnnnccgttttttaaaaccccggggggggaaaaactggttatttgggatttttggaaaaaaaccttttcttnnnnnnnnncaaatatgggaaaaaccccctccagaaatttaaggccccggggg

SEQ ID NO: 6395 - DNA, 475 bp, Homo Sapiens
tcaggtgcttggggtgggggcgctgctcccagtgggggtgtgaggaacctgaaggatgaatccctgtccccccccctccccctactctattcttccttaccctgcccctttccactccaaaacctcaagcctctggttcacatctgagtgacctttccaaagcaactgttctcagggggtccttgggagccgggaggctgtgaccttaacccacttctttggacagtgccttcctggcactccacccccacctgccacctcctgagaggaacatttcggctggtcttggcaaaaacatcagtctatgatccaggcagcctggtacagtaccagctctgccactgacaccactgtgaccttgggaagccatttacacatatgggtctcagtttctccatatgtaaaatgacttttgtttagctttcctgattttcaaacctttttttcaaacagtgaatcctcttgtttaaaaagt

SEQ ID NO: 6396 - DNA, 692 bp, Homo Sapiens
  misc_feature (77)..(126): n is a, c, g, or t
gggggagcggcgccggagcgggcgtcatggcgcggctcctctggttgctccggggcctgaccctcggaactgcgccnnnnnnnnnnnnnnnnnnnnnnnnnnnnnnnnnnnnnnnnnnnnnnnnnncgggactgggggaggcagggtctcttgcaacgtgtgagctgcctcttgccaagagtgagtggcaaaagaaactaaccccggagcagttctacgtcacaagagaaaagggaacggaaccgcctttcagtgggatctacctgaataacaaggaagcaggaatgtatcattgcgtgtgctgcgacagtccactcttcagttctgagaaaaagtactgctctggcactgggtggccttcgttttccgaggctcatggtacgtctggctctgatgaaagccacacagggatcctgagacgtctggatacctcgttaggatcagctcgcacagaggttgtctgcaagcagtgtgaagctcatctaggtcacgtgtttcctgatggacctgggcccaatggtcagaggttttgcatcaacagtgtggctttgaagttcaaaccaaggaaacactgaccatcttcaagagtcccgttcccttgccaccccttcacgtgcaccctcaatttccacaattcacttgaatgacttgttttatttgcaataaaactgggctgaatttgcaaaaaaaaa

SEQ ID NO: 6397 - DNA, 493 bp, Homo Sapiens
ggtatgtttcattagtgcatttcttcctgctgatcactgtaaacatgtgaatcagctttccatttcttatgcaggtcatgataacttgtagagtagagtacaatcatttgtgctatgtttttaattttctaaagcaccttgatgacagtgagtgtccagtggtgaagcatcctctattgaaccaccctcaaaaatttttttgccaagtcctaagttgatagcttaaagtaaaaagtgaaaattatagtttcattaggacttggtgtaaagaaatcccctcccccgcttccccaaagggatactgcagttatatcacatacccaataggcaccacgatgaagatcagagcttatacttaattaaggttttatacacaccagttccccagtaaatgcaaatttaacaagaaaatcagacatgtcatatgttcaaaatgctcatggcaaacaatcattttgcattcctgcaaataaaattgttttatactgtaaaa

SEQ ID NO: 6398 - DNA, 740 bp, Homo Sapiens
  misc_feature (44)..(44): n is a, c, g, or t
  misc_feature (291)..(344): n is a, c, g, or t
agggcaagatctatttacttcaacccattcatctatgcagcctntatgatatatgcatagacaaggcagtcgtgctatagtatctccctgctgcaattcttcaaggcatattgcacattccccagcatctttactcagtacatcctcattataggttattcgtggctttgttaaacacattacaagatgcaaatccatttcatctgaggatacaaattttgagcatacagggcacttaaatcctccaaacatgtgcggcgagaggtgagctggtaaggagccgatcaccannnnnnnnnnnnnnnnnnnnnnnnnnnnnnnnnnnnnnnnnnnnnnnnnnnnnncctcagggctgctgtgcaccgagtcctgcgagccctacgggccgctgctgctgttcgggatgctgaaagaggactgcgccgcgaaggcccccgacgccacgcccccccgaggaaacagctgcggggccgccgcggcgccgccgggctggtgagcgctgggcacctgggccgggaacctccccgcggcggcggcccccggcccccggctctggtcccggtcccattggccactccgctgctacaggaaggtaatcatagcctcctggtatcacacatccatgggaatactgaatttatttggactagaaactaacacctgctggaatgtcaccagaatagaacctcttaatgaagttcaaagctgtgaaggcatgtttcttccaaaaaccaaaagac

SEQ ID NO: 6399 - DNA, 1029 bp, Homo Sapiens
gggaaccggaagcctcgaggtttagtcccgcccccctctcctcgctgcttaggctccgcggcctccaagctgtagctatgacggcgcgcgggactccgagccgcttcttggccagcgttctccacaacggactgggtcgctatgtgcagcagctgcagcgtctgagcctcagcgtcagccgcgacggcgcctcgtctcgcggcgccagggagttcgtggagcgggaggtgatcgacttcgcccgacggaatccaggggtcgtaatatatgtaaactcgcgtccgtgctgcgtgcccagagtagtggccgaataccttaacggggctgtgcgcgaggagagcatccactgcaagtcggtcgaggagatctcgacgctggtgcagaagctggccgaccagtcgggcttggacgtgatccgcatccgcaagcccttccacaccgacaaccctagcatccagggccagtggcaccccttcaccaacaagccgaccacgttccgcgggctacgcccccgagaggttcaggatcctgccccagcccaggtacaagcacagtgaagagttgccccaccaactgcagccccaggctttggactgttactccggtaaaggtggttcttcccctttgggattccaagcccaggcaaatggaacccatcaatgggcaagttgacagaggttctgcttgggataatgaagagctgcctgtttctttccagtgcctgcttctgggggcagtgaccttgtgaaccactcatttttatgcaagtggcatccctaaaacctgagatgaggaagacttcaagggttttacagggcccttgttttttaaatccaaattgataataatgatctcaaaacacagtgagaggtctgaaggctggcttctgaagaatccctgatgtcttattggaacaaccactgagctacggagagctctgctgtgatgggctaggcactttatatctgtgtgaatacagatttataaaacaggttaataaacttatccaaggtcacatttcagaaaaac

SEQ ID NO: 6400 - DNA, 634 bp, Homo Sapiens
  misc_feature (14)..(14): n is a, c, g, or t
  misc_feature (49)..(49): n is a, c, g, or t
  misc_feature (59)..(59): n is a, c, g, or t
  misc_feature (71)..(71): n is a, c, g, or t
  misc_feature (88)..(88): n is a, c, g, or t
  misc_feature (124)..(124): n is a, c, g, or t
ataaagatgggtcncatatccgagggccaggctccatgacaggggattnctaaagagcntgcgaagccttnggtgacttatggagccnaagttggagttggctgtgaagttcaatgcactgganttggttgccagcgacttggcaatatttattgctgtcattattctcagtggagaccgcccaggtttgctgaatgtgaagcccattgaagacattcaagacaacctgctacaagccctggagctccagctgaagctgaaccaccctgagtcctcacagctgtttgccaagctgctccagaaaatgacagacctcagacagattgtcacggaacacgtgcagctactgcaggtgatcaagaagacggagacagacatgagtcttcacccgctcctgcaggagatctacaaggacttgtactagcagagagtcctgagccactgccaacatttcccttcttccagttgcactattctgagggaaaatctgacacctaagaaatttactgtgaaaaagcattttaaaaagaaaaggttttagaatatgatctattttatgcatattgtttataaagacacatttacaatttacttttaatattaaaaattaccatattatgaaattgctgatagt

SEQ ID NO: 6401 - DNA, 483 bp, Homo Sapiens
gcggccgcagaagggcaccgctggcacggggtggccccaatgaccgagtccaggaaagctcgatccgcacggaaggcagcacccgtgctccccgctggaggcggtatgtgtccctgaaatccacggtcaggcttgtgcggaagaaatcgaggcccggaagtccaggaggggcgccccacggccgggagcgggaagggtccggaggcaggagggcggcgcctacgtgtcggggtccagccagcggcactgctcctccagcaccccgcggaacacctggaagcggtggttgaggtcgggccgtgcgtggatgcggaagcgggtgcccagggcgccgtcgggcgagggcgcaccgtagaagacgcgcaggatgcgtgcgtgcaccaaggccatggcgcacatggcgcagggctcgcgggtcacgtacaggtcgtagccggtgcacaggtaggggaggccgtggcaggagctcagccagcgagcgcg

SEQ ID NO: 6402 - DNA, 355 bp, Homo Sapiens
gcgcccggcccctctgcggctctttggaggtgtttagcgcacgtgcctagtgcagcacaagggcacctgtctgctgtgacagttctgactgacatcatgggcttttctcaggctcagtgaccaccggcctgtgtcagtgctgctgggccgggagtgctggtaacagcaccaggcagtccgtgtgtggagggacagcctcctcagtggagatgacgtgtgctgatattgtccagttttgccatactgttaggacacaagtctttgtgctggtgctgtctgtgctcaggggcttttagggtttatgtttcataacgctactcagagatagagacagattgggtgactttctagtaag

SEQ ID NO: 6403 - DNA, 736 bp, Homo Sapiens
cttagatcttatagttcatgaacttctaggacaagataaattcctctgttttagacacaaaatagatcacgtcagttaaatagactttgttttaattcactcactgaaacatctccaactactagcaaaaattccgaatgtctgaatgcacactactcttcctaatgtggggagacaactgtgtgctttgtatctttcccactcaaattggcttataaaatgaaattattttaactatccaatggaaggtacataatttaaaacatcctatagaaatgacatgttactagtaatttacaattttaaaaaacagccacaaaaaagtcaaagctaaaaacaagatttttactatgaatcagtgcttctattatccttctgaaagaagttatattttaatgtgatgtaaaggcaacattgaaatttcttctttaaattaaccacctaatttatccctaaaattacaaagaatcagtcttttacaggtcaagtgcagtaaactaaaatgttctctcagcacaaagcagcactagaaaaagtaacagttatagatgggagttgactagttttgcagtggctgcgccatcaataacaaacagacatcagacggtatccatcccagagcacagacactactacagactagatgcgaagaatgcgtcacactcttggctgataaatgtcctttgtctttgactctttctagtttgaatgaagtggattttttaaaagtttaaat

SEQ ID NO: 6404 - DNA, 351 bp, Homo Sapiens
gtctgtctgcgtaccctttattgtgactgtcaggacactggtgttggagttggcgggtcctatcctgcccaggggtgactcccagggttgcagggggatcagggtggagaagggtgctgtacccattgcaggcgtgaagtcctttctgctctcttagcctattacattagagagtagcttacctttgggtgccaacggatccaggatccccctggaaaccagatggtacggccatgccggtcctgcagggagctcatgcctggcatgccatagcagcgcagccaggctcgaaaggcagagagagaccttcctaagaggactgcaacccagcggcctgaggggaccaggggg

SEQ ID NO: 6405 - DNA, 777 bp, Homo Sapiens
  misc_feature (422)..(483): n is a, c, g, or t
ctcgcctccttgggtcattctactgatgtgctgagtgccagctggttcccgcacaggagatggagtaccttggccaagcttaaagagaagattttctcagggtatttattagtgtgtccagcagggtcaggaagcaggatggaaagatgcattcagactgttaattgattaacaaggcaaatgattgtgtgtttcttgatgacagactattaagtttgggacttattttcccatttgagaagttataatatatatttaagatgataagtttcctgcttaagttgtgcctttcagcttcaatgagtttaaggagcactaagggtaatgataccaatgagggttggtttattatcaaacctgaatagctgtggtttctccagtaaatattttcttctactgaacatggagccattattaagagnnnnnnnnnnnnnnnnnnnnnnnnnnnnnnnnnnnnnnnnnnnnnnnnnnnnnnnnnnnnnnaatagttttcttttagtttcttaaagttgtgatactagatttagattctgatgctaactgcaaatcaggttggtctctgctgggtctctcctgcttttattttactttaaggacaagtgtagttgtcgtccaccacctttcaaaaaatgtgaaactgccctgcctcccctttttgctgacaacactgtgtacattgaccacttcctaccatactttatgttgtaaaatcaaactcttttgtggtacattatctcatgcttctgcaaattcgaataaattctatggcttccatgt

SEQ ID NO: 6406 - DNA, 528 bp, Homo Sapiens
aacgatggtcctcagctatcgctgaggattatgtggaagaattacacaaatggcggtgtcctgattattatgagaataaggtccacaagatgcagctcccattttccagcaagctcctgggcagcgactctgacctctgaggagaaacaagaaaggcggcagcagcaattgcggcggctgcaggagctcaatgcccggcggcgggaggagaagctgcagctggatcaggagcgtctggaccgactgctatatgtgcaggaacttctataggatggccagatggatcagtttcacaaagctctgatagagctgaatatggactccccagaagagctgcagtcctacatccagaagctcagtatagcagtggagcaggctaagcagaaaatcctccaagcggaagtcaacctcgaggtggatgtggtagacagcaagccagagaaccctgacctggagcagctggagccgtctttgcaagatgtggaaagcatgaatgattttgatccctgtgttttcagaggaacacac

SEQ ID NO: 6407 - DNA, 353 bp, Homo Sapiens
  misc_feature (157)..(166): n is a, c, g, or t
gggagcttttaaacagaagtgctttatgggtatcagatctcttctgacatcaattgtttcaaatcattgttgggctctgtcgtgttctgcaatcttccccattcccctcatgatctctggcttatcttttatccaatctgtatggactttttaggannnnnnnnnncttatagtacaaataattttcagatcccagctttggtaaatgtgttaattctactttgtgaataaataaatgagtgatctgctaaaaatggcaattgtagaattatgttgtatgtaatgtacatatggagaaagaatgtattttgttcattttcttaataaaatgttatatatggatgctaaaaaaa

SEQ ID NO: 6408 - DNA, 679 bp, Homo Sapiens
gtctcgaggtccttcggatattggcaagccaagagaaatgattcatcaagcaaaatgaatatactgcatccaataagttttcagaagaaatagtgtgaagataaccagtcagagcactagccataacttccacgaactgttctttgttctggcatttgtagacatgattgagagaagagtaagtatgaagaatagatagaatgtttttcatgtttagggattcaggatcctctactattctcttcataaacaggtccattaaaccaacaggtcgaaagccaaggttttcaaactaaaatgaggataaaaagaacttttctgaacttccagatgtcgaaagttgcagccacataatctgcaagtcccttgaagagatccaaattatggtactggaggtctttgcaggactgcaatatgttgatcattattcttaaaggacacccatggatattatctaggaccaccttactgcattcatccaggagtataagagatcggtgattcatggcagctagtacttcaaacatgtgttggctattcaaaacagaaaatctgtctaattccctcaaggctttcatccccagtttactcttaagagcaatccggtgcatcttttccgatacactttatcacaacttgttatgtgaaggactcttctattttccaaatagctgatcac

SEQ ID NO: 6409 - DNA, 466 bp, Homo Sapiens
attagtctttcaagatcagaagatatttagttagtatcatagttcagtctgttccaagctgtaaagtcagttatttcagtaatgtaatttctaagatctataaaaaatgaaaatattttattttcttatataactttctgtgagagcattgaacagtcaagaaacttgtatgttttccagcccccattctgcttcaagttacatggtgtctagccttttcagctctagaaattctacattattatgtaatatcctgctttatgggtcttggtggtatatggtatagatcaactcaaaatttaaaattttcatcgtatgaatttttgtgtagagatttcaagatgagttgatctgagaacaaaaagaactccaaagaaatcttactattttcctgttggtatatattgttcaataaaacactatattggtatatattgttcaataaaacactatattggtaaaaaaa

SEQ ID NO: 6410 - DNA, 850 bp, Homo Sapiens
  misc_feature (658)..(667): n is a, c, g, or t
gaaggaagatacgggaatactttaagaaatgttgcactaagacaacgcaatattaacaacacgcagtatttaaatacctgacttaaaatgcaggacagaatggttctctcaggaggttaatttacagttttcttgtaacatatgtcagttctagctgatgataataatctgcggttagttgaaccttaaataccattatgctatccataggtaagcataatggctatcaaataactgtcctaacaagtggtgaagccaatatcctaacatgttttagctaaatagcctaagatttaagatttgaacaaccgaactgtagtgcttttattctcctactgcatggaacattcatgcattaacaagtacaatgaattagctttatgaatagataattataagtgtatgcaatagaaatttggattttgtaatagaaaatttaccttgtaacagtgtgactacttattatgaaagccctatacacatgttaactaatggaagactacatagatgtttaggctatctagatgtagtttaaaaagaaattcaggaaatttttactagttcatgaatgaccattaaagaaacagtctggggctgtatccctttgatgcatacggatcacactctgtaaatctgtaaacacatactttgatacgtnnnnnnnnnngtcttcctatgaccggaaaaacagactagtagaggccccgggtattccaccaggcctcctctaaagatatgctaatatggctaaatactatgattataaaaatgtagaagtgctgagaaaatgagttccagacggggacttttatggagacattgcttctcaagtatccgaagggaactctag

SEQ ID NO: 6411 - DNA, 864 bp, Homo Sapiens
gttgttatggaataggacccaggtatcaattttttaaagctctgccaggctaatatgtagctaagattgagaatcactaagtcaacacattttgatatatcaagaaaataaatggaaatgggggtgataatttatatttgtaatttacaaatcaaacatctatcatacacttactatgtacctagttttattcacgaatcatccatttctaagataaaaattcccatcatttcctcactgcactaaaccaccactgtacatcgttgccaatgaatgacagtatttttctatggtcaagatttaaaattctggaatacatgatgaaaactgcattaatgaaaacaacctacggctattcatgctcaacagtagcaagctaaactacggtactgggctcctttgagctacccttattttaagaattataaataggtgtcaacccacacaaagaacagatggtggattaccgtagggaaaaaaaatagcttactcaacttactaaaagtttcaacaccaaaaaagatttaactgggctgaaagttctgaaacagctgagacacagaaccaggaagctataatttataactgaaactgtggatacatacttaaaagctactgcagctgtagctatactaaaataagatttcttcagggtttacttacccggaaaggcaagaatacaagcataacaataatattactgtttttatatgcaccaatacctctctttaatatataaaagctctacaacaaatacctctaataattttacaattaaattaagtccatacttctatactactttggtctcaacatttttaagacatcaattactttagaaaatctacaatttaacaacatgat

SEQ ID NO: 6412 - DNA, 334 bp, Homo Sapiens
gacaggctgaattatctcaaattaaataagactaaaaatatataactaaataaaatatgtggtgttggtgtggatcttataaaggacatttttgagacaactggtgaaatgtgaagatagattatatggtaaataatggtattatatcaaagccaatctcctaaatttgatcactgtatttgccaggataaatcccatgttctacagagatctgtgcctcagtctcaagtctctcaagctattccctccctgctagattggacctgatggatgatgacaactcaagtgatctacgactgctgatttctttcacgtaagtccatcctctcattct

SEQ ID NO: 6413 - DNA, 259 bp, Homo Sapiens
atatttaaaatgttacttttctgtatgatgtgcatgcaagtttaccgtaacttttcttaaactttttagtgccgtttctagtatattcctgtaaatgtcagttactgaaaatgagtccaatgtaagtagtttagcttgtttattgcaatgctggcctcaacacaacagaataaaaatggtagaaagtactctttgatgtttctggtaatcatggacccttctcctggggcatttgttttgttttcataataaaaagcaa

SEQ ID NO: 6414 - DNA, 371 bp, Homo Sapiens
atacacatgaaaaccccaagggggaatccccatatcacagtgtagtgtgatatttgacattcgtgatcatctagagatgtacagaaaaggtgaatctgtgttctgtatattctgcctaaggcaaagaaatttttagctctctttaaaatagttccataattttttctaaaaagctttgcttgaaaactgtaagcttcccatatctggagcatttcactttaaatatttggataaatatgttatcttcttacttggacatttcatgtgtttagggattgtcttctaaattcttcctaattcatatagctgctaacacttcccgcagagctaaaccattacagatatgaaataaagacctattgatttgactt

SEQ ID NO: 6415 - DNA, 521 bp, Homo Sapiens
ttaccttacagcctggcgtatttattgaacaaatactactaaaatagctaaaatacattgggtacttgtcatgagtgcatcagtaaagatcacactgttacaaaagcctgcattttcagcagtacacaactgcaactctacataaatgccacagatgcagaatactgttttcttgctctatttacacagctgatatacctattctaacgaaggagggagaggagtaatgcacaagaaactcaggccaatgggggagcaagaagaaaacgaagaagtgcagtgcatgcgtcatcgggtgtttaacagtcagaagcgaaacagttcagaacaaggcctgccctgtcaaaagaagagctaaagacagttatataaaaattaaggtgggctttcagactggctaacacaacaacattccatgagtagatggtaatttatttttgtttatccatttcgttgggagcaaggacaaaaatgtaaatctacaccttgcttatcaaaattgccgaaaaaagaatgctctg

SEQ ID NO: 6416 - DNA, 888 bp, Homo Sapiens
  misc_feature (524)..(538): n is a, c, g, or t
  misc_feature (658)..(658): n is a, c, g, or t
ggaaaaaccacatggggaaaaaaatcatctatttggatgcagcattggataatggataaaacacctcacacctcactctttatagtgcacaaaatgaatgaggtctgggctaggtagaaaaagggtcaatgctatttttgtttttagaatcattaccttttaccagcttttaaccatctgatatctatagtagacacactatcatagttaacatagttaagttcagcacttgtctcattttaatgtaaagatttgcttccattttcctacaggcagtctctctcttcctcacagtcccactgtgcaggtgctattgttactcttacgaatattttcagtaatgttattttcttctaagtgaaatttctagcctgcactttgatgtcatgtgttccctttgtctttcaaactccaaggttcccctgtggccctctcccttaccctgggaaggcctcttggagaccttacccctggctgtttggactttgtatactttaaataatttaactacccttaattacttnnnnnnnnnnnnnnngctttatggattttcataaacttatttgcctgattttaatgggattggttaaatttcccgccctggcaggttttaatttttatggtttaagaatagggggcttggggcccagggaaaatnctcaggaacgtgccccccgcagcgcagagagtacattggggcggtcccgaccctccgccccctccaagaaaagccttctcttaaaaaccatttccctttggggggcgcgcggggccccccccataccgttaaacggaaacacgtgggcccaaggccgtggttttccccagaggaaagaaccccggggcgcctggaacccagaggccgtgggggattctcccccaccacac

SEQ ID NO: 6417 - DNA, 543 bp, Homo Sapiens
aaattcccaatcttttttggtccttttaggaaagatgtgttgtggtaaaaagtgttagtataaaaatgataatttacttgtagtcttttatgattacaccaatgtattctagaaatagttatgtcttaggaaattgtggtttaatttttgacttttacaggtaagtgcaaaggagaagtggtttcatgaaatgttctaatgtataataacatttaccttcagcctccatcagaatggaacgagttttgagtaatcaggaagtatatctatatgatcttgatattgttttataataatttgaagtctaaaagactgcatttttaaacaagttagtattaatgcgttggcccacgtagcaaaaagatatttgattatcttaaaaattgttaaataccgttttcatgaaagttctcagtattgtaacagcaacttgtcaaacctaagcatatttgaatatgatctcccataatttgaaattgaaatcgtattgtgtggctctgtatattctgttaaaaaattaaaggacagaaacctttaaaaaaa

SEQ ID NO: 6418 - DNA, 554 bp, Homo Sapiens
ctagtgttcacatgttcagctctgtttgtttagatgccaaggtttccattttcagggctataaaaagtattacttggaaatgaggcatcagaccaccagatgttaccgctcggttgaatgtgtccaccgtggagtggtttggtgacgctgtaaccattccacgccagtgacctctgctgggtcacagccactcaggaggggaagggtcaggatgagaggctgcagcctcgacacttggcgcggcctgatactgaaatagcgtctactcgtgcactgaataaaaacagaaacttgatcattttattcctgattagattttatcactctctgctaagacaatatagtctggagtataagtgggaaagcttgatttaaatactgtgaactctaataatgtggaaaatatttttcaactttaattttctgaagtataaattatttatgtaaattcattgtttttgcatatttcttaggacatgcatctttaagctttatcattgcccatatgtacagaaagagaataaagacatatgtttatggatggaacttcaaaa

SEQ ID NO: 6419 - DNA, 578 bp, Homo Sapiens
  misc_feature (63)..(63): n is a, c, g, or t
ccccccgcccggccccgccacatgctgggcttccgtcaaccttgttcacaccccgcagcatgngagagcattgagattgaccagaaagctgcaggagatcatgaagcagacgggctacctgaccatcgggggccagcgctaccaggcagaaatcaacgacctggagaacttgggcgagatgggcagcggcacctgcggccaggtgtggaagatgcgcttccggaagaccggccacgtcattgccgttaagcaaatgcggcgctccgggaacaaggaggagaacaagcgcatcctcatggacctggatgtggtgctgaagagccacgactgcccctacatcgtgcagtgctttgggacgttcatcaccaacacggacgtcttcatcgccatggagctcatgggcacctgcgctgagaagctcaagaagcggatgcagggccccatccccgagcgcattctgggcaagatgacagtggcgattgtgaaggcgctgtactacctgaaggagaagcacggtgtcatccaccgcgacgtcaagccctccaacatcctgctggacgagcggggccagatcaagc

SEQ ID NO: 6420 - DNA, 415 bp, Homo Sapiens
aaggtgagttaaagctggtggaaaaggcttattgcattgcattcagagtaacctgtgtgcatactctagaagagtagggaaaataatgcttgttacaattcgacctaatatgtgcattgtaaaataaatgccatatttcaaacaaaacacgtaatttttttacagtatgttttattaccttttgatatctgttgttgcaatgttagtgatgttttaaaatgtgatcgaaaatataatgcttctaagaaggaacagtagtggaatgaatgtctaaaagatctttatgtgtttatggtctgcagaaggatttttgtgatgaaaggggattttttgaaaaatctagagaagtagcatatggaaaattataatgtgtcttttttacaatgacttcagctctgtttttagctagaaactc

SEQ ID NO: 6421 - DNA, 789 bp, Homo Sapiens
  misc_feature (107)..(107): n is a, c, g, or t
tcccatgtgggttcccggcgtcaggaagcccaaaggctagggccgggtgctttcaagctaaaaaaagggatggttgcagaagaagtacaatgcctttttcttactcnactggtatcccaggacaccacaggaaatggctttactcaaccaagcggcagagattcttggtagatcaaggttatagcttcaaggtgatcacgaaactcgctggcatggaggaggaagacttggcgttttcgacaaaagaagagcaacagcagctcttacagaaagtcctggcagccactgacctggatgccgaggaggaggtggtggctggggaatttggctccagatccagccaggcatctcggcgctttggcaccatgagttctatgtctggggccgacgacactgtgtacatggagtaccactcatcgcggagcaaggcgcccagcaaacatgtacacccgctcttcaagcgctttaggaaatgatgcttaggcagggtacttcgttcaagaccggcgcttggcacccttgttggaaagggattttcagcataacattttccttccacctctttgaccttccctccagcgttggccaaattgtgctgaggaagatgcatcaagggcttggctgtgccttcataggtcatctagggttttataaaggaggaggagacaatattttttcaaactttttggggagtggggtcatttctgtatataaaaaatgttaatatttaaggtgtatttatgttaccgttctgaataaacagaatggaccattgaaccagtaaaaaaa

SEQ ID NO: 6422 - DNA, 772 bp, Homo Sapiens
aggcaagtcattgatatgagactgaggggtagaaagcaaaacaacagcagtgttcaaacaatcctaggcataaccagggccattgtccaaaggacagatgctttgggaacactaagagatgacaagtgacctcaagcagaagttaatgaaacaggaaccatttgcttcacttccccaagctcagcctataacagaaatcaaccacgtttatcagtaaaggctaaatggccttgtggcccatgtggggtctctgttgtaactcctgcactctactattttaacatgaaagcagccacagtgaacaaacaaaaggttggtcagatatgactcgtgaaccatagttagccagcccttgatctagaagaatcgtcacactttagagcctaaagaatctagataaatcctatcattctcagatgggaaatctgggacccagtgagggccatgactcacccagggtcaaagaccaagtggatgtctccctacccttaacttctggtagcttcctcaatgttctttgatagatttaagaaatagatggttaagcaagtagaccccagaggctgtatctaagacctctttccccaatctttcatgtttggaggggccactctgaaggcgggatccaatgggacacagctgtcctgggatcaggaaagagaggttttctaagccatttctgcttcgccaggtgttccctcagagtcaggccatcttcctgtgttctggccctaccatgaacaaactgtgggcatggggcaagtcaatctct

SEQ ID NO: 6423 - DNA, 619 bp, Homo Sapiens
aagctctctgtagctccggactaaagtcagttgtttgtgagcagaaaacggcagcagtcggctccaggtcatcactgagagcctgctgttattgcagcctgctcgaatcggatcccaagtatcccaccagctgctctttgactttgaagcttacaccaatctatgcacagaaatctacgcaccacagctacagaacaaccaagatactgccagggaagacgctagtggggcacaggtcgctgaatgtcgtagctgaatacagtagctaaggtgtctccatgaaaagtattatcgccagttgagtaaataaatgactcatggcctctcacttttatcccaactggaaaagcataagagctttttttataccaagatcaaacaaagccatgatttctgtttcactctgcattgggctaattgatgtttggacagttcaattctgataacagcagcgcacactctaattctctctgggaagtgaaggaaacactgccctgtattttcctgacttcaggcttatactctggcaatcttccaaaaacttcccatggctgcccatcttacttccaacaatccctgaactcaccgcagccccttaggctgtcccgcctcccacgtg

SEQ ID NO: 6424 - DNA, 392 bp, Homo Sapiens
cagaaactaaagagaatttccaaaaggagtctatggtgaagtctctgaggatgcaaagaagacaaggagaatgaaaatccaatgaaagcctgattgtatttgttgaccttaaggaaagtgattttatggtacagcctctctggaagggagggtgtgttcgctcacagaatgcaaataccctttgaccccctaatctttcttctaggagtttctcctacagataaacttagaagggtgctcaaataagtaagttcaaggatatcctctgaagcattgccgtagtataaaaaaagcacagataccctcaaaggacatcattaggggcctggtaaaataaattccacacagtggaacaccgtgtagctctttagagaataaacagctctctataa

SEQ ID NO: 6425 - DNA, 881 bp, Homo Sapiens
  misc_feature (74)..(74): n is a, c, g, or t
  misc_feature (142)..(142): n is a, c, g, or t
tttctactttaccgggtcacagggaacggccaataccaggaatggggctgggagattcttcagagctcagccgnattcacacgggtcccctcgggtggtattctcattcaacaaatgtccagaatcttcagaagcccgagcntagggacaagatggagagcttcttcctggggagacgctcaagtatctgttctggctcttctccgatgacccaaacctgctcagcctggacgcctacgtttcaacaccgaagcccaccctctgcctatctggacccctgcctagggtggatggctgctggtgtggggacttcgggtgggcagaggcaccttgctgggtctgtggcattttccaagggcccacgtagcaccggcaaccgccaagtggcccaggctctgaactggctctgggctcctcctcgtctctgctttaatcaggacaccgtgaggacaagtgaggccgtcagtcttggtgtgatgcggggtgggctgggccgctggagcctccgcctgcttcctccagaagacacgaatcatgactcacgattgctgaagcctgagcaggtctctgtgggccgaccagaggggggcttcgaggtggtccctggtactggggtgaccgagtggacagcccagggtgcagctctgcccgggctcgtgaagcctcagatgtccccaatccaagggtctggaggggctgccgtgactccagaggcctgaggctccagggctggctctggtgtttacaagctggactcagggatcctcctggccgccccgcagggggcttggagggctggacggcaagtccgtctagctcacgggcccctccagtggaatgggtcttttcggtggagataaaagttgatttgctctacccgc

SEQ ID NO: 6426 - DNA, 709 bp, Homo Sapiens
cttggagatgtcccgggggcctgcacgcccgtcgtacccacccgcatccccgcgatagtcagcctgagccgcggcccagtctcgccgctcgtgcgcttccagctgcccaatgtgctgttcgcctacgcgcatactctcgccctgtatcacggcggtgacgacgcgctgctctctgacttctgtgccacactgctcggcgtttccggagccctgggtgcccagcaagtcttcgcctctgcggaagaagccctgcaggcggcagcccacgtgctggaagcaggcgagcacccgccggggcccctgggcacacgaggggctatgcacgaggtcgcccgcatcctgctgggcgagggcccgaccaaccagaaaggctacacgctggcagcactgggggacctggcacagaccctgggccgtgcccggaaacaggccgtggctagagaagagcgagatcatctttaccgggcccggaaaaagtgccagttcctcctggcctggaccaacgaaaatgaggcggccctcacacccctggctctagactgcgccagagctcaccaagcccatgctgtggtagccgaggaggtggccaccctcactggggagctggagcggctttggggaggccccgtgccacctgccccaagaactctcattgaggagctccctagctgaacgggttaccctggtcattaataaagctgtgactggt

SEQ ID NO: 6427 - DNA, 525 bp, Homo Sapiens
ttcgtggctgcccagtgtctggtttccatttcgaaccgcgctgcggtgccggagcatggggtcgctccggacgccgagcggctgcgactacctgagcgcgaggtgaccaaggagcacggtgacccgggggacacctggaaggattactgcacactggtcaccatcgccaagagcttgttggacctgaacaagtaccgacccatccagaccccctccgtgtgcagcgacagtctggaaagtccagatgaggatatgggatccgacagcgacgttaccaccgaatctgggtcgagtccttcccacagcccggaggagagacaggatcctggcagcgcgcccagcccgctctccctcctccatcctggagtggctgcgaaggggaaacacgcctccgaaaagaggcacaagtgcccctacagtggctgtgggaaagtctatggaaaatcctcccatctcaaagcccattacagagtgcatacaggtgaacggccctttccctgcacgtggccagactgccttaaaagg

SEQ ID NO: 6428 - DNA, 417 bp, Homo Sapiens
cataaaagaactgcagaaaaaggaagaagagaatgctgacagcgatgatgagggggaactacaggatttgttgtctcaggattggagggtgaaaggggcattgttatagggttttaaagacccaaggtttctaacagcctctgctgttgtataaaaagtgctgtctctcagtagtatagcggttacttcatgcctcaagatttgggtacctggattgctaaactggattgttgagataaaatgagccagtgagctacagcactttggaaaatttgtgtaacatgtttttgaggtaaagttgtttttgaaatttctgaagtgttatataccaaaatgccaacttttccacgacagacttaactgtataatttcgttgtaaaatctgtaagttgtaaatattgtacatagttaaaaaaa

SEQ ID NO: 6429 - DNA, 526 bp, Homo Sapiens
ctgctctctgagttttgcacacgaagttgccctcatctgctggagatcgataaggaaggcacaagacgttctcctctgcccgtgaggagcttcccgcagccgcctggcccagcctgggcacgttctccgaggcatgtgtctccctgctcaccctcgtctgggcacctcagcatctgtggacttgagcgtccaaaaaccctgagtgtgattctgggcagccggcctggcttgaagtccgccatgaccctgggcacaggggaagcccagccgtgggcttaggagagagggaccagcgcccagcgttagggctggaagacggcagtgttcagaattccagccgctcatctgaacacagaaggtgtgaactgacctctaaagcagcgtgagatgggaatgatctagaaaactttggatttttgaagtaaattttaatgtttcatattaatttcttgaaaatgtattaaatgtcattgaaagccttattacgcttttcagatcctttcaataaacaagacttgtagaaaat

SEQ ID NO: 6430 - DNA, 432 bp, Homo Sapiens
  misc_feature (351)..(351): n is a, c, g, or t
ataaagtatttataaagagggatccagagtccctcacctggttcagaatcttgggtgacccttggcaggtcactaaccctgtgagccacagccacatttgtaaaagtgggataatagtcacacattgtgaggttgttcacagtgttggcacatggtaagggctaagacacttgattagcataatattcaaaattagaaattgtacactattgtactctctttcaaaaggcaaacagcctaaaactgtttggaaaaaacagcttgtacagtatattgtacacttcctgtgatagactagtggactgatacacccactaatgcacagcagtaatagtccacctctttacacanttatgcatgttaagtgacaaaaaaactcactttaaaaggccaaatgataaaaacatcagccttgaggctcttcgatataga

SEQ ID NO: 6431 - DNA, 654 bp, Homo Sapiens
gtctggatagaagatcatactagctacaacattgtcttaagcctaatccgaagcaaggccataccgcttttcagttctgttaagcctgagagaggtgaggaagctacagaagaaaggtctgaagctagcagttggttcatgaggtttaaggaaagaagtcatctccataacataaaagtgcatggtgaagcagcatatgctgatggagaagctgcaagttatccagaagatcaagctcagatcttccgtgaaggtggctacgtaaacaacagattttccatgtagatgactagccttctcttgggaagaagatgccatctaggacttctgtagctagagaggagatgtcaacacctgccttcaaagcttcaaaggacaggctgattgtcttgttaatgcagatggtgactttcagttgaagccaatgatcatttgatattcagaaaattttagggtccttaagaatgatgctaaatcttctctgcctatgttctataaatggaacaacagagccgggatgatagtatatctatttatagcctggattactgaatctcttaagccctctgttgagacgtactgctcagaaaaagactcctttgaaaatatactgctaagtgacaatgcgcttgcggaacctctagatagctatac

SEQ ID NO: 6432 - DNA, 446 bp, Homo Sapiens
agcccctgcacggcaccagttccccgagggacgcagcaggccgcctcccgcagcggccgtgggtctgcacagcccagcccagcccaaggcccccaggagctgggactctgctacacccagtgaaatgctgtgtcccttctcccccgtgccccttgatgccccctccccacagtgctcaggagacccgtggggcacggaacaggagggtctggaccctgtggcccagccaaaggctaccagacagccacaaccagcccagccaccatccagtgcctggggcctggccactggctcttcacagtggaccccagcacctcggggtggcagagggacggcccccacggcccagcagacatgcgagcttccagagtgcaatctatgtgatgtcttccaacgttaataaatcacacagcctcccaggagggagacgctggggtgcaaaaaaa

SEQ ID NO: 6433 - DNA, 493 bp, Homo Sapiens
aagacctgttcttctcggtgggcaacatgatccccaccatcaaccacaccatcctctgtgagccactctacgttttagccttggaaaccctcaccctgctatgagactttgagcaagaccaacccttctgtcagctccttgctccagagggcacacgagcagcgcttcttaaagtccattgctgagggcatcggccctgaagaacggcgccaaaccctgttgcagaagatgagcagcttctgacttggcgtggggagctgggccccaacatggcgggtctgcagaagatcagcagcttcttacctgtgcgggagcgaaaaagctgggcttcaacatggcaggtctgtaggggtcagacccgagcagcctggactttacagttatgtgaaactgtccacaaaaagtcatggcaataatggtgtaaagaaaatagtttcttgggtatttgtaacgtacaaactatcataaaaattctcctctttcgcaaaaaaaa

SEQ ID NO: 6434 - DNA, 571 bp, Homo Sapiens
gcggctttgctcctctactcagccgatgactcgggtttcgagcgcctggtgggcgccctggcgtcggccctgtgccagctgccgctgcgcgtggccgtagacctgtggagccgtcgtgaactgagcgcgcaggggcccgtggcttggtttcacgcgcagcggcgccagaccctgcaggagggcggcgtggtggtcttgctcttctctcccggtgcggtggcgctgtgcagcgagtggctacaggatggggtgtccgggcccggggcgcacggcccgcacgacgccttccgcgcctcgctcagctgcgtgctgcccgacttcttgcagggccgggcgcccggcagctacgtgggggcctgcttcgacaggctgctccacccggacgccgtacccgcccttttccgcaccgtgcccgtcttcacactgccctcccaactgccagacttcctgggggccctgcagcagcctcgcgccccgcgttccgggcggctccaagagagagcggagcaagtgtcccgggcccttcagccagccctggatagctacttccatcccccggggactcccgcgc

SEQ ID NO: 6435 - DNA, 454 bp, Homo Sapiens
cgtctcaggaaactttttaatgaaagtgtcggccacggtggtgtgtaggtggctgagctcagattgcagctgctaagacaccagccacttaccaagagaaagccaggctgcttcaaacccagggcccaaggcaaaaaagcatcacttccggccggggagtctggaagccacgccttgtgggaggtcacactggcatctaggccttcgcctgcattgcagaaggagagccaggtccccctcctggagaacgctgcgttccccagccccacaccggctttgccaccacacaggctgttgaggcaggaggtgggtaagacgtagctgtagacccaaagcaaccaccagccctgggaccctgcgggagaggagcacttttagaacatggaaaagtgtggtcatcccatcattagacagcacacatcctacataaataaaaagtcgtatggggaaggag

SEQ ID NO: 6436 - DNA, 570 bp, Homo Sapiens
  misc_feature (88)..(88): n is a, c, g, or t
ccagtgtaattgtcgagacagaggattggtcacctgctctgagtggcccaagcgagctagctgactctctcaatctccaagcagacanctttgtcttacatgcaagagggatccaattatgacaggctgacccagctggtctcatgtttggggtttatctactgagtaaggctgaccttacctgagtttctgtatgtgtatttgcaagacagttaatactaatccatcatccctcacagagatgtagaggatgagatgtagtaacttatagcagtgtcatttggaaaagttgaatttgccctacaaggcatgttctccattcaagggtcttgtgtaaacgtttgcagacacaggtgcagctttggagaactcacctctggctcttgtgcttttatgttgggacagctgcctaaattaggagctctagacctgttattggttcccaactgttggccagaatgaattcttcgaaaaatataggtggtttccagggaatttgaatgattgtattttgtgtccatggaacgtttatagacatggaggcaggcaataaattcctccaataatttt

SEQ ID NO: 6437 - DNA, 792 bp, Homo Sapiens
  misc_feature (484)..(634): n is a, c, g, or t
  misc_feature (640)..(695): n is a, c, g, or t
  misc_feature (736)..(745): n is a, c, g, or t
ttttgaggcatctgacaaagtcacaaagtctcagactagaaataattacccagtatgatcatggcatccaagaccagagtctcagaactcattaagaaacagtttacttggaatggagaatacccatctgtaatacaggtcctgtcatttcattcatctcaaattattttgaattcttcccaaatggctgctggatttaggtggtaataggggctgtgggccataaatctgaagccttgagaaccttgggtctggagagccatgaagagggaaggaaaagagggcaagtcctgaacctaaccaatgacctgatggattgctcgaccaagacacagaagtgaagtctgtgtctgtgcacttcccacagactggagtttttggtgctgaatagagccagttgctaaaaaattgggggtttggtgaagaaatctgattgttgtgtgtattcaatgtgtgattttaaaaataaacagcaacaacaatnnnnnnnnnnnnnnnnnnnnnnnnnnnnnnnnnnnnnnnnnnnnnnnnnnnnnnnnnnnnnnnnnnnnnnnnnnnnnnnnnnnnnnnnnnnnnnnnnnnnnnnnnnnnnnnnnnnnnnnnnnnnnnnnnnnnnnnnnnnnnnnnnnnnnnngagaannnnnnnnnnnnnnnnnnnnnnnnnnnnnnnnnnnnnnnnnnnnnnnnnnnnnnnncgccgcccgcccccaagaaaaattttaataaaaggtttgtnnnnnnnnnncggcgcgccaaggaagaaagaaaaagaaggttttaacttctttcccc

SEQ ID NO: 6438 - DNA, 385 bp, Homo Sapiens
gtggatggggacttgtgaatttttctaaaggtgctatttaacatgggaggagagcgtgtgcggctccagcccagcccgctgctcactttccaccctctctccaccgtgcctctggcttctcaggcctctgctctccgacctctctcctctgaaaccctcctccacagctgcagcccatcctcccggctccctcctagtctgtcctgcgtcctctgtccccgggtttcagagacaacttcccaaagcacaaagcagtttttccccctaggggtgggaggaagcaaaagactctgtacctattttgtatgtgtataataatttgagatgtttttaattattttgattgctggaataaagcatgtggaaatgacccaaacataaaaaa

SEQ ID NO: 6439 - DNA, 481 bp, Homo Sapiens
tttatggaataataatttaatgctcactgtggccctgactgaaagtcaagctcaggcacaattagggccatggctgggctcccaccaatgaggatacaggcaggcaaggaggttggatgtggtggtgtgggatacaggagaagggcaaagggagctcataaatagggcccagcctggctctgggttcaaaggtggaggttccaggatggcacaggctgtgagggctaggcagctgaggaggtagtactcgtattggctcccttctcccagtcctctacagacacgatggtggttttgcagaagaagcagtccttgttgttcatcaggtgctggttgatacaggctttgcaggacttgtggccacagggctggaacacagcagagatggggtgggcatagcagatggggcagaggtcctcctcactggtgggcagggaggcagctgctgcctgggcagatgcagaagtcaggtgcgcccatc

SEQ ID NO: 6440 - DNA, 340 bp, Homo Sapiens
tttggatacttggaagtctaagtgtatttaaggatagaatgctatggggttagaggtagcagaggctgggacagaacttgtctgttctgccccctttcacccctcctgttctttgccttatgtccaacccatcacttgctggggtagtcagcctagttgaacaggtttagacaaccctagagttctctccaggagaattaatactgagaaggagaagttctaccattgtcactctggtgaagcacagattctaactcagaggctctttgccttgaggggcatcttccctctccttcaactcatcagaacccttagttctgggcttggcacttcttcgagg

SEQ ID NO: 6441 - DNA, 1063 bp, Homo Sapiens
acttaggaacaatgaacggggtaaaaaagaggtggtcggtccggaattcccgggatatcgtcgacccacgcgtcgcttatgactatgaaatgattgaagttgtcttgaaagttatagaacgagctgatgaaaagataaccaatattaatattaatcaggcattgagtattctgaaacatttgaagtcatacagaagaatttctcctcccgtggatctagaatatcagtatatgttggaacatgtcataactttgccatcagctgcccaaactagactgccttttcacctgatattcttggcacagcacagaacttctggaaaattctctctacagaactcagtgaagaatctttcccaacattgctcttaattggcgaaattaatgaagttctctctggacactctgtacgtgtctacagcaaaacacgttttcgaaaaaaaactgaagccaaagctcctgaagttaacacaagctaaatcctcaacactgattaacaaggaaataactaagatcacgcagaccatcgaatcctgcttactctctatagtcaacccagagtgggctgtagctattgccatcagccttgcccaggatatccctgaaggttccttcaagatatctgcttgaaattctgcctttatttagctgagagatggctacagaatatcccatcgcaggacgaaaacgtgaaacagccgaggcttgttgaagaagcttccatatccagtacccggcgacggggcacagaaagctgtggtcatagccacaaggctgcaacatgagactacttaagagtgatcggacagccggccattgaataggagacctacgaacatcctagatcatcaaggacttcggatccactggcagactatcgaattcatgcgagaaaggacaggccacaaggactacggcaaagccggccgtcgcgacatggctgcgcgtccacccgcgacaccgactgagccggaaagcaccggggaccggccgaacaacgcgcgccacaccacgacccgcacccttgggcacaccacggtctacattcgcggacgattctacag

SEQ ID NO: 6442 - DNA, 576 bp, Homo Sapiens
tgtgtgtgcacgtgtgtgtggctaaattaagtcatactgtcaaccacacgtgatctcgtctgaaacagtgttttggaagtggcataccagttttgtcctgtatgctgatgtgtccagaatttcatttaatgatagacggaaaatgtgtggttactcgaaaactgtatatgatacagaatttcataaggagccatgctgttgggcaaagcaactctttttcaaccactgctcatcagtttctgtagagacaaaaactctgtacatattttggaatcctcgaagaatcctatgtaaatcatttgttacttaagtctgtgaaaaacatatttctttggaggaaaatgtatgcatttataagtgttccatggaatcagtttttattgtatcgatataattgtctctaagtgttgactgtcttcattgcaatatgaaattcattaaaatgtccatattccataattactattataaaagctttgtgttattgggagtcttattatttttatagtttttcatgttttgctttggtgaaacatggaatgacaatataaacatcacgatgactatgcgtcttaa

SEQ ID NO: 6443 - DNA, 867 bp, Homo Sapiens
aattctaatcaatatttcatcattgctgtcaatgatagcctgttactaatgaaacaacattatgtcccagcactaaagttactgggacataaatttttcacatggagccaagctcttcactgattaagccaatgcagaatccacttgtgggcagtcagtgcccattaccccctgtgaaccattctgtgcccttgagtacatttgtgggtttaactcagtctatattcttaagttggtaatttttatgttgtaattctcaaagttctgtttctgtagctggactatgaataatacctgaatatgaagattgtgttttttaataatgtcaaagtggtgtgttgattatcataaatgttattaattcaaccccacagtttcttgggggctggttcctcattagagtgaaaggtagccaagagtgaaaactggaaggggcctaaggcttaaagtcttaagacctggatgtggttcaggttttgccatctgcctcagaaaaaatctcttcagttcttggagccttgaattcctcatctgttaaacaggaggaagaatatctacctcacaaagttcttatgagataatgaatataaaaatgtttcattctcaggttgtgtgagatcatcccagcttatactaataattacaaaggacatatgtactttaacaatggagaatatctgttgatttacctcttcaccgagtaacaaaatgtctacattgcttagattgtagacagcccacatatatgtgccaccttctgcgatgtaataagctgaacaatgttcatacctgaatttaatcaagcttcgtggacctcattgccaggttacaggaaatacaggaggcagagacagatataaagactag

SEQ ID NO: 6444 - DNA, 396 bp, Homo Sapiens
aaatgaggggattaatggactgtagttctggacaaggtggaaaactcttaaagtggaagtactggggcaagtgctctgacagggtaggatggtgcagtcagtcccttcacccagaaatcagtagaatgttagcagttcagactcaaaccttgtgaaaaacaggtggtggaaaggaaatccctcacagcaactggcaccataatcaagacaatgtttacagaataaatggagttacctgctttcagccccaggtcgtagctattgtctgccctgctgatatgtgataataatttgtgatcctgttgtcttaaaatggggtcactcatctccagtagaattaagtccacagtgaagttgtccccccatccccaaagagataaacatattgaatgtact

SEQ ID NO: 6445 - DNA, 612 bp, Homo Sapiens
tgagatgcatagtgggaagatgagttgaaataattgatatggaaaacaatctctaaagcaagatcaatgaggaactgagggatgagcataattgcaagaaattagccttgcacatgaagaaggatagaagataaaggatgcatgtgggtgtaggcaattttttaggtagaagaatgtgaaaaagatgtttcatgcttttcatataattttctattgagagtagcagattatgttatcagatgaattaagggtgagagggtagagacctggatcagcatggagaaagtgaaattagctgcagggaggaatgagagagagggcaattaagaatagctaaataagttgattaaaggccttagagataggaaacagttaacttgttattccattatacagaattgagtgatttttttcccctaccaccaatgctcaattacctgtgtgtaaattgaataagacagacaattggactgatcctgtttagagtttacaggacatgtgcaaatgaagaggcaacaggtgacaagggttttgaggccactagcaataatgtaattaaagtgtgggcttttgggcttaggctgaagtgggttgggaaggcaagtgagacct

SEQ ID NO: 6446 - DNA, 624 bp, Homo Sapiens
tccgaggattctaagagcatagtcatcgtggacgtgatgttggtgtgttcacatttgatcatggcatgggttactttgaaagttgcaatatacacagaagataggatagcaggctttgaagtaaaagcctatgctaaccctacagtggttcgatgtgaaattcaccatgggcagactggaggaatatatgtccatgaaaaaggaagcaggacaattcatagagaatcaaaatctatgcaaacaacgtgtgcaggtgtatggattacctcaaatagtgcacccaacacataaggggaaattctatatttaatggcactcaaggcggagtttacatctttggtgatggacgaggccttattgaaggaaatgacatttatggcaatgcattagcaggaattcaaattaggacaaacagttgtccaattgttcggcataacaaaattcatgatggccagcatggtgggattaatgtgcatgaaaagggacaaggagtaatagaagagaatgaagtttatagtaacactctagctggagtctgggtgacaactggcagcactccagtactgagaagaaaccgtgatacacagggctagcaggtgttttatttttatgactatggacatg

SEQ ID NO: 6447 - DNA, 816 bp, Homo Sapiens
gaaggtaatggatggaaagatgaatgaaagaatgaatggagggatggatgtgacccagctgaagtgtgagtaggaacattctcttattatgggtgcaggaaagagagaggagattgagaaaataagataaaatacattgatgagcatcatttttggtgttcgaaaagtaggattgaattaggactaataaatctagagaattttacctctttcaatgcccaagccacacttttctatcactttgaaaccgaaaaagtaaatactttcccaacatttgctttgctggtaggaaatgctttaataaaaatgcaatctctaagttgccatggcatcattaaaagaaaggatgtcatgcccaggtccagaacttgaaggtggcaggcaccagcaagcaccatagctctgaatgggcctgccttacaggtcctcactccaacactgctcacttcttccagcttgaaaatggagaacatgttcacaccctgggttgtaagtaggaggaactctgatcagcaagaagcttgcagaggacaatatgaggcaatagtattttactggccacagtgtgactgggttgcactctgttctgacattaggaagaatttcatgcctgggcaaagtcaaagttttttcctttagtcacattactcaaagaataagttgactatatcccaacagcacttggccaaattccaggactccacttacgactattatgaggcaaacatctgcctgtgcagtttgtctttccatccagtctattctttggggtccagatccttgatcattctcacacccagtgctatctgcctcatt

SEQ ID NO: 6448 - DNA, 945 bp, Homo Sapiens
ttccactaaaattgcatttattttcctgtcatagtaaaaaaaggaaaaacagtagcaaatactgggcttcgttttccccctcaacggcacgccttccacaacagcacaggtggttctctgcttcactggcagaaccacacaagcttatcctagagaaaatctgctgtcgtaagtccacaaggaagagttgactgggcccaccgctatagccaatacttccagaatcaccagcccaccttcgtcaaagggctgactgtggcagcaaggggtgtctgtcacattcgtcctggctcactgagcccaggcctcatcgtaccctcagctgtgacatctgtactaccattgcctctgcgtggtcctctgggcctcacgccagccatggcagagtgtcccaaaggttctcaggagctgtttaacacactatgtcaaataccagcttcccccgaaaactggagatgcgtcttgagtgcactgagttgggcatcagtcccagaagtttccattaaatgaaagcgaatcccattgcagggtagggcctgggggaggccactgttggctgctctttggaataacaatgcaatgactgatcatttcccttgaacacaggccaggaacgtgccttgtgtgtttaggtgggtgtcagaacatttctcttaaaagttaagtcatattttaggagggaaggaaggaaccatattgcctttctttggaatggaaaacccatctcggatgattgactttagacaggccttcccctctgcgaagaccacgaggcatttttcagtaaggtataaagaactaaactctggcagacactgtggaagcccacgccttatctttagaaagtccattgtatgctcctcacacacggcagacggcttctgtgccgtgcaaagcactacatgctcatacagcattctaatgctgcagaccctaaagggctag

SEQ ID NO: 6449 - DNA, 448 bp, Homo Sapiens
cctttgtcagcgcccagaacacaggcgtggtggaagtggaggagggcgaggtgaacgggcaggagctgtgcatcgcatcccactccatcgccaggatctccttcgccaaggagccccacgtagagcagatcacccggaagttcaggctgaattctgaaggcaaacttgagcagacggtctccatggcaaccacgacacagccaatgactcagcatcttcacgtcacctacaagaaggtgaccccgtaaacctagagcttctggagccctcgggagggcctggctactgtgcctcaacggttcggctcctcaacagacagtccctgcggcagaagtgggtgtggccgtgagcctctgcaggctcaagagtgttgtccagatgtttctgtactggcatagaaaaaccaaataaaaggcctttatttttatggctgaggattttgaatatt

SEQ ID NO: 6450 - DNA, 567 bp, Homo Sapiens
  misc_feature (24)..(24): n is a, c, g, or t
ctttatgttgatacattgatttanaatgtagtgtctgtgatttatagctcttaggatgaaggaaaatgtttaatttatacaaagagcagtattgtttgcattaatttattccattttgtaaaaattctgtagctggactacatgaaagatcttaagttatggcattattatcattgttattttattttataatattatcattctcattttctgtcgatcagaaggtgtgatttatgatgtggcacaatggttgtgtttattgctaaccaggaattattatggattttatgattttaatgaaggaatgaaaatggaattcccatttgggagctccctggtattgatcttagctgtgttccctaattttctgtgtacaacaatcatctgaggacgcatgttctgccctgaagcccaatggatacattgtgattttgacttgatcatgaaagctcctgggtgggccgatgacccccaggatgtcaaatagtggatggacatatagttaaaaagctgtaaactttctaaagtttcttaggaaataaattcatgggactatattagaaaaaa

SEQ ID NO: 6451 - DNA, 475 bp, Homo Sapiens
aagccgtccgaaggcattcttgttagctttgcttttctccccatatcccaaggcgaagcgctgagattcttccatctaaaaaaccctcgacccgaaaccctcaccagataaactacagtttgtttaggaggccctgaccttcatggtgtctttgaagcccaaccactcggtttccttcggattttcctccctttgttcggggtttggtttggctcctctgtgtgtgtccgtatcttgttcggtgtcctcgaggttgagcttcactccactgcggcagaggcagcgtgcacactcggatttgctacgtttctatatatcttgaagctaaatgtatatatgagtagtttgccatgagataacacagtgtaaacagtagacacccagaaatcgtgacttctgtgttctctccatttgagtattttgtaatttttttgaaatatttgtggacataaataaaaccaagctacactacaaa

SEQ ID NO: 6452 - DNA, 593 bp, Homo Sapiens
taagctccacacctgtcaggattctgttacttctgggtaactgggacttgcccaactttaaaaacattatttaaaaaaatagtaatgtgcacatgtaaaagattcaaatagtatatatacaaggtgtacagtaaaaagtaaactccttcccatcccaggcctgccagcatccctgatgccgactttctgggtgtggcctagggcccctcagtgtaatgtaggggttgtgagcacagactttggtgccagtttgctaggttcgaatcctgactccctctttgtagctctgtgcttcaattgaaatactgtgcctcagtttctcctttataaaggcagggatcatgagagtgcctgtcccttgtgagcactatgaaagtgttagctgttctttaccagaataaatgcatttctatatcttcccatatgcattttgttaatttttaaagtatttcaaacacaaagtttgaaacagaaaattgtgtaacattaactatgaacttaccacccagaatttacaaatgctgacattttgcaatatttatttcggatctatttttaagggggggaaccctgcagttactgcttaatcctct

SEQ ID NO: 6453 - DNA, 521 bp, Homo Sapiens
ggggccccaccccacgcactgaagaggccgcctgggctgccatggccctgaccttcctgctggtgctgctcaccctggccacgctctgcacacggctgcacagaaacttccgacgcggggagagcatctactgggggcccacagcggacagccaggacacagtggctgctgtgctgaagcggaggctgctgcagccctcgcgccgggtcaagcgctcgcgccggagacccctcctcccgcccacgccggacagcggcccggaaggcgagagctcggagtgacggcctgggacctgccactgtggcgtgcggctcctccccgcgccgcgaggccgcgacctctgccacgtggaccgcgcgcggggcgctccctggtggcgatggcgcggcactggccgagcactgcgggggctttcctccttgttggttgctgagtgggcggccaaggggagaaaaggagccgcttctgcctcccttgccaaaactccgtttctaattaaattatttttagtagactctgga

SEQ ID NO: 6454 - DNA, 294 bp, Homo Sapiens
aagacccagaggacactaaccaaggtatctcgggggagctttgtgccttgatggatcaagttcatcatatgcagcactcaaaatggcagcatccttcggacctcaccacgcgaaactacgcccgccgacagaaacatctgcaaagatacagtctgactcagtgggttgacaggaacatgcgaagccaccatcggttccagcgtctcccagacttctcgtacagttaatttgtgtcatcccatcagcaatgaaggtccctatccagggtcctgcttggagcagcatttcatgttc

SEQ ID NO: 6455 - DNA, 827 bp, Homo Sapiens
  misc_feature (90)..(99): n is a, c, g, or t
gcctttctatattttgacacactgaatcaccatgtccgagtttgttccattatgtatgatggctcatgtttggggatgatgaatcatgannnnnnnnnnctgagcccctgcctcccggcagggcctccctcctctcctatttgggtttgagctttgctaagcaccacccctgctctgtgttgggtgctggggcatctcccagaatgccccaccatctgtgaccccataggaggaagaaggggctccggggctctcatttgctgaggccttcagaggcatgagctcatgccatccttgcaaacctccagcaaaatgagtgtcgtatttctgtttacagatgaggaaacagagaagttaggtgccttgttcaatgccctagaggtagtaagtggcagagctgggattcaaacctagaaacacctgtctccttgtagcatgcaccatgtcagactctggagaagccttttgtggattgtctctgccatgagacctcacagaccctaggagagagatgctgtttgctacggtctgaatgtttgtccctccaaaactcatgttgaaatttaattgcccttgtagcagtatgaagatgtgggggcctttaagcgatgattaggccacgagggctctgcctgcagggatgggattaatactgctataaaaggccaagttcagtttccttctgtctctctttgcccttctgccttctgctgtgtgctgatgcagcaagaaggccctggccagaggttggggtttggggttaggaaggccttggactttccaagccccagactgtgagaaaataaatttctgttcattaaagagta

SEQ ID NO: 6456 - DNA, 846 bp, Homo Sapiens
gggtgtggaaggacgctgcatgggaagggtgcttctcatcctgacttggtgtgctcctctggccaggccactgcgggtaccacttcctaaatgcctgactcctacaacacaggctttcatagctttccctgtgcctgactcctgcaacataggtgacttctgtagcatctgtctcctcattgtgcagagggtcagccgaacccggcagtcagtcctctcagctgactttacagtggagtgctgtcagttaggctcctctggtgaccagtttcccctggcactctgtaaaggcagctttgtggtgagttctaagacacagcgcctccccgtggatggcttcccccaacattcagaaggtgggtttccagcgagtttggccagcatggaaccttggtgacttctctgccacgcggcgagccatgtctgtgccttctccaaaaaggtcttgatctcagccgtggtgtgcgtaggtatgagggccaggagctcttttttaggtgttctatctgagtccagggaatagtggctgtaccttaaaaatgctatcctgcacgctttagagttcttctttagagttctctttacttttcactagccaagccctcattactctaatcccctgaaatagtaattctttgtattgaactttcctgttcaaattactgtgtggtttctgtcacctgattacatttctatccctagtttgcatttttaacctaagtcggttgaaaattttgttaactttaaaaaatctatttaggtgaacacatactttttcttctttattctgtgcatgtggtgcactaaatgaatagatttaaaaatacttaacttcacgccaggcac

SEQ ID NO: 6457 - DNA, 1027 bp, Homo Sapiens
  misc_feature (105)..(139): n is a, c, g, or t
attcccgggatcgctgaatgttgaggactacgcgcggcccaggcctgggccccccgctgctccaggccgcgctgggccttgggcgggctgggtggcactggcctnnnnnnnnnnnnnnnnnnnnnnnnnnnnnnnnnnnctggctgcagcccacgggccgggagacgggtgtgcaggtgtacaacagcctcaccggtgaggaaggaacccctaatcgtggcgcacgccgaagccgcctcctggtatagctgtggaccaactgtatatgatcatgcgcaccttggccatgcttgctcatatgttagatttgatatcattcgaaggatcctaaccaaggtttttggatgcagcatagtcatggtgatgggtattacagatgtagatgataaaatcatcaaaagagccaatgagatgaatatttcccccgcttccctcgccagtctttatgaggaagacttcaagcaggacatggcagccctgaaggttctcccacccacggtgtacctgagggtaaccgaaaatattcctcagataatttctttcattgaaggaatcattgctcgtgggaacgcttattcaacggcaaaaggcaatgtctacttcgatctgaagtctagaggagacaagtatggcaaattggtcggcgtggtccctggtccagtcggagagccagcggactctgacaagcgtcatgccagtgacttcgccctgtggaaggcggccaaaccccaggaggtgttctgggcctctccctggggacccgggaggccgggctggcacatcgagtgctctgccatcgctagtatggtatttggaagtcaactggatatccattcaggtgggatagatttagcttttccacatcatgagaacgaaattgcacagtgcgaagtctttcatcagtgcgagcagtggggaaattattttctgcattctgggcatttgcacgccaaaggcaagaagaaaaatgtccaatcattaagaactactactattaggacttctgagactttccccgagtctccgg

SEQ ID NO: 6458 - DNA, 1032 bp, Homo Sapiens
cttcgcgaatgctgtatccttgcgaactgtatagcggattaagattgaacacaaatccacgtgtggggatcccttatagagcaagcctggtctgtattcgtcgtcgtctgaatgggacaggccgactcggtgttccacaggaaactgaacatacagctctcagttgagagaaaagatggggtggctgttcagcctgcccctggatcagacgagatggatcctcgtggtatatgtggtctgtctgccatcgctggtggtgcaggccgatctcattcacgtatgccagaaggagcctgccgctgtcatcaaccaccgggccggtctgtgccattcccaagttactgatggaaaccacttcagtgaaggagccctgatctttttcatacttcatctggcaagccgatgcatatcggttgcagcccggcactggattcagaggccgacacacgttaatgtagtatttcctccacgtgacatgttcccctgagttgtccatggcataccagtttcctccaaggccaccttcagattttgccagactggagaggtcgtactgctccagcgtggaggggtcggtcactacgcattccaggggctcctccgggcaggcatagctggtgtaccaccggaagttgtaggtggagttatcctcttcctgatattcagggaagcccactcccgtcgtctcgatcacagagaaaggtgatgagcgtagctctcggtgtgtgtctttcattgttatagggtgtgccgcctctgtagttcagttggatcatcccatcataatatgaaagcttcgcattactcagacccaagttccaagtcttctcatcactttttgccacctggcaggctcctgagtctggctgacaggggctcacagacaccgggccacacacatttatataaaagtcatacttctttgtctcaactttataggcaccattattctttgtgagaggtgataagtcaaaagaaaaccctgcctgggagtcaaagacaaagaagtataaagcgttgaggggtaccgag

SEQ ID NO: 6459 - DNA, 616 bp, Homo Sapiens
cttcttcgacagcttcactcacagctcatctctgtctttgcccctgcttggctgtctcacaactgcccagatcttccttgtctgccagctcctctgcctgctctttcactgttggggtttccttgggctctataatccatctccgctagtcccaacacaggtgtcgctgcatggtcacatctgttttagtggctttaactgttgtctgaatcagaggttcttaacttaggctccatgattcatggatgggcttctgggggtccctttgttctctgaaattgtatgcagcattgggagtagtgtgtaattttcctgggcacaaggtctgtagctttcaacagattttcaaaggggctcttatccttaacaatgttacaactattcatcctaaatttccagattttcatttccaactacactagatacagctcctcaagtttctttaacctgggttagctgtgtgaagtctatatttttcagattgttactgatggataatttgaaaaacaataaataaagatcaagtataattggctttacatagaccaccgatcttaaaatcttaaaaagattttaaatagtcacttattcttatcaggtgacagccttacagatc

SEQ ID NO: 6460 - DNA, 516 bp, Homo Sapiens
cacacctggggggtgtggcagagggcagacttactccttcatccactctgctgccttgatgaggtgaacacactggaataatatggagggcaagatacctgccaaagcctgaggcttgagatgatctgaaacaattgggcaacaggctggacatttcaaaaagctgacttccaactgcagtttatgggtatagaatttgatgcttccctcaagtcctgactgctctttctgaggcagccaggctaggccaagaaatgagctgctccagcttctccagagcacagcagcctcccagggcctgtcagcatctgcagcagctgggaaggaggtcccagctcttctgagacataggccatttgtaggattctccagtgctccaattcactaatgtctcctaatggctcagaacaggctaaagcttctcccaagataacccctcccccaaaactgagtcctcagggacagttgttaactgaatgacctccaggttatctacttggggaggtgcaggacatg

SEQ ID NO: 6461 - DNA, 230 bp, Homo Sapiens
ttaaagtctgtacctttgatcatcatcttcccatttcctcctcccctcagaccctgccaaataccattctaattctgttctgtttctatgagtttgacttttttagattccgcatgtgagaacataaagtatttgtctttctctgtctgacttagcataatgccctcaaggttcatccattttgttgcaaatgacagaatttcttacttttctttgcctgaaataatatt

SEQ ID NO: 6462 - DNA, 494 bp, Homo Sapiens
gcagcagccaagatgtacagtaaagcctttgacagtggcataatccccatggagtatgtgaacaagatgaagaaggaagggaagctgatcatgggcattggtcaccgagtgaagtcgataaacaacccagacatgcgagtgcagatcctcaaagattacgtcaggcagcacttccccgccactcctctgctcgattatgcactggaagtagagaagattaccacctcgaagaagccaaatcttatcctgaatgtagatggtctcatcggagtcgcatttgtagacatgcttagaaactgtgggtcctttaatcgagaggaagctgatgaatatattgacattggagccctcaatggcatctttgtgctgggaaggagtatggggttcattggacactatctttgatccagaagacggtgaagccggggctgtatccgtcatccgtgggatgaattatttcatatgttcttccggaaacacaattgagcatgtaa

SEQ ID NO: 6463 - DNA, 565 bp, Homo Sapiens
ttccctctaaacaatgcatcaaagaatgcactcgctgcaacgtagccctctgttctgcacacagcacgggggccaaggatgccccgtccccctctggctcaagctggccgggagcctgatcacctgccctgctgagtcccaggctgagcctcagtctccctcccttggggcctatgcagaggtccacaacacacagatttgagctcagccctggtgggcagagaggtagggatggggctgtggggatagtgaggcatcgcaatgtaagactcgggattagtacacacttgttgattaatggaaatgtttacagatccccaagcctggcaagggaatttcttcaactccctgccccccagccctccttatcaaaggacaccattttggcaagctctatcaccaaggagccaaacatcctacaagacacagtgaccatactaattataccccctgcaaagcccagcttgaaaccttcacttaggaacgtaatcgtgtcccctatcctacttccccttcctaattccacagctgctcaataaagtacaagagcttaacagtgaaaaaa

SEQ ID NO: 6464 - DNA, 542 bp, Homo Sapiens
agctacattctgcgcagggaggaagagaaaaagcaatttctcgctccccttcccaagtccttcctgtccaccaccacctcggatgtccccgcacacagccttccggtgagcggccgtgccgtcccctcctctctctaaggcattggggagcagagggcccataggcagcaccctgcgaatgatataaatgatctacgtgtgaggagagggcaaggggctggatgcaggcagagaatgactttaagaaaagattctatgatcccttcctttagtatggagctcgattttccagctggcgcttggtgagaaagtacttgaagaactcatagacagaccaagaaatggcggtggagggcatctggtagatgacacgcgcctggatgcctttgaagtagccggccaggccgttgagctggtacaccgtccggaaggcattggccatacccgacagccggccgctgatgttggccagcgagagggccacgttctcctgagtgttcagaagggtcttacagacgtccaggggggtcgtggcggccgca

SEQ ID NO: 6465 - DNA, 707 bp, Homo Sapiens
gcggccgccgccgcgtacctggacgagctgcccgagccgctgctgctgcgcgtgctggccgcactgccggccgccgagctggtgcaggcctgccgcctggtgtgcctgcgctggaaggagctggtggacggcgccccgctgtggctgctcaagtgccagcaggaggggctggtgcccgagggcggcgtggaggaggagcgcgaccactggcagcagttctacttcctgagcaagcggcgccgcaaccttctgcgtaacccgtgtggggaagaggacttggaaggctggtgtgacgtggagcatggtggggacggctggagggtggaggagctgcctggagacagtggggtggagttcacccacgatgagagcgtcaagaagtacttcgcctcctcctttgagtggtgtcgcaaagcacaggtcattgacctgcaggctgagggctactgggaggagctgctggacacgactcagccggccatcgtggtgaaggactggtgagagggtcctggggtggcatggggctgggaggagcggggtaaggcagaggggagagccagctggggaaccccccgcctgggggtgctgcctccccactgcaggggttgaggccacgtgggccacgggtctgcaaaggttgacaacttccgtgttttgcaggagaacctggaaacccagctcccctcctgagttttaaatgttggcaa

SEQ ID NO: 6466 - DNA, 545 bp, Homo Sapiens
gcagtcctcccggctttctaggtgcgcggggctgtcgtgttccagtccgtgttccccgtcgctggagtgcagcttaagtgcgaatcatttcttggaaagtttagagataattttgtcaactacccacaatatgtatgtgtggactagattactttcttatttcaggatctaaaggcaaaatggaaaaacgtcacattttgtggttattaccagggactgaagtgagttgcccggtggcccctggtggctttagctcccctggtcacctgaagggctgcagtgacccctcctggccagcagaggtattggcccagccaggctgggggaggctgaaactgcttcccttctctgcagccacaaagggctggattccttgggcgccaggaggggaggatttttcttttccctccgatagccctactgggcgctaagattgttgtgaatcattaccctcagaatttggactttctagatgcttcttaacccatgatttaggtgagtaaacttggaaaaatgtttttgcaaaacttgatgatcaagctgaa

SEQ ID NO: 6467 - DNA, 472 bp, Homo Sapiens
agatatgtttctgaaaacctgtagtttcttaatttaagtccatccccttcattaacgctacagttgtgactcacactgatcccaaacttttaagtgctaaatattaacatttagcattaactgtcttgtcaagcgaaaggccttctctacaacctagtccatctcacttctggtgctacctgagttggacagaattctagctcatggttgctaggaaagctaggcctctgatcatagaagcagatagcttcagtcccagtctaggcctagataaatgactcttattaccacaacccttattattttccaatttcctttctcacatactgtacacaggtagtattttcaatgtgaatccaaagcttgtctggttctctgaaaataattttttcccctttaggttctttacattgtgataatgctgtatttaaagagaatatttaaatgtaatattaaagaaatattcaaaaga

SEQ ID NO: 6468 - DNA, 577 bp, Homo Sapiens
ctgaacagtatgaaattgaggtgaccgtcatcagcccggctacatccacaccaacctctctgtaaatgccatcaccgcggatggatctaggtatggagttatggacaccaccacagcccagccgaagccctgtggaggtggcccaggatgttcttgctgctgtggggaagaagaagaaagatgtgatcctggctgacttactgccttccttggctgtttatcttcgaactctggctcctgggctcttcttcagcctcatggcctccagggccagaaaagagcggaaatccaagaactcctagtactctgaccagccagggccagggcagagaagcagcactcttaggcttgcttactctacaagggacagttgcatttgttgagactttaatggagatttgtctcacaagtgggaaagactgaagaaacacatctcgtgcagatctgctggcagaggacaatcaaaaacgacaacaagcttcttcccagggtgaggggaaacacttaaggaataaatatggagctggggtttaacactaaaaactagaaataaacatctcaaacagtaagaaaaaaa

SEQ ID NO: 6469 - DNA, 820 bp, Homo Sapiens
ttgggacccgttgtcccggtcctggtctttcccccggatctagtattcagggcggacgggcggagcggaccccgacagctgctgaccctctataaccccacaggaactgcgcttcgcttccgagtcctgtgcacagcacctgccaaatacacggtgtttgacgcagagggatatgtgaagccccagtcttgcattgacattgtgattcgccatgtggcacccattcccagccactatgatgtccaggaccgcttccgcattgagctgtctgaggaaggagctgagggccgagtggtgggacgcaaggacattacctccattctgagagccccagcgtacccccttgagcttcagggacagccagatcaagcgcctcgcccaggccctcatgctcacacaccaccacccacaggccagacacttccaggagcacccccgccagcaactggccaccagctccttcctcctcttcttgctgacggggattgtgtctgtggccttcctgctgctcccactcccggacgaactcggcagccagctgcctcaagtcctgcacgtctccctgggacaaaagttggtggccgcctacgtcttgggcctcctcaccatggtgttcctccggacctgagctccgtgctcaacccccagcccaccccaccctccctgggcagggtcttgaggcagccactgtgatgctcataccttaccttgcctcctaccctcttctctttcctgcctactccccactcctccctgacaaaaaacacccagggatttgtactcattttccaagttgaataaaatacatttttaaaatgat

SEQ ID NO: 6470 - DNA, 420 bp, Homo Sapiens
tctacagatgacgctaaatcagttggggtctactctaaacagcattgtgtgtaagaagcatcctcaagctcccagttaagtaacttgactacttttatttgggaatttcagactatagaagctctcttatgttttatgtccagattctgtgaccactagttactgtatcagaactcatcaggtacccacttataaatagcactgatctggctgtatactgatccatcactaacctgttttctaggacccagcgtatgtagcatttgtattgcagtttccctggcttacttgtgttttgcactgatgaattttgacagggtaattgccactttacttgtgcaatactgctgtaaataactgcagatttttaaacaatcttttatgttaattttataaaaataaaactttcaactagtaaaa

SEQ ID NO: 6471 - DNA, 697 bp, Homo Sapiens
cacggttgtcctggctcgagaactggcaacctccagagaatatgcgattaaaattctggagaagcgacatatcataaaagagaacaaggtcccctatgtaaccagagagcgggatgtcatgtcgcgcctggatcaccccttctttgttaagctttacttcacatttcaggacgacgagaagctgtatttcggccttagttatgccaaaaatggagaactacttaaatatattcgcaaaatcgggttcatccgatgagacctgtaccccgatttaacacggctgagattgtgtctgctttagagtacttgcacggcaagggcatcattcacagggaccttaaaccggaaaacattttgttaaatgaagatatgcacatccagatcacagattttggaacagcaaaagtcttatccccagagagcaaacaagtttgttgaagaaacaagtcatttgcatctgtgtggcgttgttgaacatggtcctctctcctggccactacatcacattcagagttgattctcccctccctgttcagagactggtggtgggtgttctttatccggcatctctctgtgacagcagcagcatttgtggccataattggcctaaattcatgaactcattagagagtgcagaaaggtcacagcctgatacattcatgagatgcaattcattaaagagcaacttctccccagc

SEQ ID NO: 6472 - DNA, 288 bp, Homo Sapiens
aaaagaaatctatttcataccatggaggaaggctctgttccacatatatttccacttcttcattctctcggtatagttttgtcacaattatagattagatcaaaagtctacataactaatacagctgagctatgtagtatgctatgattaaatttacttatgtaacttttattgtctttggcattaacagtgtttcaaaaaattttctgtgtatacccatcagtgattcattcccaaatcttctagaagcataagtgtctcaatatattaaaacatattgaataatca

SEQ ID NO: 6473 - DNA, 717 bp, Homo Sapiens
ctgtaggccagcgtgaggaagaccacggtcctggatgtcatgaggcggctgctgcagcccaagaacgtgatggtgtcacaggccgagaccgccagaccaaccactgctacatcgccatcctcaacatcatccagggagaggtggaccccacccaggtccacaagagcgtgcagaggatccgggaacgcaagttggccaacttcatcccgtggggccccgccagcatccaggtggccctgtcgaggaagtctccctacctgccctcggcccaccgggtcagcgggctcatgatggccaaccacaccagcatctcctcgctcttcgagagaacctgtcgccagtatgacaagctgcgtaagcgggaggccttcctggagcagttccgcaaggaggacatgttcaaggacaactttgatgagatggacacatccagggagattgtgcagcagctcatcgatgagtaccatgcggccacacggccagactacatctcctggggcacccaggagcagtgagtcccccaggacagggaccctcatctgccttactggttggcccaagccctgcctgactgaccaccccctcagagcacagatcagggacctcacgcatctctttctcatatacatggactctctgttggcctgcaaacacatttacttctcctcttatgagactatttatctttaataaagcactggatataaatcaaaaaaa

SEQ ID NO: 6474 - DNA, 462 bp, Homo Sapiens
cctcactgcagtgtgagttggacaaaaataatataccaacaagaagttatgtttcttacttttatcatgattcactttataccacggactgctatacagccaaagccagtctggctggatctctctctctgatgctgatttgcactctgctggaattctgcctagctgtgctcactgctgtgctgcggtggaaacaggcttactctgacttccctgggagtgtacttttcctgcctcacagttacattggtaattctggcatgtcctcaaaaatgactcatgactgtggatatgaagaactattgacttcttaagaaaaaagggagaaatattaatcagaaagttgattcttatgataatatggaaaagttaaccattatagaaaagcaaagcttgagtttcctaaatgtaagcttttaaagtaatgaacattaaaaaaaaccattatttcactgtcattta

SEQ ID NO: 6475 - DNA, 641 bp, Homo Sapiens
gtgccgctccgtgcactgtctctgcccccagaggaagccctgtccatggttcctggtgcacggccacaggcctgccttgaggccaccacatctggtgtctagaacagctgcgggccccacttgggcagaaggaagaggtgctagctgctgcccctgcctgctgtgaacacctgcccagcccttccttgtctgctgaggtgctcagaccagagtgccattaaataccaactgatgtcacggagcggacggtgcattgccaaggactcacagctgtgggctcccttccagctcctcccactttcttggctgggtcttctgaggcctacgtggaatgaactacacatgtggcctcatgcccaagggtttgttagatggcctctgactctgtgggattcaacttgacttttttgccccaggaggctctgtctggaaacaggcttagctttagtgctggggtgggacctgccctgtgggccccagggaggggacagtgggggtgaggccctgaggctgtccagggtctgagctctttgcctccaacctgcttctgccccaaaaggaacaggctgttggtggcaggctcctcccggggagctgtactgtacagaccaaggtgtaaataaacagtttgctcttctaaa

SEQ ID NO: 6476 - DNA, 325 bp, Homo Sapiens
  misc_feature (139)..(139): n is a, c, g, or t
  misc_feature (149)..(151): n is a, c, g, or t
  misc_feature (157)..(158): n is a, c, g, or t
  misc_feature (165)..(165): n is a, c, g, or t
  misc_feature (168)..(168): n is a, c, g, or t
ggagcgacaacttgtccccaccctggccgtgcgtccttccctctccagctggttaagagggatttagaattcccgttctctttttttagtgcatcgtccatgccaaagtgtgcggcccttcctgacatcaccacagttngagcagcctnnngcgtcnngcagggnagnccgccccctcctccccaccatcctccctacctccttaactttgtactagactggcctgggcctgcccagctcagcgttatcagtctgtttcatattatttattattttaattttctattaaattattgaaataaagttaagttgagaaactgaaaaa

SEQ ID NO: 6477 - DNA, 545 bp, Homo Sapiens
  misc_feature (416)..(424): n is a, c, g, or t
ccgcccgcacccctaggccctctcagccttcctatcatcccacgtgtctacccagacccttgtgcggcccatgccctgggggcggcgtcctgtccctgagctgggaggcggctttggatggtccgggcgtcaagagcaggggtgggccggggaggggtcctttgcggtgagctatgtttacatgacacagtgtgccaaagtgacttactgcggttgcgttagtttctagtcatcaggactatctcaccctcccactcctgtttttaaaactcagaattctttcctaagagcccttcgagcaaagcgtgccgaagttagttgtcttctctgtgctggtcctttcttatgtcctcataaaagctcagatgatggtatctgtgagtatgttttgcaaattcaaaatatagtttggtaannnnnnnnnccagttgatttttaaaaagaactgctgtacagagcttgtactttgtccattttatagatggaaaccatccttgaaaattgtttaacttaaataaagagaagatactttctagaaaaataaa

SEQ ID NO: 6478 - DNA, 1179 bp, Homo Sapiens
cggcgcctctggaagggaaccgctctgggccccgcctttgatctcgttggtggggctgggggatgagagctgcaccgcgcgggacaagtcgccggcggcgcccgacggagcagaacagagagcatggagctggagaggatcgtcagtgcagccctccttgcctttgtccagacacacctcccggaggccgacctcagtggcttggatgaggtcatcttctcctatgtgcttggggtcctggaggacctgggcccctcgggcccatcagaggagaacttcgatatggaggctttcactgagatgatggaggcctatgtgcctggcttcgcccacatccccaggggcacaataggggacatgatgcagaagctctcagggcagctgagcgatgccaggaacaaagagaacctgcaaccgcagagctctggtgtccaaggtcaggtgcccatctccccagagcccctgcagcggcccgaaatgctcaaagaagagactaggtcttcggctgctgctgctgcagacacccaagatgaggcaactggcgctgaggaggagcttctgccaggggtggatgtactcctggaggtgttccctacctgttcggtggagcaggcccagtgggtgctggccaaagctcggggggacttggaagaagctgtgcagatgctggtagagggaaaggaagaggggcctgcagcctgggagggccccaaccaggacctgcccagacgcctcagaggcccccaaaaggatgagctgaagtccttcatcctgcagaagtacatgatggtggatagcgcagaggaatcagaagattcaccggcccatggctcccaaggaggcccccaagaagctgatccgatacatcgacaaccaggtagtgagcaccaaaggggagcgattcaaagatgtgcggaaccctgaggccgaggagatgaaggccacatacatcaacctcaagccagccagaaagtaccgcttccattgaggcactcgccggactctgcccgagccttctaggctcagatcccagagggatgcaggagccctatacccctacacaggggccccctaactcctgtcccccttctctactcctttgctccatagtgttaacctactctcggagctgcctccatgggcacagtaaaggtggcccaaggattaaagtaattaaag

SEQ ID NO: 6479 - DNA, 530 bp, Homo Sapiens
gggggctgtgtaaacacagtcaaaataattctaaatccctcgatatttttaaagatctgtaagtaacttcacattaaaaaatgaaatattttttaatttaaagcttactctgtccatttatccacaggaaagtgttatttttaaaggaaggttcatgtagagaaaagcacacttgtaggataagtgaaatggatactacatctttaaacagtatttcattgcctgtgtatggaaaaaccatttgaagtgtacctgtgtacataactctgtaaaaacactgaaaaattatactaacttatttatgttaaaagattttttttaatctagacaatatacaagccaaagtggcatgttttgtgcatttgtaaatgctgtgttgggtagaataggttttcccctcttttgttaaataatatggctatgcttaaaaggttgcatactgagccaagtataattttttgtaatgtgtgaaaaagatgccaattattgttacacattaagtaatcaataaagaaaacttccatagctaa

SEQ ID NO: 6480 - DNA, 794 bp, Homo Sapiens
  misc_feature (518)..(518): n is a, c, g, or t
  misc_feature (526)..(668): n is a, c, g, or t
  misc_feature (670)..(670): n is a, c, g, or t
  misc_feature (678)..(679): n is a, c, g, or t
  misc_feature (683)..(683): n is a, c, g, or t
  misc_feature (689)..(692): n is a, c, g, or t
  misc_feature (695)..(696): n is a, c, g, or t
  misc_feature (699)..(709): n is a, c, g, or t
  misc_feature (728)..(739): n is a, c, g, or t
ggacttaaaattcctgtacatactgcaaatatttctttaaattgcacaggaaaatgagcgaactttttatttcttaatatctttggcaaaaaactttaaccagtaagcaattttataaccctgagggatcatcaaagatactatcctgattcctggtaaggaaaaatatattatttccttataacaaggcaaggagaaatgctattttattcctgataatttatataactagaataatttttttcctttcttttatggacctaaatctgccaattgggaattttgtgcatgaaatatgaagttactttttatagataatcagtgcttttaagtccctaaaaggctcctgctgaagtaatgatgatgttaataataaaagcctttgaaaggctgaaaacctacatagtggtaccatagtatttggagcttctataggagtggagaggggcagctcattgttgagagttgcatgctgcaacctaatggtcagcaatgaaataaatacttgtagaatgttncaaaaaannnnnnnnnnnnnnnnnnnnnnnnnnnnnnnnnnnnnnnnnnnnnnnnnnnnnnnnnnnnnnnnnnnnnnnnnnnnnnnnnnnnnnnnnnnnnnnnnnnnnnnnnnnnnnnnnnnnnnnnnnnnnnnnnnnnnnnnnnnnnnncncccccccnncccnccaacnnnnccnnccnnnnnnnnnnncccttgtgggcgccgcctnnnnnnnnnnnnagaaaagatttttctacaaaaaccctcttcttgtgggcgcccgcgcgcgcccccc

SEQ ID NO: 6481 - DNA, 741 bp, Homo Sapiens
  misc_feature (557)..(557): n is a, c, g, or t
gggataactcttttgcatttagatcacatgagagcaaagactaaatatgtcaaaattgtggagaagtgggcttcagatttaaggctgacaggaagactgatgttcatgggtaaaataatactgattttactacagggagacagaaacaacctcaaggagtacttgattcttcagaaaacctccaaagtagatgtggactcaagtggaaagaaatgcaaagagaaaatgattagtgtactgtttgaaacaaaagtacagacagaacacaaaaggtttctggcatttgaagtcaaagagtattcagcgttggatgaattacaaaaggaatttgaaactgcaggacttaagaagcttttctccgaatttgtacttgctctggtaaaatgaaatggaagacaggaatcttttagtaaaatagcagtgttttttgttgtttttgcattggatttggggagtggttaattgaaatagtcaattttaaagtttctctgaagcaaaatgataggcatcattctaacttcaggaacaaaagccagttctgttttacgaaatattanacatgaagaaaacttgtatattctaatgtttgccaggaaaggctaggttcagtagatgagacattatttaaaagataaatttaaaaagatggtaaatgaacacttgtttttatagacaatatttgtttgaaactatgtaattttctggctaattttcttgtaattaaatgattttttaaaaaag

SEQ ID NO: 6482 - DNA, 1058 bp, Homo Sapiens
  misc_feature (732)..(732): n is a, c, g, or t
ttttaaagtggagattctgaagtggaaaataggtactgtcagaacaaagctacctggaaacagcatagagtgaagcctttcgtgagggcttgcaggccgcatgctgagtggcagtttacagaagaggtcgcggggtgagcctcttagcaggacagaaaacaaggcagcagcgcaccatgccaccccttcacgagctgctccttgagcctaaaaagtaggctttattcatcccttctgttcatttaccaacctgggggattgatacgaccggggaaaatgttcctaaaccaggaagctgcgttagccgatcaggctttgtaagatctcgccaacagctagctgcttaggagtacccccacgatacgcacagcacaccactgtcccttcactgcactttcttcctgccttaggtagttgggcttgcccaccctagtttgcttttgtagtggtttggcaaggttagaaggcctcggcctctctgtcatgctgggaagtgcctactctctgggccactgctgcagaggccgtggcacttgtcatgggtttggaagacccagccatctgcagcagaggcagcctatcccattgcaaggagaggaactgaacggagtaattattctactcttctttttacataaatgtttatttaaatattctaaattggattttctttcacagatactgattattctttccagttcttaaataaaactgcacttgatttcactcccncgacagggagcgcgacagcaaacacccgagcgcacaaaaaccagacccaacacttcccgaccacaccacccacacgaaagccacaaggcggggcggcagagtcaccaacacactcagcgttatcaacatcacaccttatgtgcgcggcgtccccactatcgtacccaggcactccgaggcctcccccctgcgcactgaagcgagtcgccggcataccctgccccttgggttcaaccgagaagaccccggagtccacacctagcccccgttcagggaatgataagcactcacgtggctctagtaagaaccacccgcgcaacctcatc

SEQ ID NO: 6483 - DNA, 1715 bp, Homo Sapiens
  misc_feature (945)..(973): n is a, c, g, or t
  misc_feature (1460)..(1519): n is a, c, g, or t
atttggtggagaaatcccaagccattagttcagggcccggggattttcctggggaaagcaagctatggcccatgtttccctttacctactggggccggcggcggcaaacgaaattggttttagaaagctttttcggggggccagggcgggccgacaaaaggagaggaactgggtgatggttttcggcggaaggttgggtgggtgtttttggcattttgtgatcaaatttattttttgtttaaatttcatttactttgttttactgtaatttacacaagagactggcaagtaaactaggtattttacattcaccacacattccctcaaatctccacagttgttagaaaaacattaaaatccatgcgccgggctctcatttccatgtgcgcctaagctcccaatgatactacagatgccagcgagagttaagttcattaaaaggagagggctagactctttatttcacaaaattagcaataatcttcctcgcaccaaacactttgcagacaatgattatgctctgacaaaacctatcttacaacagtgcccagagagtaaacatcagtctttatcctgagtacacaaaggatgtatgaaatgtgggttttgttgctgaggataacagggtattgcaatgcagtagtgatcctacacatccttccttgtctgattcactgaaatcactccagtgggggagggatgcaggacatgtgggaaaacgaggagcaggcagggcaggactgtcagcaaatcagattactaatgtggatttgactgcaggggttggcgtgttttaggagggacaggaggttacaaaagacagtttgtgacctgaaggcttcaacaatataattctattcaagcttccaggactgacagaggaaaaactggattcagacagagaaagctgataaaaatcttacctagctattgttccttcctttnnnnnnnnnnnnnnnnnnnnnnnnnnnnngtggcagccgtttctgaccagcactctcatgatgcctattcagaatctgtcctgatgacgtcctacttgagagcacatcccacagtcagatgtccaccagtctcttggcggggcctcctcaccgcacgcaggccagactcacactgcatcttaaactgttcctatctcaaagtcactatctcctccttgaagtgtgtgttcccacaagaagagcaaaatgtcatcactaactatatcctatcatgtgagctctgaggaaatagaccatttgcatagtttccaagctgtagttacagaaaactgtcatcttcaaaacaagactccatgaagtgctatatttccaacttttctacacagcctacaatcctattaagactaatttcttcatcaatgtgtttgtctaacaggagcctgaaaactgtctagtatttattataaatcagaaaccgtcatctccatttttgctaggtttgatgtagaaaaatannnnnnnnnnnnnnnnnnnnnnnnnnnnnnnnnnnnnnnnnnnnnnnnnnnnnnnnnnnnccctcagggcaaacaagtaaaaactggcctgtaactttgctccttactttatattgtcaaatttggctacaagataatgaccatccagaaataaatagttataaatacattcagagtttacatcccagattcattggaacaccaaaaaattttgaagaaattttctgtgggagtctactgcttatgggactaaaaa

SEQ ID NO: 6484 - DNA, 870 bp, Homo Sapiens
  misc_feature (65)..(142): n is a, c, g, or t
  misc_feature (711)..(712): n is a, c, g, or t
  misc_feature (717)..(723): n is a, c, g, or t
  misc_feature (725)..(735): n is a, c, g, or t
  misc_feature (737)..(740): n is a, c, g, or t
  misc_feature (770)..(770): n is a, c, g, or t
ggagacggaaatgtccgaaggccgcagtacttgaccctgtattttgggagtcgaacggagaatgnnnnnnnnnnnnnnnnnnnnnnnnnnnnnnnnnnnnnnnnnnnnnnnnnnnnnnnnnnnnnnnnnnnnnnnnnnnnnncggtcacgagttaaacaggtgcttgcagatattgctaagcaagtggacttctggtttggggatgcaaatcttcacaaggatagatttcttcgagaacagatagaaaaatctagagatggatatgttgatatatcactacttgtgtcttttaacaaaatgaaaaaattgactactgatgggaagttaattgccagagcattgagaagttcagctgttgtagagcttgatttggaaggcaccagaatccggaggaaaaaacctctgggggaaagaccaaaggatgaggatgaacgcacagtgtatgtggagttacttcccaaaaatgttaatcacagctggattgaaagagtatttgggaaatgtggcaatgttgtttatataagtataccacattataagtctactggagatccaaagggatttgcgttttgtggaatttgaaacaaaagaacaagcagcaaaagcaattgagtttcttaacaacccaccagaagaagcaccaagaaaaacctggcatatttcccaaaacagtgaaaaataagcccattcccagccttaagagttgtggnngaacnnnnnnnannnnnnnnnnnannnnaaaaacttgtccgggcggcctccggccttnaagaaggcttttctaaaccattcgttttgccgcgcggggcccagtaaggaaagggacctgggccataacctgtttcccataggaaatccctggccatgaa

SEQ ID NO: 6485 - DNA, 732 bp, Homo Sapiens
  misc_feature (377)..(403): n is a, c, g, or t
ggggctttcggttttggctgggatcatccgcggcggccgggctcgtggggcgcctggagtgagggttctggttcccgccggcgaggattgttaaaatgagtcttcggaagcaaacccctagtgacttcttaaagcaaatcatcggacgaccagttgtggtaaaattaaattctggagtggattatcgaggggtcctggcttgcctggatggctacatgaatatagccctggagcagacagaagaatatgtaaatggacaactgaagaataagtatggggatgcatttatccgaggaaacaatgtgttgtacatcagtacacagaagagacggatgtgaagacaccaagagagcaacgcttttcatagttggatatannnnnnnnnnnnnnnnnnnnnnnnnnngcttcttttgtgatacaatttgtcctctttttataatagttggtgatttttcactgacatgtgagtaagataaatgtatacaattgtggatttaattgtgaaatgttctttcacttgtaagtttcagtcattttcttttacctcgttgtcagtgtacagaatgctaaaataattaaaaaaagacaaaatatacctcttcctacaagattatttaacttaagtttcgagaagggtcatttcatttgacttgcttttcttatccagctaaaatgatgcatatattttatatattggatggacatataattaaaacattttggagggaaaac

SEQ ID NO: 6486 - DNA, 1204 bp, Homo Sapiens
  misc_feature (686)..(687): n is a, c, g, or t
  misc_feature (693)..(693): n is a, c, g, or t
  misc_feature (741)..(753): n is a, c, g, or t
  misc_feature (916)..(924): n is a, c, g, or t
ggccatcatcctaattatatgctattattcagaatgccaagtattatttttattcccaaaatcagtctggacatttactactttttagactttttgacgttgaactttctgtataaaaattggctgggttttgagcttttggtaagaaataaaagccgattaagcactggccgccccgcggctggtacccaatgcccgagtcactgtggcagcattcgcactggtgtggggagtcctttcaactcaaggaggctgggtttctgggcaccctcgaagttttctggatgtctttttatctttctcgtgtgaactgcactacaaaagagaccagcccgcttcccaagccagccagacacctgggtcttgagccataaactggcgtagttaagctttgcagcttccagtgtattttatttattcttttgttgggtttttgtttgtttcttcttgtaaaattgtacagaaactttttaaaagaaattggattcgaaactggatgtgtattcgtaacctcataatttttatttgtgtattgtttcttttattatttcagttaaatttttacattattttgcatgtatatttctttgtacagagaccttacatgtttacacagtatgatgtgatgtaaatattttattttgccatcagttattttaaaaaattaaacatatttgcctgaaaanntaatcncacaccaagccccacacaccaaaaaccgagaccaaaacaaacacctgnnnnnnnnnnnnngtggcgggaagaactcctgcccatcaaaaaagcctttttcacacccattgcccttggaatggcgggggcgccccagggggaaaaaggggacaattggccaaaaaagatgcttgtcccaaaggaaaaatgcggggggcgggtaccctaaagggcattcggaatnnnnnnnnngcaataaaaaaagaacgccccgggggaaaaaccaatactcgttttagtgaaacccctccccagacctggaagttgcccatgacccccattcacgggagaatcccaaccgaccgggtaattccccaagaaagacaccctcttatcaaaaataccccccctacgccaccggcccatgtaatatacgccgaaaaagtggggtcgcacgccccaaaagtgagttatcgggcgcaaccatgaggaacacattccccacccgcgggttggtcatgaaaccttttct

SEQ ID NO: 6487 - DNA, 1176 bp, Homo Sapiens
cagtactataacggtcctaaggtagcgaggcctgggtggctgcattcggcacgagggttacttggctcggagcgggcgaggggacgcgtgggcggagcggggctggccagcctcggcccccatgacccgctgtcctgtgccctttcccagcgatgggcgtgcagccccccaacttctcctgggtgcttccgggccggctggcgggactggcgctgccgcggctccccgcccactaccagttcctgttggacctgggcgtgcggcacctggtgtccctgacggagcgcgggccccctcacagcgacagctgccccggcctcaccctgcaccgcctgcgcatccccgacttctgcccgccggcccccgaccagatcgaccgcttcgtgcagatcgtggacgaggccaacgcacggggagaggctgtgggagtgcactgtgctctgggctttggccgcactggcaccatgctggcctgttacctggtgaaggagcggggcttggctgcaggagatgccattgctgaaatccgacgactacgacccggctccatcgagacctatgagcaggagaaagcagtcttccagttctaccagcgaacgaaataaggggccttagtacccttctaccaggccctcactccccttccccatgttgtcgatggggccagagatgaagggaagtggactaaagtattaaaccctctagctcccattggctgaagacactgaagtagcccacccctgcaggcaggtcctgattgaaggggaggcttgtactgctttgttgaataaatgagttttacgaacccctcattaccaccacttcttccaccgctcatttaatggtggccggtccaaatcgctcttctaaaagggggcggcccccttctaaaaattttcccccccgaggggcccccaactttttaccgctatccccaagcttttttttggaaccaaaaagggggcccctaataaggggagccgccaaatcaaaaacctccaggccccttggcccgcctgatttttacaaaacaactccaacacatgtgggagaaacaggcgtattgttgacgaaatcacatattcaaaaacggaaacccctccattcttttgccggccggagaatcaatttttgggcgtgacgcactctctctatgagcgtacgtttaccggtctc

SEQ ID NO: 6488 - DNA, 553 bp, Homo Sapiens
  misc_feature (85)..(85): n is a, c, g, or t
gtcacaactacgtactagtcgtgtcatcgaagtcataagttactgagatggagagcaacaagtagagtcgacgtacacgtattantcattcaacgaatcattattgagtcaccattgacacgcactattctaatcagtagttcactttaatatttaataagattttctgcgataacagtaagggatattagataatataccgtatgtatttattactagtcttttcctctaggaaaagggatactttgataattaaagccagaggcccattagttgagaaagtcacagatatatttctccaagaaagccaacaaccaccaccacaatgacagaaatgacaacaaggccctttaacttgtcttctagtttagagacatccttcatttgacatttagtagaattcctctttggccacaagaataagcagcaaataaacaactatggctgttgaggttctcattttggtttgttttaattttttgaactttgggtacctgtaattagtttaaaaataaagttcctgataataaagtgactgaaaatggcatcccca

SEQ ID NO: 6489 - DNA, 1137 bp, Homo Sapiens
tttggacaacagaaataaatcctagaggacaaaattaaactcaatagagtgtagtctagttaaaaactcgaaaaatgagcaagtctggtgggagtggaggaagggctatactataaatccaagtgggcctcctgatcttaacaagccatgctcattatacacatctctgaactggacataccacctttacgcaggaaacagggcttggaacttctaagggaaattaacatgcaccacccacatctaacctacctgccgggtaggtaccatccctgcttctctgaagaagtgaaagagcactgatttcagcagctaagaaatgggctcttttaaggcgatttagacattgcagattgttccacagagaaggtaccttagcatttcctgttaataaggtacctaattaagactaaagtccccagaaatggtaaagaaagaatcacctttctgggctgggagagtaaaatccttctttagtgactagagtgaggaaccctgaacttctatttcatctaaagagccatgaagcaagttcctgtgtggtctgcagaacttggataatgagatgaaaaaacaagaatgaaattataggaaaaaaatcaagaggaaaggagtaagaagaaaataaaagttatcttaaaaaatatttctttagagtgtgtggttcaggtggactggtccttggtagtatggtccattagtatctgtaataattaggtttgaatggcccatttttgttgagtcccagatattttgcttggtcatctgtcagctctgtaaggtgggcatcaaatgatggcagatgcaagctggcaacgtattcatccattttcttaggaagcaagtacacatcctgcttgtatcgcccctcgggtgcattatagagttctatcagtgccaaagcctgtgttgtggctgtgatggacagaacaaaggtgggaactgtggagcagctcaaattgagtagacgaccctctgccaggaggacaactcgtttgccatctggccagatgacatggtccacctgagaacgtactcgctcccacgtcagctccggagtgcggaggctggtcacatcgatttctgtgttggagtggcccatattgcatacgatacaactgtttttcatgcgatccc

SEQ ID NO: 6490 - DNA, 1244 bp, Homo Sapiens
  misc_feature (513)..(522): n is a, c, g, or t
  misc_feature (801)..(825): n is a, c, g, or t
ctgcctttgaaaagtgatcatgttcactgcaatgctggaaaactacgtgtatctgtccttggtcaagcagggaccctctgaacacttcttgtggccctttttttctttcaccctgtggtttttctaatggactttcaggaattttgtaatctcataactttccaagctccaccacttcctaaatcttaagaactttaattgacagtttcaattgaaggtgctgtttgtagacttaacacccagtgaaagcccagccatcatgacaaatccttgaatgttctcttaagaaaatgatgctggtcatcgcagcttcagcatctcctgttttttgatgcttggctccctctgctgatctcagtttcctggcttttcctccctcagccccttctcacccctttgctgtcctgtgtagtgatttggtgagaaatcgttgctgcacccttcccccagcaccatttatgagtctcaagttttattattgcaataaaagtgctttatgccggcttttctccnnnnnnnnnncgcccggggccaccctaacctttctgaccacgtccagatgaagttccagcgcccctcattacatcaataaacagccagtcccgcccgagctcaaataatgaaataagagccaataacttgcctccccgcgcgcaccatcggcccgaaaaacacttttcccgcaactcttcgttcggggcaccgcggtcccccaaacgagggagggtgaccccgggactcccccccgttggttccaaaggaaaaaatctggtccccagagacctaaaggagtttgtcggnnnnnnnnnnnnnnnnnnnnnnnnngcgcccgtctatgggagacgacaccccccccgcgactttttctcccccaacggttttttacctagaaggacgcaccgtccccgacgaaagtctcctctactccctggggacttttccgcgcccgcgagaggatgcccccacgagcgggcgtgccctctaataaataaaatgttccaccgcccccccttttctgtttttcccctcttcgttttcccgaacaacgcgggtgttaaaccccttgtacaccccacccctatcttctggttataaggaaaaggccgtataacatagaggggggggagtgaatcacacccgcgacaccgcgccccccaccttgttgacgcggggcccggccgtgggcaaagccgtgagaccccgccgccgccgcaacaaaattggggctagagataccaacgccc

SEQ ID NO: 6491 - DNA, 731 bp, Homo Sapiens
  misc_feature (498)..(536): n is a, c, g, or t
  misc_feature (538)..(547): n is a, c, g, or t
  misc_feature (554)..(556): n is a, c, g, or t
  misc_feature (558)..(559): n is a, c, g, or t
  misc_feature (561)..(562): n is a, c, g, or t
  misc_feature (564)..(570): n is a, c, g, or t
  misc_feature (572)..(572): n is a, c, g, or t
  misc_feature (574)..(574): n is a, c, g, or t
  misc_feature (576)..(578): n is a, c, g, or t
ggggagctatccttagacaaagaaaagtcaagtcatgaaagaagtccttgaagatataccaagaacattcatcagtatcattcgtgtttggatttttaaggccacctgatttcttcgtcatgcattcggcatttgctaaatgacagttactacatcaatctgcaactatcaaaaatgaggggaaaaggttcaggctgttaacaattccatgcagtatttaaatacatttactttggcagagtttataccctccccttgttttcttgctttattctgggcaagtttgaaggggaaaatttgtgctgctgttagtgcaactgctgtgtatgttgagccactgttgtcatgccagccaggtgcaaaggcagcttagctactgaggtagcgaatgttctgaggacattctagacaacagcttagttcctttttcaggctcatttgcttttgcttttttgttgaatgattccaatcgtaaataaagcttttaataattttaannnnnnnnnnnnnnnnnnnnnnnnnnnnnnnnnnnnnnncnnnnnnnnnncacaccnnnannannannnnnnnananannnaaaattggggggccgccctgggcccctcaaaaacttttttaaaaacctttggcttttggggcgcgggccccccaaaaggggaaagggaaacaggggccaaaaccttgtttcccaagagaaatcccggggccatgaactaagggcgttggaatt

SEQ ID NO: 6492 - DNA, 1475 bp, Homo Sapiens
  misc_feature (83)..(83): n is a, c, g, or t
  misc_feature (113)..(113): n is a, c, g, or t
cactgttgaaaacaatgacttttattacttaaagccagcactagttcccattactctcataatgttatagttaaggcttgatntagttccagaaaataaatagggtaaatttntaatatttccctagctctgtctgctatagggaatttcagagtatgaaggtaagatgaagcagatatataagaacatttttagataatgacaatttttccttaaaatttggtgaaaatttagtttcttctcaaaattctgtacttctatccataaaagtaaatttctattttagtagctctgtaagaactaggccagagaagagtattacccataatagtaaatagcaaatactttggcaagtctgaattagagtacaagtgaagacattcacaaacacactttttacatctcctggatgtggtacgggctgtatgttagaattaaagcatcacaactatctgactgtagggtgctggtgggcaatgcaatcaatcaacacgtctaccccaacagatgtggagacgcatggaaaaaatacatcaaccaaagtggtcagggagaacaaaacacagaaaacaccataaaactgaagacattatctcttcttgtctgaaaaaaggggttccctggagcacagaaagtatttatcaggggagtgcttctattctgttatcacaggagggcttgatgcagattctggccattcatacacatctggcagcagggaatcatattcactccgccatgttctttctttaacatatttggccttgtcttcaggttctgggtatcggaaagccattttattagcatataggtattctgtaactttaatagcaatgttaatagaaacttcctgaatattagcaaagcggtgggtaaagtctcccttgggctagctcttcatctgtcaattggcttgtcagggcctttgcagcttctaggaaaacactgtcactaatatgccgggtgttacagagaataacagctaaagccacacctggaaaaatataaacattgtttccttgacctggtgtaaagactcgcccatctgtaagtttcactggcccaaatggactgccactggcaaacaaacacctgccctctgtaagtgtatatgcttcttcagccgtgcactctgcctgtgctgtaggattacttaatgcaaatattacaggcctttcattgatagaggccatggctctgattacatcaggagtgaaaagacggccagcacctgcaactccaattatagttgaaggcttcagtatattcactgcatcttcaaaagtatcaggtatgctctctggggctgagtgagtaaatggttcctgataactatctacttttgctttccgtcccttaactaataaaccatacttgtcaaacatccagattttcttttgtgcctcttgttctgacaggccattttctaccatagacataactataagatttgcaattccaagagcagcctcccc

SEQ ID NO: 6493 - DNA, 1830 bp, Homo Sapiens
  misc_feature (868)..(868): n is a, c, g, or t
caactatgaatttattaacagtaagttacaacaaaagcaaatagcaacttcaagatcccttagtaatcatgacaaggaaacatcccaacatggcttactgagctaggaaaaacctgcccatttttcttgtccttttgatacccggcaaatgctcttttatgtaactgcatttgatcgggaccgagcaatgcaaagatttactttgataccaacccagaaatcaacccagtctgattctcaagatagcagagttgcacctagattggatagaaaaaaacgtactgtgaaccgagaggagctgctgaaacaggcggagtctgtgatgcaggacctcgcaagctcacggccaatgttagaaaatccagtatgaaaatgaggttggtacaggtcttgggcctacactggaagttttatgcgcttgtatctcaggaactacagagagctgacttgggtctttggagaggtgaagaagtaactcttagcaatccaaaagggagccaagaagggaccaagtatattcaaaacctccagggcctgtttgcgcttccctttggtaggacagcaaagccagctcatatcgcaaaggttaagatgaagtttcgcttcttaggaaaattaatggccaaggctatcatggatttcagattggtggaccttccccttggcttacccttttataaatggatgctacggcaagaaacttcactgacatcacacgatttgtttgacatcgacccagttgtagccagatcagtttatcacctagaagacattgtcagacagaagaaaagacttgaacaagataaatcccagaccaaagagagtctacagtatgcattagaaaccttgactatgaatggctgctcangttgaagatctaagactggatttcactctgccagggtttcccaatatcgaactgaagaaaggagggaaggatataccagtcactatccacaatttagaggagtatctaagactggttatattctgggcactaaatgaaggcgtttctaggcaatttgattcgttcagagatggatttgaatcagtcttcccactcagtcatcttcagtacttctacccggaggaactggatcagctcctttgtggcagtaaagcagacacttgggatgcaaagacactgatggaatgctgtaggcctgatcatggttatactcatgacagtcgggctgtgaagtttttgtttgagattctcagtagttttgataatgagcagcagaggttatttctccagtttgtgactggtagcccaagattgcctgttggaggattccggagtttgaatccacctttgacaattgtccgaaagacgtttgaatcaacagaaaacccagatgacttcttgccctctgtaatgacttgtgtgaactatcttaagttgccggactattcaagcattgagataatgcgtgaaaaactgttgatagcagcaagagaagggcagcagtcgttccatctttcctgatcatagcaagaaatgcagtgtctgcctgttacagcaaaagaaacaaatcatgatttcttttctaatgttatcacctgagtcaaggaaacatgttacgccttcttgttgtaggaaaaacggcttgcagattataaagagacatttggttgatattcattaatggccccatggacttaaagtgatcaggccctaaaacgttgttgtgatgaggtttctttagcaagttcttgtttaaattatcatttatttgatgagtgaagtttttaacatgctttgctgtgtgaaatttaaaaaagggatgtttttccaggctggaacaataaatgtggctgtgcagttta

SEQ ID NO: 6494 - DNA, 1331 bp, Homo Sapiens
ccggggtaatctgagaaacaatgactaattcttgcatattttgtaacttccatgtgagggttttcagcattgatatttgtgcattttctaaacagagatgaggtggtatcttcacgtagaacattggtattcgcttgagaaaaaaagaatagttgaaccctatttctctttctttacaagatgggtccaggattcctcttttctctgccataaatgattaattaaatagcttttgtgtcttacattggtagccagccagccaaggctctgtttatgcttttggggggcatatattgggttccattctcacctatccacacaacatatccgtatatatcccctctactcttacttcccccaaatttaaagaagtatgggaaatgagaggcatttcccccaccccatttctctcctcacacacagactcatattactggtaggaacttgagaactttatttccaagttgttcaaacatttaccaatcatattaatacaatgatgctatttgcaattcctgctcctaggggaggggagataagaaaccctcactctctacaggtttgggtacaagtggcaacctgcttccatggccgtgtagaagcatggtgccctggcttctctgaggaagctggggttcatgacaatggcagatgtaaagttattcttgaagtcagattgaggctgggagacagccgtagtagatgttctactttgttctgctgttctctagaaagaatatttggttttcctgtataggaatgagattaattcctttccaggtattttataattctgggaagcaaaacccatgcctccccctagccatttttactgttatcctatttagatggccatgaagaggatgctgtgaaattcccaacaaacattgatgctgacagtcatgcagtctgggagtggggaagtgatcttttgttcccatcctcttcttttagcagtaaaatagctgagggaaaagggagggaaaaggaagttatgggaatacctgtggtggttgtgatccctaggtcttgggagctcttggaggtgtctgtatcagtggatttcccatcccctgtgggaaattagtaggctcatttactgttttaggtctagcctatgtggattttttcctaacatacctaagcaaacccagtgtcaggatggtaattcttattctttcgttcagttaagtttttcccttcatctgggcactgaagggatatgtgaaacaatgttaacatttttggtagtcttcaaccagggattgtttctgtttaacttcttataggaaagcttgagtaaaataaatattgtctttttgtatgccaaa

SEQ ID NO: 6495 - DNA, 929 bp, Homo Sapiens
gtctagccgatccctgtagactggagaaggagtacaggagctgatgaacgtcaagctggccctggatgtggagatcgccacctaccgcaagctgctggagggcgaggagtgcaggctgaatggcgaaggcgttggacaagtcaacatctctgtagtgcagtccaccgtctccagtggctatggcggtgccagcggtgtcggcagtggcttaggcctgggtggaggaagcagctactcctatggcagtggtcttggcgttggaggtggcttcagttccagcagtggcagagccattgggggtggcctcagctctgttggaggcggcagttccaccatcaagtacaccaccacctcctcctccagcaggaagagctataagcactaaagtgcgtctgctagctctcggtcccacagtcctcaggcccctctctggctgcagagccctctcctcaggttgcctgtcctctcctggcctccagtctcccctgctgtcccaggtagagctggggatgaatgcttagtgccctcacttcttctctctctctctataccatctgagcacccattgctcaccatcagatcaacctctgattttacatcatgatgtaatcaccactggagcttcactgttactaaattattaatttcttgcctccagtgttctatctctgaggctgagcattataagaaaatgacctctgctcctttttattgcagaaaattgccaggggcttatttccagaacaaccttccaccttactttccactgggctcctcaaattctctaacttaataaggtggttgtgaaaccccccacccccaggccaggtattccactggaaaaagccccaaggtggacctacgtcccctattggatgggtaccaaaaggccctcgtgaactctctcggggagaaatgggatatctcca

SEQ ID NO: 6496 - DNA, 1020 bp, Homo Sapiens
  misc_feature (126)..(126): n is a, c, g, or t
  misc_feature (1005)..(1005): n is a, c, g, or t
gggggccctacttctccgttactactacgacaggtacacgcagagctgccgccagttcctgtacgggggctgcgagggcaacgccaacaatttctacacctgggaggcttgcgacgatgcttgctnggaggatagaaaaagttcccaaagtttgccggctgcaagtgagtgtggacgaccagtgtgaggggtccacagaaaagtatttctttaatctaagttccatgacatgtgaaaaattcttttccggtgggtgtcaccggaaccggattgagaacaggtttccagatgaagctacttgtatgggcttctgcgcaccaaagaaaattccatcattttgctacagtccaaaagatgagggactgtgctctgccaatgtgactcgctattattttaatccaagatacagaacctgtgatgctttcacctatactggctgtggagggaatgacaataactttgttagcagggaggattgcaaacgtgcatgtgcaaaagctttgaaaaagaaaaagaagatgccaaagcttcgctttgccagtagaatccggaaaattcggaagaagcaattttaaacattcttaatatgtcatcttgtttgtctttatggcttatttgcctttatggttgtatctgaagaataatatgacagcatgaggaaacaaatcattggtgatttattcaccagtttttattaataccagtcactttttaaaaaatttggatttttttatatataactagctgctattcaaatgtgagtctaccatttttaatttatggttcaactgtttgtgagactgaattcttgcaatgcataagatataaaagcaaatatgactcactcatttcttggggtcgtattcctgatttcagaagaggatcataactgaaacaacataagacaatataatcctgtgcttttaacatatttgacaataaaaaggactagcaaataaaactcattttgcattcaaaaagaaagaaggtacagggggaaattantgcatgtcgggcgac

SEQ ID NO: 6497 - DNA, 449 bp, Homo Sapiens
aaggtttgcaaattaaaaagggccagaaaaatttggcaccaggcaaacgaataaagataggattgggaaagaagttgctaagtgtgcttagttttaataagtaattccttctcttttttcagagaaggccttacagaaaattgttgtgcttagaattgctggatgcatttttaccctccacacaaacctaaaaattttgtgacccctttcacttacctgaaaagtagagaaatgaattcagtataaaggataaggaggaaaggtggaccccaaaatgaaaactgtaaatatttttttaacctaatatcacttaaatcgaggcagaaagatacagacattcaatgaattatattcaatgcatttaaaataccactgtaattgacagagtaaaagtatagatacaaaaccttgtgtaagaggctgacttttccaaataaacattttttaag

SEQ ID NO: 6498 - DNA, 649 bp, Homo Sapiens
ggggtcacagcaccctcctgaaaactgcagcttccttctcaccttgaagaataatcctagaaaactcacaaaatgtgtgatgcttttgtaggtacctggaaacttgtctccagtgaaaactttgatgattatatgaaagaagtaggagtgggctttgccaccaggaaagtggctggcatggccaaacctaacatgatcatcagtgtgaatggggatgtgatcaccattaaatctgaaagtacctttaaaaatactgagatttccttcatactgggccaggaatttgacgaagtcactgcagatgacaggaaagtcaagagcaccataaccttagatgggggtgtcctggtacatgtgcagaaatgggatggaaaatcaaccaccataaagagaaaacgagaggatgataaactggtggtggaatgcgtcatgaaaggcgtcacttccacgagagtttatgagagagcataagccaagggacgttgacctggactgaagttcgcattgaactctacaacattctgtgggatatattgttcaaaaagatattgttgttttccatgatttagcaagcaactaattttctcccaagctgattttattcaatatggttacgttggttaaataaacttttttttagattgaaaaa

SEQ ID NO: 6499 - DNA, 839 bp, Homo Sapiens
  misc_feature (141)..(149): n is a, c, g, or t
cccccaaaatgggcaaaaagcggtgtttaggaaaaaggctctccctcgcaggtgccccgagccccggtcactatccaggtatagccctgttatggggccccccttggtggcgggttggggggggaagacctgggatcagannnnnnnnnaccgaacccttgggtgcgcgcaatttgccacacattaccaaccgctttgccaggacttcatcagcagggggacccgctaagcaaactggcctaggttcaggcccacacggcggctacctactcttcaagacattaggcgtgaacagagaaggggaatgaggtgacctgggtttgaatgacccagggcccaatgcacaagagagaattttgatgtcaaattagggtggcaaggagaaaacaaaaaagatccaacttagaaacagaaccatgattcaacatttgcaaaaagcatcatcaataagcctgaagaaggccacggactgtgcatccgctggctcagagaaaggctgggcagccggaacagcagcttcctgggtaaccaggcaacaatctcagcgcctgggagtcagggctgcgcactccactctggccagaacacaaacggcattggcactgtaagctctcagttacgtggccctcttttctctcctctatttctccaaacatatgtgcacacccagaggaactgagtggcaattccagggtgcgggcgggcaggaggggagagaggacaaagagagaataagatgagctaaatgttttgtgaaaagccaccgcccatccgaaagcttgtgacttcccttgccccaacaatctttgtaggttgccccttttcccattcctaccccc

SEQ ID NO: 6500 - DNA, 443 bp, Homo Sapiens
  misc_feature (89)..(120): n is a, c, g, or t
cggattggcgaccatttcaaagactctaaaataatcatttgcttcccctcaaaagtcagaatccaccatgtaattattcaaaactgggnnnnnnnnnnnnnnnnnnnnnnnnnnnnnnnnttgtacgcttgttagtatacacggtttcatgtagcagggagaccacataattgctctttgtgattaaccctctggcccttaaaatagtaaagtcagaaaattaaaataagtaatatatacttaaaatacttaaaacctgtatctatatccattttcaatagatgtgacagttaagaaatgactgaaattatattattataaatgtttactgcataacagtacaaaattgatgttcccaaaaagagggtaaaaaaatctttaactgacattaaacatcttaagtaatttggaaaaatcccaaggttgaaatggtcgccaatccg

SEQ ID NO: 6501 - DNA, 517 bp, Homo Sapiens
gggggcgcggctctgggtccgtctcgtcgcgtccgggttgtcactctctcgggttgttactctgtagcttcccggctcgcgaaagggaggacctgtctgggtcatggattttgagaatcttttctcaaaaccccccaacccggccctcggcaaaacggccacggactctgacgaaagaatcgatgatgaaatagatacagaagttgaagaaacacaagaagagaaaattaaactggagtgcgagcaaattcccaaaaaatttagacactctgcaatatcaccaaaaagttcgctgcatagaaaatcaagaagtaaggactatgatgtatatagtgataatgatatctgcagtcaggaatcagaagataattttgccaaagagcttcaacagtacatacaagccagagaaatggcaaatgctgctcaacctgaagaatctacaaagaaagaaggagtaaaagataccccacaggctgctaaacaaaatataaaaattcgacacttctttcaaacatgt

SEQ ID NO: 6502 - DNA, 932 bp, Homo Sapiens
  misc_feature (909)..(909): n is a, c, g, or t
  misc_feature (912)..(912): n is a, c, g, or t
tcgcccagcatcaagtggcacaactcctacagggagcccttcgagcagcacctcctgctgggcgtcagcgtttcctgcattgtcatcctggccgtctgcctgttgtgctatgtcagcatcaccaagattaagaaagaatggtgggatcagattcccaacccagcccgcagccgcctcgtggctataataatccaggatgctcaggggtcacagtgggagaagcggtcccgaggcccttgggcacctcgacttgtgaacgagttgttggctgctccctccacagcttctgcagcagactgtccctgttgttaactgcccaaggcatgttttgccccaccagatcatgccccacatggaagcccaccctgcctctgtctcactgaactagaagccgagcctagaaactaacacagccatcaagggaatgacttgggcggccttgggaaatcgatgagaaattgaacttcagggagggtggtcattgcctagaggtgctcattcatttaacagagcttccttaggttgatgctggaggcagaatcccggctgtcaaggggtgttcagttaaggggagcaacagaggacatgaaaaattgctgtgactaaagcagggacaatttgctgccaaacacccatgcccagctgtatggctgggggctcctcgtatgcatggaacccccagaataaatatgctcagccaccctgtgggccgggcaatccagacagcaggcataaggcaccagttaccctgcatgttggcccagacctcaggtgctagggaaggcgggaaccttgggttgagtaatgctcgtctgtgtgttttagtttcatcacctgttatctgtgtttgctgaggagagtggaacagaaggcgtggagttttgtataaataaagtttctttgtctccnganatggaagccatcaacaacca

SEQ ID NO: 6503 - DNA, 822 bp, Homo Sapiens
  misc_feature (660)..(660): n is a, c, g, or t
  misc_feature (670)..(670): n is a, c, g, or t
  misc_feature (677)..(764): n is a, c, g, or t
  misc_feature (772)..(772): n is a, c, g, or t
gggacccacggccggccgcggagccgaagtgctgacccgggtgagaggttcccgcggctcagggaagatgggcggcagccgtggtgctggctgctgggttgcgcgcggcgcgcagagccgtggcggccacgggggtgcgcggggggcaggtccgaggagctgcaggtgtgactgatgggaatgaagtggccaaggcccagcaggcaactcctgggggagcagccccaaccatcttctcccggatcctggacaagagcctcccagctgacattctctatgaggaccagcagtgtcttgtgttccgtgatgtggcccctcaggctcctgtgcacttcctggtcattcctaagaagcccattcctcggattagccaggctgaagaagaagaccagcagcttctaggacacctactccttgtggccaagcagacagcaaaggctgagggcctgggagatggataccgacttgtgatcaacgatgggaagctgggtgcacaatctgtgtatcatctgcacattcatgtacttgggggccggcagctccagtggcctccaggttgaacctgccaactgattaaaggacaacagactctggatgcttggatggaaagggaaaaatggaccctgtgatgctaataaaactgttctcccttaaaaaaanaaaccccaanaaaaaannnnnnnnnnnnnnnnnnnnnnnnnnnnnnnnnnnnnnnnnnnnnnnnnnnnnnnnnnnnnnnnnnnnnnnnnnnnnnnnnnnnnnnnggattccntcatcacctgtacgccctctagagttactcttagcccgttacctctgcgt

SEQ ID NO: 6504 - DNA, 668 bp, Homo Sapiens
  misc_feature (436)..(561): n is a, c, g, or t
  misc_feature (569)..(583): n is a, c, g, or t
ttttcagatgaactattgtttagtaccagagactgagcaaatactacaaaattcaacttaaccttcatttcattggtttaaatgcgttattaaccatcttaagtgcaaactaatcattgtaaattatattttagcatggtctgcctcaaatagtaatgtatttttctgcattcacttggatatatttagaatcacttttttcctcctgtatcaaggaagaggtatgtgctgatttgtttggatatttgacaaggcactctgatgtgacttccctgactactaccttcatatttcatttcaaattcaaacttctgaggttgcagcatatatgaattgcattttcaaaagaagatttgtaagaattaaactatatttatgagtaaacttttgaggtttctgctgtattgtttcaaatgtaataaactttacttctgtnnnnnnnnnnnnnnnnnnnnnnnnnnnnnnnnnnnnnnnnnnnnnnnnnnnnnnnnnnnnnnnnnnnnnnnnnnnnnnnnnnnnnnnnnnnnnnnnnnnnnnnnnnnnnnnnnnnnnnnnnnnnnnctggccgnnnnnnnnnnnnnnnaaaaattttttaaaacctttttttgggcgcccggccccaaaaggaaaggaaacagggcaaaattttttccaaaaaaaacccgggc

SEQ ID NO: 6505 - DNA, 1346 bp, Homo Sapiens
  misc_feature (386)..(395): n is a, c, g, or t
  misc_feature (1013)..(1021): n is a, c, g, or t
  misc_feature (1203)..(1203): n is a, c, g, or t
gatgcacaaattttcatccagaagaaagcggtcaagaacttcactgaggtccaccctgactacgggagccacatccaggctcttctggacaagtacaatgctgagaagcctaagaatgcgattcacacctttgtgcagtccggatctcacttggcggcaagggagaaggcaaatctgtgaggccggggccctgcacctgtgcagcgaagcttagcgttcatccgtgtaacccgctcatcactggatgaagattctcctgtgctagatgtgcaaatgcaagctagtggcttcaaaatagagaatcccactttctatagcagattgtgtaacaattttaatgctatttccccaggggaaaatgaaggttaggatttaacagtcatttnnnnnnnnnntttgttttgacggatgattggattattcatttaaaatgattagaaggcaagtttctagctagaaatatgattttatttgacaaaatttgttgaaattatgtatgtttacatatcacctcatggcctattatattaaaatatggctataaatatataaaaagaaaagataaagatgatctactcagaaatttttatttttctaaggttctcataggaaaagtacatttaatacagcagtgtcatcagaagataacttgagcaccgtcatggcttaatgtttattcctgataataattgatcaaattcatttttttcactggagttacattaatgttaattcagcactgatttcacaacagatcaatttgtaattgcttacatttttacaataaataatctgtacgtaagagtaccaaacaccccattaacccctcccttccgctgttttccgtcaacaatccaattactcttggaaaactccccaatacaccgtatgcgcctcgaacaccccccccgtctgcccctttttcctctcttgtttggctgccctccgccccctccgcaaaatgtttggcaccccccttccccctttaaaaaaatttattcccaacacactcnnnnnnnnnggcggcgggggtccccccttcatcagcaacaacaaaacgtggtgccacacatgcagttcctcccccaaggaataccccggcccctattaaacaacgggggtgtttggtgttcttccccaaagataaaaaaacaaccccgcccgcgcaaaacagtcttgtcttttatcaccacaataccccanaaggtgggcctctgcgggggggtctattaggtggggctttcacaacacacgagagttctccccccaccgtgcctttaaacaataacatttaatcctcccccgccccccgttttcgccttctcaagataatcatgcgccgtgta

SEQ ID NO: 6506 - DNA, 1564 bp, Homo Sapiens
  misc_feature (1368)..(1377): n is a, c, g, or t
ggggctccgggcccgccagtagccggccgcggcggcgagggactaggacgcggctggagcggcgccgggagacgaggggctgagagacggcggcggccgaaagcggagagatgctgggcgttgcggccgggatgacccacagcaacatggccaacgccctggccagcgccacttgcgagcgctgcaagggcggctttgcgcccgctgagaagatcgtgaacagtaatggggagctgtaccatgagcagtgtttcgtgtgcgctcagtgcttccagcagttcccagaaggactcttctatgagtttgaaggaagaaagtactgtgaacatgactttcagatgctctttgccccttgctgtcatcagtgtggtgaattcatcattggccgagttatcaaagccatgaataacagctggcatccggagtgcttccgctgtgacctctgccaggaagttctggcagatatcgggtttgtcaagaatgctgggagacacctgtgtcgcccctgtcataatcgtgagaaagccagaagccttgggaaatacatctgccagaaatgccatgctatcatcgatgagcagcctctgatattcaagaacgacccctaccatccagaccatttcaactgcgccaactgcgggaaaagacctgactgccgatgcacggggagctgaaaaggggagctatactggcctcccatgccatgattaaaatgggggtccccatctgtggtgcttgccgacggcccatcgaagggcgcgtggtgaacgctatgggcaagcagtggcatgtggagcattttgtttgtgccaagtgtgagaaaccctttcttggacatcgccattatgagaggaaaggcctggcgtattgtgaaactcactataaccagctatttggtgatgtttgcttccactgcaatcgtgttatagaaagtgatgtggtctctgctcttaataaggcctggtgcatgaactgctttgcctgttctacctgcaacactaaattaacactcaagaataagtttgtggagtttgacatgaagccagtctgtaagaagtgctatgagaaatttccattggagctgaagaaaagacttaagaaactagctgagaccttaggaaggaaataagttcctttattttttcttttctatgcaagataagagattaccaacattacttgtcttgatctacccatatttaaagctatatctcaaagcagttgagagaagaggacctatatgaatggttttatgtcatttttttaattaaaaaagaaaaattcatataatcgtgtttaaaacacaaatgaagtcagtatttgcctttgttaacccttatccatttgttgacatgtagactgtttacnnnnnnnnnncacatggttaaatgttaaattttaattaaggcccccaaaaattaaatataactttttaaaatgaaaggagtcaccttttacatgactcaggtgaaaaaacagtataaacattaatttactttgtgttcaaaagaaaattccaactgctgttggggaaggacacagaaaagaaaaataaccacccaag

SEQ ID NO: 6507 - DNA, 1657 bp, Homo Sapiens
  misc_feature (194)..(194): n is a, c, g, or t
  misc_feature (279)..(279): n is a, c, g, or t
  misc_feature (869)..(879): n is a, c, g, or t
  misc_feature (936)..(992): n is a, c, g, or t
  misc_feature (1144)..(1167): n is a, c, g, or t
  misc_feature (1541)..(1541): n is a, c, g, or t
  misc_feature (1617)..(1617): n is a, c, g, or t
tcgccaagcaggacagtgcttgatacaggaacaacatttacaactcattccaaatcccaggcccctggaggctgcctcccaacagtggggaagagtgactctccaggggtcctaggcctcaactcctcccataaaaactctcttcttctcatatgaaaggtgccatggaagaggctacagggccaaacgttgangccacctgcccttttttctgcctcctttagtaaaactccgagtgaactgggtcttcctttttggtttttacttaactgtttcaanagccaagacctcacacacacaaaaaatgcacaaacaatgcaatcaacagaaaagctgtaaatgtgtgtacagttggcatggtagtatacaaaaagattgtagtggatctaatttttaagaaattttgcctttaagttattttacctgtttttgtttcttgttttgaaagatgcgcattctaacctggaggtcaatgttatgtatttatttatttatttatttggttcccttcctattccaagcttccatagctgctgccctagttttctttcctcctttcctcctctgacttggggaccttttgggggagggctgcgacgcttgctctgtttgtggggtgacgggactcaggcgggacagtgctgcagctccctggcttctgtggggcccctcacctacttacccaggtgggtcccggctctgtgggtgatggggaggggcattgctgactgtgtatataggataattatgaaaagcagttctggatggtgtgccttccagatcctctctggggctgtgttttgagcagcaggtagcctgctggttttatctgagtgaaatactgtacaggggaataaaagagatcttannnnnnnnnnnatacttggcgttttttgatgaaaaaccttttgtcttaacaaagaaaacaaaaccccnnnnnnnnnnnnnnnnnnnnnnnnnnnnnnnnnnnnnnnnnnnnnnnnnnnnnnnnncatggtcggccgcctccggcccttctgaaaactttttctaaaccctttctttttggccccccgggccccacgtagggaacgggaacacatggcccttaccttggtttcccaaggaagaaccctggcccagtgactaaggcgtttggaatctnnnnnnnnnnnnnnnnnnnnnnnngcggcgggcaacccgaaggggttttctgaaacaaatttcccaaatgggacgttctccggaggggcctcttcacgtgggatacttattcaaaacggggagttctccaaggccgaggcttcccaatatatcaaattttagcgccccccggcccggtggccactctttaatcgcacacagaactgggctggcgtaactcccctttagacgcccattccttgcgccgaaaatggggaaaacccccttccacaaaacccgccaagtggattgacacccttgaactccgcccgcgcggagcattccagcccaccccttgtttgccctctctggccatacataaatattctttccgccctaggtgggggaaaaacacgggngggtcgtcaacaaaacactgctggcttccattcatggaggccccacgcgtttataaaaatccacacacttgtgggngagaacaactctcctcccaagcgattgtctggttttgaaa

SEQ ID NO: 6508 - DNA, 1454 bp, Homo Sapiens
gggtgtttgtttggactggagaagggaggcggcgggcgaagcgcacgtcgagcgggggagcggcgctgcctgtggagatccgcggaggccgacaggattcgttggctgccgtccccgctgctgtgcattgggttaaaaacgacaaccaacatcagccatgaaagatccaagtcgcagcagtactagcccaagcatcatcaatgaagatgtgattattaacggtcattctcatgaagatgacaatccatttgcagagtacatgtggatggaaaatgaagaagaattcaacagacaaatagaagaggagttatgggaagaagaatttattgaacgctgtttccaagaaatgctggaagaggaagaagagcatgaatggtttattccagctcgagatctcccacaaactatggaccaaatccaagaccagtttaatgaccttgttatcagtgatggctcttctctggaagatcttgtggtcaagagcaatctgaatccaaatgcaaaggagtttgttcctggggtgaagtacggaaatatttgagtagacggggccctcttttggtggatgtagcacaatttccacactgtgaaggcagtattagaagacttaattgtaaaagctctcttgtcactgtgttacacttatgcattgccaaagtttttgttagtcttgcatgcttaataaaagtgctgagactgttactaagtaaaaagctgtcaaacatttactgaaaatagaattggccccatggcttgatgtgaagacagcaaggaaagaagcaccagtcaagttgtgaacaagcaccaaattaaaagacctaaaccttaccaaattgtctttttttgaggctaatctatcacttgttaatgtctaaactttaaaatcagtacatttaatttgagttccaactgttaagcatatttctcagacttaaatttgattatgtccccatcaaaaagaatctccattttctgaaggtctgttagttaatttgagataatttgttaaaggcaagtatgtcatattactgaggctacaagttagtcagcagatgagtgccagtccagccttttctggtatgttattgttagaaatattgagttctaatgttacatctgaggaagtatgtaatttgagaattgtaacttctaagggattcactgcatcatagctatgcctgtatggagtctaacatatgaccaataccaacccataatccagctgaacaaagatactgtaacattatgatttgagtggtgcttttccctgctttgttaaccatcacgagagtctgcagcacaacttttaacaaaactagaacagttttggcttcctaaacttcatattttgggtaggttaagctgccatacgtgttcagtgtgaatagtgtttaagttgaaaatattgtaaaaaaattatattttttcaaaaatatttaacaacaacgaaacac

SEQ ID NO: 6509 - DNA, 692 bp, Homo Sapiens
ggatacaatattaagtccaaatccaacctcctgtcagtggagcagttatgttttatactctacagattttacaaataatgaggctgttccttgaaaatgtgttgttgctgtgtcctggaggagacatgagttccgagatgacccaatctgcctttgaatctggaggaaataggcagaaacaaaatgactgtagaacttattctctgtaggccaaaattcatttcagccacttctgcaggatccctactgccaacctggaatggagacttttatctacttctctctctctgaagatgtcaaatcgtggtttagatcaaatatatttcaagctataaaagcaggaggttatctgtgcagggggctggcatcatgtatttaggggcaagtaataatggaatgctactaagatactccatattcttccccgaatcacacagacagtttctgacaggcgcaactcctccattttcctcccgcaggtgagaaccctgtggagatgagtcagtgccatgactgagaaggaaccgacccctagttgagagcaccttgcagttccccgagaactttctgattcacagtctcattttgacagcatgaaatgtcctcttgaagcatagctttttaaatatctttttccttctactcctccctctgactctaagaattctctcttctggaatcgcttgaaccca

SEQ ID NO: 6510 - DNA, 829 bp, Homo Sapiens
  misc_feature (690)..(693): n is a, c, g, or t
  misc_feature (695)..(695): n is a, c, g, or t
  misc_feature (698)..(699): n is a, c, g, or t
  misc_feature (701)..(701): n is a, c, g, or t
  misc_feature (703)..(706): n is a, c, g, or t
  misc_feature (716)..(716): n is a, c, g, or t
gggggggcagatctcagatctccgtcaagtaccagctgctctacgtggcggttcccagtggccctccctcaacaaccatcttggcttcttcaaacaaagtgaaaagtggggacgacatcagtgtgctctgcactgtcctgggggagcccgatgtggaggtggagttcacctggatcttcccagggcagaaggatgaaaggcctgtgacgatccaagacacttggaggttgatccacagaggactgggacacaccacgagaatctcccagagtgtcattacagtggaagacttcgagacgattgatgcaggatattacatttgcactgctcagaatcttcaaggacagaccacagtagctaccactgttgagttttcctgacttggaaaaggaaatgtaatgaacttatggaaagcccatttgtgtacacagtcagctttggggttccttttattagtgctttgccagaggctgatgtcaagcaccacaccccaaccccagcgtctcgtgagtccgacccagacatccaaactaaaagggagtcatccagtctattcacagaagtgttaacttttctaacagaaagcatgattttgattgcttacctacctacgtgttcctagtttttatacatgtggaaacaattttatataatcaatcatttctattaaatgagcacggtttttgcccnnnncnacnncncnnnncaaaaccccnccacatggtcgggcgccttcggcccctcgaaaagcttttccaacacccattcggtttgggcgcgcggggccccggtaaggtaagtgaaacatgggcccataactggttttcca

SEQ ID NO: 6511 - DNA, 774 bp, Homo Sapiens
  misc_feature (169)..(169): n is a, c, g, or t
  misc_feature (185)..(185): n is a, c, g, or t
  misc_feature (191)..(349): n is a, c, g, or t
  misc_feature (353)..(353): n is a, c, g, or t
  misc_feature (355)..(355): n is a, c, g, or t
  misc_feature (358)..(358): n is a, c, g, or t
  misc_feature (362)..(362): n is a, c, g, or t
gttggtgggaagaaggacaagcccgctttgtgttgtgccggcggtggtgttctttttgagaacacgaaggtttatccccggggttctctcttctctcttggtggggccgcggcccgcccgccaaaaggggttgaaagagatattttcttggggggcgaggggagcggcncacaactttgtttttntttttnnnnnnnnnnnnnnnnnnnnnnnnnnnnnnnnnnnnnnnnnnnnnnnnnnnnnnnnnnnnnnnnnnnnnnnnnnnnnnnnnnnnnnnnnnnnnnnnnnnnnnnnnnnnnnnnnnnnnnnnnnnnnnnnnnnnnnnnnnnnnnnnnnnnnnnnnnnnnnngggngntgngggnttttttgactgtaatcaaacttttaattcttagtttttattctggtaaatgaaaacaaaaaataatcaaaaagaatttttatttgtcattgacagttcaatataaattaagtaaaacattaattcatttattctgcactattatcagaatttttctaatttttccgtaaaatgaccatttctaaacatatagcttaatggtcaaaacaagtgcaataaaagattaatttacaagtatcagaagtgaagactgtggtcctataactctttcccccaccaaagttaaaatataattgtcattccaggaaatcaaaatcttttagaatagcacactccaaacaagtgatgggaacactactaattccttagacttcctttggcagcattacttttgataagaagtctccaaatcc

SEQ ID NO: 6512 - DNA, 2073 bp, Homo Sapiens
  misc_feature (1740)..(1775): n is a, c, g, or t
ggggtgacgggtccgcgaggcccagctcgcgcagtcgttcgggtgagcgaagatggcggccgagagggaacctcctccgctgggggacgggaagcccaccgactttgaggatctggaggacggagaggacctgttcaccagcactgtctccaccctagagtcaagtccatcatctccagaaccagctagtcttcctgcagaagatattagtgcaaactccaatggcccaaaacccacagaagttgtattagatgatgacagagaagatctttttgcagaagccacagaagaagtttctttggacagccctgaaagggaacctatcctatcctcggaaccttctcctgcagtcacacctgtcactcctactacactcattgctcctagaattgaatcaaagagtatgtctgctcccgtgatctttgatagatccagggaagagattgaagaagaagcaaatggagacatttttgacatagaaattggtgtatcagatccagaaaaagttggtgatggcatgaatgcctatatggcatatagagtaacaacaaagacatctctttccatgttcagtaagagtgaattttcagtgaaaagaagattcagcgactttcttggtttgcacagcaaattaccaagcaaatatttacatgttggttatattgtgccaccagctccagaaaagagtatagtaaggatgaccaaggtcaaagtgggtaaagaagactcatcatccactgagtttgtagaaaaacggagagcagctcttgaaaggtatcttcaaagaacagtaaaacatccaactttactacaggatcctgatttaaggcagttcttggaaagttcagagctgcctagagcagttaatacacaggctctgagtggagcaggaatattgaggatggtgaacaaggctgccgacgctgtcaacaaaatgacaatcaagatgaatgaatcggatgcatggtttgaagaaaagcagcagcaatttgagaatctggatcagcaacttaggaaacttcatgtcagtgttgaagccttggtctgtcatagaaaagaactttcagccaacacagctgcctttgctaaaagtgctgccatgttaggtaattctgaggatcatactgctttatctagagctttgtctcagcttgcagaggttgaggagaagatagaccagttacatcaagaacaagcttttgctgacttttatatgttttcagaactacttagtgactacattcgtcttattgctgcagtgaaaggtgtgtttgaccatcgaatgaagtgctggcagaaatgggaagatgctcaaattactttgctcaaaaaacgtgaagctgaagcaaaaatgatggttgctaacaaaccagataaaatacagcaagctaaaaatgaaataagagagtgggaggcgaaagtgcaacaaggggaaagagattttgaacagatatctaaaacgattcgaaaagaagtgggaagatttgagaaagaacgagtgaaggattttaaaaccgttatcatcaagtacttagaatcactagttcaaacacaacaacagctgataaaatactgggaagcattcctacctgaagccaaagccattgcctagcaataagattgttgccgttaagaagaccttggatgttgttccagttatgctggattccacagtgaaatcatttaaaaccatctaaataaaccactatatattttatgaattacatgtggttttatatnnnnnnnnnnnnnnnnnnnnnnnnnnnnnnnnnnnntctgacattttattacaagctgcatgtcctgaccctctttgaattaagtggactgtggcatgacattctgcaatactttgctgaattgaacactattgtgtcttaaatacttgcactaaatagtgcactgcaagaccagaaaattttacaatattttttctttacaatatgttctgtagtatgtttaccctctttatgaagtgaattaccaatgctttgaataatgttcacttatacattcctgtacagaaattacgattttgtgattacagtaataaaatgatattccttgtgacaa

SEQ ID NO: 6513 - DNA, 470 bp, Homo Sapiens
ccctatttaaatgaaaggagtttaaaaacattttttaaggagggagaaaggagaaattttggtttttcaacactgaaaaaatactacctataggaaagtctgtcaggtttggtttttttgtacaatatgaaaaggatattatctacctgttctgtagctttctggaatttacctccccttttctatgttgctattgtaaggtctttgtaaaatcttgcagttttgtaagccctctttaatgctgtctttgtggactgtgggtctggactaaccctgtggttgcctgccctcctgagcctccgccttcccagcagcggcaccaaggggccttagggagccccaaaacctaccactcgcgtgttccccaagcgcctggctgctgcttcttgcttcccgtcccccagccccatgctcccttttacattctgtgtgtatctaaaggatggaaaaataaaacgcaattaaaaata

SEQ ID NO: 6514 - DNA, 474 bp, Homo Sapiens
caagttatagatttgcttaaagtgaggttttttggtgtgtgcttttttgttgtcttttgacccttccagtttccagacaaacttgtcttaaaaagtgcatcattggattgaccatggtttttcatgaaattttatgagatttctgccttaacaaaatgcatatattccttatcttaaagcctgtcattacttaggatgcacttataggatctgaaaagctcactttaaactcatactacattcgttacgagtattttacgttaacataattgaaaagtacaaggtccaagctggctttcaaattatgtctaaacagaaatgggacaaatagacttgaaaatagaagggatttattccacccctgcaagggtagagtcaggtgagagtcccttggtgagtcatttgtacatcagtgtcatttcttcttaacctctgaagaagatgggcatcagaaataaagacaaagcactatca

SEQ ID NO: 6515 - DNA, 538 bp, Homo Sapiens
tttttagtttaaaaaatatttattatagaaatgtacatttaattagttttaaggaatgtacctgaccacagtgttaatatatatttcttcaaatttgcaaactttacacctttaagatatctacaaagatgatagtttatttacaagttttacaagaaatgatcacttcacaatactgttgacacagttacgattgaatcttcttctcactttttatttcactctgtacttatagaaagaacagagagtatgggtgaagttccatcccagtgccagggaaagcccgtagagcagaatcagaggtgcaaatggatacagaagaattactgtatttttcaaaaatggcaatgcactgtatcccaggaaagttacatagatataatagccaactgcaaccaaccataaggtatttccaactaaatatccaataaatgtgtctgtcaggataacatggttgatgaaaaaaagctggataaaatgcaaaatgaccaggagtggataaaaagcattgagatgcacatcaaaagcatagcccccc

SEQ ID NO: 6516 - DNA, 1188 bp, Homo Sapiens
  misc_feature (54)..(54): n is a, c, g, or t
cccggcgggccctgggagagctgggacgggcggcggccgggtggcctcggccanccgctaattgcatcttttcccggcgtctcgtctgcagagggagcactatgtctgcggaagtccccgaggcagcctccgcggaggagcagaaggaaatggaagataaagtgactagtccagagaaagcagaagaagcaaaattaaaagcaagatatcctcatctgggacaaaagcctggaggttcagatttcttaaggaaacggttgcagaaagggcaaaaatattttgattctggggattacaacatggctaaagcaaaaatgaagaacaagcaacttcctactgcagctccggataagacggaggtcactggtgaccacattcccactccgcaagaccttcctcaacggaagccgtcccttgttgctagcaagctggctggctgattaagaggctgaactgcatgaatctgctaaatctcattatttctccttaatatgttacttatctactttttatttcctttcattcactagtcatttgagactgacagctttgcaggtagcagtagtgtgtgctgctattgtggaatatacgtgtgtagagtttttgattagtttaacagtgcactggtgaagaggacatgttagagcaacataagtaaactacttgaaaatagttgtatatattacctaacttctagtgtagtactggttctaacaagtaacaagcaagttttaaaattttaatgttttggctttcattacttcatcttaattatagctttgtatgttactcttatttaatataatctctattgtattgatttcttctgtatttaccttttggattttgtaaaacagaagtttaagaccacaagttagaagaaaggtcacatatttcaaacacaactagatggggctctgaaagatttgtatctctgtgcttgaacttgaatggccttaaacctgtttcagctttaacagtagaattttacttgggcaatatttgcccattctggtgtaacttatgtgactctagtgcttaacagctgccgttgaagctaatattcagttctgtagagttagaataccttttgttgttgaagatgtgaatgaagtatgcatgtgcattaactgttgaattcacttttgtgccatttttgtaaatacagtagttttgcacaacctctca

SEQ ID NO: 6517 - DNA, 297 bp, Homo Sapiens
aagagaacaaggtgctgaagatagagctggagacctacaaactgaagtgcaaggcactgcaggaggagaaccgcgacctgcgcaaagccagcgtgaccatccaagccagggctgagcaggaagaagaattcattagtaacactttattcaagaaaattcaggctttgcagaaggagaaagaaacccttgctgtaaattatgagaaagaagaagaattcctcactaatgagctctccagaaaattgatgcagttgcagcatgagaaagccgaactagaacagcatcttgaacaagacc

SEQ ID NO: 6518 - DNA, 546 bp, Homo Sapiens
  misc_feature (514)..(514): n is a, c, g, or t
ggggtgccggaggcgcgtcctgcatcgtctgccgctttggtgacttctgacagctctctccatggaaggaggcggcggccgcgatgagccttcagcctgccgggcaggggacgtgaacatggatgaccctaagaaggaagacattcttcttttggccgatgaaaaatttgacttcgatctttcattgtcttcttcgagtgcaaatgaagatgatgaagtcttctttggaccctttggacataaagaaagatgtattgctgccagcttggaattaaataatccggttcccgaacagcctccgttgcccacatctgagagtccctttgcctggagccctctggccggggagaagttcgtggaggtgtacaaagaagctcacttactggctttacacattgagagcagcagccggaaacaggcagcccaagctgccaagcctgaagaccctcggagccagggcgtggtaaagattcatacaggaggcaaaattaaaaataaacctctttgacccgcncccacgtattgaagcccccaagaccctggtcg

SEQ ID NO: 6519 - DNA, 615 bp, Homo Sapiens
taaccacgcctggctgagaaagccattttcaatacagagtgtaaaattagatagcctctattaattaattagattttggaaagaaatgcagctttttagttagcattgaggcaaaacagggaacctgcttctttccaattgcacttgggtctttgcaaaagtccactcggcgctgagaaactttcctgttcaccagtgtgaggagttctgtgaactctaaggaggagccatattttcccaacatctcacacaaatcttgaatgtaccatgagccgttcacagtttcccggtgagaataatatccttctgcaacagagtaacacatgaggaagtcagctccagcaggcagcgtgtaaacggaggctgcatccacctcagttatgttggtgtccaacttctctgtctgattatctactacatccaaaggaatgactggcacatcgtgctggtttccccgacatgcctgaatgataaatatcttgggttttccaaccaggctgtgacacttgtctcctttgaacaagccagttaatgtctgaatttcgattttagcatcatatgcataaatgtgattgccttcgccatggctcaggaagacacacacaaagcaatccc

SEQ ID NO: 6520 - DNA, 1053 bp, Homo Sapiens
tcctgccttcctcacccacagtgttcctaccatttaatttccctttcatcatttgcttagactagagcctcttctccctccccttctatttctcttccaatcaggaccttttggacactgggtactgttcaattcttactctgtcaggcccatgggccatggtcaagtaggtcctttagatctcgatgccagttgtagtattggtgtcgtcatcttccattgaaggtaggtctgtgtgtaactacactaggcttgagtgttcatttctttcactttttctgactcatgatctagcacctgtttgtgatagaacagtaaatacccttcactgtccagtacgtccttaatactggccttagtgatgacggcatcatcacacttgaaccactggtccttgtggtgccggatgaagctggtatagtggccactctccaaggttccttgatgattaaccacagcaaacaaggaatacttattttcgttgtttccactattggttggcagctgcaattgtccattcattctgctctctttacttgaggccataaacggcgtcatatccagctccagaggaaaggaaatgtatgtagtgatcttgcgcctctgtttcgctgaatgttcaaaccgtttgaaatgaaaacaggcaacgacaggtaatttattcattgtgagctgtttggtagattcctggtagctttggcaactaccacatttgattttggcactgcttcctaagtgctctggcctcgtaaacctccgcaagcagtccgtgagggtggtgattcctggtatgtggctttccccgttcacactgctctccctccctgggctcatgggccagaaggaggtgcaagagccaggcaagtccaaactaatgtcccagcatgggtctatcgtggtggagacgccatggcaggcttgacaggtgacatcagactgcaggccacctgtgaagatttggtctatgatgcagttacagtggttgggattgttggccgccttcccgacatcatcacctttgcagtgcctgtgcaggaggggatcatctagagt

SEQ ID NO: 6521 - DNA, 848 bp, Homo Sapiens
  misc_feature (648)..(652): n is a, c, g, or t
  misc_feature (656)..(656): n is a, c, g, or t
  misc_feature (659)..(659): n is a, c, g, or t
  misc_feature (689)..(690): n is a, c, g, or t
  misc_feature (692)..(692): n is a, c, g, or t
  misc_feature (698)..(701): n is a, c, g, or t
  misc_feature (757)..(757): n is a, c, g, or t
gggggaaatgcgtgttctagctttctgtgtgcttaggtgcccgagctactgagggtctaagtccgggcagccgaagagtgtggtaggtaacggtcctcagcgcaagggtcatttcgtcgctgggaagggacggccctcgcccgcggtgatggtggttagcaagatgaacaaagatgcgcagatgagagcagcgattaaccaaaagttgatagaaactggagaaagagaacgcctcaaagagttgctgagagctaaattaattgaatgtggctggaaggatcagttgaaggcacactgtaaagaggtaattaaagaaaaaggactagaacacgttactgttgatgacttggtggctgaaatcactccaaaaggcagagccctggtacctgacagtgtaaagaaggagctcctacaaagaataagaacattccttgctcagcatgccagcctttaagattgaattagattgtgttgttgtggttttatttctgaaagtaaaacttgccataaattagaaaacaatttcccaaaataaaatccttttttgtatgatggtatacagttttcagtaatgatgtatacattgtattgatttttttccctaaatgtgttattttaataaatatctcatgaatgagtttgaaaaannnnngcgnggncgggagcgggccccgcggcgcggggcgcgnngngggggnnnnccgtgttcggccccctcggcccttcgaaaaatgttctaagaccattcttagggggngcgggggccccggggaggaagggaaaatgggccataccgtggtacgccaggaaaacccgggccatgaactaggggctggggaatcccccca

SEQ ID NO: 6522 - DNA, 624 bp, Homo Sapiens
ggtgcccaagtattgtcaaactatggtattattttaatgttactttaaaaatccataatctgctagttttgcatgtacttatatgaaaacagtgcagtaagttgaaaactcagtatctatggaattgataaatgttgatctggtgtagtatattttatcgcattttcttatattaaaaaatgtctgcatgattacattttatttcctttgtaatttacatttcagaatagtgtattgctatatgggtgccaagattgaatatgaagaacccgagtgtttgtagtattatagttttaagcaaatctgtgtggtgatacagccataagaatggggcttatataaactctgtacatgtaagattttgtacagagaatttttaactttataaattgtatatgaacatgtaaatcttttaaaatgtacataaaatactgtatttttttaccttgtgtgtgatagtctagtcattgcatgtaaatataatttattatgtattctgtagtataaatcatacattgatgacttacatttttactggtaagtcaacatccgttggatgttttctgaagtggctctttttgaagtgataatagattgtaattcaaaataaaattattaatgaaa

SEQ ID NO: 6523 - DNA, 328 bp, Homo Sapiens
ggggctgctgtgaccgcaaaactgtttctgtagaattttctccggtgtggtcatcctgccttcagaggtttctccaggacgtcacctgtatgaggtacacagtgtgatgacacactctgtgcttttcctacttgtgtccacgtgagtgtctggagctgcccttcaaggagagcaatagatgaatgattctgccttcccgctgagagggatgtgggtcctgcggatggtcggggtgaagcttcctctcctttctgctgacagcacttcctcattaaatgcagagatctgcaaaaagggaaaataaaaacacaagaagaaaaatgaggca

SEQ ID NO: 6524 - DNA, 826 bp, Homo Sapiens
ggtctggagataattcagaaatacagatgataattgttttcaaattcttgaaggaaatgggagagagaataggctaattctgtattgcttcagaaaccaaatggaaacaattaaattccattagagaaacggttggaaaatatgaggaggatttagttcagtacgaggaagctgtttctaatactttttgttggttaaaaatacattccgctgctgtggaaagcctgtagctgccaggagtgttacagagggcattcctcccttgagttgacatttgtgccaaaccggcttttagggcttctccagcttttaagatgcgataatgataagatgatcatcgggaaaacatccctcagatgaaacgttcacaggctggctctgaaaactggcattcagatgattgcggctcccccatactgtaggaatattgtttatggcttaaggttgcctcgctcctcatctgtaatcagtgaaagtttatccagaggttaattaccggttttctggtgggtatctgggaactgaggatgggagattaactgttgtatatgaccatagtaaagcaaaagactgttagagaatgagtaaacgttcgttttcctccctacagaatttacagttactctctgtccattccactcactactgtcttcatcacacacacagaggcaaacgtctgattcagatagccaggtgtgccatgcatgcactccaccatattgggatctcttcgagggcttgtttctgtcccctgtcctccacagtcctggattgttaatgaatagttcatacatgtttgttaaataaatataccttctttaaaatt

SEQ ID NO: 6525 - DNA, 540 bp, Homo Sapiens
aagtctgctctcccttctctgtgaccccgcatgactgggcgcctggagcagtttcactctgtgaggagtgagggaaccctggggctcaccctctcagaggaagggcacagagaggaagggaagaattggggggcagccggagtgagtggcagcctccctgcttccttctgcattcccaagccggcagctactgcccagggcccgcagtgttggctgctgcctgccacagcctctgtgactgcagtggagcggcgaattccctgtggcctgccacgccttcggcatcagaggatggagtggtcgaggctagtggagtcccagggaccgctggctgctctgcctgagcatcagggagggggcaggaaagaccaagctgggtttgcacatctgtctgcaggctgtctctccaggcacggggtgtcaggagggagagacagcctgggtatgggcaagaaatgactgtaaatatttcagccccacattatttatagaaaatgtacagttgtgtgaatgtgaaataaatgtcctcaactccaaaaa

SEQ ID NO: 6526 - DNA, 275 bp, Homo Sapiens
taattgaaccccagtgaatttgtagagtgggggtatttgacatattttacagggtggagtgtactatatactattacctttgaatgtgtttgcagagctagtggatgtgtttgtctacaagtatgattgctgttacataacaccccaaattaactcccaaattaaaacacagttgtgctgtcaatacctcatactgctttacctttttttcctggatatctgtgtattttcaaatgttactatatattaaagcagaaatataaccaaaggttaaa

SEQ ID NO: 6527 - DNA, 664 bp, Homo Sapiens
  misc_feature (103)..(111): n is a, c, g, or t
ttttaaaacaatggaattttattttgatgaaaaactcaagtttacaatcatttagtaaatgaagagcaaacacttcattttcctatcccactaactcttaagnnnnnnnnngcattagtaaataaatatctgtgaacagcattaagggtaaggcaccactggcataataacaccacctctgacattcacactccctgcactgtgactcactctacaagggtgacacatggctctggagataactgacactggtaagatatgggcattaaatctcatcctgatcattcagataagcccaagataaatactttttgctcatcaagggcagcaaactatacaaacttgtactggaggaatactttgacagaagcacttaaatctatattgtgcatcacaactataaaatggcttgaacatttccatttaaccaccatttataaagtgcaactatatattactctgcattttatctgaggtgtgatgaatatcagtccaaactgaaagtaccccagctgccaatttccaccacttctgaaaagacctagctgtgtgaaaaaggaccatcccccatacaaagaaccaatttcacaaacctactggtaaacaaatacatttacaactggaacttcaaaatgctagagttgtactcatttaaataaaaaaa

SEQ ID NO: 6528 - DNA, 624 bp, Homo Sapiens
gggacaccgcaactgtggagaagattggtttcgaccccagctcaactctcgaatgcccagccggggccataaactgactgtgaccctgtcatgtggcagaccttccatccgaaccacggcttgggaagactacatttggttccaggcaccagtgacatttaaaggcttccgcgagtgaatgagtgcttcttaatcctaaaaacacaatggctgaattatctttctccatgtggcgctgaatcacccatctggtttggagctagagttgcttcctggtgagagaggaagcaactctccttctggttgtctgcctcccctcagatttcctgataggctgatggcatgtggctgtgactgtgactgtaatcattgctgaacaacatctctttgaatcaaaggttgattttcccagagggtgctgggtcaggcatttctattaggagttggaaagcaaaaatgggtccatagacactctatggaggtgtccctttctgctctttgctgtgtcctttcagaatttttaccaggaacataatgtggatgtgacttatgaacttaaatataaaataaatagattcttattatgaacggcacacaatccaaccccaataaaaaaaccctgtc

SEQ ID NO: 6529 - DNA, 922 bp, Homo Sapiens
ggaaggtataggcgcagaactcaaagctccacttaagcaagaacctctccaagtaagagttaaagcagtccttaagaaaagggagtatggatcaaagtacactcagaataatttcatcactggagtcagagcgataaatgagttctgcctcaaatccagtgatctagaacaacttcgaaaaatcagacgacgaagtccccatgaagatactgagtcttttactgtatacttgagatcagatgtggaagcaaaatctttggaagtttggggaagccctgaagctcttgccagagagaaaaaattgcgtaaggaagcagaaatagaatacagagaaaggctatttagaaaccaaaaaatattaagagaatacagagatttcttgggaaataccaagccacgctccagaacagcatcagtgttttttaagggaccaggaaaagtggtgatggttgcaatttgcatcaatggattaaactgcttctttaaatttcttgcctggatttataccggttcagcaagtatgttctcagaagctatacactcattatctgatacttgtaatcagggtttactagcattgggcatcagtaagtctgttcaaacaccagatcccttctcatccgtacggattttccaaatatgcgctatattttcttcgctatttaggggtgttgggattttcatgatgggtgcaggaatatcttggtaccatgggagtcatggggattgctttctccctcaacccattaaaattcgccttctaatggggaatattggaatttttaaccaagggaaccattaaagtatccctgaaagggagcacaaacccttctccttggggtggcccgggaaaaaatggaaacccttcccccaaaaggaaatggggctcccgcgggcctttaagaggggaaattggtcccaa

SEQ ID NO: 6530 - DNA, 505 bp, Homo Sapiens
  misc_feature (102)..(112): n is a, c, g, or t
tccccctggcttgctcaggttcaaagatatcttagggaaaatagacatttttcctggtagtttagttctccaccaagagaaatgctggaaaacggtgtttgnnnnnnnnnnnctttccgaattaatagtgacgagggtcttgacaccagatgctgaggaaaatctggccgatcacgctgagttaatttcggaaatgcagaggtacacgctttctcaagcctagccgattagaaggggctgccgggcttccaccacacctcatcgaggcaatgttttctggtagagatgctcatggaaatcactgagccaatgccacgagaacttcccatttttcttgccacgcttatggaacattggaaattagcactataatttgctttggggaacacttctctgaaaatccagcagtccaactgttgccagacttaaatccctcgctgctttatcttgctcgtatccttcccaccggaagtgaaaccgaagaaaacgccacgtcgaaggcccc

SEQ ID NO: 6531 - DNA, 589 bp, Homo Sapiens
  misc_feature (411)..(466): n is a, c, g, or t
tttgtgtttccaaaatagagatttatttattaaggattatttagtttctgcataaaaatctccaattgttcctcattgggttttttcttttaaaacacacatcaactcttttggggttgctttgtttgccccagcactttaaaaaatacagctctttttagcgccaggaagaacagttaaggttaaggcagtgaggcgttttcttggatcttagcagctgaagggttcatctctccccgtcaagagaatacacacggtaggtagtttcttaggttggaaaatctgtccctgaaggaaataattctgcagaagaatgcaaacggagtcatctatggtcaattgtttgtgccctatagctttgaaagaaacgcctcttggtcatcaagggcttgctggttggtttcagctgtnnnnnnnnnnnnnnnnnnnnnnnnnnnnnnnnnnnnnnnnnnnnnnnnnnnnnnnntctgtctagcgagacagaaagagcagggtttacaatagtgctgtgaggctgggctgtgcaaaccacatgagaatacacaccagtttgctttttaaaaaatcccacataggggccctgcatacc

SEQ ID NO: 6532 - DNA, 765 bp, Homo Sapiens
  misc_feature (85)..(104): n is a, c, g, or t
  misc_feature (111)..(124): n is a, c, g, or t
  misc_feature (136)..(260): n is a, c, g, or t
ggggggatcccacccctttttttgtcccgggtttccttgggaaaaacataggccctgtttcctttcctttgggggcccggccccnnnnnnnnnnnnnnnnnnnnttttttnnnnnnnnnnnnnncccccaaaattnnnnnnnnnnnnnnnnnnnnnnnnnnnnnnnnnnnnnnnnnnnnnnnnnnnnnnnnnnnnnnnnnnnnnnnnnnnnnnnnnnnnnnnnnnnnnnnnnnnnnnnnnnnnnnnnnnnnnnnnnnnnnttgtaaaaatgaatttattaaaatgctcataattataaaagaatattaaaatgcacagaaattaacattaataattataaaagaatattaaaatgcacagaaattaacattaattacaaactttacatcttatgccacaatgtgtgaaaagcatcatgaatagttctacttcagttaagctgctcatacatttttaccctctcaaacataatatgaacataaaatggtacaagaagtgtttcaacaagagtacattctgacccccattgtgaattaatgttttatgaaattcaaggcacacatgcaataaaaaagggaagactttggtgacagtttataagatggccttgtttagttttaaaataaaaatgatagctttccctttctaatgatatatagctaaattatctgagggatgtttaatgaaaaatcccctgagtatttgctctaatgtttcaatatgctaaaattcacaggcattaaaaaaggatataaagctcagttt

SEQ ID NO: 6533 - DNA, 1602 bp, Homo Sapiens
  misc_feature (291)..(352): n is a, c, g, or t
  misc_feature (372)..(385): n is a, c, g, or t
  misc_feature (736)..(765): n is a, c, g, or t
  misc_feature (1076)..(1076): n is a, c, g, or t
  misc_feature (1081)..(1081): n is a, c, g, or t
  misc_feature (1143)..(1143): n is a, c, g, or t
  misc_feature (1181)..(1181): n is a, c, g, or t
  misc_feature (1237)..(1237): n is a, c, g, or t
  misc_feature (1312)..(1312): n is a, c, g, or t
  misc_feature (1358)..(1358): n is a, c, g, or t
  misc_feature (1417)..(1417): n is a, c, g, or t
  misc_feature (1429)..(1429): n is a, c, g, or t
ggtatcgtatgcagtgcaaatatgtgaaatgtcttttggtttattccaacaattatttattttagaaagtaagtttaaagactttaaggacattcaaagtttaaaatagtgttcaaattgcaaaatttggcaatcttcatataaattggtttcttttctaacttttcaaaaactaacattaaatgtcaattataggaaaacatagttggaaatgtaatcatccaaagatcatttttaaaatgaaatttaattagcacatattgaacatttgacttaattgttaaaccccannnnnnnnnnnnnnnnnnnnnnnnnnnnnnnnnnnnnnnnnnnnnnnnnnnnnnnnnnnnnngttgctttattattcaaggnnnnnnnnnnnnnncttccccatgggggagattgtcttccaatgtttaactacgtttaaataaataaaaattgaattttattgttcatttatataaaatctgataccttgatgtaatttcacaatacagttccaatttttatggcttttataattacaatgatattttcttctataataaaatccaaagtaaacatttaaattgtagaactgatatttttcatttatatgaagtataagcctctactgggtctatattgtgaatcatcctgcctttcaaatttgtttcataattgttagatgaaaactatttttttggagatgttactgaagttgattgagcaataaaagtctacttaattagtnnnnnnnnnnnnnnnnnnnnnnnnnnnnnnccctgaccaaagcacttcgctcctccaaaacactcatccaaacacctttaattcgaacactgttgcgccccccttgcgtcaccacccaaaaatggcacactaggcctacccacccccagtcgcagaacacccaggcgccacaggaacctagtccgctttggggacatccttgaatctctataccatcttaatttttcccctacccgtgcaaaacccccgcaaggccgccatcctaaataaccgaccaatttttccccaacaaacatgatcacaacgtttttcatcatcaatggctgatgcacgccttctcnatacncgctgggcggagaatataataatatatctctgagacgaacagagctgagcaccacgccggtngctcgcacttccgctccaggacatcttaatatcaacancactccgctgccgagccacgatcgcggtccgacggcaaagagaggtctttaatatnacgcagcccctgcactctcgcgtacgaactccaccccgcgcgagagcgagatagtgaactcaactccaataaagngccagaggaagtatgatagatctagctcgatgatgaccatagcacnaccacattaaactgttcgccatcattaccaccagatcccgcgtttacacatctctattnaagcacacctcntctacagagtacgcgtggtatcacagccaccacctatctgactatggagcgacacccccccgcgccacacctatttacgctcctcacgtttattaacgcccactcctcgtatatataaacatgacccaagcgagaagttcataatactatatacatctacacacgcgcgcatg

SEQ ID NO: 6534 - DNA, 1316 bp, Homo Sapiens
  misc_feature (582)..(582): n is a, c, g, or t
ggaagggctactctatggtgagggcctctcatggagtacggaagggtgcctggtattttgaaatcactgtggatgagatgccaccagataccgctgccagactgggttggtcccagcccctaggaaaccttcaagctcctttaggttatgataaatttagctattcttggcggagcaaaaagggaaccaagttccaccagtccattggaaaacactactcttctggctatggacagggagacgtcctgggattttatattaatcttcctgaagacacagagacagccaagtcattgccagacacatacaaagataaggctttgataaaattcaagagttatttgtattttgaggaaaaagactttgtggataaagcagagaagagcctgaagcagactccccatagtgagataatattttataaaaatggtgtcaatcaaggtgtggcttacaaagatatttttgagggggtttacttcccagccatctcactgtacaagagctgcacggtttccattaactttggaccatgcttcaagtatcctccgaaggatctcacttaccgccctatgagtgacatgnggctggggcgccgtggtagagcacaccctggctgacgtcttgtatcacgtggagacagaagtggatgggaagcgcagtcccccatgggaacccctgaccaggtccctcctttctgtcaagggactttctgggaataatactgggggttttgtttttgtttttgaactgtctcaaatgttctcccaaagatgctaaaaacacagcctctccttttagcaagttaaaaggctgggtaggactgcgggagactgcctgcctttcaccattttctccccacttccagtgactgctcttattttgtgtaccataagccaacaaccgctgactccaggattgcataagccccctgtgaaatcggtgctgtactgcataccctgccagctgtgacttgttatcctactatattttctaaggagtgaataatattgtccgagtaactaacttatttaaaagacatttccttctgtgggcattgactgtatcccacctgttttccaaggaaatggtaacctgtttctgagaacacctgaaatcaatggctatacattccaaaccaatctaaacgctatttccttttggtgtgggtttggttttgttcattttgaaatacacttttgaacactgagatccgtaaaactactagatctctggaagtgtaattgtgaaagaaacttgcttgcagctttaacaaaatgagaaacttcccaaataaaacttgttttgaagtttaaaaa

SEQ ID NO: 6535 - DNA, 1679 bp, Homo Sapiens
  misc_feature (727)..(743): n is a, c, g, or t
  misc_feature (1004)..(1040): n is a, c, g, or t
ggggacatgccccgcggcgcgccattaaccgccagatttgaatcgccggacccgttggcagaggtggcggcggcggcatgggtgccccgacgttgccccctgcctggcagccctttctcaaggaccaccgcatctctacattcaagaactggcccttcttggagggctgcgcctgcaccccggagcggatggccgaggctggcttcatccactgccccactgagaacgagccagacttggcccagtgtttcttctgcttcaaggagctggaaggctgggagccagatgacgaccccatagaggaacataaaaagcattcgtccggttgcgctttcctttctgtcaagaagcagtttgaagaattaacccttggtgaatttttgaaactggacagagaaagagccaagaacaaaattgcaaaggaaaccaacaataagaagaaagaatttgaggaaactgcgaagaaagtgcgccgtgccatcgagcagctggctgccatggattgaggcctctggccggagctgcctggtcccagagtggctgcaccacttccagggtttattccctggtgccaccagccttcctgtgggccccttagcaatgtcttaggaaaggagatcaacattttcaaattagatgtttcaactgtgctcttgttttgtcttgaaagtggcaccagaggtgcttctgcctgtgcagcgggtgctgctggtaacagtggctgctnnnnnnnnnnnnnnnnntttttgggggctcatttttgctgttttgattcccgggcttaccaggtgagaagtgagggacggaagaaggcagtgtcccttttgctagagctgacagcctttggttcggcgtgggcagagccttccacagtgaatgtgtcctggacctccatgttgttgaggctggtcacagtccctgagtgtggacttgggcaggtgcctgttgacatctgagctcgcaggttccctatctgttcacacctgtgcctcctcagaggacannnnnnnnnnnnnnnnnnnnnnnnnnnnnnnnnnnnnggtagatgcatgacttgtgtgtgatgagagaatggagacagagtccctggctcctctactgtttaacaacatggctttctgattttgtgtgaattggtaattcacagaatagcacaaactacaattaaaactaagcacaaagccattctaagtcattggggaaacggggtgaacttcaggtggatgaggagacagaatagagtgataggaagcgtctggcagatactccttttgccactgctgtgtgattagacaggcccagtgagccgcggggcacatgctggccgctcctccctcagaaaaaggcagtggcctaaatcctttttaaatgacttggctcgatgctgtgggggactggctgggctgctgcaggccgtgtgtctgtcagcccaaccttcacatctgtcacgttctccacacgggggagagacgcagtccgcccaggtccccgctttctttggaggcagcagctcccgcagggctgaagtctggcgtaagatgatggatttgattcgccctcctccctgtcatagagctgcagggtggattgttacagcttcgctggaaacctctggaggtcatctcggctgttcctgagaaataaaaagcctgtcatttcaaacactgctgtggacccta

SEQ ID NO: 6536 - DNA, 756 bp, Homo Sapiens
gggaggcggcgaggagagcggtgccttgcagggatgctgcgggcgggagcaccaaccggggacttaccccgggcgggagaagtccacaccgggaccaccatcatggcagtggagtttgacgggggcgttgtgatgggttctgattcccgagtgtctgcaggcgaggcggtggtgaaccgagtgtttgacaagctgtccccgctgcacgagcacatctactgtgcactctctggttcagctgctgatgcccaagccgtggccgacatggccgcctaccagctggagctccatgggatagaactggaggaacctccacttgttttggctgctgcaaatgtggtgagaaatatcagctataaatatcgagaggacttgtctgcacatctcatggtagctggctgggaccaacgtgaaggaggtcaggtatatggaaccctgggaggaatgctgactcgacagccttttgccattggtggctccggcagcacctttatctatggttatgtggatgcagcatataagccaggcatgtctcccgaggagtgcaggcgcttcaccacagacgctattgctctggccatgagccgggatggctcaagcgggggtgtcatctacctggtcactattacagctgccggtgtggaccatcgagtcatcttgggcaatgaactgccaaaattctatgatgagtgaaccttccccagacttctctttcttattttgtaataaactctctagggccaaaaaaacgaaacc

SEQ ID NO: 6537 - DNA, 857 bp, Homo Sapiens
  misc_feature (359)..(377): n is a, c, g, or t
  misc_feature (379)..(589): n is a, c, g, or t
  misc_feature (591)..(596): n is a, c, g, or t
  misc_feature (598)..(609): n is a, c, g, or t
  misc_feature (611)..(612): n is a, c, g, or t
  misc_feature (614)..(614): n is a, c, g, or t
  misc_feature (616)..(635): n is a, c, g, or t
  misc_feature (637)..(640): n is a, c, g, or t
  misc_feature (642)..(646): n is a, c, g, or t
  misc_feature (649)..(654): n is a, c, g, or t
  misc_feature (656)..(658): n is a, c, g, or t
  misc_feature (660)..(665): n is a, c, g, or t
  misc_feature (667)..(671): n is a, c, g, or t
  misc_feature (673)..(675): n is a, c, g, or t
  misc_feature (677)..(680): n is a, c, g, or t
  misc_feature (683)..(688): n is a, c, g, or t
  misc_feature (690)..(704): n is a, c, g, or t
  misc_feature (706)..(708): n is a, c, g, or t
  misc_feature (711)..(712): n is a, c, g, or t
  misc_feature (729)..(731): n is a, c, g, or t
  misc_feature (734)..(734): n is a, c, g, or t
  misc_feature (736)..(739): n is a, c, g, or t
  misc_feature (742)..(743): n is a, c, g, or t
  misc_feature (748)..(749): n is a, c, g, or t
ggcgaacaatgctagcttgactattgcttgtacaaaccgttttttgcccaagtcggactattttcttaggttaaattccttggtgcagaagtgcgagggctgtatttaggcccctaaaggggtggtaccaaaatcgccctcccccaccagcataagagggggccggcgacacccttgcccaagctggattttgcagacctggtaggcgtgagatagtatttcactgtagcttgtgtttcctgtaagtatagtcgaacgtcgtgatgttcctgttacatctatgttacgttgatcattgttaccactgacagtcgtttcgagattggaaaatatgtttattataaacgtttgactattcnnnnnnnnnnnnnnnnnnncnnnnnnnnnnnnnnnnnnnnnnnnnnnnnnnnnnnnnnnnnnnnnnnnnnnnnnnnnnnnnnnnnnnnnnnnnnnnnnnnnnnnnnnnnnnnnnnnnnnnnnnnnnnnnnnnnnnnnnnnnnnnnnnnnnnnnnnnnnnnnnnnnnnnnnnnnnnnnnnnnnnnnnnnnnnnnnnnnnnnnnnnnnnnnnnnnnnnnnnnnnnnnnnnnnncnnnnnnannnnnnnnnnnntnntntnnnnnnnnnnnnnnnnnnnngnnnngnnnnnagnnnnnngnnntnnnnnnannnnncnnncnnnnagnnnnnncnnnnnnnnnnnnnnntnnncgnncctccccccgcccttcnnnccncnnnnagnnttgcnnaaaatatgtctgaaagcacccaagcccccaacaccacagaacggtgaacaagccgcagacaaatagtcggtgtctaccctcctacaccaagaagtgtctcccccccca

SEQ ID NO: 6538 - DNA, 499 bp, Homo Sapiens
cgtgcagagcagctgaggctggtgccgaccttgtcctgctggacaacttcaagccagaggagctgcaccccacggccaccgtgctgaaggcccagttcccgagtgtggctgtggaagccagtgggggcatcaccctggacaacctcccccagttctgcgggccgcacatagacgtcatctccatggggatgctgacccaggcggccccagcccttgatttctccctcaagctgtttgccaaagaggtggctccagtgcccaaaatccactagtcctaaaccggaagaggatgacaccggccatgggttaacgtggctcctcaggaccctctgggtcacacatctttagggtcagtggccaatggggcacatttggcactagcttgagcccaactctgactctgccacctgctgctcctgtgacctatcagggcagacttcacatatgatcatctcagtttcataatatgtaaaatgggtctaataaagaataaaccaca

SEQ ID NO: 6539 - DNA, 523 bp, Homo Sapiens
  misc_feature (412)..(440): n is a, c, g, or t
gggggagagccagtatgggggagcaaatttgacaaatgggaattagaggagtgcagttttaaaaggaaaagttgctgtcatcaaaatggcagccttttccccagctactgtttttggggccaagatggctgccctagcagcaatcactgccaagggcaagatcatggcttttggagggaggtgagtttagggagggccaggaccatcctcctacccctcataccctcccagcatatacaaaaggggaggttttagacaggctccctgaatgttaaccacagaggagtcactccttcattcctcctctgtctctttgcacttttcttggtcttggccacagcctgagtgacgaatttcctactgaatgtaccaagttccaatttttaagggggggaaaggtttcaaatggggnnnnnnnnnnnnnnnnnnnnnnnnnnnnnttcccacaaatcttgtttctggcactttagaaaaactgcaaaaaaatacgtaataaagaatacatatatatatatctacacac

SEQ ID NO: 6540 - DNA, 1129 bp, Homo Sapiens
gtgctcttgtcccattctccctccctgtcttccagcaggctctccccggaggctcagccccctctgctccccatgggcaactgccaggcagggcacaacctgcacctgtgtctggcccaccacccacctctggtctgtgccactttgatcctgctgctccttggcctctctggcctgggccttggcagcttcctcctcacccacaggactggcctgcgcagccctgacatcccccaggactgggtctcttttttgagatcttttggccagctgaccctgtgtcccaggaatgggacagtcacagggaagtggcgagggtctcacgtcgtgggcttgctgaccaccttgaacttcggagacggtccagacaggaacaagacccggacattccaggccacagtcctgggaagtcagatgggattgaaaggatcttctgcaggacaactggtccttatcacagccagggtgaccacagaaaggactgcaggaacctgcctatattttagtgctgttccaggaatcctaccctccagccagccacccatatcctgctcagaggagggggctggaaatgccaccctgagccctagaatgggtgaggaatgtgttagtgtctggagccatgaaggccttgtgctgaccaagctgctcacctcggaggagctggctctgtgtggctccaggctgctggtcttgggctccttcctgcttctcttctgtggccttctctgctgtgtcactgctatgtgcttccacccgcgccgggagtcccactggtctagaacccggctctgagggcactggcctagttcccgacttgtttctcaggtgtgaatcaacttcttgggccttggctctgagttggaaaaggttttagaaaaagtgaagagctggaatgtgggggaaaataaaaagcttttttgcccaaaaaacacgaaagaagcatttccccactcccacccgtagcaaagcggagttgttcaagcacatatctatttggggaggctaatttatgatacaccaaagttagggatcccccaatgcgattccccctaccctgagggaggcggggggggcgggcttacaaatgcgcccgcgggggcggcccgcaatggttgggacaacaccc

SEQ ID NO: 6541 - DNA, 462 bp, Homo Sapiens
ggtgaccatatgatcatccgcacgctgagcacttttaggaactacatcatggacttccaggttgggaaggagtttgaggaggatctgacaggcatagatgaccgcaagtgcatgacaacagtgagcttgggacggagacaagctccagtgtgtgcagaagggtgagaaggaggggcgtggctggacccagtggatcgagggtgatgagctgcacctggagatgagagtggaaggtgtggtctgcaagcaagtattcaagaaggtgcagtgaggcccaggcagacaaccttgtcccaaggaatcagcaggatgtgtgggccaggatccccctctttgcacagcatgaggcaaaaatgtccagccacccccaggcatctgttagcagagtctgtctcttggctttgtcacttttccttttcttaaaacaaagccatgccaataaagtgatctgtgttcgaaaaa

SEQ ID NO: 6542 - DNA, 1645 bp, Homo Sapiens
gtcgccgtgggcgacgtgcccgcttccaaaatggcggcggcggcggtatctggtgcgcttggccgggcgggctggaggctcctgcagctgcgatgcctgcccgtggcccgttgccgacaagccctggtgccgcgtgccttccatgcttcagctgtggggctaaggtcttcagatgagcagaagcagcagcctcccaactcattttctcagcagcattctgagacacagggggcagaaaaacctgatccagagtcttctcattcaccccccaggtatacagaccagggcggcgaggaggaggaggactatgaaagtgaggagcagttgcagcaccgcatcctgacggcagcccttgagtttgtgcccgcccacgggtggacagcagaggcgattgcagaaggagcccagtctctgggtctctccagtgcagcagccagcatgttcgggaaggatggcagtgagctaatactgcattttgtgacccagtgcaatacccggctcacacgtgtgctagaagaggagcagaagctggtacagttgggccaggcggagaagaggaagacagaccagttcctgagggatgcagtggaaaccagactgagaatgctgatcccatacattgagcactggccccgggccctcagcatcctcatgctccctcacaacatcccgtccagcctgagcctgctcaccagcatggtggatgacatgtggcattacgctggggaccagtccactgattttaactggtacacccgccgagccatgctggctgccatctacaacacaacagagctggtgatgatgcaggactcctctccagactttgaggacacttggcgcttcctggaaaaccgggttaatgatgcaatgaacatgggccacactgccaagcaggtaaagtccacaggagaggcactggtgcaaggactcatgggtgcagcagtgacgctcaagaacttgacaggtctaaaccagcgtcggtgagaggaaggggtataagctacaatgcctagaagagaatgagcggacagattgaaagagctttgaaaagtataaggtgccatccacataacctggtgttcacgagaacacactaaaggactcctgagtcactaccacagccacctggaaaccacaaggcatttgatgctaccgttctggtcagggattgggctgcttcttcagttcctaataccagaccaagcctcctgatgcctttctgcactgcaactgtgtgattgaaaaatgagatgttcatccaagcagtcaagccacagaaacccagcatgtccctgtcacaatctcatgggcaccttgatcatgtcttaaccttcccttaaccttggggctcccaagccagagtcaaggtctgacgccacctcaaggtgacagctcatctccagcacagcacaggcgtgtgcacacagaggtgttccttgcagccccctccctctcaggtgtcctgagatgctgctcctgggagccccctcagaaaactgcctcacctgagacaagtgcctgctggacagaggtgtgattccaggcctggtgtcacatgacaccagcatgcattgcaggattattagtgtattttgagtctgtaaaaataataaatatgtttgaagtagtttcccaaaaaaaa

SEQ ID NO: 6543 - DNA, 330 bp, Homo Sapiens
ggaccaaagaaattaatgagaagagcaatatactatcaaatgaaatgaaagctaagaataaagatgtaaaagatacagaaaagaaactgaataaaattacaaaatttattgaggagaataaagaaaaatttacacagctagatttggaagatgttcaagttagagaaaagttaaaacatgccacgagtaaagccaaaaaactggagaaacaacttcaaaaagataaagaaaaggttgaagaatttaaaagtatacctgccaagagtaacaatatcattaatgaaacaacaaccagaaacaatgccctcgagaaggaaaaagagaaagaag

SEQ ID NO: 6544 - DNA, 608 bp, Homo Sapiens
  misc_feature (41)..(57): n is a, c, g, or t
atgccctgacccacctggcactgaggagagtggtttccagnnnnnnnnnnnnnnnnnttttttgatttttggccttgtggcagcacatcctcaggggcaaagttgtttgtaaatgttccagaacaccctagagaacacctgagtactaagcagcagttttgcaaggatgggagactgggatagcttcccatcacagaactgtgttccatcaaaaagacactaagggatttccttctgggcctcagttctatttgtaagatggagaataatcctctctgtgaactccttgcaaagatgatatgaggctaagagaatatcaagtccccaggtctggaagaaaagtagaaaagagtagtactattgtccaatgtcatgaaagtggtaaaagtgggaaccagtgtgctttgaaaccaaattagaaacacattccttgggaaggcaaagttttctgggacttgatcatacattttatatggttgggacttctctcttcgggagatgatatcttgtttaaggagacctcttttcagttcatcaagttcatcagatatttgagtgcccactctgtgcccaaataaatatgagctggggattaaatacgaaaaaaa

SEQ ID NO: 6545 - DNA, 469 bp, Homo Sapiens
gtcagaggattccccaggcaaagctcctactcaccaagaagacatagctatcctaaatctttatgcaataaacaatagagcttcagaacacatgaagcaaaaactgacagaaataaaataggaatagttccacatataacagttggaggttgcaatattcctctttcagttattaaaaaaacaggcagacacaacattaccatggatagagaagacctgaaaaacattaagaatcatcttgacagttacagaacactccatccaacaacagaatacttattctgggaatcaccaagatagaacacatagtgtgtcacaaaccaaaccttaaacttaaaatgactgaagtcagccgggcacggtgcctgtatcattataacacagattcttatatacaattacatattgggtagttataacatgatgatgtagaccagttcacatagtctactcttctgcagtgactaag

SEQ ID NO: 6546 - DNA, 654 bp, Homo Sapiens
gctgacctagaggatcccaggcaaagctcctacccaaactggagggtgaactccaggcacctgatctggaactttctttgccagcgattcacgtcgaaggtcttgacatcaaggcgaaggctcccaaggtcaagatgccagatgtggacatctcagtgccaaaaatagagggtgacctgaaaaggccccaaagtgcaggcaaacttgggtgcacctgaacatcaacatcgaaggcctagatgctaaagtcaaaacaccgtccttcggcatttctgcccctcaagtctccatccctgatgtgaatgtaaacttgaaaggaccaaagataaagggtgatgtccccagcgtgggactggaaggaccagatgtagatctgcaaggtccagaagcaaaaattaagttccccaagttttccatgcccaagataggcatcccaggtgtgaaaatggagggtgggggagccgaggtccatgcccagctaccctctcttgaaggagacttgagaggaccagatgttaaagctcgaaggggccgatgtttctctaaaggggcaggagtagacttgccttcagtgaacctctctatccaaaagtctcgggcctgaccttatctgaacttgaaaggacaagttgaagggagactggatgcatctgt

SEQ ID NO: 6547 - DNA, 602 bp, Homo Sapiens
tctagagtattccccaggcaaagctcctacaggagtatatgaatttgaagcttatgggattttggcagagaaattttcagctgtgcttgatacccaccaaaagaatgtatctcgaaagaatgaaggaagaagaaaaaaggatcctttgatgttttgtgacaagaaaaatgagaaagttagtatctgcaatacagagcttgttcctgttcagtgactgacgctctgtattctgtatagacaccaggccgataacacagtggagttcccaggccttgtttgcaggaagccgactgtaaagacagccccagctcaaggctataaggttgaatatttgctttcatgagtaaatgtggatcttaggggaatggcttaaaataagtcacgaacacaaattctttgtaaattatgtaaattcctgtttaatataaattggcaacaacttataccgtctgaccagttcaaaatctctttcagctgcgctcttcccaccgagccgagctttactgtgagtgtggagatgttatcccaccatgtaaagtcgcctgcgcaggggaggggtgcccatctccccaaaccagtcacagagagataggaaaagggat

SEQ ID NO: 6548 - DNA, 898 bp, Homo Sapiens
caattacctttactggatctgccaagtttgttttgaacaatcctggttcaatgcatgagacgtgcacaccaaaagctttcatgtcccgtcttaagctgtcattgaaaccttccactgcatatttggatggagtatagccccctccaacgattgcaaggcgacctccaacactggagacattaataactctcccttgagctttccttgaccaaaggaagcatatttagtgtcacactgatgagtccaaacaggttcacttcaataggttctctgtagtcctctagtgtcagccagtcagtgggagccagcacgccgggaacaccagcattattgatcagaccccagagacctttctccccaacttggttcttcacccactgggcagtcctcttgacattctctgggtcggtcacatccagaagcacagtacgaagtctctctgaggtttctgcctttaaagctgttgatcctgattcagtcagacaggcagcgattacatgaaatccctttttatcaaaagttctggctgccaagtttccaaagcccgagtcacatccagtgataaaaatgtacttatcagtgatgtcttcaatctttagttttcctttacgagtccacagaaaaccacagaggattaggaggcctagcacccaaaagagcatttttccccctgtgtgtgataggtacactcctttcttgtataatacaagaagatggtgtccttattaaagatgaagtgggacacagaaactgttggtggacttgctcagctgatggcagctttcctgctgtgcacggggaaggaagagttgtgccacctggccaggctgatcctcttgaggtcgaggtgcctgggtttccgtagagctctgagtactacatgtgtgaggaatcctca

SEQ ID NO: 6549 - DNA, 555 bp, Homo Sapiens
gtctatgatttaggcgcagtaagaagaacagatatttccctctttggctagtgatatgcttttagggtagttacgctgctgagttatcccagtgaagttagtgttgaggaaattctctttacttgagccaagatctgcacttatgtgcaagactgtggtacaagctcctaaaagaagattactgctgccaacttaagtcatctccattaacgaaattgcattcttgtggcagagttaaaacaacaagagaaattcagtgttcgctggttctgaatgtcatttttcctccctggtgtggttttacattttcagcttctttcccttttcttctctcccaccctcaaaattctgccttagcatttgtgtgcttaattaaatccactctgtgctttatagttggagaatgtggacaatacaaagatttggggtggggtcatacagtgtatacaaaacacagacactatgtgtttggacaaattcgcctagcgtgagaatcatcagtagtgagttaaacgtttgaaatcagagccaaatatggggtgttaaaatatctcc

SEQ ID NO: 6550 - DNA, 505 bp, Homo Sapiens
tgattgatatgtcacagaaatcatggtagtaaatcacattgctatttgaatagcctgtttttgtaagtttttaaaactcatattctgacaagatgtcattctcttagtgttagcttgggagttagattgccatgattaaactattatttatccttgtgtaatattagtttgtaactttaacatctgttgctttttaatctataatgagctagttttatggaaaatggaatttcttactatataaagaatacagagactcattgtattagagaatcaagtcagccagcttaagtatcctactgttacatccttaaacctaattttggaaaagagaaagttaacaatgtattaccttacatgtggaaagaactatgttagtctgattcatgtgaagaagatgtgcaaaggatttattcacaattttaaaggagatatgagtaaagttttatctttcttgacttttctcctgacactatgtctagcagtgtcactgagattgacgcta

SEQ ID NO: 6551 - DNA, 547 bp, Homo Sapiens
tgtccagaggtccgtaggtcgggatccaggccaacgaagtctgacatgggaggattttcacttcatgctgcgggaccatgacagcgagctccgcttcacgcagctctgtgtcaaaggtggaggtggaggtggaaatggtattagagatatctttaaacaaaacatcagctgtcgagtctcgttcatcactcggacacctggggagcgctcccacccccagggactggggccccctgccccagaagccccagagctgggaggccctggactgaagaagaggttaggcaaaaaggcagcagtgcccactccccggctgtacacagaggcgctgcaagagaagatgcagcgaggcttcctagcccaaaagctgcagcagtacaagcgcttcgtggagaactaccggaggcacatcgtgtgtgtggcaatcttctcggccatctgtattggcgtgtttgcagatcgtgctgactactatggctttgccttggccaccctcggacactggcacagaccaccctcgtgggcatcatcctgtccgaggcacgcg

SEQ ID NO: 6552 - DNA, 1034 bp, Homo Sapiens
gggggacatcggatcccgcggatatgggcgccctcgcgtagggaacccgtagtttcggagggctcccgcactgtacgcagcagaatgctctgggggccagtggtgcccaaggcggtcaccatcctcgtgtcggatgggctggtcgcagaaagcgacatcattggcgagaaagcgctcaaaagtagcactcggggcagaagggggctccatcccttcgtcgaagaagctgctgcctcccagggcggtggaacagcctccgcaaacgaagttgctcggggtgccaggcgcggcccagagccgtcaccacttgcccagcaaataggtttattgcaggagccacagaggcctttggcctgggtgggaacaccccggcggctgaggtcggactgcagcagccccagcatggtgtctaggctgcccttgccagtcggctctggtggggatggggagccctcatttgtggagctcaccaccggtggctgagttggcccagaggctggaagatggttttgaacgcggaagtcagagagtgaggccatcagtctatccagctccagagtggctgaggtggcagaagcctttgggaggccaggagacgggctggaagggaggctgggtcttttcttatcttcagactggtcctccttctgctctcctgaagccaccttgctagatgggaactgagacatgatttcatctgtgatgttgaactgagtggcattaagttcctgaagcaaccgatctagctcacagagcccggtacccaagacaccgctggaagaggagaatggaggggccgccggggctgcaggctttggggaccgaggcttgcataccgtgctgtacaggtggtccttgtcccccgaggctcctgaagactccccagaccctgtctgtggctggtggccataggatgggggaggggtgagaggctccgcagggcgctctttgggagccctgaccttggcatgtgcgaggtggtagtctccaggtcagagagcagggcatccagatcctccatggcggggcgcggg

SEQ ID NO: 6553 - DNA, 608 bp, Homo Sapiens
acatccggctgacgtgcgatcggtcgtccgacctgggtataggggcgaaagataatcgaacacatctagtagctggtaccctaccgaagtatccctcagtgatagctggcgctctcgcagacccgacatccccaccggcctccccggggattgcggggctgccagggccaccgtggggaccccgccctcgctgcctacccctgccctgcgtaacagtgtctgggaagccaggcgcaggggtgccagctagcactcaccactacacactgaaagcagtcacttccggctgctgctaaaacacactactgactgagcatctagcacgagccaggtcctcagagctccctgaaccctcttccacagggtgcagccctaccctttccacacacacaggaacccaggcaccgagtgaggggcactaagtcctagaacccgcttctgctccaaagccagagctttcctggaagccctgggatcagagcccactccgtctcccagtctcagctggcagggcagggtcagcctccttggggggaaggtgctgacacaatgaggtcaatgacagactggcgcccacacccacgagggcactcatggctatgtcaccc

SEQ ID NO: 6554 - DNA, 570 bp, Homo Sapiens
tcccacgggtcgcagttacttattcagggagagtgactgcattcgttttcctgacaatgtggcatcgtcttatgctatcctttactctatccttctgccgggcagcctcctcccgctgtaacaggatgatggccagccgggccaggtcagccttggatagctctgtcttcccggccaagtgcattttcatgtaacgctcttttgccttctgcttctcaatctcttctcgttctctcctcgaaagctcctttggcccgtccagatccagttgtgtgacctttttggttgtctgtgccacccggttggggttctcgatgtcgatgagcccttcaacgcctttgcgcttttgctggtagtcatcttcttcatcctcactctcatctgagtctagagatttcttctcctttttggggtcacctgcagccccatctccaccttctttttgctcctcttcttgcctggccttctgcttctcagcctgcagctgcagcgtcgatctcctcagggcttgtatactgcctcgcccggcctttgtgcctcccaatcttcctcctttagccattgcactcc

SEQ ID NO: 6555 - DNA, 445 bp, Homo Sapiens
  misc_feature (244)..(313): n is a, c, g, or t
tttaacatatgacaggaagtgttgaaggcactttatttgtattaatttatttaaccctcagaataatcctgagacagtgtttttatcatctttgccatcttatatatgaagacagtgcagatcagggaacttcagtccattgcccaggtttacacaggaagcagcaaacctgtgactctagcccgggcagaatattccaggtcacactctcttaatcaccacaaaatactgcctcctcaatcannnnnnnnnnnnnnnnnnnnnnnnnnnnnnnnnnnnnnnnnnnnnnnnnnnnnnnnnnnnnnnnnnnnnnatgacacgccggcagacaagaacccacgtcagctgctcttccagcatcaggcagtcctgccagaagcaccatacaggtggctgttgttccagctctgagtaaggcagccaggacccctctggctgtgaagaa

SEQ ID NO: 6556 - DNA, 437 bp, Homo Sapiens
tcctgcccccaggcctaggcatgctgcttgctcggccatccccacttcctcctctaccccaacacatgcaggctaggccttgccctggaacatggaggccctgcccggggctggggcctagtccagcagccaccaaagtctggcagactttctgcatttgagaaacatgacaaagggccccgcagcccttctgcacccagcacagcctgcccagcccagccctgcccccgggcactgcacagcctgtctgggggccagaccaccccattgtccatccttgttgtccgtgagtccttggcctccaccaagcacgtgtggccattgtgtgcctgccttagtgactccgtggttttgtgaggagcagagtgtgtatgatttttgcctcagaaactatactcttctgtgtaacagaccaataaacaacatttgtcaacaaa

SEQ ID NO: 6557 - DNA, 492 bp, Homo Sapiens
atatttgaaaaacactccagaatctagtacgctttatttttagactgaacctaaagtaggttgttcttttaacaaagggtttaattcgggtggggaatataacatatcaaaatacatgaacaaatggaaagttacttctagaaaagcaaagaaattgggtatcatttttgtttcttgggaagctaattttgttgaatgtttagaattgagcaaagatgtaaatttttgaagggcagtttagaaaaattaactttgtgaatgaacttaagatgtctgtactctatatgtgatgctgtgcagtttgtttttatatggaaagatgtcaactatagccataaccaataaaataaaaactgatgaggcatgcagctttcagcacatcttttatacatgaagaaattaattttgtgttgctatggtgttgaaatatccaagatgttctgtatctatgtaaacatgattcctttaataaattgtattttattattaaaa

SEQ ID NO: 6558 - DNA, 404 bp, Homo Sapiens
tttatgcttatgaatctatttaattgctcagactgtgctagagaatacgtaccatgaaatacatatatttcataaggttcagttacaaaatggattgtttcaaatggcaatttcttacactaacctgattatgaaaaaaagaagtctgtatcatctgcttccaagtctgttatgtccaaatatattttaattatgcatttattttgctacttttataaatattagagatttcaccttaaattatttttgtaactagttctagaacatgttttccaattattatttttctaatggagacatataattgacctatgtttatgcatatatgttctctacacagtgaaactttttttaaaaagaatagtaaagaaaatgcggaagctctggctctccaaggcaaagtc

SEQ ID NO: 6559 - DNA, 464 bp, Homo Sapiens
cgtccttagaatactgtattgttacagctgaaagacagtaaagaccatttagtcctcaccttctgttttagagttgagcaaactgaagcccacagaggtggaacttaattacctaagagccacaataagcccctggtatctgggggactagaacacaaatccaacgcttttcccacctctttggatgttttccccaattatcctccttcactccctgtcatagttaccgatggtgtcccgttgtgtgggtttactctgtgctaagttgtcttacacttctcaaatgctactcagtatatagccttaagtcttactgttttgtgcggtgtgtctccagctgattttaacttttttgatggtagaaattttatctcttcttccttttgtatcctccattgtatcttcatacaaaggacagtacacacttgggtaattaaaaataaaagttgattgaccataaaaaa

SEQ ID NO: 6560 - DNA, 658 bp, Homo Sapiens
  misc_feature (566)..(566): n is a, c, g, or t
gccccgttgatgccatgccgctcacagagtccggacaggatgtctttgatggagaagcccgccttgacagccaccacgcaggatgtcccatccgggagatgaatgcagcagtgcttggtggccttgtccttctcgggtgccaaagtcctgcaggcctccgacaggtccaggctccccgcagaggacacagagccctgcgactctcggcgacacaggcctccattggcatgcagggcgtcgtctgcgtggtccccgtgctccctctttttctgggacctcccggtgctcctggtccgcgaccacgagaaaaacgcgcctttccgcttcttctcgctgtcctcatcccccagctcttcattcagggatcggccggattttgattttccacttaacttttttggcgtggacacactggagtggtctgaaccgaggctgtgcttggaagccgggctgctggggacctgctgcgagtccgggagtgcacggccctccacttccgccaggatgcattcctggtacagcggggacttcagaaagcgagtgtagctatcaaacttcatgagatngaagatctgcagctgctgctccttgaacatgtctgggtgaggtgcgcggaagagtcgtctgcttgcctggcctggctgtcgatggtgaccgg

SEQ ID NO: 6561 - DNA, 541 bp, Homo Sapiens
ttccccgcttgacgggtgcagcggacttgctccagcctgggtgaggaggccccgctgaagaactcgcctcctgggacccagcttcagccatcgggccaggctgcaggaagaagacaaaggcagcgtgaggaaaccttggctttgaccccttctcgtgttgtcatctttggcttcgctcaccacccgggcttaccagatggaactcttctgtaaagcagcttggcccctccagccagtcccattcgggaaagatgaaaccggaggccgggctcacggtggtggtggagttcttggatgactcagccctgggacctgcacagggacctgtgacttgtgttcatcgggggccggtgtcacttccagttttgatccaggctctttcactgtaaaattatttattggattcctttggagtaatgggaacattctaatgttttatgtaggaaaatgccttgccattctagttgaatatgttcaaggaaattatttttgttgttgttctgtgttctcgagtttcaggagttaaatcatttttcccccc

SEQ ID NO: 6562 - DNA, 235 bp, Homo Sapiens
attccagttttcgttttttctaaaagatgaattcctatggctctgcaattgtcaccggttaactgtggcctgtgcccaggaagagccattcactcctgcccctgcccacacggcaggtagcagggggagtgctggtcacacccctgtgtgatatgtgatgccctcggcaaagaatctactggaatagattccgaggagcaggagtgctcaataaaatgttggtttccagcaaaaa

SEQ ID NO: 6563 - DNA, 266 bp, Homo Sapiens
tgtgaacctgaggattcggctgtgcatgcttacaactcgccagtattgactgttgtttgccaggtctctggcaaggtctggggtgacgaacgcaggacagacccgtcagtgcaactatcctgtgtcgtactggctggggctgctcaagtcctggaaagtgagagaaaggggccgtggccagtgatgccctggtgtggcacatccagaacgcctgggtcaccacggagcagcaggagcgataattctcccaggatgggccgggactt

SEQ ID NO: 6564 - DNA, 620 bp, Homo Sapiens
tgctgatctcgaggttccgggtcggctatctgtccagcaacccttcctctacttccacgtcctgttcctgacagcgcagtttgaagcagcagttgcctttcttttccgcatggagcggctgcgctgccatgctgtccatgtgcactggtgctgtttgagctgaagctgcttttaaagtcctctggccagagtgctcagctcctcagccacgagcctggtgaccctccttgcttgcggcggctgaacttcgtgcggctcctcatgctgtacacccggaagtttgagtccacggacccaagggaggccctccagtacttctatttcctcagggatgagaaagatagtcaaggagaaaacatgtttctgcgctgtgtgagtgagcttgtgattgaaagccgagagttcgatatgattcttgggaaactagagaatgacggaagtagaaagcctggagtcatagataagtttactagtgacacaaagcctattatcaacaaggttgcttctgtggcagaaaataaaggactgtttgaagaggcagcaaagctgtatgaccttgccaagaatgctgacaaggtactggagctgatgaacaaactgatgagccctgtcgtcccaca

SEQ ID NO: 6565 - DNA, 592 bp, Homo Sapiens
atgggctgaaacatggttcaacagtggacgagaagtaaggctagggatagaaggagcaaaccaaccatgctacagaatttctactttatcctaattataacaggaaacccttgaaaagagctaaagcacaggaatgacaagatctggtctgttcttcggaaaggttgttctaagtgcaacgcgaagaacagactggaggtaaagcaagcataggggccaagaaattggttaggaggttattgcactaacgcaagtctgaactgaccaaatagggaaaattggaaggtaccggggaagttcttccaagctccctgtaatgctctgccaactataacagtactaggctctgccaggaagcaagatgtggttttagtaaggaggtggtgccaatgctaaggctgatagcgagtcttccagcagactctactcctgcttctggcccaaactttatactcaatctctagacttgggctcccttatacctccacaatgaacataaagatcctcaccatgtgcaacagagagatagtctactgtaagagtatggatttgagtcagacgcacctacgttcaaattcctgccctgcgacat

SEQ ID NO: 6566 - DNA, 364 bp, Homo Sapiens
cgctccggtttctctgggagtgctgacatgacaaaacgtgactatctggtggatgcggccacgcagatccggctggccctggagcgcgatgttagtgaggactatgaggcggccttcaaccactatcagaatggcgtggacgtgctgctccgtggcatacacgttgaccccaacaaggagcgacgtgaggctgtgaagctgaaaattaccaaatacctgcggcgggcagaggagatcttcaactgccacctgcagcggccgcggagcagtggagccagccccagcgcggtgcagctggtccaggacccggcaaccggagggacctttgtggtgaagagcctacccaggtgccacatggtgagca

SEQ ID NO: 6567 - DNA, 414 bp, Homo Sapiens
tgctgatgtctgtctctgattcttgccccagaatcagttcttcattagctgctcagatgggcggacggttctgaacaaggtgggcgatgagattgtggacagaatcctgaaggcccacaaacaggggtggtgttaccgagtctacgtgcttttgcccttactccctggcttcgagggtgacatctccacgggcgctggcaactccatccagcccattctgcactttacttacaggaccctgtgtcatggggagtattcaatcctgcatcgccttaaaccagccatggggacagcatgccgggactatatttccatctcgcgggcttcgtacacacggacgagcatgggccgggcaccccgtctcagagctcatcacactccgaagcagtgctaagatcctgtagatcacccagc

SEQ ID NO: 6568 - DNA, 401 bp, Homo Sapiens
atttatgggaatggcaccgcaaagtcgaaggtcatgagtccattgtcatgcagtgaacattgaaggggtaaatcttggatttgcctcctactccgttacccacccttataacataaccgttgcattgttgggcagattacagtatgaaagtcaggtgatctcatctcttccagcttctggggtcaccctttcccctaatacttaaaatggcttgagccatgtactataagttcagtaccttttcttctctccaatattctgataataatggggcttacctttcctggtcatctttctttgaatttctgctgctacctcagtgtttcacctctggccactgctgtctcctcttcgctctgcactgcccgcttctctaatctcccagacatcccccgagccat

SEQ ID NO: 6569 - DNA, 468 bp, Homo Sapiens
ccacaagatggcggacctctcgctgcttcaggaggacctgcaggaggacgcagacggatccctggactttgtctcacaagatgaaatgttgacgcccctggggagattggacaagtatgctgcaagtgagaacatatttaacagacaaatggtggcccggagtttgctcgataccttgagggaagtctgcgatgatgaaagagattgtattgctgttttggaaagaattagcagattggccgatgattcagaaccaactgtgagagcggagctgatggaacaggtgcctcacatcgcactgttttgtcaagaaaaccggccttcaataccatatgctttttcaaaattcttactacctattgtggttagataccttgcagatcagaataatcaggtgaggaaaacaagtcaggcagctttgctggctctgttggagcaggagctcattgaacgatttgatgtggagac

SEQ ID NO: 6570 - DNA, 1161 bp, Homo Sapiens
  misc_feature (561)..(570): n is a, c, g, or t
aattcaacccagccattccaaggaaacaaagagaaattctatggcctaccatatgttccaaatactgcctggcagctgcgattcagccacctcgtggggtatggtgctagatattactcttacctcatgtccagagcggtcgcctccatggtttggaaggagtgttttctacaggatcctttcaacagggctgccggggagcgctatcgcagggagatgctggcccacggtggaggcagggagcccatgctcatggttgaaggtatgcttcagaagtgtccttctgttgatgacttcgtaagtgccctcgtttccgacttggatctggacttcgaaactttcctcatggattctgaataaaagaaacactctacacctcttaaatcaaggtcatgtagataatgactttgttataaatgctacagctgtgagagcttgtttctgatttcattgttcgcttctgtaattctgaaaaactttaaactggtagaacttggaataaataatttgttttaattacgccggccggcgggcgcgctggtcgcgcacggcgcacgccgnnnnnnnnnntgtgggcgcagagggggacgagccttgctgggccgccctcggccccttaaaaaactttttcagggcccttcgcctgtgggggccgcggggccccacagggacaggggacacgggggaagtaagggtgtttcccaaggggagacccctcggtcatgaaaaaaggggctgtggtattctctcccccaataaaaaaaacgccgccgggtgggaaaccccgagggttttttttgagaaaaataccccggtagtgggggctctctggagccgcacttttctgggggtatcttatccaaccgggggagccccccggagcagaggcttcccgaagattcacaataattcgcgccccccgaccgcttggggccccgcccgctgtcccaagagggacgcgggggcggaccagtatagtcctatgggggcccgttttcctcggcgcgcactatgtggggcagacgcctgactgtcaaaagaacggcgtcgagtgtgaagaaacaccgcacgcagacatggtcgccgcgggcccggaggatacgacaaggcagcccctctgcgctcccccccctttcgcggcgtgctatctacgtcatgggt

SEQ ID NO: 6571 - DNA, 431 bp, Homo Sapiens
tttctcctccagctgaatcagctggatcccagtgtcctggctgtttggtgattgggcaagattgaatttgcccaggtaggcgtgagagtgtgggttttgatgacctcgaaggtcacaggcagaaaataggagcaggatttcccctggggaaaagttctcctgggacatcttctgctcttctgtacatttctagatgcaaataactccttcaccaggcagtgagtggcgtaggctctggagccaggctgcctgggctccaatgccagctctgccacttgctagctgtgagactgtggacaaaccactcagcctctgtgtgcctcagttttcctatttgtaaaatagaggccatagtggtacctattttgaagactaagtaaaagaattcaaataaagagacttggcacagagtaagtgctcagtaaatggtt

SEQ ID NO: 6572 - DNA, 210 bp, Homo Sapiens
aagattaaagtttaaatgttttccactagtcatttcacttctaacttggtataggaagcttagctctctacatacctatcatgtgccctgtatcacagaagattcaggaaaaatgcacttgggaatcaaagaaaatggaacttctttttgaaaagacaagcaaccatgttaactgtattgacacatcctcaataaaacctgttgtataaa

SEQ ID NO: 6573 - DNA, 481 bp, Homo Sapiens
  misc_feature (445)..(445): n is a, c, g, or t
gagcgcgcagcaggcgaagctggctcctcctgggggcgatgcagcatcacagggctccggcccaccccgggccagggcgccgaccctccctgccggaccctctctagaaggccgcgggtctgggtctggctcatcccttaaagattccaagattgggcgcactctgagctccccaaacacaaaatgatgggatccctgcgcgtgcccccacgtcacagagtggtaggggtccaggggcattctaattataaacggggctcaatcacaccccaaaattctaaacgcctccacccctaacctgcaggtgcaaacagcacccctatttcattgccggcagctactttgtactttcgtactgatagacaaagatagtgacaacaaagacgggaaagaaacaagcatcgaaagctacatgaagggggtgcagcgctgttctaaaacacanaatgccgagccccgttttccctttccctccccgctc

SEQ ID NO: 6574 - DNA, 1109 bp, Homo Sapiens
cgccctgccgcctgccgcctgccgccggtggtcgctgcccgtggtgctccgtcgcccccgccacctcacgtcctcccgtgcgtcgggagcgtctcggctacaacatgttgggcatgatcaagaactcgctgttcggaagcgtagagacgtggccttggcaggtcctaagcaaaggggacaaggaagaagttgcctatgaagaaagggcctgtgaaggcggcaaatttgccacagtagaagtgacagataagcctgtggatgaggctctacgggaagcaatgcccaaggtcgcaaagtatgcggggggcaccaatgacaagggaattgggatggggatgacagtccctatttcctttgctgtgttccccaatgaagatggctctctgcagaagaaattaaaagtctggttccggattccaaaccaatttcaaagcgacccaccagctcccagtgacaaaagcgttaagattgaggaacgggaaggcatcactgtctattccatgcagtttggtggttatgccaaggaagcagactacgtagcacaagccacccgtctgcgtgctgccctggagggcacagccacctaccggggggacatctacttctgcacgggttatgaccctcccatgaagccctacggacggcgcaatgagatctggctgttgaagacatgagtgacccactgaaccaagaacttactggaagtgtgcctctgtgtctccttcctcgggggtaaggaggggacagtgcttcccaagttccagctgcaagtccaacttaaccaactttccttcaaagtcagttactgccaattttctgaaaaaagcatgttccatatactaagtctcttttctcacggtaggaaataatacagccaagatatgcagcatccttctcattgatgtagaaaattctgcgatagaccagaaaaatcctggcagcttttctccaggcatctgggtcactaaaaactgattttctaaaattattggatttgtattttgttattaagggggaaaatgtgatttgtgcctgatctttcatctgtgattcttataagagctttgtcttcagaaaaactaaaaataaaaggcattgacttaaaaaaa

SEQ ID NO: 6575 - DNA, 488 bp, Homo Sapiens
gcggccgcactcggggcacggaaagggcttctcccccgtgtggctgcgcccgtggctgcgcagctcgggtgccgtcttgtaggccttggggcatagcggacacgcatagggcctaggcttggccgcggagcctgacaccttctccccactggcttcctctgccttagcttctgtctctggctttggcttcacctcggccacctcttcagagcagtctgccggcccatgtgtggcagcgtggcgcgctgccctgggcgcgtttggaaatgtcttggtacaggacaggcacttgtagcggcggcccgagcgcttgtagccgggggctggggaccgggcctctgcagcctccacttccatggccttggtgaacggggtttctctgatgagacttgtgctgactccgtggcgtcggcgtcggctcctcgcaccgacggagcccggaccctgccaaacaggggccggcgctaggacccagcggcggggcgggg

SEQ ID NO: 6576 - DNA, 242 bp, Homo Sapiens
ctttcttagggcatctgtaggcctcaaaggacctttcctttaggtcatattcctcagaaagtcttcaatcttcccttgtttttgtttgtttgtttttcttaaagaatattttcaaagcttaaatttgtatattaatttaggactatttagaagtataggctgtcgttggcggcagcagtatattctgaaatgtctcatagatatatatttttgaataaagatggtgttgttgaacaacaaaa

SEQ ID NO: 6577 - DNA, 810 bp, Homo Sapiens
tggcttatattttgaaatctcatttctgttttctgtggctattttaattttccaccctcaaaatatagatgagtatctttgtagtaggaaaatcataaaaattaacagcttcttccctagttaataactctgcatattgtttttgtgcgtggagcaggggctaaatcaggaggggatttaaggcaacattgaagaccaagcagtatagaataaaagataagagcacaaaatctgtaattataaagcctttttagaattaggtctttgccactttctaaccctgaaaacttgagcaagtcacaacttttctgcgctcaattccttatctgtacaatgtagacaatgagtatttattgcaaagatgaaataatacataaaacaattaaaacagtgcctagcatacttcagtgtgctcatttaatatcagctgccatgaaggtaatcattgtgaaaatcttgaaattttatttatctaaatgggattgaggcatcggatttcttgttccacactgctagctggcttcaaaatgtagaaatatgtcgcaaattactgggaggcaaggaggtttctggcttcattactgttaccattgttcttttgttgtttgctaccaagttaaatttttcacgtgtgtcaagtactcctgcttaaggcattattctcgagtacttaatattttcaacgtgtgtcaatgatcatcattcaatagaaaagcccaacaaggctataaagattggaataaccctgcaaatgatacataggttgtaataatccagctattcccaaaataaagataagttagatactgt

SEQ ID NO: 6578 - DNA, 525 bp, Homo Sapiens
tatgacagtggggacggccgccttgacatagctccctagaggagacgacacctggagtcgggcttgctccggccactcttcacctcgtcacccttggctgtcagaacaatgttgaggtaacgcagatcataaagcagctgcagcgcccggttctgggtgactggaaatgcaccttctttcttaatctgtttttcttcggagagtttctcataggcagctactacttgaaccatacagcttttcagcatctcctgtaatgtcacctttggcaaggcatggcctccaacccgattaatttcctggcataaactaaacaggaaggactgtacataccaggacggctgtgcagggagtcggatcttggatgtgacactgctgccagactctgcctcctcctgaatttctagctcatcccagctggtggctgtggccagaactgagccagcatcatctagaagtaatgactgggtgaatccatgaatcaaaactttcacaactgcactgctccagacctggcaagccagg

SEQ ID NO: 6579 - DNA, 448 bp, Homo Sapiens
ctgtttgcttgtggtcgtttctgcacggatcccggatgtcgccggtgtttccattcggtgatcagcactgatccactgaggactcaccatggagtttgggtctgagctggtttttcctcgttgctctttttataagtgtccagtgtcaggtgcacctgctgtagtgtctgggggaggcgttgtccagcctgcaggtccctgagacttctcctgtgcagcctcttggatttaccttcagaaattatcttatgcattgggttccgccgggccccaggcaatggggctagagtgggtggcttccatagcagaagatggaagttattacttcggtcgcatacttcgcgaagggccggttcaccatttccagagacaattccaagaatttgttgtttctgcaaatcaatcagcctgagaggtgaggactcggctctttatcactgtgtgagag

SEQ ID NO: 6580 - DNA, 414 bp, Homo Sapiens
atctccaagttagtcgcggacgtctttgccacgttcacaaaccggtccagatcgtcacacttgttctggggcttgttgatggccaacgatattcaggaaccagctgcactctttaagtcatggctggtttgactcaggctctggtgggagtcttcgactcgttgcagctcccgcttcatcttgttgtggaggatgagttccgggaggcaggcagcatttgcaacagctcccttgacaaagtggaggtactccttcaggaacagctccaccttgtccactgctgtgcgtatttcattgatgtgtctttccatatatccgtaacaccgccagtcggtagtgaccagcgccattaggctggagacacccatctcaagggcctgctggagccgctgaagtctctcaatagctgtgtct

SEQ ID NO: 6581 - DNA, 442 bp, Homo Sapiens
aggaccgtcggtagtgatggtggtggatgcatggctggcggagtgcatggctgggagcgtggtgtgtgccagcagagcaggaagcaagctgcccaagaggtgtgcaccatgctcccactcttctacctgcttccagaccaagcacacacaaatctgggccaggctccctttcttcccacgagtgctacagatcagcctccacaaaaccagccactccccaggctcaagctcaagctcagagggacacaagccaaccaaggctacagttagagaccggtcctcagaggcctcgtgtagtgcgacgcccttgtgtggcagtaagaaaacgagggtcctggaaaggccccggacactgcttgtggacaccagtgcttctggaagacccacgcaggggccccgagaagggcgctgctccacgggactcaggtccacacgggcagct

SEQ ID NO: 6582 - DNA, 209 bp, Homo Sapiens
cccaggagtgctcgtctgctgcactttgggtggtggtagggaaccaggaaaccggggaagggctgctgactatgggcctcgtgagcaggctgctgatcctctctgagcctgcgaaaatccacctctcgtctcagattgtgggaggtgagaacatcaacatcaggaagaaaggaagccagaagctgctggttgtagaagaataactaaaa

SEQ ID NO: 6583 - DNA, 452 bp, Homo Sapiens
ctgtgcgttgggacggcgggggcaggagcgtgagcatcggcagcagctgcctggagcatcttttgccttggccatgtggagcccttgccccaactctacgggctgggtcctctcctccccaggggctggagtgacagcacaggccccaagaccaccaggtggcatggtggggtggtgggggaaggctagtgaaccaaggcaccatcactcacatggaggcgctaatagaaagacaggaggacagacggatggtcacctttccctctagcccaggccaagaacaaacccttgaggctccaaagctccttgtcccatgcacgctggtaagcgagccagtcattctctcagcctggccacagatcccctccccagtgcctggagactgcccaggcaggggctactctgcagcaggcaggccaaaggccccattgtgccgccgtcccaaagcacag

SEQ ID NO: 6584 - DNA, 821 bp, Homo Sapiens
tgtgagtgctggtgtgtatggggagtcacattgagcatctgcagccggtccagtgggtcattgcccaggcacagccacacacattctgcgtgctgcactctcagctgccagccgctcagcataggacatgtcaggccgcagggctggcccagctgccagcgctagacgttctcgctccaggggccccaggctcggatgaaaggggaaagggtgcaggccaggtgggccaggctgcagagccaggccccccatgtcggggaaagggatccaagcccggcccagggaccccatgtaggggttccagctcactaggcttcacctcaaagccaggcttgaggcggtcacggaggtctcgttcacgggcttcccgttccctctcccagggcagctggatcactgctgtacagggccagggacattgtaacccaggagccccagggtccactgcccccaggggcacgtagaatggatggttgcgattgccaggagacatgacatgaggccgggcatattcactgagagtgcgcaaggctggagtgtcaggacccaggtaggggggcactgtagccaccgcactgcccggttcaaatggagggcgatggggcactgggcccagagatgggcattccaccggagcacggccctcctgagccaacttctgtgggatacagggaaaagtggagtcaaagcggcagttatgaaaagaggtggctggttttaagctgcccatttgtttcgacagccgaatgccaaaatgcctcaactcattgaaactctgcccacctggaacttaactgcggccccatcccgggaattccgga

SEQ ID NO: 6585 - DNA, 394 bp, Homo Sapiens
tcaagaaagcgattatatgcgtgatgtggagatcaccgacgagcatttacaacagctaaacagtctagtacacgcctgtgcagacagagctccaggtaggcgtcaatgtcacttactggaggggatcccagccctaagagccctttctcagtggcagtatctccaagcctggacctcagcaagatcaaggtgtctggcctgggagagaaggtggacgttggcaaagaccaggagttcacagtcacaatcaaagggtgctggtggtacaaggcaaagtggcatccaagtattgtgggcccctcgggtgcagcggtgccctgcaaggtggagccaggcctgggggctgacaacagtgtggtgcgcttcctgccccgtgaggaagggccctatgagg

SEQ ID NO: 6586 - DNA, 124 bp, Homo Sapiens
cctccccccgcttctgggtatcagcacttaaacacatctctgccaaaccccaaaaacaaagaaccctaacaccagcctaaccagatttcaaattttatcttggtttggtcgttcggcgtgtgca

SEQ ID NO: 6587 - DNA, 867 bp, Homo Sapiens
ggggagagagggcgcggccaactccaggggggacggcaggccgagagcgcggcgcccgggcctggcgcggagcctgagcccgccggacgggaggcggccccgccgcgggctcggccccggccccagccccgccagcatggccggccggactgtacgggccgagacccggagccgggccaaggatgacatcaagaaggtgatggcgaccatcgagaaggtccggagatggtagaagcgatgggtgactgtgggcgacacttcccttcgtatcttcaagtgggtgccagtggtggatccccaggaggaggagcgaaggcgggcaggtggcggggcagagagatcccgtggccgggaacgtcggggcaggggcgccagtccccgagggggtggccctctcatcctgctggatcttaatgatgagaacagcaaccagagtttccattcggaaggttccctgcaaaagggcacagagcccagtcctgggggcaccccccagcccagccgccctgtgtcacctgccggacccccagaaggggtccctgaggaggctcagcccccacggctgggccaagagagagatcccggggggcataactgctggcagcaccgacgaacccccaatgctgaccaaggaggagcctgttccagaactgctggaagctgaggcccccgaagcttaccctgtctttgagccagtgccacctgtccctgaggcagcccagggtgacacagaggactcggagggtgcccccccactcaagcgcatctgcccaaatgcccctgacccctgagaagccggcctgcctgtcctgttgccccaggggcccctttggctttttacaaataaagacccttttgtaaaaaaaa

SEQ ID NO: 6588 - DNA, 631 bp, Homo Sapiens
  misc_feature (141)..(141): n is a, c, g, or t
gtgaacgggtaccagtgtgtgtgcccacggggcttcggaggccggcattgcgagctggaacgagacgagtgtgccagcagcccctgccacagcggcggcctctgcgaggacctggccgacggcttccactgccactgcccncagggcttctccgggcctctctgtgaggtggatgtcgacctttgtgagccaagcccctgccggaacggcgctcgctgctataacctggagggtgactattactgcgcctgccctgatgactttggtggcaagaactgctccgtgccccgcgagccgtgccctggcggggcctgcagagtgatcgatggctgcgggtcagacgcggggcctgggatgcctggcacagcagcctccggcgtgtgtggcccccatggacgctgcgtcagccagccagggggcaacttttcctgcatctgtgacagtggctttactggcacctactgccatgagaacattgacgactgcctgggccagccctgccgcaatgggggcacatgcatcgatgaggtggacgccttccgctgcttctgccccagcggctgggagggcgagctctgcgacaccaatcccaacgactgccttcccgatccctgccacagccgcggccgct

SEQ ID NO: 6589 - DNA, 578 bp, Homo Sapiens
cagtgacacctgggagcttgttaggaatgcagagtctaggcctcaccctatacctcccgactcagaccatgcattttagcaagacccccagctgattcctataagcactttagagtttgagaagcaaggacctaggctggggatgtcctccgagcagagggtgaagtttctctcagttctctccctgccacttccagggatctgagcctgtgttcagcctcctccctaacccaccctgggagacacttggcctgttagattgttccagagtctgcatggcactcctgaagaagggagtgtgacctgcagtcaccaggagatgagggttaggtgtgcccagccctccagacccggcctttctggttaacccctgcatgccaagctgcctgctgccccaggtcctcacctcaggcctttgaaggggcagcttctggaagttgttttctcctctgcttggagagtttgcccttgtctgtcttggaaagtgtgggcagccacagatgcccccaaatcagagctcacagtgagtgagcccctaagcttcagtctgcaataaagaatgcattggtttcatttgc

SEQ ID NO: 6590 - DNA, 528 bp, Homo Sapiens
gtctttagctggggtgacctggagtgacctgggacggtgttgtggtttaccgtctccagcttcagcctttccagaaacccttgtggagggcagtgttggctgcaggtttcatcatattgcagtttgaggtcaccactatttggggaacaagcttgcgtcctgctgaggggcaggattttcagcagagcgtcggtggggctgggccgtcgtggaggtggccccaggagtcatatggccatactcagacacaccttgtgtggcctgctcagagctggatgccacctttaggcaatgtttagagtctattttctaaagttttaagtattttaagaggtattgagactaatgaatataatagttcagtaatttaaatgcttatttattttcagtggaaggatttttattaaaaagaagctaattgacatggaaatgtcagtgaaatttcttacctgcaaggaaagtgaacattttgtatttaagtaaactataatgtgcacattttaataaagaaatctgacatttgaaaaa

SEQ ID NO: 6591 - DNA, 448 bp, Homo Sapiens
gccagaagagaggtcttcaggagacttcatttaaattctgattattaaactgaggctttaattgatgttaatgccttatgtcaaatgtaaagttagaatttgctagggctgggatagggagtgatatttctaggacttagacattgaaaactaattcagcctgtagtaacctggatggttttcaatggcatggttagtcaaattcatggttttaaacttagaagcagctttcgggggagagggtaggttggagcatttattacatattttactgtttaatgtcttaaccgtgggccttttaatttgtaaacactgaaatgattgttgggctgtggaaaacatttacctatttaccttggaagttttaaaagacagtccactttttagcatgtgtgttgtgtccagcctgtggtcgtcttaactaataaatgtgatttttctccccaaa

SEQ ID NO: 6592 - DNA, 440 bp, Homo Sapiens
  misc_feature (283)..(292): n is a, c, g, or t
gagatgtgtaattgtccaccactgtctaatccagaccctcgattactattcaaactcagcacgaagcattttcttgaagaatcagagaaagaagacctaaatatcacgaagaaacagaaaatggatactcttcctattcaaaaacaggagcaaataccattaacatacatagttgagaaaagaacgggcagttgaattaaaatttatgagacacaagatatatgaagaatgttgcagtccttatcattttatgttactttttaaaaaatgatgtttgaagtgnnnnnnnnnnggatattcagggtcaaatcatgtacattacagatattatctaaattcttctagaatttatttttcatgaaatattgatgtattttaatctatgttaaaatatcttcaatgaggaaaatgtcacagaataaatttatattacacatttt

SEQ ID NO: 6593 - DNA, 698 bp, Homo Sapiens
aagctcaggattcttgattttaaaggtacaaggatagttgtgggagttttatttttggttatatttgaactgtatgaatggtaggtctgaatattgagaatttccatggtcttatgtggaggtaaaatatacagataactgatcagtttgagtgactgcaacatgttctggttgcacaacagttaggcatgctatggtttatatttgtgaagtttggatgcctgtgaagaatgattaaatacatgtttctaatattttagtgttttgtatttaggttatttattctttgtatctaaaactgaacagctactgtgctatattgattttattggtagtattgagcagaccttgtttctgcatgaaactagttgcaaaacccactattttggaaataaaaatgtattttgacatatacaaataaaatgaataaaactattttaaatgtgtgaacttttaatgaagacattttaaattttgttctgagatatttaaattctgcatgggtattttttcactaattgctttacttggataccaatttgaataatttctgaaattgtaatattgtgataatttgcacagcattgtacatgcacatctgtaaatgcaatcttaattgccatatttatgcaatctgtgtaccaatttggacaaatgtttatatattttacataaagctgtctgtatgcagaaaaaaa

SEQ ID NO: 6594 - DNA, 598 bp, Homo Sapiens
ctatcatacccaaattttattagtaagacctcttaacaagtctttaaaatcaactggagaagtaagagaacagttcatcgttgtgtgggtgaaacccacgttgctggtacaggtggccatcatagaaaagaacatgagggaattgtcctgatgtctgaatgtcatttattgtgtcttcagttatctgaacatcatcatcaattatagcctgtgtaccgtaacctgaggtagtgatattcctgaggagtgtgaagaattggacactgtggattactatacattgtcatgaaagccttacaaggaggcagcttttctaggcttgacttaataacttcaacctaattgcttagagatttggataaataacctaatggcctgactccttttctaatgttttactaacagctacttctaaataaatatggtcccaggattttaaaattgtcttttctatgcattttttaaaaatggaaaaaaatgctcatttttctcaactattgcggaattattttaatatttcacaatattaacatgaaattcataaaaggatattttgcattaaattatagtttatagttcataaaataagctctataat

SEQ ID NO: 6595 - DNA, 578 bp, Homo Sapiens
  misc_feature (22)..(22): n is a, c, g, or t
  misc_feature (30)..(30): n is a, c, g, or t
aatgatcacccagaggaatgcngaaaatcnacctggaggaggagcagaaggagaaggtttttaaggaggggcttctgatacttggagatacggaacggaccaaggaccacactccagggtgcattcgttgctccctggggcaccacttctggattacagtgtgccaggtcctttggaggccctaccccttccccattcattgccaccagtgagaaatgggggtgcccctgtgtaaagaaacctaccaaaggtttacatttgcaccttagcctcaatagctacgaaccctagagaagcagctagctggagctcatgtgcaactcctgattctcaggagaaagatggattttaacccaaaattatgagtgagctgttaactctaaaatgtacttgggagataggccaagcgagaggtcatgggccaactaagtgttatccagtagaaaagacagtacactgcttttcttttagtgtttgcttttcctttgctatatgttttgctatttccttgtggcttagaatgtaaaattgattgttaaaagttttgttctgaataaatatttatcttttgtattgct

SEQ ID NO: 6596 - DNA, 285 bp, Homo Sapiens
atgtcgtagaaattggaagttagggagtactgctttcaaggttcaacttcattatcttctgcattggaaaatatttgggccatgagaactaggggaaaggaggtttgaatgtgtctatttttttctagtgaaatgtatttgtaaccacagtgtcctaaactgagaaaactagacaggacaaaagtgggtgttcatgaactttgtagttgagagagtggttaaacatgtctgtgtattcatgacttaggcagtgggtaggatcattggaaagagaattgcacagaa

SEQ ID NO: 6597 - DNA, 826 bp, Homo Sapiens
  misc_feature (74)..(107): n is a, c, g, or t
tgcacacgccgagagaccagacctggcctgagtttgcatcttataagcaatgtctaagatctgcggcagtgtgnnnnnnnnnnnnnnnnnnnnnnnnnnnnnnnnnngtctcaccagaaagttatcagtttcaataatattttcaaatacttctacttcactaaaggtgtgttttccattccttatttttggaggtggtgtacacaaaaccttttcacatattgggggcgtaccgctccaaattgctactgatcctttaagttcacaatatagaatttcttcaccaattaagtaataaccctcattacaaataaagtgcatctgataaccaaactcgtaagtcccatttgcagggactgcttggccatttaaaggatcccgtatatatggacatgtttctctataacaggcgtcatctgagacaggtagccatgtatgattccgatcacaaatagtatgggtggcaagaggaggtatatagaagtatccttttttacacttataatctactcgttcaccaatctcatagtagggttttggtttaccaatgagctccatagcttcaaatgttggtggctcctcacaggcatcggagaaggagtacagcagcaacaccatggccgccagaagcaacccaggaaagcgccaggaaggaaagggacactcgcggcggccgggaggctccatgcgcggcgcggaagacgctgttatttctccggaggaaagcagagaaaccgagagccagccgagcagggaagtcccttctgggtccagatatgggacgcaacaatccccaactcacaaagcatccagtgctgcaggacag

SEQ ID NO: 6598 - DNA, 218 bp, Homo Sapiens
caaacaataaattgtctacttatcaacttttagctgtaccctggactttggcaatgttgtagatactagttcaggttctagttttccattctcacatgagctggaaaaatgttactagaccaccatatttatacaagcatctcatatataaagagtctaacagaaagtctcttagggaaaaaagaaagtccttactataaaaacggaaggtgtcgtgc

SEQ ID NO: 6599 - DNA, 560 bp, Homo Sapiens
agacgtcgtattctcattgttctgcgtgaggtatcatcttctagttgattggtaagagccaaacagaaaagatcctaacccttttcttctatcacaaatattgtatgtttcccacttctccatttgccttttaattttgtctatttaatttgttgttgttttaatcttgaaatgtagcatttccagctagtcaaatcctctgcatttgtcctttgtaatgccatataagggatgatctaccgaagctggctaatgacctattagtttctaaaaagcagccagtgtaagtcccccaaatctgcacagcctgcagaggttccactcagtgtaggccagatggaaggaatgtggagtagaaacgctaccagatggactatgagtcaggaggcccagatgcttgtcctgggtttgctgcttgcttgctgcaagtccttaggcaaatctcccattctctctgggtaccataaccctctgtcaacaaaatgaaaggtatggacactacactctcaaaagacacatcattttttttactattaagtctggatgctcggcgtgtgcag

SEQ ID NO: 6600 - DNA, 378 bp, Homo Sapiens
tccccaagcccaacaagggacggtcacgtgtcacccttgacggggcagagctcatgaggctccgaaccacagaggaaacttcccattctgttgctttctctaccggtcgctgaggaaggaggccagattggtacctgttgtgggaagttttgtctgcagagaaacttgaatagaccccccgactcttcccggagcagaatatgtatggactctctgggtgtgaagcccaggcagggctcacttctcaggctgaagtcgctgagatgaatgggaagcccaggctcagccccaggccctgctgcaggcttgtgggaattggtgtctcaccagggtgtgcgcggctcacggttctcacatccaccaaaaaagggtaccgag

SEQ ID NO: 6601 - DNA, 570 bp, Homo Sapiens
  misc_feature (22)..(22): n is a, c, g, or t
gctcgtaccaggtgcttgcctnataaaaggatggggagcaataaatcatattgcccactgaacttgctgatgaggaatgtcattatctgagtctctctacagttttctgttggcttcacatgcagagcaaagcaaatctttcttagctctggcggtgggacctctatggaaggcagggggaggagacagacaggacaaggtggacactgtagtcagtcttaagtagtaatgtacaaaagtgcatgctaagtgtctacaggcactttgaggtcactttgccctggaaaatccccatggattgctttagacagagagtatgctagtagtgcaggtgtgtttcgtatgatggaattattgacttaaaaatcttgtcaagtttaacttacgcatgtaagcactgaaatactgacgctttttagtttggtagtgtggtcactcattaaattatgtgagcatattatatactgctctcagcaataattctctcaccggttctttgaactacctctcacagcctgcactgagtttgggttacggcgtgtgaggtccgagctcgaatcgtagtctgtc

SEQ ID NO: 6602 - DNA, 458 bp, Homo Sapiens
tgcacaagccgagagaccatactgaagccggtctaggtctgtcaggttacagatccacacgccctctgacctagcagttctactcctggaagcgtttcctactgatatgctcacacacttggagcagtgtgtgttacagcaaaaggatggagaaaaccttaaggtccaccaagaagagacaggggcaataatggtgcgtccatgcaaaggaccaactgtgccatggtgggaaaaagagcagggggctcagtttccctacaggaatgctgtccaggatggtatccagtgcaggagagtcaactggctaggaaccactgggaaatagggtcatggtaacgcagaaatacctgtgcttctttatgcaaaactctctggaaagagaagcaactcagatgagttgccccaagaaatgtgattggctggtaacaggtgcatgtatggggactcgcgtgtccgga

SEQ ID NO: 6603 - DNA, 437 bp, Homo Sapiens
tggacgggcagaacaccacacacacagagaaaaacgagaaagcgtgcataacaggaccaaacaagtgcagcgctaacgcggtcagcggtgacagagaaccactgaaccaagatcaggcgaggccgaaatccggggaggtgagagccagccgggccacgtctgtcctagggttcggatcactgatggggcatccctgtgaggctgaagagagagttcccaagaggctcttgtagctctcctgagtgggaggacaggacattccagcacagcaaggcaaggccctggcccctcctgggcagcccctccctgagggtgcgggaagaccagcagcgccgggcccttggggactctctgagcacttatcagtgtgtctggccccttggatggatgagattctctcagaaacaaccttctgtccctcaggcaggggtacggag

SEQ ID NO: 6604 - DNA, 1036 bp, Homo Sapiens
cgagacaacgagagaacaccgcctgcagctagaacagcctggtcaggagcgtaacggagtggtgcgccaacgtgagaggaaacccgtgcgcggctgcgctttcctgtccccaagccgttctagacgcgggaaaaatgctttctgaaagcagctcctttttgaagggtgtgatgcttggaagcattttctgtgctttgatcactatgctaggacacattaggattggtcatggaaactagaatgcaccaccatgagcatcatcacctacaagctcctaacaaagaagatatcttgaaaatttcagaggatgagcgcatggagctcagtaagagctttcgagtatactgtattatccttgtaaaacccaaagatgtgagtctttgggctgcagtaaaggagacttggaccaaacactgtgacaaagcagagttcttcagcttctgaaaatgttaaagtgtctgagtcaacttaatatggacacaaatgacatgtggttaatgatgacgaacaagcttacaaatacgcctttgataagtatagagaccaatacaactggttcttccttgcacgccccactacgctcgctatcatcgcacaaacctaaagtatcccccgtcacacaacaggatccatcacagcctttctatctaggccacactataaaatctggagaccttgaatatgtgggtatggaaggaggaatagtcttaagtgtagaatcaatgaaaaagacttaacagccttctcaatatcccagaaaagtgtcctgaacagggagggatgatttggaagatatctgaagataaacagcttgcagtttgcctgaaatatgctggagtatttgcagacaatgcagaagatgctgatggaaaagatgtcatttaataccaaatctgttgggctttctattaaagaggcaatgacttatcaccccaaccaggtagtagaaggctgtagttcagatatggctgttacttttaatggactgactccaaatcagatgcatgtgatgatgtagggggcctcggcgtgtgca

SEQ ID NO: 6605 - DNA, 604 bp, Homo Sapiens
caccatggaggatgagcgggtgaggttacagcctgagtgcaaaaagcgcctcaatgaccggattgagatgtggagttacgcagcaaaggtggccccagcagatggcttctctgatctgcccatgcaagtaatgacgtctccatctaagaactacattctctctgtgatcagtgggagcatctgtatattgttcctgattggcctgatgtgtggacggatcaccaagcgagtgacacgagagctcaaggacaggtagagccaccttgaccaccaaaggaactacctatccagtgcccagtttgtacagccctcttgtatagcatccccactcacctcgctcttctcagaagtgacaccaaccccgtgttagagcattagcagatgtccactgcgttgtcccatccagcctccactcgtgtccatggtgtcctcctcctcctcaccgtgcagcagcagcagctggtcgctggggttactgcctttgtttggcaaacttgggtttacctgcctgtagacaagtctctctcataccaacagaacttccggtacttccagaaccaactcacctgacctgcaactcaaaggcttttttaagaaaaccacc

SEQ ID NO: 6606 - DNA, 1120 bp, Homo Sapiens
gccgtgaactgggcagctgtgacacgcgcaccttgtcaccttgtcaccaatttcctgcccgggatcccagagctacccttcttggagcccacaggggcagcccttggctggtccctgcgagcccgtggagactgccagagatgtcctctttcggttacaggaccctgactgtggccctcttcaccctgatctgctgtccaggatcggatgagaaggtattcgaggtacacgtgaggccaaagaagctggcggttgagcccaaagggtccctcgaggtcaactgcagcaccacctgtaaccagcctgaagtgggtggtctggagacctctctagataagattctgctggacgaacaggctcagtggaaacattacttggtctcaaacatctcccatgacacggtcctccaatgccacttcacctgctccgggaagcaggagtcaatgaattccaacgtcagcgtgtaccagcctccaaggcaggtcatcctgacactgcaacccactttggtggctgtgggcaagtccttcaccattgagtgcagggtgcccaccgtggagcccctggacagcctcaccctcttcctgttccgtggcaatgagactctgcactatgagaccttcgggaaggcagcccctgctccgcaggaggccacagccacattcaacagcacggctgacagagaggatggccaccgcaacttctcctgcctggctgtgctggacttgatgtctcgcggtggcaacatctttcacaaacactcagccccgaagatgttggagatctatgagcctgtgtcggacagccagatggtcatcatagtcacggtggtgtcggtgttgctgtccctgttcgtgacatctgtcctgctctgcttcatcttcggccagcacttgcgccagcagcggatgggcacctacggggtgcgagcggcttggaggaggctgccccaccgttccggccatagcaaccatgagtggcatggcccacaccacggtggtcactggaactcagtgtgactcctcagggttgaggtccagccctggctgaaggactgtgacaggcagcagagacttgggacattgccttttctagcccgaatacaaacacctggacttag

SEQ ID NO: 6607 - DNA, 405 bp, Homo Sapiens
tggttagtcagaggcatcctgctccaagctctgcttttccttcctctgaaacaatgccattcttgcttctattgctacacatctccttctggctcaggtgaaatccatgcccttctgcttatagacctaaagttcaggtacttattattggccattgatcttgaatttgccctctcctagtgctgcagtcccacttcaaagccattttctgaggaggatggtttaggtctggcaattgtccttgaaaaatcccacccatgttgtaccaccttggtgagtcatatgccactcatcagcttgggaatgatggctgccaactcccaatctcccaggaaggcagggggcagaatctttttttcacttggcctgctacctccattaaaaaaccattctcttacagtttta

SEQ ID NO: 6608 - DNA, 466 bp, Homo Sapiens
ctagttcgataagctttaatcaggccctcacaccctgggatggtcgttaatgacatggatcaaaatccctgaggtggctggaatctaaccagtgggtagcacaaaaagctcaccttgcctatggaggctgtgggtatttttaggaaggtcatgcattatgggatgggaatttttataaacaaattgctacataaaaactaatgcactgttgcagcacttgtggaggtttcctttgctttgagacaccactgtttataggctgcagactgtaaagggaagtactgggaaatggcaaaggtcacatgggccagtgccatgttttaaggtcaaaggcactgttattttaagtgacctatctcattattaaaatcagtcactttcaccatcttcaaaatattttgtttttttaaaaagacaagggccttgtggctccaactattttgttggatgtaccaacataaataaa

SEQ ID NO: 6609 - DNA, 1322 bp, Homo Sapiens
ggggtaggcgttccgagcggcggcggagattgtccgcagtgactacactcatggcaggtcccctgtggcggaccgcagcatttgtgcagagacacaggacaggcctctatggtgggttcctgtgcaggcctgtttggagttccagtctcgtaccacctcttcccggatcccgtggtccaatggctctaccagtactggcctcagggccagccagctccgctccctccacagctgcagagcctcttccaagaggtgctacaggacataggtgttccttcagtgccattgctacaagcccttcaccaccttcaccttccagcctgtgagtgcaggcttcccaagactccctgctggggctgtggtgggcatccctgccagtttcttgggagacctagtgatcaacactaaccatcccgtggtcatacatgggcatacagtggactggcggagcccagcaggctgcccggctgagagcttccctgaccttgtcccgtgaagcccagaagttcgccttggccagggaagtggtgtacctggaaagcagtaccactgccgtgcacgccctgctggccccagcttgcctggcagggacctgggcactgggcgtgggtgccaagtacaccctggggctccatgcaggccccatgaatttacgggctgccttcagcttggtggcagcagtggcaggctttgtggcctacgccttctcccaggattctctcactcatgcccgtgggagtcctggctggaccgccgcacggcctccctctctgcagcctatgcctgtggtggagtggagttctatgagaagcttctgtcgggcaacctggccctgcgcagtctcttgggcaaagagggggagaagctgtatacacccagcgggaacatcgtccccagacacttgttccgaatcaaacatttaccctacaccacccgccgggactctgtgctgcagatgtggagggggatgctcaatccgggccgctcctgatgggctcatcacaaggacacttccagcttgtgcagacaccaccctgccattgagtctggagggccctgttggagcctttggacctatagctcaaggccagaaaaatcactggctttggaattaaatagcttagattgtactataaccactacttatgaactcagggactatgagggactattcaggggctatgaatctgagcctttgtttcttgaactgtaaagtggagatgatgtaaaccgccttgcaagattgtagagttgggtaaggtcatgaacataagggcctggcacaaagggtgcactgtaaataaacagacatccctccttaa

SEQ ID NO: 6610 - DNA, 967 bp, Homo Sapiens
  misc_feature (154)..(154): n is a, c, g, or t
gccgggttgatgcgcaaacacttctgcttgggggacccgctggccaagtggaggaagtgccagcgccagctgctgctcggcctcttctgcaccaacgtggccttcccgcccgaagctctgcgcatgcgcgcacccgccgacccggctcccgccnccgcggacacagcatccccgcagcaccagccggccgggcctgcccccttgctgagcacccctgctcccgaggcccggcccgtgatcggggccctggggctgtgagaccccgaccctctcgaggaaccctgcctgagacgcctccattaccactgcgcagtgagatgaggggactcacagttgccaagaggggtctttgccgtgggccccctcgccagccactcaccagctgcactgagaggggaggtttccacacccctcccctgggccgctgaggccccgcgcacctgtgccttaatcttccctcccctgtgctgcccgagcacctcccccgcccctttactcctgggaactttgcagctgcccttccctccccgtttttcatggcctgctgaaatatgtgtgtgaagaattatttattttcgccaaagcacatgtaataaatgctgcagcccagcctctgcccactttgtgtgtatgtgaccgcctgcttacttgcagtgagagcctggtggccagggtctggccctaccttggctgaccagcctctccacagctgcaggccaggtctcccagcgtcgcactcctgggcctggcatttggaacctgccaggctggcctgggaacacccccctacaggcacatatgaacgtactgcattcctgccgacccccctgtctaggatgcatccacaccccccccaattttgcccagcagcctcctggctgacccttggccacagccttctgagggccaatggaaatatttgggaccaagattcttggtaaataaaaacgaaaatgtttgcaaaagg

SEQ ID NO: 6611 - DNA, 1482 bp, Homo Sapiens
aattctcgggatggaagccagctgagagacaggtctacgtttcagggagggaaacagattcagcagcggcagcagctggagaaggtcgtggagcagcaccttgcctgcagggtgttctgagaatcagccatgtcatccctgtacccatctctagaggacctaaaagtggaccaagccattcaggcccaggtcagagcctcacccaagatgccagccctgccagtccaggcaacagccatttccccaccaccagttttgtacccaaacttggcagaactggaaaattatatgggtctttccctctccagccaagaagtccaggagagcctgcttcagattccagagggtgacagtacagcggtctcgggccccgggccccccaagatggtggcaccggtaaccgggtacagcctgggcgtgcggcgagctgagatcaagcccggggtgcgcgagatccacctgtgcaaggacgagcgcggcaagaccgggctgaggctgcggaaagttcgaccaggggctcttttgtgcagttggtccaggccaacacccctgcatcccttgtggggctgcgctttggggaccagctcctgcagattgacgggcgtgactgtgctgggtggagctcgcacaaagcccatcaggtggtgaagaaggcatcaggcgataagattgtcgtggtggttcgggacagggccgttcagcggactgtaaccatgcacaaagacaagcatggggccacgtcggctttcctgatcaagaaaggggaagattgtctctctggccaaagggagttctgcggcccgcaacgggctcctcaccaaccactacgtgtgtgaggtagacggcagaaatgttatcgggctgaaggacaaaaagatcatggagattctggccacggctgggaacgttgtcaccctgaccatcatccccagtgtgatctacgagcacatggtcaaaaagttgcctccagtcctgctccaccacaccatggaccactccatcccagatgcctgaagccactggagggcagggcaggcagggggggcttcccgccctcctgcagcaaagggcaaccacccttggatgatgggttgcagccggcctgctgcttaaggtgggggctgccatgaggggggcgtgtccaggagggtgaccatgggatggcttatacacacaggcctccttggagcctcagactccaagctaggctgaggctcaggcagggcccacaggcagccgattctcttgtgctgatttaaatgctggacacggaggcaggctgtttaaacgctgcttaaagtcgcaactgggcccctttcaagaaattttgctctaccaggaaaacagttacacattttaagagaacagagctacgttctttgtgagagctttttccttggcttgacttgctctttgtcacagactgcataagttgtcagccttgactatcttttgaataaagatttgattttaaacaaaaaa

SEQ ID NO: 6612 - DNA, 519 bp, Homo Sapiens
acaagcacagaggtacaggagatgaagaaaaggactctgcgcggaagacaggactgagaaaaggcggaggggcaagatggcacccaagccccagtctcgcggcacctctacccgctcagcagaatttatagaccaggaagctgactaatcattgggaaggaacatccattcaactctcatttacagatgtggaaccaaagaccaaacaattatctgtgagaggccaggtctcaacaaatggcagctattacatcagacagtgacgagtcctgctgctcccttacagtgtctgacagaccacggtggattcagactgggagcatggaagttaacagtgaaacgggcagcacaaagacattagcaggctgctggtttcatggacctgtaccacaatgacacagagaacaccagagcatcaggactgaatgaaatgggagttttcaaagctgcactaagaagtaaatgttaaggcagtggttaaaaacaacagtctataaaggggcacttgcaaattgtgct

SEQ ID NO: 6613 - DNA, 615 bp, Homo Sapiens
cggggactcctgctggtcggggctaagacgggaactcctccttcctgcttcagggccgcaccgcccagactggctcagcccaggccaccaacttcatcgcctttgcggctcagtaccgctccagcagcctgggccccgtcacggtccaatggctccttgagcctcacgacgcaatccgtgtcctgctggataaccagactgtgacatttcagcctgaccatgaagacggcggaggccaggagacgttcaacgccaccggagtcctcctgagccgcaacggctctgaggtctccgccagcttcgacggctgggccaccgtctcggtgatcgcgctctccaacatcctccactcctccgccagcctcccgccctgagtaccagaaccgcacggaggggctcctgggggtctggaataacaatccagaggacgacttcaggatgcccaatggctccaccattcccccagggagccctgaggagatgcttttccactttggaatgacctggcagatcaacgggacaggcctccttggcaagaggaatgaccagctgccttccaacttcacccctgtattctactcacaactgcaaaaaaacagctcatgggctgaacat

SEQ ID NO: 6614 - DNA, 437 bp, Homo Sapiens
cccggagaggcgaagaccagactgtagcttgtggatgaagggtgtgggggaggccgtgtgtagtgaaaggaccacccggctgaagacggtcctgggggttggagggcaggagggagctgacaaggacagttctgctcctgggagcctctcgttcctgggcgagggtctggggaccctggatgaagttttaggatcttttacaatgacggtctggggcagagaataaaattttgcagggagcagattgagggtctggaggactgggttaggtgggctctaggtacccaggacgatctcgggaggcgcacaatgagaatctgggggctccaggattacggtgtgggtgcacaggatgaaattctgggggcgcagattaggtaggatctaggtgagcaggatgacatttgaggtgagcgttgggacgctcggcgtgtgca

SEQ ID NO: 6615 - DNA, 366 bp, Homo Sapiens
cggaacgggcgagaaacatacccggctagtacacgttctaaagtatatattatcctaacaaagcctgaatgaactcagtttggtttcctctctcggtgtatgactaggatcttcacatgccttaccacctagtaagcagcaatctctccatcttattattgttacatggagttttagttttactgttaaaaacacacatgaaaaaacattttcagtcatctgttcatcaaatttatttgtgtattttgttaacttctgtggttacagtaatttcttatgtatggccttctccgagtcttttttttctggctgaagtatatcctttagtaattctttcagtaaaggtctggatattcggcgtgtgca

SEQ ID NO: 6616 - DNA, 462 bp, Homo Sapiens
  misc_feature (217)..(339): n is a, c, g, or t
agagtaggtcgtcagtaaagctgtggcagctatggtgatagggtttgaaattcaaattaacgcatatttcttgagcaggcaaggtgtgtgctgctggatctttcaaggggtcccagaattggtagtatagttgcttttctcaaaagacggtcgccgggcagaggaaaaggtgttaaggtatgagtgaagacagatcagccagacatggtgccgcttnnnnnnnnnnnnnnnnnnnnnnnnnnnnnnnnnnnnnnnnnnnnnnnnnnnnnnnnnnnnnnnnnnnnnnnnnnnnnnnnnnnnnnnnnnnnnnnnnnnnnnnnnnnnnnnnnnnnnnnnnnngattagctgagtgtggtggcgtgcacctgtagtcctaactgtttgggaggctgagacaggaggattgcttgagcccaggagtttaagtccagtccgggcaacatagcaagaccccatctctta

SEQ ID NO: 6617 - DNA, 295 bp, Homo Sapiens
ttccgcttgggctttcgagtgcaggcgtttaatggggtttagtagggtggggttattttcgttaatgttagtaagggtggggaagcgaggttgacctgttagggtgagaagaattattcgagtgctataggcgcttgtcagggaggtagcgatgagagtaatagatagggctcaggcgtttgtgtatgatatgttgtgcggtttcgactgatgtggtctttggatgtagaaacctgtgaggaaaggtattctactccaaagaccgcaactcgaaagccccaagcggggtaccgag

SEQ ID NO: 6618 - DNA, 271 bp, Homo Sapiens
tatgggatagcaaagatagatcactaacagcgataggaccccagagtagcacagcaagctgggggccctatgagacttcctgtcaggacaagggaagctgaaactccgaaaggcgaagcccagggtcctgtgattggtggggtcagaatttgaacctgggtttgtccccacccatgctgtcctgctataggaggcctaggggtctgcatcagccacggagtcttaagggtgagaagagcttcattcatgccaaaaatgggccagcagatcg

SEQ ID NO: 6619 - DNA, 823 bp, Homo Sapiens
gaagagcagtgtcataatgcaaatgggaagatttcttctcttagtaattttatttctgccacgtgagatgacaagttcgttttaactgtgaatggtaaaactgagaactatatcctggatactacacctggctcccaagcatctctgatatgtgctgttcaaaaccacaccagagaggaagaactgctctggtaccgagaggaggggagagtggattgaaatctggaaacaaaatcaattccagctctgtctgtgtctcttccatcagtgaaaatgacaacggaatcagctttacctgcaggctggggagggatcagtccgtgtccgtttcggtggtgctgaatgttacttttcctcctctcctaagtggaaacgacttccaaacagttgaggaaggcagtaatctgaagttggtttgcaatgtgaaagccaacccccaggctcaaatgatgtggtacaaaaacagtagtctcctcgatttagagaaaagccgtcaccaaatccaacagacaagtgagtcttttcagctgtcaatcaccaaagtcgagaagcctgacaacggaacctacagttgtatggcaaagtcatctctgaaaacggagagcttggactttcacctgatgttaaagataaaactgtgggtgtaccaatagagcccattattgtgcatgtgttgtgatctttctgacattgtgcttggactgatgctagaagaaagaacataatgaagctctgcttgaaggataaagacctcacagtgaaacagtctatgagaaagctgagatgccatcgaataacgagagagtttgcatcaggacctcca

SEQ ID NO: 6620 - DNA, 495 bp, Homo Sapiens
  misc_feature (34)..(34): n is a, c, g, or t
ggaggtgatctagaggatcccatctcaggcaggnacgacggtctgataggcagaaaatccgtaagcgttacctctgcactttcaggacacacatccaggggtcgaccacagcatcagggtcaaagtcatcctcacacacatcaccaacgccatggcctgggcagagtgaggctgggtgctcaggaaggccctggccacatctgagtccttctgatggggatggggtaccaggcggcagttatcgggaccaggaggcacataatctgggatgccatcattgtcatcatccccatcacactcatctccaagtccatcgttatcagagtccagctgggagctatttggcagctgtgggcagttgtccttggtgtcctgatgcccatccccatcgccgtcttcattagtatcacagacatcccccaccaggtcgctgtctgcatctgggtaggattgctcatttcagggcagctgtcgcaagcatctcccaccccgtcc

SEQ ID NO: 6621 - DNA, 1870 bp, Homo Sapiens
  misc_feature (1773)..(1777): n is a, c, g, or t
  misc_feature (1783)..(1783): n is a, c, g, or t
  misc_feature (1803)..(1803): n is a, c, g, or t
caaagaaggcaccaacctattggctatggtgcgagtgctgggtggtgaattcggcacgaggggcagcccgggaggagcggcgcgcgctcggacctctcccgccctgctcgttcgctctccagcttgggatggccggctacctgcgggtcgtgcgctcgctctgcagagcctcaggctcgcggccggcctgggcgccggcggccctgacagcccccacctcgcaagagcagccgcggcgccactatgccgacaaaaggatcaaggtggcgaagcccgtggtggagatggatggtgatgagatgacccgtattatctggcagttcatcaaggagaagctcatcctgccccacgtggacatccagctaaagtattttgacctcgggctcccaaaccgtgaccagactgatgaccaggtcaccattgactctgcactggccacccagaagtacagtgtggctgtcaagtgtgccaccatcacccctgatgaggcccgtgtggaagagttcaagctgaagaagatgtggaaaagtcccaatggaactatccggaacatcctggggggggactgtcttccgggagcccatcatctgcaaaaacatcccacgcctagtccctggctggaccaagcccatcaccattggcaggcacgcccatggcgaccagtacaaggccacagactttgtggcagaccgggccggcactttcaaaatggtcttcaccccaaaagatggcagtggtgtcaaggagtgggaagtgtacaacttccccgcaggcggcgtgggcatgggcatgtacaacaccgacgagtccatctcaggttttgcgcacagctgcttccagtatgccatccagaagaaatggccgctgtacatgagcaccaagaacaccatactgaaagcctacgatgggcgtttcaaggacatcttccaggagatctttgacaagcactataagaccgacttcgacaagaataagatctggtatgagcaccggctcattgatgacatggtggctcaggtcctcaagtcttcgggtggctttgtgtgggcctgcaagaactatgacggagatgtgcagtcagacatcctggcccagggctttggctcccttggcctgatgacgtccgtcctggtctgccctgatgggaagacgattgaggctgaggccgctcatgggaccgtcacccgccactatcgggagcaccagaagggccggcccaccagcaccaaccccatcgccagcatctttgcctggacacgtggcctggagcaccgggggaagctggatgggaaccaagacctcatcaggtttgcccagatgctggagaaggtgtgcgtggagacggtggagagtggagccatgaccaaggacctggcgggctgcattcacggcctcagcaatgtgaagctgaacgagcacttcctgaacaccacggacttcctcgacaccatcaagagcaacctggacagagccctgggcaggcagtagggggaggcgccacccatggctgcagtggaggggccagggctgagccggcgggtcctcctgagcgcggcagagggtgagcctcacagcccctctctggaggcctttctaggggatgtttttttataagccagatgtttttaaaagcatatgtgtgtttcccctcatggtgacgtgaggcaggagcagtgcgttttacctcagccagtcagtatgttttgcatactgtaatttatattgcccttggaacacatggtgccatatttagctactaaaaaggctcttccnnnnncccaanaaaacccctaatacacaaanccctggtggggcgcctcgggcccctcgaaaaagcctttcctaaaccttttcttttgggcgggggggg

SEQ ID NO: 6622 - DNA, 897 bp, Homo Sapiens
ctgatctttgttttgtgcactgtggccctgccaggcatatagtgaaggtgaatgtcttctccctcagaaaaaaattggttccttgctgtcccagtaaggcatagcttttccagccctaactttaaaactcagtgaggacttagatgggaaagaatgaggtaaatacaaaggattgcaggacaacaactacagcgttgtgtactgggaaggggagttgggcactcttggaggactcctgctgaaggtggtcagcctgcctgacaatggaagacatacttgaatgcggagcagggtatgtgctttcatatgaaaaaagagctgatgttaaaactcatttggtgaggtcaacgttgtcacataccttcacataagggatagtatattttgggttgcagtcaaacttgtgctcagactggtgaaactgagagtcaggcttttacattttaaagaaaatacagttttcattctaattcaggtgtctacttattttatgtaagaataattttagatttcccccccaccatgaagtttcttcctatttttttatgctgtaacttacccccaatctttatctctggatttttactctttaaattttgaagttgactagcattttcaaacctttattttatacccttgtcttttatattaactttttcttattattctttaggtaagaatgattgatgttggctgatattggagtgctcattcacatgaagtggatagatacttctcaagacatcacacagcgtgagtcaatcaaggagggaagccacaagcagactgacaacgtttctagcaggatcaggtgagctgtgtccagaaaaccaacgagaaggagtggaaggaggaatgaacgtttcattctcgttaataaaggcattatcctaatta

SEQ ID NO: 6623 - DNA, 326 bp, Homo Sapiens
aatgttatcttgctattaagtggtaatgaatgttcccaggatgaggatgttacccaaagcaaaaatcaagagtagccaaagaatcaacatgaaatatattaactacttcctctgaccatactaaagaattcagaatacacagtgaccaatgtgcctcaatatcttattgttcaacttgacattttctaggactgtacttgatgaaaatgccaacacactagaccactctttggattcaagagcactgtgtatgactgaaatttctggaataactgtaaatggttatgttaatggaataaaacacaaatgttgaaaaatgtaaaaaa

SEQ ID NO: 6624 - DNA, 316 bp, Homo Sapiens
gcaggaagtgcattctctggtccttccctattttctgttctggatgtcagtgcagtgcactgctactgttttatccacttggccacagactttttctaacagctgcgtattatttctatatactaattgcattggcagcattgtgtctttgaccttgtatactagcttgacatagtgctgtctctgatttctaggctagttacttgagatatgaattttccatagaatatgcactgatacaacattaccattcttctatggaaagaaaacttttgatgatgaaacaataaagattttaaatatctattttaaaaaa

SEQ ID NO: 6625 - DNA, 902 bp, Homo Sapiens
  misc_feature (547)..(698): n is a, c, g, or t
aatgacccgttgatatcgtagtacctgcttttagtatcgaatcagactgttaatctgggaccctgagcttagtataacctctactgattatagaaccgtgtagaaaagacaccatcaccctaaactaagtcctttcacagtggctgaaggtagtcttattactaaacattatttgatttttgttttaagtaggagaaaaatatttactgtttatgcaaatatgtagtataaactggtgatactatacctcttccttccaactgggagtctgataacaatattgtaaagtaaaccactaccaaataagatattgtgtcgtacttttattgcctggcttccaggtatttgcaattattattaaaggaaaacattgtcaaacatagtctaccaattcttatgcacagtctgggcagcgataatcttttgtatttaaaccaagtaaggaattgtgggtatgagtatgatattcagcctttattagggatcctacttactgctgcagaaagttaggatgctggccagagttattttctaactaaggagactnnnnnnnnnnnnnnnnnnnnnnnnnnnnnnnnnnnnnnnnnnnnnnnnnnnnnnnnnnnnnnnnnnnnnnnnnnnnnnnnnnnnnnnnnnnnnnnnnnnnnnnnnnnnnnnnnnnnnnnnnnnnnnnnnnnnnnnnnnnnnnnnnnnnnnnnatagagagcccttaggtttctgtacaagacagtctgtctcttctgtctctgtgaccccatctcctggcctcttgcagtgacttaaagcatccaaacctcttcaagtgctggacatgctgcaattccatgacccaatcacaggacatttaagcacagcaggtctagtgcatgcgactggagctggaagaaatatatttaagagtc

SEQ ID NO: 6626 - DNA, 502 bp, Homo Sapiens
aaagatttttggtttagcttttcaagcgccctgagcagggctcgggagcgaaggctgctaaagggctatgagatctatgtgacccctggagtccagccaccaccacctcagatgggagagattattagctgctgtggaggcacatacctacccagcatgcctcggtcctataagcctcagagagttgtgatcacatgccctcaggacttccctcattgctccattccactacgggttgggctgcccctcctctcgcctgagttcctgctgactggagtgctgaagcaggaagccaagccagaggcctttgtcctctcccctttggagatgtcatccacctgagaactccactacccttttccctcccagaccacgaattagaagatatgtggaagaaagaactcagggcgttagaaaggattggggtatattgatacaacttgtcctggaacatgggtgggaccagaaatctttatgaataaatgaaaagataagggaaaaa

SEQ ID NO: 6627 - DNA, 742 bp, Homo Sapiens
ctagactttgagactagtatacattgtggttcacataggaatcatccatagtccagtgctagaacaaatgtatacataatccactccccacaaattatcactcatttagttgtccactggaaaataagactagatggagtcggtaggtgaaacagttttgccgtgcctaagtggaggctgatctaaactaatttgagatcccgctgcctttaatagagctccacctcaggaatcttacctttataatacatcctagataggcaagagggatatgtcctgaaatcttcactaattccaagattgcgtgtcatttcccccaaaaatttgcttaactctattggaaaatccaagagaattgctgcagctgctgaaaacaagagagctgcattaagctgcaaggccggctagggtaggtagactgactcaccacctatgggacctgcctccacacatcagcttcccaaatacttgcagatttgggtcttacctaaaggacaagtcagtatgagttactcacaatcctaactacaaaggctacatttacaaataccagagtttcgactgtgtttttactctctgctccctgaaaactgtaaccccaggctagctccaaactctgcttatagcccatgctttactacagtggtggtcgcatatgtgaatcgtgtgcatgcgtgttcacgtgttcatgacaacagcaatgcagccatgagggagctgcccccaaaccaagctaccctaa

SEQ ID NO: 6628 - DNA, 701 bp, Homo Sapiens
gatgagaaaaatagatgaagcactcgtgacagtgttcagatagcgtcacgattctgtcattggggagtcatgacgacgaattgatgtccggggctagattctgtgtagacggtgactttgaggatggaaaatcaccactcccgactgggttgtcctagctgtttccgggagctggatggcaaggcctgtgcgacagataatgcctgaggaaatgttcctgagtcacgctgaggagagccttcactcaggagttcatgctgagatgatcatgagttcatgcgacgtatattttcctttggaaacagaatgaagcagaggaaactcttaatacttaaaatcgttcttgattagtatcgtgagtttgaaaagtctagaactcctgtaagtttttgaactcaagggagaaggtatagtggaatgagtgtgagcatcgggctttgcagtcccatagaacagaaatgggatgctagcgtgccactacctacttgtgtgattgtgggaaattacttaacctcttcaagccccaatttcctcaaccataaaatgaagataataatgcctacctcagagggatgctgaccacagacctttatagcagcccgtatgatattattcacattatgatatgtgtttattattatgtgactctttttacatttcctaaaggtttgagaattaaatatatttaattatgaaaaaaa

SEQ ID NO: 6629 - DNA, 385 bp, Homo Sapiens
tttgcttggttgtggtgctaatgtcatgggagaagttgagggcaaccttagctatctgatactaggggaatgtgcactatagaatattcggtattattgagaagcaacaaacacatgtgcaaccaccagcaaggccagattctaaaaatgttatgtggagtgacaagaaacagaactaagatttatagcatatcatcacgttatgtaaacaaaacacccgacacagaagaacactatctacttggacaaggttacatatcaggcacatgaggctgggtgtctgagaatgtggagagcaggccaggatagtggggaaaactaagggcgcctccctgatccaggatgacagtgtgttctgaccaacaaccctagggtcctgctagca

SEQ ID NO: 6630 - DNA, 521 bp, Homo Sapiens
ggcacgggggaccacagggctgccgtgagcacccaccctggttctccaggcccctctgtccagaggcagggcctgaacctcgggctcctgcctggaccagtgacagcattggggagagaagcactgggggtcttcagaccagccagcaaggggccgtgccagtgcccagagagcaggtcagacaacaggcaaccctgaggcagctggctccctctctctgccctgcagggcttgccgcagggcgtgaggctccccagccacagccccctcttacttgccttaaaactggagagaggaatctagtatttgcacttagcaaaatatttaaaaactgaaaaaaatgtgcatgatctgtcactttgtataaaaacaagaaacgattagttcattaaactttttctttaccttctggtagtaaaaatagataaaataattccgtttcaactactgtgtgtaaaaagcctgtatcatatgtaactgggacttttgtaaataaatgtttgtgcgctctacaaaaaaaa

SEQ ID NO: 6631 - DNA, 417 bp, Homo Sapiens
aagcggatcctgggttgttggttaatccaggatcatctcctcagctcagagccttcacttaatcacagccgcacaggcctgtctctctgtgtaacgtagcctccacacccgagcccaaggatgtggacaacctctctgtcagggccatcattcaaatctccgtggagctgctaaaagggacagaaaccctccaagctcgtctgagccatgaagtactcctggagtaaaggtagaggggcatctcatggaacccaagagcagaaagcccagtggacctcaggaagcagcgcctgagaaccagagccttccagaagccaggcatctgtccgtgcctgggtccaccccaactcgctgaccacctgtcctccgcaacccctccacagcgcctgggattccatgcctcagggtaccgagctc

SEQ ID NO: 6632 - DNA, 940 bp, Homo Sapiens
gtacaaggaagagcagggacttcaatgaagagtgtccccggctcaggattttctcgcatccaaatgtgctcccagtgctaggtgcctgccagtctccacctgctcctcatcctactctcatcacacactggatgccgtatggatccctctacaatgtactacatgaaggcaccaatttcgtcgtggaccagagccaggctgtgaagtttgctttggacatggcaaggggcatggccttcctacacacactagagcccctcatcccacgacatgcactcaatagccgtagtgtaatgattgatgaggacatgactgcccgaattagcatggctgatgtcaagttctctttccaatgtcctggtcgcatgtatgcacctgcctgggtagcccccgaagctctgcagaagaagcctgaagacacaaacagacgctcagcagacatgtggagttttgcagtgcttctgtgggaactggtgacacgggaggtaccctttgctgacctctccaatatggagattggaatgaaggtggcattggaaggccttcggcctaccatcccaccaggtatttcccctcatgtgtgtaagctcatgaagatctgcatgaatgaagaccctgcaaagcgacccaaatttgacatgattgtgcctatccttgagaagatgcaggacaagtaggactggaaggtccttgcctgaactccagaggtgtcgggacatggttgggggaatgcacctccccaaagcagcaggcctctggttgcctcccccgcctccagtcatggtactaccccagccatggggtccatccccttcccccatccctaccactgtggccccaagaggggcgggctcagagctttgtcacttgccacatggtgtctcccaacatgggagggatcagccccgcctgtcacaataaagtttattatgaaaacaaa

SEQ ID NO: 6633 - DNA, 501 bp, Homo Sapiens
cctcagaagctcagcgtgggatatggtgacttggacgagccaattagtcatccagtggatggtggttggatgtccaagtctgaagttcagaggagagggactttagatctaactgtgggaatcactgttgtgtgggtgtacttaaagatataaggtgttgagatcaccaaaggagtgcatgtagataaagaagctggccaagaactgaaccctggggactttcagtggcgcagggtcagggagatgtgtccaatgttattgactagctgagtaataaaaagaatgggacttgatcatattcatcattggatgtagcaacttcaagttctttagtgactttgtgaacccctattggagtcccgacaggattttttaattatactccatagcaattagaaaaatatttatcacagcctaatggctgaagagaactaatagtctcaaaacagaaagactccatttagaacactgttaaaacacagtgacctcaggactaagtgt

SEQ ID NO: 6634 - DNA, 316 bp, Homo Sapiens
aacttgcgttgggcttagcgaaggtaccaggagagtgcaccatcatagtactatgaaatgtccctccattttgaggacacaggagtggcctacctttcatctaacaaagacaagagaattgaacgctgattgtctttgtctttgaagggtttattgctttacctcttcacttcacctggctttggcacctctgtcatttcttcatttactgttttttctagcatacttttaacttctttctgtactttctctttccaactgctgtccacatgccacctgtgtatagaatcccaagaaaacataacccaccagatcg

SEQ ID NO: 6635 - DNA, 317 bp, Homo Sapiens
tctagcggatcctgggttgttggtcaccctggtcctggcttgccttccagtgtgtcggacacatttacgcacagagaaaaataggcaatccaaatggtccaactctattggatattctctatgctagctttcattcactcaataatgtgtagctgagcacttttctgtgtcaatgaatatagttccacattatcctgggcttgaaggatgtgtcatcaaatattttactaaccccccactgatgcatctagcaggatctgtccatgccctgcccatatctctaacatttctatgtgctccaaccaagcaacccctgg

SEQ ID NO: 6636 - DNA, 952 bp, Homo Sapiens
agaatgtgtaacaacgacgggcagggctggcctcacaacgactcctctcctacattgtcaggacagggaaggagcccagctctgtttcttccagtcctctgctcccagtaacccatgttccaaaccgctgcttctggtccttcgagtgccacacctgtaacaggcacagttgaaactatctctgccatgttggtgacactatagctgtgcccactgtcgtctctgggaaacatagccgccacatcactgcatctacactggcaacagagctggcaaacagggctctgttgactcactgctagtctgcaacctgtccagtaggagctccttaaacatgcctggacaagggcaaaatgtactactcatcccactcccttaagcaaaaaagtcagagagaagcatttagtgtctaacaaccctgtcccaggaagggagaggtattgaggtgaaacataggtcgtgtctatacagtctgggcaaagtggatgtagaatgacagaatctggttagcatcattcagagctggtacggaagcctggctctcttctaactgtatttggccatggccttggaagcctccgtggatgaccaagtgtgtatttcactcgtctcaatgctatgtctgaggcagtgggcctagaacatagccgtggcacacttttccctctggctcatgtcagtttttctgctccagtgtggcatagactgtcaacctgcaaaagcaaggcacatagagaccccccacccccaacccatctccccatccactagcaaatggggaagcaaaagaaacctaggaagagttggccaacattccaggacgtgccactcactcttctctaatagactgacttggaaatgtccctagaactctgacggttcccatcggcggctgctccatgccagtggttcccaggaggatatgaagaggtgatgctggtgtcctgacgat

SEQ ID NO: 6637 - DNA, 599 bp, Homo Sapiens
  misc_feature (51)..(51): n is a, c, g, or t
gctgtctacaggatccttaggttgttggttgtccaggcaagatacccaggncccttgggctggccatgtgtacatctggacggcagcctgaatggttcccttgtcccttggttgtttggggccctgagaacatgagaacccactgcaccgtccatagaatctgcagacccatagtaagtcaggagggacacagacccctggtaattttccccaacgtggcttgcccaccatgcagaataaccacagtaacttgtggccctggattggttctcccaggatattcacttggacagagaattcagggaaatcttacatcccccaaggcctgaggagggccctggaatctgaactttccagaaaccagcagggccgccagggtcaccccagcccctggccactctttctcctcctcttggtccggagccacctgcggacaagcgttctgcctgggtcttggctcttggcgtttctttgcagctccatctctccgagtgctcccatctgatacacgtttcaaaagttcaattccagggtagccaaaagtgtgaagctgccatggagaagggctaaaaaacaaccaggaaccaagcaaccactgg

SEQ ID NO: 6638 - DNA, 401 bp, Homo Sapiens
ggcgcgtttcacttcgatgttggtggctccagttggaattgtgatgatatcatgatatccaggtttcgcactagtaactgatcctgatcatttttttacaagtagatccatttcccccgcaaacaccacatttatcaaacttctttttggagtctatgatgcgatcacaaccagcttttacacactgtccttgcacacagacagaggtggaatctgggctacatggagtaccatctacaaccttgggctgcaaaacgaagaagtagccaatgcctttggcttggcagatgagcttgcacctgtcctttggtgagacgccagcgtacttgggaatccattccaccgcaggcccactcccaaaggaagcttttgaaaactcgttgtgtgcttcacattgttcc

SEQ ID NO: 6639 - DNA, 414 bp, Homo Sapiens
ccgccgttccagagtctaggagagacagagatggctcttagcaactgctgctgctctgaattgttattgaacacttctgcctcatacttcctgacagctgaagagatgggaggagggaatgttgaggaataaacaagacagagccttccagctcttgcctgttcccttgcctttagtatgattgatggattgttaagttagggatggaaggggaggtagggaggagggcaggcgcctgtctgagtgtcctgagcttagtgcttatgtcgccactctgacaggcaagaaaaaaggaatttacaaaccacaagatggcaacgatctatctgtgctgactttgtcagggctaacgaacaggagtttaaggtgagactccttcttttcccccaaatcatataaaataaccaagcaacc

SEQ ID NO: 6640 - DNA, 176 bp, Homo Sapiens
ttctgtctcagaacaaaaccaaaagcaaagatgtagcttgggaaccaccgaaggtgatacataaatgaacaggcgagctgtcctgccacaaaaccttatttgcagactgtaaaatgcaaatttacatagaatggttgtgtgtcaccaatatctgttttcaactatttactgattat

SEQ ID NO: 6641 - DNA, 339 bp, Homo Sapiens
  misc_feature (87)..(285): n is a, c, g, or t
ttcgagctcgggtacccagcggttgcttgcttgttaacagagtccatgcaaggggtggctaggaacataatgttaatgataaaaatnnnnnnnnnnnnnnnnnnnnnnnnnnnnnnnnnnnnnnnnnnnnnnnnnnnnnnnnnnnnnnnnnnnnnnnnnnnnnnnnnnnnnnnnnnnnnnnnnnnnnnnnnnnnnnnnnnnnnnnnnnnnnnnnnnnnnnnnnnnnnnnnnnnnnnnnnnnnnnnnnnnnnnnnnnnnnnnnnnnnnnnnnnnnnnnnnnnnnnncattataccctctgctgtagggatcatcataaccagcaccctgagatcctgtga

SEQ ID NO: 6642 - DNA, 519 bp, Homo Sapiens
tgagcactatagctttgcatcccagttggcaactgaaatgtgggtaattctgtaaactcatggccacacctttaatgcttggggacagtgggtggagtcagccagagctcttttccaacttcatctagggtcttctctctggaaaagcttagtgacgttctccgaaggtttatttggttaaggagtattgctaaaacactttttaaaaatccactttgaacacatgtgtaagctgaaaagaaaatgacatatatacctccattgaagctgggaaagtgaaaaggctgacgaaatgtctgaaatcctgagcctttcctggttctattttaatacagcgtacaggtaacagatgatctcatttaccttctgaatgacccagcactcaatttccctaaaactgctcagctccacttggaaatcaccaggggacttgagaatcttccccttagactcagggagacacccagaccaggaagaagggcactgatgttttcagggacccaaaagcccacttttttt

SEQ ID NO: 6643 - DNA, 466 bp, Homo Sapiens
gcggatgggggacccagggttagaggtatatggcataggcattgaaatctccaactgctctgactccaggtaggtgcacttcaatgccaagtactaaccaaacaataacaggatgccaccaaaacctggtatggggctgctgcatcctaattaaaaaaagtaatagatgttattttttagaacagttctagatttacagaaaaatggagtagatagtacagagagttctcctaggctcccctgtcctccagcacacaacttcccctattagtatgttgtattagtgtggtccattcgttacaattgatgaaccactgttgatacatcattatcaactaaagtccatagtttacattagagttcattctttgagtttcacagattatgggttttggcaattacgtaatgtcctaaatcctcaatacagacatgcatgcaaaatagtttcactgctgaaagagagcct

SEQ ID NO: 6644 - DNA, 985 bp, Homo Sapiens
  misc_feature (19)..(19): n is a, c, g, or t
  misc_feature (23)..(23): n is a, c, g, or t
ccacaagttttcccagtangcgncgtttaattcctgctagatgcttttataagcagctgacacctatacagagttatgaatcatctttggtgctcaaggaacctgtagcaaagtaagagacatcatcatacagagaaatgtagttaagttagagttgaagcttggaaaagatcacatgaaacaaaatctagctcttgccttatctcttcctaagttaagcataaattagccgtctgcaatagccgcctgtaagacaaatgataacagaagacaatcacacatggtgaatggtttccagtggagtttttcttctaaagagacagtaaacaggtcacaactcattccttgagaaaggattcctattaaatacccagaaacagctatcaaataaacagccaaagctattacttgttttcatcacatctctgtatcttcagaattggaagaagaatgtgaggctgtactgtgggcccgttcttttgccatgtgcgagtcactggtttgactccaccactattccttctttagcaatctggaggggtgtcaagtggatcagccaggaggaaacaatagtggatttacttcagcttggaaataatcataggccttctttccacagactagaagtgtgacatatcttcccactgctctggattctatccaccaacttctcatagggttccatcatagccacattccaccccatttcacttcaatgatgacatcctcatcctctaagcccagccaagtcagcaggagcggacttctgtactctttgatgaatgacccagcagacccgaatccgcattaagtgaaagccatagcattttaccttggccacccgaagagttaagctagaatctatgacccatgatcagggagatgaaattcggagaagagagtagaaggacatgagaaactggagaatgctgaattcagaatgaaataagagagagtggcggcataaacaagaataggccgatga

SEQ ID NO: 6645 - DNA, 236 bp, Homo Sapiens
ggtttgcaacacaggaagaggcggttgccctatcactgtgctggttctgtgaggagtagacagcgggtggacctgtggtttgcaacacaggaagaggcggcggccctatcactgtgctggttctgtgaggagtagacagcgggtggacctgtggtttgcaacacaggaagaggcggcggccctatcactgtgctggttctgtgaggagtagatagcgggtggacctgtggtttgca

SEQ ID NO: 6646 - DNA, 231 bp, Homo Sapiens
cgatctggtgggtgtgatgatgtgtgtcagtttgaacatgcagatgaggacacaactctagggatggtgggacatctagacagaaggaatctggtctccaggacaactttgcaggacagagaaacacatctcctatgctgtggactccagcccgcccctggtctgttagatgagggaaataagccaccacatcttgtttgagtcaccgcatatcatatgatttcctcgatc

SEQ ID NO: 6647 - DNA, 176 bp, Homo Sapiens
cgatcggatggggacacaattcacagctgaaatatttctttacttaagctaagactttatcccaattttggtatatctgaccagtcttactaaagctacattttgtaagaccagaaatgagtcttttcaaaacaaaaggattggtgtgaggacagagaaagtaggcagcagacagg

SEQ ID NO: 6648 - DNA, 530 bp, Homo Sapiens
tctgcagctcctctcgcacccagaggagctcctttcctccagcatgggcgatatctttgggaccgagactttccttggagagctgctgagagcggacagtcccaaaaacaagtgtcaaagggcccaagggaaaggggactgtgccctggaggctcacttcacagggatcagtgtttgctccacagctgtagctctgggctgacgccccccagaccccttccttctcggagtgacccgcccccaggccacctgctccggggagttctgtgcactttactctttggacttctcctcacgtgtgccctggttttatggggagagggaatcgctgttgggaaggcagagcagttgcaaccctctctgcccttgcttcatgtggctggagcccaggcaaggagagcaggagccagcgtgagactgaggccccctggtgcctatcaaggaccagagtgaaggggactacatctcccagcccttcaccttttaaatatgagtggttttaaaaggaaaaaaatgaaaccaggcaacaa

SEQ ID NO: 6649 - DNA, 482 bp, Homo Sapiens
gtttgggaccaaggtggagcccgagtttgagacccagttggagcctgagtttgagacccagctggaacccgagtttgaggaagaggaggaggagcagaaagaggaggagatagccactggccaggcattccccttcacaacagtagagacctacacagtgaactttggggacttctgagatcagcgtcctaccaagaccccagcccaactcaagctacagcagcagcacttcccaagcctgctgaccacagtcacatcacccatcagcacatggaaggcccctggtatggacactgaaaggaagggctggtcctgcccctttgagggggtgcaaacatgactgggacctaagagccagaggctgtgtagaggctcctgctccacctgccagtctcgtaagagatggggttgctgcagtgttggagtaggggcagagggagggagccaaggtcactccaataaaacaagctcatggcaaaaaa

SEQ ID NO: 6650 - DNA, 652 bp, Homo Sapiens
tttgtcactgtaactatttttattacattacaataattaggagtagtacagttcatgacaaaaatattacaaattttagatcacttcacagcacatactcctataaacatttaaaagttaatttcaattaaaagagtggtcatttttaatgtttgatatgaccaacattcctaggtcagcgcaaccaaatgatggaaaacaactggatcacactgcatatgtcccacaaaagaaagcacaatgtacaaaatgtgcatgtttcagtttacactatacaaaaatagttaaaatacattccaggtaaacatgttacattaagaaatagtactagtaagaaattggcactcaaaggaaaaatgcaaaagtattttcaacatgaaaacacaagacagtggaattggaaactttcggataaaacactgtaacccagttagctctgtggggtgtggggggagagatgggccctcaacatttctgcagataactttttttcccctaaattaatctaaattacctatcattatcccaaacaggcacttcaaactattaaactaaaacacagatcttaatctagttatgactattcttcaagaactcatgtgagtatctttctttagaaagaaagtttcattttatgaagcctattcacttt

SEQ ID NO: 6651 - DNA, 1411 bp, Homo Sapiens
ggggcggaaatggatctggtagccgagttcccccagcctcccggtgctgcgcgctgggctgaggttatggctcgcttcgcggccaggctgggcgcgcagggccggcgggtggtgttggttacgtcaggcggcaccaaggtcccactggaagcgcggccggtgcgcttcctggacaacttcagcagcgggcggcgcggtgcaacctcggccgaggccttcctagccgccggctacggggtcctgttcttgtatcgcgctcgctctgccttcccctatgcccaccgcttcccaccccagacttggctgtccgctctgcggccttcgggcccagccctttcgggcttgctgagcctggaggccgaggagaatgcacttccgggttttgctgaggctctgaggagctaccaggaggctgcggctgcaggcaccttcctggcagtagagttcaccactttggcggactatttgcatctgttgcaggctgcggcccaggcactcaatccgctaggcccttctgcgatgttttacctggctgcggctgtgtcagatttctatgttcctgtctctgaaatgcctgaacacaagatccagtcatctgggggcccactgcagataacaatgaagatggtgccaaaactgctttctcctttgggtaaagattgcgctcccaaagcatttataaattccctttaagttggagactgaccccgccattgtaaataatcgagctcggaaggctttggaaatttatcagcatcaagtggtggtggctaatatccttgagtcacgacagtcctttgtgtttattgtaaccaaagactcggaaaacaagttattgctatcagaggaagaaatagaaaaaggcgtagagatagaagagaagatagtggataatcctcagtctcgacacacagcttttataggtgacagaaactgaagtaaaaagcccttataggatcaaaaattgttcagggctcttagagatggtgaaaactacaaaaaaaaccatggctttcatatggacagagaaaatgaaagaaagggaaaaggcagtggtgtgtaggcaaatatggtttggcatttgtcttttaatgacacctgatatgatgtcattttgattttgaaattgaacactagaactgttaatcacctttaaaaagaagagcttattgggaattatatattccttaaaatatacatgggggcctgaatgtcagccatctttatactatagaaaaaggattatggatgcatgaatggtcatgctttggagatcaaatattggttgaatgcctatgtatgtcaggccctgtgctgagccatgaggattaaaaagatgaataaacatatcttgtttaggaaatggatgtataaaaaaatcaagtgcaataaagtgtgtgtccaaaagctg

SEQ ID NO: 6652 - DNA, 559 bp, Homo Sapiens
cgcttgatggtcatggccatccatacccccttgcaatggagtgtgggatgctcacctggccatctgtcctcctgtctggccaggagcacctgagttctctgctgttatcctcgccaaggctctggccgagcctctacctgaagcaactctgctcttcctgtcagtctcaaagcacaaggaggttcagcccaggaggaagccagctgcaatgtggagacacgtcctcctccccaacccacctcatgccaccgccaaccccctgccccaggagcgggcctgagccacgtcccctaggagcagctggagatggccaaaagagtgagctcaggactactggatcccatgcccaggtgtccagcagacctcaaggcagaagggtcacctaacccaggagtccacagactgatgtgacctcaggttcccacatcagtggccacagggcagggcccacctggtagaagtgttctggatatggccagggtgggtgtgtggctaagtgggcctgaacagagggaacctaaggcccttggccaatgtgattaaagctgccatcttgaaa

SEQ ID NO: 6653 - DNA, 415 bp, Homo Sapiens
  misc_feature (99)..(108): n is a, c, g, or t
  misc_feature (111)..(206): n is a, c, g, or t
gatcctttcctggttgtctaactcctggggtcaagtaatcctccgcttagcctcccaagtagctggggctacaggcacacatcaccacacccggctaannnnnnnnnnaannnnnnnnnnnnnnnnnnnnnnnnnnnnnnnnnnnnnnnnnnnnnnnnnnnnnnnnnnnnnnnnnnnnnnnnnnnnnnnnnnnnnnnnnnnnnnnnatgaaccactgcatccagtcttagttgttgagttttaggaggtgtctgcatatcctggatattaatcccttaccgacatactatttacaaatattttcacccattctgtggtttgcctttttattccattgattctgtccaaaacttctctttactcatagagcaaaggttgtatatctctaaaccaagcaacccctgggtaccgagct

SEQ ID NO: 6654 - DNA, 429 bp, Homo Sapiens
aacagtatgaatttcctcttatagcaataatggatgagatttaaatgacagctttctcacattcattatggcatacagtgccccccaaccaagtcatcttggatgtgttgataaaagatttctcaatattcattatactcataagtactctcctctcatgcaaattctctaaaataacactagtgaaaatggtagctaatatttgtggtatgctacgttcaaggcaccattctaagagcttttacatgtaataacttacataatacttccaagaatcttacaataaaggtaatatacttaggtctatcttaaaatgattaaaccaaggtagaggttaagtatcatgatacatataacaaaaagatcaactagtagagctaagataacgttgaaaaagatatttgttttcaatatggctaaagggcttcc

SEQ ID NO: 6655 - DNA, 351 bp, Homo Sapiens
gtctagagcggacgcacaaacactagcatagttctagtaaacacagcctaatacagggaaggaacaaaacaaaagaggactgaagaaacacgttcgacgacacgtatgtccggaactaccaaaagaatccctagatctctaccagcacaaaggagcaccacacatggcggccaccactagcatcgacacagacagaggtcagttgaatagcaataaaccccgtactaccactacactgacggcttctgatcgatcaaaacccagcaaaagcacgcacaggccggaaagggcacgcacgccgccagcgcggccgacgcgtgggtcgacccgggattccggaccgtacctcga

SEQ ID NO: 6656 - DNA, 401 bp, Homo Sapiens
tctggatggatctgtgtaggagttccctgtagataaattactgatcccccatctactatccccagtatgtaatggctgaattaatatgtaatcaactgcattgtatctaaagccttagaactagtcaggtgctccctccacccaataccatttcttaccctctaatcctacctgatctttaacaaagcattaataattctaaggataatctctattttgttgtgcttttttgtaactgttttaaataaatcaatttgtactgtatatttgtacttttgtgagatcctttttgctgttttaccattttaagtctctgtacttggctacacacagattgtatttttattgttaatgctcttcttatggatacctgcatttaacttgtggactatgtaaacaca

SEQ ID NO: 6657 - DNA, 710 bp, Homo Sapiens
ctcttagaagaggaaaatgctatcttttctggagattgcatcctaggggaaggaacaacggtatttgaagacctctatgattatatgaactctttaaaagagttattgaaaatcaaagctgatattatatatccaggacatggcccagtaattcataatgctgaagctaaaattcaacaatacatttctcacagaaatattcgagagcagcaaattcttacattatttcgtgagaactttgagaaatcatttacagtaatggagcttgtaaaaattatttacaagaatactcctgagaatttacatgaaatggctaaacataatctcttacttcatttgaaaaaactagaaaaagaaggaaaaatatttagcaacacagatcctgacaagaaatggaaagctcatctttagtttcagattaaagaaagctttgttttattttgctttcagagaatggtatgttttcttaactataggttattttatagagaatataaaagtataaaacattaaaaataaccctagatatactttaaaataatgttatatttatgctaaaatatgtaaattacactatacaaccatatgataggttatttctctaaccttgtcttctaacgttttaccaaaaattcataatctaatagtttatcagttttcaatagattaaataaaatgattactttaaaaataataaaatttatctaatt

SEQ ID NO: 6658 - DNA, 730 bp, Homo Sapiens
cccacacacggagcagtgtcaggcccacgctgactgtgcggacaacacaggtgttgttggtggggcccttcccgatctgcacaaagtcgtctctgttagtggcaaagttgaggaccgaactgtgagcatggaagacatctccagagttgtcgtggaagtggacagtgaaggtcacggtcattcccaaaggcacggccaccagggcctccttgttctgggtgtgcagtacagggctcatggaaaccctcaggtaggaaacaggggatacctttacagcaacaatgatggtttgttggccccaaagggctcttgtgcaatcacttcgatggtggatgtcccgatcatagaccctgatactagaaagcctttctcatcaacatgcacaactggaaccttttcgggtccatccaggacgcggtagctcagagaggctgcaccatccctgtttgtctgcagctttatatatgagttgggcgacattaatatttgttctgcttctatttcagggttgagcagctgcagcttctcaaacacctggacttggatctcatccgagagttctctggccaggccatacagctgccccgatgtggggtccacagccttgaccaccaccctcagcccggtccggccttttacccgccgagcacgttcatggcaaagttgtatctgtgacgggagtcggatcacgcctcgtgtccgccctcgagtccacggtcccgactaactt

SEQ ID NO: 6659 - DNA, 596 bp, Homo Sapiens
attccagcgattcaaatgtaagtaacttactctcaccaacagtagtcaaaatgagaagcctgctatgctgtggatttatggctcatggactctggatgagttctgcatttatcttcgtggagtgacgaataattgaattggaaaatcatggcatccagaatggaactgcataaaaatctgctggagtgtttccgaaaaaatgaagacctctgggcccttatcccagactttctatttcagtggtccatggaagagcctgcaagcttggcttttccatctcaggacttagctgcagggtctcagggcacactgcagagactcgtcatcctgttgcctggaggtgtgcactggctatttgcagatgagccgccatcccgatgactgcccaatcctcggctgcctgtgctccgggtctccattcatttgaccagcaagacccacatccagcagcaaggactccaccgggatgggagcctggtgcttattctcgaactcagcaatccagcagtgcacctgggtctgtttccagcctggccaatgatattctaagcatgaattattacatattactaattattaaaaattaaatgtaaaaa

SEQ ID NO: 6660 - DNA, 319 bp, Homo Sapiens
cgagctgttggggtctaaatcacagaaggccttgaatgtcaagattaaaacttcagattattccacaggtgactggaggtccctctctttcttttatgagaagggaagtacattatcagaactacatttcagaaaatgcctttaatgatggcatgatagataatgaagatttggaagagtgaggggataggaagaggcgaagatgatgagaaattagttaatgggtataatgtatgttatccaggtgatgggatatcctaaaagtcctgacttgaccactacataacctatgcatgtaacttagtgcacatgtacccct

SEQ ID NO: 6661 - DNA, 502 bp, Homo Sapiens
ttcagtggttcaaatgtgttactcatgtatttgttccacaatctggtctccttttcatctggaatactgaagatttttcttatttccttttcaattgtatctattgtgtcagctttgctaaaccttcgagttacaacattattcatgtttccattttcacatagcttcaatcctgtgagatatactcctactttgcagtgctttacaaacataccctgttcaaccacctttcgtgctattggctcttgaccttccatcaatgtgtaccagctgacaagtttattccaaccttcagttggcaacagtatgtaatcccaattcatcaataagatgttccttaagtgactgggcatcaccatctttgagaagtccagagttatcaatgggtccaggatacacattttgatctcccatctggtatttgtcccaactgtcaaagccaacatattttttccactgtttgaaccagcgactatcgactaggtaccaggtgtcctcgtgc

SEQ ID NO: 6662 - DNA, 521 bp, Homo Sapiens
gatgggtggagttgcatctctgatgcctctacgtctcagattctatgtatctgccagatggcagggtacctggaagccagtagcccttacctggcacctgtgacttctgagcacagaggcaggagtctctgtgagaccctgccatgaccccatggtgagtggaggtggctgtccatgggaaacgcctgacttctgggtccctcttcccccgcctcctgggctggctctgtccacactgagtagcagcaggtgtgcccagggatgctggcaaggctatgcttccgcctctcctcacagcactggccactccctctctctgttcccccatgcaggttctgtgaggtggaattccagggccccctctccatccaggaagagtgggtgcggcagcttatcagcggcacatcctggagatgaacttctccataagcggaccccccacctgaggagtcccaggccccgcaggcacagacagcgacgacagaggctccctaacacaaacgcattccagatccccgctg

SEQ ID NO: 6663 - DNA, 584 bp, Homo Sapiens
gaaatcagatgcagatctcgttctcagggattttatagtccagtgggatgggagtggtgagcctgtagtcaaggacaaggcaggaagtgttgagttgagaaaatggagtgggagtttagaaggaaaaaagcttgagaggaggtagcactggaaccagtcctcagaggaaggtggggtagtagggttaggatgtaaggggatgaggtaggtggggtcaagcaggaccatggtaggcaaagtcgtggaggcagagaagtgtgatctgacttaactagaatgtggcagtgaaaactggaaaggtaaatgtggccaagaaggccaacaagcacggagagcggcctccaggggactgccctcatggcggaactcagagcttccacataccaggctctgcgtggaagcattcttgtacacccagagctgtataccgaatcatactggtatccagggctcaatgtaaaagtatgcacatgcacacgtcagtacacggaatcacatacatcaccggggtcatatgctgagccatctgccacatcgggggctatgttcagaaccacacatgtccttggggctctggagaactg

SEQ ID NO: 6664 - DNA, 352 bp, Homo Sapiens
taggggaaaaaagtaaataagtatgaaggaataatgataataaataactacataagtaaataactatgtaatttcacagctacctcagattattatttcatcctcagcctagtcaattaatctgtgtttatttaacacagcactgagccagtcaaatatatagattactcctaaggctgtgaaatgtaggagtgacatgcagcccttattctgactggcttagtacaggaactgtgggaagcaaggaatttactaatttttaatatctatacatctatagatatggatatgtattttttggtagaagtgggtctcgctatgtcccttgccgtcttgactctgtgcttgaaat

SEQ ID NO: 6665 - DNA, 426 bp, Homo Sapiens
ggagacttaaccgttgctatgctgccacttggaacaggggtagagcttggggttgacgtggtacttgtgtaggaatagcaaaccactacttccttgcttcctgtttctgcaggcactggaagagatgcattatgccggatagctgcattagcaacagcattagctgttacagtaaaggcggtttggggaacgagccggggcatcagtggtaccaatcgacgaccttcaatggaccattctgaagagctattaggtccagacatattatgtgcaattgttgttaaccgttcatcgtttactgctctccgaacttcacgcacggctggcgttctagttgagatgctaagaacttttgatagttctccaagaagatctttcttttccttggtgagatcccctgtgcccgaagtgcactgatactccaca

SEQ ID NO: 6666 - DNA, 601 bp, Homo Sapiens
tcttgccaaaatattagaagtaccaagaactattgcataagagaaagtatgtagcaattttttgctaggctgatggtacacttgaagacaacaatgacttcattcaccaaggaaaacactacttagcaaagatttacaatatcctaaacacaaacacatatgtggctgaggtggaataagcagcacgttgtcccaaaaacacacttaaggctttactttagcagcatcagggtaacctatcaaagaggcgctgttaatggtcagttcatttcaggaacgctcggatggaaccataaaagtgctccgtgagtatagtaagaaacattttaaatatcgaaggattttcttctttcatgcaaatcctgatccttaatctttctcccttgaatctttcaaatcggtctgttcttctccccccaggaacagtccaccagtggtgtgataataatctaagtggccagatgatagtaggtaatttattaaactccacatccagtatgttcattaacagagactaaggacatgagatgagagaagaggacctgctttgtttgaaatcatgttcgaggggcttgctcctctgcccaagatgattcgatgc

SEQ ID NO: 6667 - DNA, 273 bp, Homo Sapiens
cgtccatgacgggggggtctagctctggccttatttcctgagagatggggacggagtcccccttctggttcccttagggtggttctggcgtggcttcaggcagaagaacagcgatggagacctctctcctctgccatctgtcacgtggaagagcagatcggtttatggaagtctttggggcagtgggaaatcaagcttgtctgcaggcagcaggagatactacagttccgggttccggagaggagggccactttctgagagagactcttgctt

SEQ ID NO: 6668 - DNA, 724 bp, Homo Sapiens
tggggagtaaagtggacttccatgatctggcctggatgatagtgatgaggaggtcaccgggattgccctgacagaatggactgtgagctatcagagcatggaagctgcatcttcatctctataatcccttgtttggcacagtgtcagcctgagaagatgcttggcggcaaatatgaattatggcacacactgttaatttcttatccatgagcagttcctttgcttgctaacagaaaatcctgattttgcttggataaacaaagtgtccagtgtcaggtgatgactcaaggtcggtttaagatcaggctggggcctttagttccttttggcctgatacttgaaagagtttacagtagggactgtcctgtggtccacttctggataatgagacataaggagaagtctgctgtgtcctactaagaagattcacttcactggttaaaggcgagagacacatcaagaaaagccccctttgacatagcttcccccatcttgtacctggagtctgaacttggtcatgatggctggagctataacagccatcctgtgatcatgaagctccaagggtataaagcagtaatattcaggaaggtggagcctttggacaaaatgataacaggaatctggggcctcagctacatcactgagccttttcaagtccttgccttcttcctcttaaatcctgttatgttacataactcaatgtctttattgcaaaagccac

SEQ ID NO: 6669 - DNA, 465 bp, Homo Sapiens
ccagggaagcgtggctccaggatctaagaaggaaccagagacaagcctggccaggagcaaatacaaatggctcgagggggaggatgctgagagactggcctgttggggctgggggtgcctccagaggagggacaggagctcagtcacttgttctgagtcccactccactcactggctggcacagggcctggctctgagcacatactagcacatgtgctgactgaccaccttgttttcacagaccagcagagaactgggacctctttggtgaggctgtctctcaggatcttctctggatgacatccaagccaccacacttcctcatttcccctctggctttgccactgacagatctgagtagtgatagggatcctattgcagcaagtgggaagctgcatttttacggcttccccgtcccttcctcagacctgctgttccctcgccttgtaagcgttggtctccatg

SEQ ID NO: 6670 - DNA, 141 bp, Homo Sapiens
aagagaaggtatacacctcctgatatacctgtatacctcaggacagagaggtggccaaaggctggctatttgtggaaacctgtgaacagaggctggacctgcaggcttctgtccatgaagcctgtccaaagcaagatgact

SEQ ID NO: 6671 - DNA, 343 bp, Homo Sapiens
cagggattgagtgctgctgttagtttagagaaggagagatgtctaacccttgaggtgaagggctctgggagggtccaagaagacgtaggcttcattttcacaccagcccacaccattccagtgctcagcctagcaaatgtgctttaatgcacacttctcagacctgtgatccgtgtatctactccccagtgacagaagtagagaagagaatggaaagcagcacactccgtcccctctagtctggagctgttaacagaatctgctagaaactaagctttattctaaccataccgtaggattcttaaaatcctcctacctgggtccatgaatttcctttggaaat

SEQ ID NO: 6672 - DNA, 288 bp, Homo Sapiens
tctgaggatctcgacacacgccgaatgcacaacagaatcaaatgggtggacagaggaattaattcaggcaggtaaagaagaaactgtaggagaattagctttgtctcctccccatctgccctatgacattattaaaagggagctggacactagctagggaacatggaagcaacagataaacaaatttaagagtgaaaagtggcagacgctttgtacacttaagggagtggctacttctccttgatctgggacataggatgggtatggtctggtccttcggcgtgtgca

SEQ ID NO: 6673 - DNA, 323 bp, Homo Sapiens
ctgaggacccgcaacaacttcgtccattaagatctcaagaagtgtgtggacattcggcgtgtgcaaatgtccagacactggcgaggaagaaactgaaacagctgtaaccactcacttaaatataccatggcattcgtacaaatgatcgtcgactttgaacccaagagctggggtccaataggaagacaactccaaatcaggccttaaaaacctggtttcagaatacacattgctgccttgcctttgtgggtatggaggctcggcgtgtgcagcaacaacttcgtccatacggatctgcggcgtatggattctcggcgtgtgca

SEQ ID NO: 6674 - DNA, 294 bp, Homo Sapiens
cacacgccgaatgaccaaacacttcaagtccggatggacgaagttgttgctgcacacgccgaatcaccattactgtggtctcaggtcacgtggacgaagttgttgcgcaacaacttcgtccagacagacctgtgtcaccaaggggtatggacacttcggcgtgtgcagtatagtagttcggcgtgtgcagtatgggttttcggcgtgtgcatgcacacgccgagtgcccacacccattgtgacctgcaacaacttcgtccaccgtgactaaagaaggtctggacctacgcgtcg

SEQ ID NO: 6675 - DNA, 262 bp, Homo Sapiens
aagagtccttcatagagctcagtcaggaaggggatggggcaccaagccaagcccccagcattgggagcggccaggccacagctgctgctcccgtagtcctcaggctgtaagcaagagacagcactggcccttggccagcgtcctaccctgcccaactccaaggactgggtatggattgctgggccctaggctcttgcttctggggctattggagggtcagtgtctgtgactgaataaagttccattttgtggtcctgcaaaa

SEQ ID NO: 6676 - DNA, 684 bp, Homo Sapiens
  misc_feature (34)..(34): n is a, c, g, or t
cccatttatagcatgaagccctaacatggatcanctgcagatgattccttcctcccaccctttcccttttttagtccctgtcttatacaaaccagagaagtgggtgttggccaggcacattccatctcaggcagcaagacaatctttcactcactgacggcagcagccatgtctctcaaagtggtgaaaataatatctgagcatctgtaagacaaaagaggcaaagacaaactggatttaatggcccaacatcaaagggtgaacccagaatatgaattttggcatattcccagtgtcgaagtagtctccagcctctaaataaagcccagtcttctccccaaagtcaagcaagagactagttgaagggagttctggggccaggctcactggaccattgtcacaaccctctgtttctctttgactaagtgccctggctacaggaattacacagttctctttctccaaagggcaagatctcatttcaatttctttattagagggccttattgatgtgttctaagtctttccagaaaaaaactatccagtgatttatatcctgatttcaaccagtcacttagctgataatcacagtaagaagacttctggtattatctctctatcagataagattttgttaatgtactattttactcttcaataaataaaacagtttatttaatcaaa

SEQ ID NO: 6677 - DNA, 759 bp, Homo Sapiens
acaactgatggactgccgtcttggtacccatactaaaacggtaccaggcaaatagattaccatgtgctggaaacactattcagtggaaagtttagtggcaacttttccatatcattcatgacttaatacctgaaatgcacttttaaatgtttgccttatatccaagtgtttacttgtatccatgacctaaccgtctattgaaaagaatgtttgcagatgcagattgcaatgttgtttgtattcataggcaaaagtcctcttctctagtataattttttaaatctgagagaattgaaggtacagaaaaaaattctggagtgcctgaaccacagtttgagagcacaaaggtcacattctttcagtaaatttgggggaaataaatttcagctacctggttagcttcagtgactacttacacacagggctttggttccattacttgtttccaccacagccacatcctaaatacttggaatatccgaaaacaacttctaaaatcactcaataaaagtattcacttctaaccaactcctcctcctttatacctgctctgtgttagggcgtagtctgtttccacctctgtaagtcctatctaggcttcctgatctatcaattcagtatcatgattgttaacccaaacgacttcctggaaaattcccagccctagatgtatccaagccctcctaccctcaccagttatttctggagaaagatcaccaaatgtataaatccgtattagtaaaaattggttttaactga

SEQ ID NO: 6678 - DNA, 549 bp, Homo Sapiens
cccatgtctatggctcacccgggacccggggcctcccgcgccccttttcccaaaaaattctcccgggattcttcccccccagccagatgtcaagagtggaaatggccaggctggggtaccaccctcctctcggtgggcccctatgatactagcctctcgcctcttccaggagaagatacaaatccacaagaaacaaagaggacacggctggttttcattgtgaaagatagctacacctcacaaggaaatggactgcctctcttgagcacttccctggagctaccacgtatctagctaatatgtatgtgtcagtagtaggctccaaggattgacaaatatatttatgatctattcagctgcttttactgtgtggattatgccaacagcttgaatggattctaacagactcttttgtttttaaaagtctgccttgtttatggtggaaaattactgaaactattttactgtgaaacagtgtgaactattataatgcaaatactttttaacttagaggcaatggaaaaataaaagttgactgtactaaaaatg

SEQ ID NO: 6679 - DNA, 768 bp, Homo Sapiens
  misc_feature (464)..(464): n is a, c, g, or t
  misc_feature (467)..(467): n is a, c, g, or t
  misc_feature (469)..(470): n is a, c, g, or t
  misc_feature (614)..(622): n is a, c, g, or t
  misc_feature (626)..(637): n is a, c, g, or t
  misc_feature (687)..(722): n is a, c, g, or t
atggcaccaggcagacacaaaaaccgcagaaaggatcgtcgaaccctgaagcccagggcccctgggctgccctgtggtccagtctgaggccctttcagcccccaggctgccttgccaccagctccaggtgctcaagattctggcagagcctggactcaggatgacttggaactagggcttggctctcagaagtcctggattttggaaactccaaatggaatcacccttcagagacatccctggtgcctggagatgggaatgtggcctcagtgcctctgagtaggtgccatgaggcacctttgcttttctgcccagagtggccatgagcaccagaacagatgatctccatttccgccagctgcctgtagccacgtggcatcctgcctgtggtctgggtgagatttactgtgaccagatgtagaataaatgtgtctcatcctgccgacgaccggctcaacaagganatnanngcttgtcggccggctccgcccttcaaaaacttttcaaaaccattccgttggggccccgggcccccaaaagggaaaggggaaaatggggcaaaactttgtttcccaaagaaaaacccggggcaaagaaaaaaggggcgggggttnnnnnnnnncacnnnnnnnnnnnncccccgggggggaaaccccaaagggttttttggagaaaaattcccccaannnnnnnnnnnnnnnnnnnnnnnnnnnnnnnnnnnncgcccctccaaaaagggaggaggtcccccccgcgcgcctccaaaat

SEQ ID NO: 6680 - DNA, 441 bp, Homo Sapiens
acgaaaggcgcaggcgtcaggagggtgctgcccgctggagtctgcaaatgctgccttccaaaagggacctggtgggttctgttctccctggcaacacatctggctgttccagccaccagcgagagcccaagactggtaactgtccacaggcaacagggagtcatgtcgcggttctccaggagcacccagagtctgcaccacagacacgtccaggtaactggccataggctggtaggttcccggatatcccggatagaaggcaaactcagtggggcgactggggtactcttccccggccgtgggagtctccgcggggtacgcggccagggtggctgcctgggcacagggtttcagcgagctccgggacactcggcaggagtagtacccgcctccaaagtaaccataaggcacgggagctggggaaccgtcccctggggcacc

SEQ ID NO: 6681 - DNA, 416 bp, Homo Sapiens
gtcatcttcatccaccctttaaacactggattattccggataaaaattcaaggagccactggaaaatttaatatggtcatccctcttgtggatgggatgattgtcagcaggcgagctcttggctttctggtgaggcagactgtaattaacatttgtagaagaaagagactggaaagtgactcctacagtcccccccatgtccgccggaaacagaaaatcaccgacattgtcaacaagtaccggaacaagcagctggagccagagttttatacttcacttttccaggaggttggactcaagaactgcagttcttagaccactgaatttctaagactgttgaactccagtttgggaactataacacagcagaacagtttgataggtgatcactgtaaaaataaaaacaaatcactccc

SEQ ID NO: 6682 - DNA, 529 bp, Homo Sapiens
agaaaacagttgctaaatgtaggacatcttttgaggaattagtttatgagaaataaaattttacttgtttttactatcctgttagaagtatttgtttatcctgataattttaagccaacatagtagtcttaaattacttttgaatttctaatctgtgaaggcagtaaatgaaatatctgttctgcaactgttgaaacaaataattggctacattgaccataattaaagttaaaattttgccaatgatgtacagttttatggttaaagttgctgtggttggttgcattacatgacacagaaaactgtcctctacctcacgtgaaataaatattttatatggttttactaaaaataagactcatgtatctggtcacctagtttacaaattttgaattatatttattgaaacatgacatactgtgctctgagcttatacctcaattgtattttgtgctgttttccattttcatgccttgtaaataacttgtatagattgtggatcaaatactaaataaaaacttttaatgcc

SEQ ID NO: 6683 - DNA, 506 bp, Homo Sapiens
ctggcccctggtgggggtcgggagcgcttttgtttaatatccggcagggaattcagctgaacaagacccctggggcccaagagagctcagcgctgaagccaccacctcagagctcagagggactggtgggggccctgatgcacgtgatgcagaagagaagcagagccatccactcctccgacgaaggggaggaccaggctggcgatgaagatgaagatgatgaatgggatgactgagtggctgagttacttgctgccctgtgctcctccccgcaggacatggctccccctccacctgctctgtgcccaccctccactctcctcttccaggcccccaaccccccatttcttccccaccaacccctccaatgctgttatccctgcctggtcctcacactcacccaacaatcccaaggccctttttatacaaaaattctcagttctcttcactcaaggatttttaaagaaaaataaaagaattgtctttctgtctctctataaaaaaaa

SEQ ID NO: 6684 - DNA, 690 bp, Homo Sapiens
acataagttatagagagcctcaggggaaccccgagccgtctcccaccactctcccaactccagaatgagatccgcggcggcccggcgagggggttctggggaggcgcaccccaggctggctaccctgagcccaggcccaaggctgcccctctaggccccagcacccagcccccttcctctctccgctccccgcccctccttcctcgcatcagacaaaggtggatgaagttcttttcaagtttcaaaggcagttgctgggcagctttgcagaaacaataactcttttattgggaacaaatgttgacatttgacgggcgcgggaggcagcgcccgcgccggccgccgggcaagcgccccggtgctctcggcagcccccggcccccggggcccacctgagattaaagcgcgaattccgataaatcagctctaaggaaaccctgggccgcggagagcagaagggctgtcgcggatccaccacgcgggcgccgggccgcggagccgggagcgcgcccaggcctgcacccgcagcaaagccaaggccaccgccccaaagcccatctgctcctggtcgccccgttttgccgacgtctccccggcctcagtcaacaacagcaaacttctatcttggagggctaggtaatttttgactatgaaaattttaaagcaaaaataaaattcagaccccattaa

SEQ ID NO: 6685 - DNA, 439 bp, Homo Sapiens
tagcctgctggatgctgttcgtgcctgtccctgctctgcctcccacccagttgcctgaatcatcccagctcagatgcagccactgtctcttgtcaagtgggacctcatactattctcagaaggctaacttgagaggttggggcccttgtttccccagagggtccccagggactctgcagtgtccttggcaaatccccactgtactcaatgccctacattctcttctgtggtctctccccgggcttgcttcatggccactgaaccaatcactttgtatgctatgctcctactgtgatggaaaacaaaatgagtataacttattttatatccatattcagactatatagagaatattctatgcatctatgacgtgcttactactgcagtgcatttgtcattagtcttcatgttaatacagtacatttattctttggtaaaa

SEQ ID NO: 6686 - DNA, 584 bp, Homo Sapiens
taacagcacactgaaataatttatttaaaactaagatttgtaaaactgtgatctatcctggtctaatattattaaaattaaaaatcaaaagatgaaatattatttcagacctatatacatcaagatgccagttcttataaaaaacatactttagttgtaaatgctaggttatgcaaaaataattttatttcaatttaattttaatgaatctcccccaactataatattaaaaacatcaaaagaacttaagttttaatggcaaaaagttcctattttcccccatctactaaaaaggttgttttcccttattaacatacaatgccctattgttaaggcacaactttttttagattaaaaatgaaaccatagattaggtttattttatacaacagttacaagacagaccttttgtaggcatataaatacatcttaaattcaatcaagatctaaaatgaaaaattattttttctttctaggatcaatcaacacatagccaataggtagttacagctagaataattccaacagttcctgttttaacctgtcagattgtctccaaaaggccatcttcaaagtgcgatccc

SEQ ID NO: 6687 - DNA, 430 bp, Homo Sapiens
ccaccagaatgcagttccagcttaggaagccacaaacaagccacccaggaggaacaaaacaccgccagcgtggattttccaaatttccctggaaagtaagtctcgctcttgccaaagaaaagtctggcttggagagtctctggagcccaggatgccagcatgtgccaatgactgtcaccttcatctcttcaaaagaaaagccatagccgaggactgtcccgcgacccccgtggactgcgtctaggtcatgtgattctgttttcatttctcatcccatccaatttgtccttttctcctgtcattttcttcctctgtggtcccttcaaagttgttataatttgtactgaacttcaaaatgtgtcccgttctccccagaccactctagccacagtatattgcaataaaattacttcttatatttgcagaaaaa

SEQ ID NO: 6688 - DNA, 1027 bp, Homo Sapiens
cgtataggacatatagaacagtgtgtacaaaaagccaggctggtacggtgcggaatcccgggatatgtcgacccacgcgtcgctggtcagcaatgctacccaagtttatcattcttgcacagcaaaagatcgttgaaatcacggaatgccactccttcagtctagaggatagattcaatgattacatgaaacctaggaaaagaacttgaaagttcttgagttaccctgcatcatgaacaaacttgcactgtctggttctcagagaaacttagcgctctcaccttgaaatacatatgtggactatggacttccaagccaagttaggtgatggctttgaagggattgttataaatagcacatacagaactcttggtggtgaaacaagaattcttgcagtaacagattttgagccaacccaggcacgcatggctttcccttgctttgatgaaccgttgttcaaagccaacttttcaatcaagatacgaagagagagcaggcatatgcactatccaacatgccaaaggttaagacaattgaacttgaaggaggtcttttggaagatcactttgaaactcactgtaaaaaatgagtacataccttgtagcctacatagttttgtgatttccactctctgagtggcttcacttcatcaggggtcaaggtgtccatctatgcatccccagacaaacggaatcaaacacattatgctttgcaggcatcactgaagctacttgatttttatgaaaagtacttttgatatctactatccatctcaaactggatttaatgtattctgatttgactggaggcatggaaaatgggggctcatactattggggaagttcatgtttttgaccgagactctttgttcgataagtggggtaccagatcttgcatgactgggcgcagggttggacctgtcaggatgggagagcttggcacgggtgaaaactgaattgggaggcattcagcgagggaatgcagtgtcgaataagagatggtacgcatcaagagcctagagggagtt

SEQ ID NO: 6689 - DNA, 422 bp, Homo Sapiens
tttttttattagcacatacaaagtttatttataaatagagaaaagttactatcagcctcaatattcaaaggtctgttaactaaaccacaatgcattcatacaggcaatattgtgcagctattagaagccacagagaagtacaggtatccctttctacctgaactcaagctccctgactcagaaaccaagtagattcagatagcaagggatacctgtattcaatgacatggaaagatgttcatgatatattaagtgaaaaaaagggttacaaaacaacatatactttatttttattaaaagtagcatatttacatatatttttgtatacacataaaaatgagactttctgtaccgtctgcaatgttcttgtctttttgtgattcttctaaatgataaaaactctcctaaaaaattaaatacag

SEQ ID NO: 6690 - DNA, 467 bp, Homo Sapiens
aaacatcggcagcaggaagcagagagacaaaaaagcaaaaaggatacaacttgcatcaagctaaagattgatagtgaaatgaaaaaaacagtagttttgccacccattgttgccagcagaggacaatcagaggagcctgcaggtaaaacaaagtctatgcaggaggtgcacatcaagacgctggaagaaattaaactggagaaggcactgagggtgcagcagagctctgagagcagcaccagctccccgtctcaacacgaggccactccaggggcaaggcggctgctgcgaatcaccaaaagaacagggatgaaagaagagaagaaccttcaggaaggaaatgaagttgattctcagaagcagtattagaacagaagctaaagaggcttcaggtgagaccacaggagttgacatcactaaaattcaagtcaagagatgtgagaccatgagagagaagcacatgcaga

SEQ ID NO: 6691 - DNA, 588 bp, Homo Sapiens
tgagcaccaatcacgagaccatcgacctgcttgtccagatcctccggaattgtttacggtacttcctgcctccaagtttccccatctccaagaagcagctgagtgctatgaattcagatgagctaatatcttttcctctgaaggagtacttcaagcaatatgaagtagggctccaaaacctgtgcaattcctaccagagccgtgctgactcccgggccaaggcctccgaggaaagcctgcgcacctccgagaggaagctccgcgagacggaggagaagctgcagaagctgaggaccaacatcgtggcactcctgcaaaaggtgcaggaggacatagacatcaacacagatgatgagctggacgcctacattgaggacctcatcaccaagggggactgaaggcaggagagagagcagctcccctgcccacctgcccctcaaccctgtagctgcagggggaggggacttcattcatgggttggtggtcgcaccttggtttgacttacacgggacatttgtgtttttggaggaaaagataccctgattctttgaatcttccttaagtttataaatatttattttttaaaag

SEQ ID NO: 6692 - DNA, 445 bp, Homo Sapiens
cgatactctctcaattgttgatatactttaaaatattcagttgtgcctcagttccagaaattattgccaaacaggagccacagcaatttttggctacttttctgctctgcccatctgtcaccttactggttttcccttgttcaggaaggaagcagctgtttccttgccaacaggtcccttcctctccatctcccaccaaactagggcaccattgattagacaaaggtacagtgtaacttgggtttctgacagcaacaacaggactgtgaattgtttaacctctgtggttaaagctacagcttgagttgactgccttggggatgtcagttaattaaggggtgatgatttgcaagagaaaattagtggagagtcacataggtaaatcattatttaacttaggttttcctaaagttagaatagtcgaatgttcttttctttaccttga

SEQ ID NO: 6693 - DNA, 444 bp, Homo Sapiens
caaacaaaaagtatgtaatacccattttaaaaaaccatttgaaagtagacaacttattccaaaatagcaaatgcagaatctctgctcagtgagcttggatgagtggcttaacttctctgggcctttgttcctatctgtaaatgagaaagtttgtagatattgccaagatttcccaggctcaatacagtgtaattattttatgttttaaagatatgaaatctgtttactcaaccaattttttaaatgtcatattgtgataatgctctgcttttgcaaattgtgtttgcatgtcattagttatatcaaatagttttgtggcatggggtagtggagcttccctccccacccccatatgtatcagtgaagcctttgaaattacttaaggcagtctttcatggaatgttttgattgagcaatgaaataaacagtcctcccttttgaaaa

SEQ ID NO: 6694 - DNA, 513 bp, Homo Sapiens
  misc_feature (323)..(336): n is a, c, g, or t
cttgtaaaggactgattgatatatttaagagttaataaatttgtgatttctgctgacagtgcgtccatctttatttcttcagaagaggtactgtatgtatgcctgcatagtgctggccagtgtcaagggcagtgtgtcctactctggtctcatttagtacataacaatttgcacttggtgagaatggcaagttaattgttctctgtgagcaaaacaatggtctcttctgggaaaatgttgctgagaacaatatagttaacaactaagactcctaaaagcttctctaaactgtaccctccaatccagccttcacatggctgccnnnnnnnnnnnnnnaaatacgaacctgtctttgtaacctttggatgttcccatttcggggataggggaaagcaccccagttctggttactccccagttggaactggagcatactgggttgctcagctccttgggatgggctaaaaacttcacattggctcacatgacggtctatgcggtccaggtggtaca

SEQ ID NO: 6695 - DNA, 1733 bp, Homo Sapiens
agcggccgctgtcatcatcccatggagaggatgtctccgtgtcactgagccactcggcgtccccggcatagtgggtaggggcagcgagcaggggctgggcggagaaggccaccaggtcccgtggccagaagtgtgccttgtactgctcgttggggtgctggtcgaacatgatgggcaggaactcgtccacgggcagcatgcggcgcagaggctgtgaggccagcagcttgcgggcacccgccagacgcagggcataggccagcgtccagtaggagtacccagccaccaccaggcccggcagcccctccacggccgtctccttctcagggttcacctgcttccgtccgaggtagatcaggtcccaagacagtttctctgcctccacatcctccatcagccgctccagccgccccctgaagttgctctcaaagcgcacgtcatcctcaaacaccaggacccgggccaggccctggcaaccacctcttcccagatggagtaatggctgaggaagcagcccacctcgcccttggtcagagtgcggcccgagtaagggtcctggtagcccgggagcaagtctacgccgaggttcctgatggcactgctgttgagcatccagccatccacagcgtccaccaccctcccagagatctccatctcccagagcgaggcgagcatgcgttcccgacggtcaggcctgcgagccaggctgatgacaagacctcgtcaaccctatcttgctgggcctcttagagggccgagtcacatgaggctgaggcctgcatgcgggggccgtccaactagtgcttctaagatcagggggatgaagttgaccctctcgtctttccagcccctggtgggatttcaccggcacattcatgtacccataacggtgctcattgcacacgtggacggagaccccagcagcctggcaaggcataggcgaagacgatgatgtcgtcgaaaggcccaagtgtagttgggatgtgccgggtagaaagcaagcttggtctgccccttcagcccgcagggatgcaaggaaggtggagtggaccatggggacacggaagcagccccggcgctggcggttcttggtggggaagtactcggctgtgcggcggtagtagccctggggggtgatcccacaccagaagttggagtagtaggtctgggagtccagcattggggccaccactggaagcccctgccccatgagaagccgcagagtctgattgttggtcagaatgttgtctgtgtctgcaaacaggatatagtcggccccccagttcctggcaaaggtgagggcttcctgcttcagctccatcagaaactggtgcctttctttggtccagtgcttgggaccctcttcatctgggtagaacctgggctcgccctcaggcctccagaccacagcagcatagtcatcgcccacagccgccagccactcctgcagcatctctgtggtgttgtccacattgtggtccgtggcacaccagagggccatcctggcccgggggtagtccagccgctccagagcgcccaggtagtggggcagcgagtgttcggcattgcgggccaggatggcaaggaccacggcgggcagcggcgactccgcaacgcccgcagcctccagccacggccccagcaggagcagcagctggagcagcggcgcggcgcgggcagcgcgcatggcgggcgcttgggcggctgcagcggatcccgagaattccggaccg

SEQ ID NO: 6696 - DNA, 268 bp, Homo Sapiens
tgcactcgccgaggatccacacagcaacacagatagcaattatatccaagtgtagacaacaagaaggaaaatggacacatgactctggatttctcttgtgagacctgggactccatttacaaacgtataaatcatcttgatataggtagtgattacaatttttgcatggatgagtcatccatgggtgaaagtggcataagaaaaggaagcttgggaataagccttaaagaattccagtatttaatggtacagctggaggatgattagc

SEQ ID NO: 6697 - DNA, 1032 bp, Homo Sapiens
ctctggtatgcaaaggtctctcgatgcaaagtgtctttaaggcagaatcgttctgtccaagtaaagaaattcaaagtaaagaaaagctcctaccaacttcccaattttgggggaagcattccaaacaggacatttgagggagagattagcactctgttaactatattcctatacccctataaacattcttggtggctgtttagacatttttaggtaaatattctcaggctacagactacccatacacaaagacatattaagccagctatgcaggcaaaatccatctagagctgatagaatgaggaacgtgggaacagaagtcaaactgctcattcccaggagaaataacatgagcaagaagatggccacagaacaaggcaaagttacacacaggctttggtaatgaatgaactgtcaacaacagaaggcacgtggctatggaaaaaaagccaaatttcagtagatctcccgacctgacccagtttccacagacaagtgtttcagcaggtccattggcttcatctgagtttgaagttaaaaaacaagcagggaacagagaatcaggtcttcagtctccctcagtctctgtctcctgacactgagcctttcagatatcgaacatggtgtctatcaaagggtgcaaacttaggtgtcgacaggggcaagtgatgtgaatgaggctagggtcagggcccgagggaatgcacagactctcccgactagagagaggcagccctgtctgcactcctcaccaagtggaccaaacaaaacatctgtgcaaaacatgctcctcccagactgccagcttgccatcctgattcagacaggcagcttctccatgaggatacacggctggatggaaattgacttgtcatcatctctactgcccactataatcacgatcaagtggtcgtattttacacatgacccactttaactaactcggcatttttatctcccttctgagaaaaacatactttaaaactattgtatttgtccacatttgagaaatgcaggattgtttcaaaagtg

SEQ ID NO: 6698 - DNA, 325 bp, Homo Sapiens
cacgccgaatgtccaaacgtgcacacgccgaggcaccatacaaaaggctagtgatgagaggtgaatccatttaaaaacaggactatgagtgcagaacagaaagaaaaggtggcccaccttaacaacacaaaacaatcctagaaatcactagtttccagaggtaaagggagggactgtaggaagtagaagtgctaatgccctttatttagtcaattaatcaggtgtaaaattgaaacgtggttttaaatatataacgtcttgtttattgtcctccctaactacctgaggatcaaccaccatggtctggtgattcgcgtgtgcagga

SEQ ID NO: 6699 - DNA, 665 bp, Homo Sapiens
cacgtaacagtatcactgtatgtgcatgaggagaaatgtggatagaatattggtgatccactttgggaactaaatctgcaccaatgtccttccagcaggacttaaagtgacatcatgagacctgagatcaagagggatttctccgttagcaaagcataacatggagaggagatcacaaatggagagaccagttagaaggttattgcaattgtcaaggtagaaattatcatggtgagaactagtgtgatgataggaacagaaaggagacttccaagagcacttgttctgacccttttctcaatggaaaatgagagagaggagaaaataaaatagaaatgtaataaagacgggaagaggaacagatctgagcagacaggattaatttggcttagaaaattttcagttgttcttgtggaatgttgaggcagaagtgtccagtggtcattggaaaatgagagtctagagctgtactgttcattaagaccacatacgactattgtgttattgaactgtggctggtttgaattgagaagtgctctaagaaaaagtacacactgaattttgaacacttagcaccaaaaaatgtaaaatatgtcaatattgtttatcttatttcttgaaataatatttcagatagttgtgacttaaataggatatattaaatt

SEQ ID NO: 6700 - DNA, 821 bp, Homo Sapiens
tgcacacgccgagtgtccacacatgttcgcaagtgtgccaccctcagccctgccagcaatgcccacggctcccccagctggtgcgctgttgcccctgtggccaaactcctctcagccaattgctagaacttggaagtagtagtcggaaaacatgcatggaccctgtgccttcatgtggaaaagtgtgcggcaagcctctgccttgtggttccttagatttcattcatacctgtgaaaagctctgccatgaaggagactgtggaccatgctctcgcacatcagttatttcctgcagatgctctttcagaacaaaggagcttccatgtaccagtctcaaaagtgaagatgctacatttatgtgtgacaagcggtgtaacaagaaacggttgtgtggacggcataaatgtaatgagatatgctgtgtggtaagtggacttattaggcataatcagattccattcatccaggtgctgggcttctggaagcctgagccatgtggagaatgcagcccggatttaaaagtcactgggacaggcccctaagcagcagtcagagagctctcatagtccccataacctctctgcaaagagacagactgggcctttttagcctcacccaggttaagaagtcagccagtggcatctggtagcaacacagaggaagagaaagagataagagaaggtctcacaccccagagcccaagacccctagatgagcacacagtcttcggcagaagattgtgtgttgtcccaacacaaactggcctggacttagcaacttgggcttcaggtttcatgtactgcttaggtcaggtcagtagg

SEQ ID NO: 6701 - DNA, 721 bp, Homo Sapiens
  misc_feature (178)..(178): n is a, c, g, or t
  misc_feature (183)..(183): n is a, c, g, or t
  misc_feature (444)..(463): n is a, c, g, or t
agcattgctaccttctctcctacacgcacgcaggcatataaacgtaggtttttgatgctcctctgcctgttgaccccgctattttcatgtttccaacaggtttttcttcccccagtccctcagctgctgctgctgctcaggaggtcagatctgccactgatggtaataccagcaccantccgnccacctctgccaagaagagaaagttaaacagcagcagcagtagcagcagtaacagtagtaacgagagagaagactttgattccacctcttcctcctcttccactcctcctttacaacccagggattcggcatccccttcaacctcgtccttctgcctgggggtttcagtggctgcttccagccacgtaccgatacagaagaagctgcgttttgaagacaccctggagtatgtagggttagatgcgaagatggctgaggaannnnnnnnnnnnnnnnnnnnatcttcaccaactgctgcaacatctcagcagcagcaacttaaaaataagagtatattaatctcttctgtggcttcggtgcatcatgcaaacggcctagccaaatcttctaccaccgtctctagctttgctaaacagcaaacctggctctgctaagaagttagtgatcaagaactttaaagataagcctaaattaccagaaaactacacagatgaaagctggcaaagaatgaaagaagcagtggaagctattcagaata

SEQ ID NO: 6702 - DNA, 423 bp, Homo Sapiens
agccggaccgtcaacgcgagggccacactgcacacgccgagtctccatatacttcttgaaatcagatcgtaatggacgaagttgttgcagatcagtgtggacgaagttgttgctgcacacgccgagtgaccagaccaaacagaacaggaaatcacagtggacgaagttgttgcgcaacaacttcgtccaccaggatatgcggcgtttggatactcggcgtgtgcatgcacacgccgaatgaccatacacttcttcaagtcagatctggtggacgaagttgttgtgcacacgccgagtcaccaaacttaaaaactatccctcaaatattaaaacaatctacaacatgatccaaactaacttttcccattcatcttctaaagctagtatctgtagctgggtgtggacactcggcgtgtgcagggg

SEQ ID NO: 6703 - DNA, 502 bp, Homo Sapiens
agtttatttggatgctgctacaacatctatgccagaaactgccgaattcctcctttgcagtgactggaatcttcctccccattcgcactaccaacattctatgctttggcttgatcatctcacactacaactattgtaacagcctcattatctctgcctccaggtaactcctgtctccatattattatcacagtgtttttttaataataggcatcatttaatcaccaagtatttgagtgcctacattcaaatgcataaatgctaaacagaatacaaagtaatttagtaaggttcctatcctcaagaatactgtaaatacctgctttgaaaactttcatttaaaaaataaaataactgggcataaagcagagattgagacctgtagtcccctggtggtccgcagattaaacctagcctacaaagtataggcgcaaataccgttttagattctaattaatgaaaaacacttaaaatccaagtttaaaaatcataaaaagggctg

SEQ ID NO: 6704 - DNA, 382 bp, Homo Sapiens
  misc_feature (12)..(12): n is a, c, g, or t
  misc_feature (67)..(67): n is a, c, g, or t
  misc_feature (161)..(161): n is a, c, g, or t
cagacaatctanctataaagtcagatttgagtggagaattaaaggaattatctgaataattaaaacnagaacactaatatctttgaaaaggctatttaagacttaatgatgcctacaaccatttacttgttaaagtctacttaaatatttattctacattntagcgctccagacatacatgcatatcttattagtggattcattcaaaatattcacacacatggaataaactcaagaacataataactcctaaataggctttgatcagaaaaaacaccattttcaaggaacagaaaaccagtttgaatataacaatcataaatttggttcctacctgacacatactctgtgtggtattcgcgtgtgcagggatcctgctaga

SEQ ID NO: 6705 - DNA, 186 bp, Homo Sapiens
tgctgggttcacaggcgtgagccaccatgcccagccaactggcggtttcttaaaaggttaaacctattcttcacagatgaaccatcccatttcacttccagcatcattcacccaagcatacatgcaaaacatcatgtcctccacagtgcacttcatatcatatgcacatgttccatagccagcgtt

SEQ ID NO: 6706 - DNA, 387 bp, Homo Sapiens
agggggcagccttgggctgacccaggacggtcaacttggtccctccgccgaacacccaattagaactcaggctgctatcccaggttccgcaataataatcggcctcgtccccagtctggagtccggtgacgaccagggtggctgacgtgccagacttggagccagagaatcggtcaggaatacctgagggtcgactacaattgtcataaaggaggagttagggggctgttcctgggaactgctgataccaggagacataattattcccaatattggagctacttccagagcaggagatggtgaccttctgtcctggggccgcagatattgagggcggctgcgtcaatacagactgggcccaggaccctgtgcagtgaatgagaaggg

SEQ ID NO: 6707 - DNA, 532 bp, Homo Sapiens
acatgaaaatattccttcatgttcttaacttctgcgtatctccaaacccaactgaaatgacatctactgagtgacatttcagtggtgtctactttgcaccccagtggagaaatctgctacaccttgtactgtgatatgtccaggtgtgctccctcccccaccaatgaggggcgctaaagggcaggtaccatgtcctcttcacctctgtattatatcctggcacctagtccatgcctgcctcatattagatggtcaacatgtgaacttataatccacagtcataagagtcagagaatcagatgtccaggctcaaaacttttcagaaaatatactgtttcagatgaaagtggtttgccaaggacatttttaagcacttagatttgatcccaagtcgagtaaatatggttccagttcaacttgttccaggttttaagtaacactttggttcaagtcccctataagagtcaaagtccgcaaatgaaacacgaaggactaggaaggagggggaagagaaaaatggtggatagcaaaa

SEQ ID NO: 6708 - DNA, 422 bp, Homo Sapiens
tgagccggtaccgcacacgcgaggcccatacagtgtgaccagtgctgagaggtgggaaggagtgtgatggggaggcagagagagcttctggggggagctctaggaaggggtaaccactactgtggctccaaaactagctcagagacataaactcagtgtggcaggtccctgcttcactgtcctttgacaggagcctctgagtcccatgctaggcacaagggacactcaatgaaccatacagcaccagtgtatggtagatgcatgtaacaatagcttcttaggaaacgagggttgccatgtggaggttactgggggaaggtgctatataatctgcatgcattttacaagtggatgaggtgcccccatccagccccccaccactagactgctgactgccctcaagttcccctagataaagcaca

SEQ ID NO: 6709 - DNA, 412 bp, Homo Sapiens
  misc_feature (137)..(137): n is a, c, g, or t
ccggtccaacacttcgtcactccgatttgcacaacttcgtccacaaggattgatcttaagaagtgtgtggatgctcggcgtgtgcagcaacaacttcgtccacagtgacttgacttcaagaagggtatggattctcnggcgggtgcactgcacacgctcgaggatccacacacttcttaaggtcaagtctgtatgacgaaattgttgctgcacacgccgaaagaccagaccgccgcgaggtcagtatggacggaagtagtagaaatctcaatggacgaaggccacaacttcgtccatcgcgatttctctgcgctacctttctcagtctatagccttcgtatggtacttcggcgtgtgcaaaaacaacttcgtccaccatgacctgtgtcaccaaggggtagggtcccctcgg

SEQ ID NO: 6710 - DNA, 160 bp, Homo Sapiens
ggtttggtctggttcctcggcgtgtgcatgcacacgccgaatctccatactactgggcaaatctggggtggacgaagttgttcaacaacttcgtccataacgatctctacaacttcgtccatcgggacttttctgcgagtaagaccctcggcggtccgcc

SEQ ID NO: 6711 - DNA, 540 bp, Homo Sapiens
  misc_feature (381)..(411): n is a, c, g, or t
tgcacacgccgagggtccagaccgcatgagctaaagtctcgatggacgaagttgttgcaggtcacggtggacgaagttgttgcaggtcagggtggacgaagttgttgcaagtcgttatggacgaagttgttgctgcacacgccgaaagcccaaactcagccccatggagaatatagtcaactcagtcggtggctgttgttgcctctgcatgtgttcccccacttgttgagaaaagagagaaaaagaaacaactagccatggattcgtgtatttggaacttgagtaccttaaattcatgtccttgtcttttcctggtctctgcttgtcatgtaaggtaaaaatgctaagagtgaccttaacacatatggctttcaacttacnnnnnnnnnnnnnnnnnnnnnnnnnnnnnnnccatgaaaaatatttatattattttttttctaacctccagctgattaaacaggtaccttacacttattaatttggaggaaaaataatagtagctgcctgacataccttctcactttgaagagtctctac

SEQ ID NO: 6712 - DNA, 552 bp, Homo Sapiens
taattatagaaggtgatatgaacagctgttttatcatcctacatgctaccaagctgtaggtgtcccattaagtcctgctatttaagaaatacttacataacccttaggaactcttcaggctttaaaaggcaaggagcaaataattttaggagaccgataatgtcacctaaatttgaaatactaagaagaggttagtgttctcaactatgtgaaatctgtttctcctactttctcaaatctaatcctaggaatcttgcttataaacaaagcatttctgggacaggagtacttcctctattatagcaatgcttcacatcatattgtgctgcagtttccatcatttttaaaggacagagacataaatgataaataatggtatacaaatattacaatctaccacctcaaaaaaacaaatattgtttatggaattcagagtttggagattcaagtattgattgcagttttattttgaaaagaatgctacaatttatgtggtttttatttctcatgtttatattaaaagctaataaactctattttaattaaaaaaaa

SEQ ID NO: 6713 - DNA, 1322 bp, Homo Sapiens
  misc_feature (760)..(866): n is a, c, g, or t
  misc_feature (876)..(891): n is a, c, g, or t
  misc_feature (940)..(954): n is a, c, g, or t
  misc_feature (995)..(1007): n is a, c, g, or t
  misc_feature (1065)..(1074): n is a, c, g, or t
  misc_feature (1180)..(1189): n is a, c, g, or t
  misc_feature (1247)..(1255): n is a, c, g, or t
aagcgggtgagcgatgacgtaccagactgcaaaggtcctgaagcctttgttgagcggttccatccctgtggagcagttcgtgcagaccctggagaagcatggcttcagtgatattaaggtggaggacacagccaagggccatatcgtcctgctccaggaggctgagacgctcatccagattgaagaagactcgacccatatcatctgcgacaatgacgagatgctcagagtgcgactgcgggacctttgtcctcaaattcttacagaagttctgagtgggccatctgagctacttccctgaaaatcctgcagtccctcactggctgccctcacaagccacctgaggagtggcatgagaggccattaactgtgtctttgtggtgtcctctggcttaaggagtgaagaggtggctcttgagggaaatggtctggacttattcccagcactgtttcaggcaagaactttccctttcaacttcaggctcattttcttctcaactctggctctctcaaggagctggagggtggcagaagtgggacaggagaagttttccaagaggttcatgggaggcggaggtgactggctggctgtcttgcatcagtcccaggcctcggccaggggagccagcctttggtttcgtttacttgcctacagtgctgtacgcaataagatgatgatcccaaaatatggtaaagtgaacccatctgtctgcattttctactctgagcccatttgttaataaacacttatttttatatnnnnnnnnnnnnnnnnnnnnnnnnnnnnnnnnnnnnnnnnnnnnnnnnnnnnnnnnnnnnnnnnnnnnnnnnnnnnnnnnnnnnnnnnnnnnnnnnnnnnnnnnnnnttgatgaccnnnnnnnnnnnnnnnnttgatgtgaacaaacaacagcaagctaaacaaaaagtggtgtgttccgnnnnnnnnnnnnnnngaaactcttttaaaaccttttcgggggcgggggcccccccnnnnnnnnnnnnnggggatacatctgttttcccaaaaaacaccgggaataaaggaggttggtgaacccccnnnnnnnnnncccccggggaaaaccccgggattttaaaacaacccaagggggacctggggggtactattgggttgcctccacgggggatccccagggggctcttatatattttctnnnnnnnnnnggggcccttcgggggaggaggggggaataaatataaacatcctcccgcacaagaggannnnnnnnnacaaggcgttagataaaacctttaaacccccgcggggggttctccaccccccggggcccccgctggg

SEQ ID NO: 6714 - DNA, 648 bp, Homo Sapiens
  misc_feature (82)..(82): n is a, c, g, or t
gggctctgccttgccaccctcggggctgacagcatccacacacttactccaactgaccatgcttctgcagcaccacctcagnttacaaggtcaccagttgaaaatgacggttacatagaggaaggaagccatcactaagcacccttcaacctggtcggtggaagcagtggtcctatttctaaaacaaacagatcctcttgcattatgccctcttgtcgacctcttcagaagccatgaaattgacgggaaggctctgctcctactcacgagtgacgtgttgctgaagcacttgggggtgaagctgggaacggctgtgaagctatgctactacattgaccgacttaaacaaggaaaatgctttgaaaattgaaaaaatccttgtgcaaatttagattgggccaacttctagaggcaccaatgccttcttagtgtggaatcatttttctgccctttagtcgtttttgttttgtagaaagtatctctcaaaatatattatagctagaattgtagaactatgttatagtccagtctacttctttaaaaaccatttaaactgctagatagtattagaatagtccaatagaaaattcattctttataggtctttaaaaattacttttattatattgtttacaaatatatttcatg

SEQ ID NO: 6715 - DNA, 840 bp, Homo Sapiens
gcggccgcagggcttccccgcctggcgcctgccctccagggctggggcctcgcctggcgggaccccgcagcagccccggccccatccccgcccagagccgggcgtcgtgtgggtccgtgggtgataattgagagcgtcagacccaggactgttcagggaggagccccggtcagactcccacgtgtgaagaccgggccccaagtggcaagggctggcctggggcgggcagcttgggtcctggacgttgataggaagcggaaggggaatcgcgggaagctggcccaggtcaggtccgcaaaggcttctgaagaagaggaagggcgagtaggggcacctggacgctgatggtggccaggatgctcagctggccaggagggcagcacctgctggggacggtggccctgccttcatgcccaggacaccagctgggtccagctagcagccactgggaatcagaggaatggggcagagctgggcattcaggaccttgaggacacgtgaccccacccgcccaccgccactatcaggccccgggaccgcactgacaggaaaccttccgtcgtgagggagcacttcccaggggccgcagggacgacactctccagggaggccccagcaaccacaccatcttcttgctgtgagaggtctcaccccgggctacctcctgtcactactcactgccctggggtccgtgggcaagttgcccagggtgggggtgcctagccaggtgcagtccccgccccgcctagtcctcggcgtcacgcaatgctcacctcgcctcttccccactaacatcccagactttaaaattcagtaaatcagatgtacaccgaaaaaaaa

SEQ ID NO: 6716 - DNA, 401 bp, Homo Sapiens
ctttcagaataaacatttttaattgatttcagtggcaactctcaaattgattacaatatgagatatatcagtgtcgtccattaacactcataagaataatatttactgtgtcagtgctattctaggattatagttattgtttgattatttcaggttgaaaagtagaagttccaaggttttgattttggtctggtctttaagtgaaaaattaaagcaaccagtagatgtaggttaaacttttacttcatagacttaatatgtaattaatatattgccaagcaacactgttaaagaaaagtaaaactcattttttcttgttcttaatttatatattacaagatactgtaaggtattctttatgaagttgatatataaaaatttacatttttagaacaaaaaaa

SEQ ID NO: 6717 - DNA, 581 bp, Homo Sapiens
agaaattagaatactttattataaatattttcagaatataaactgattttgtatcaagactctttgaaactttagaaactttatgtaacctaagatcataatatatttcattttccactttccagcctagaaaatacactgcaagttagatctaataaaggagaaaaaaattgcttcacagagaaaaaccaatgaacataaaatacccaactcaaaactataacaaacccaatcaagaaacagattgtgcaaaggtcattaatcctccaatttaaaataaataacctcccaacagaaaacatttccaccatcaaagcaatttgatgaataaaagcagagtcactttcattaaaggaaattacactatatgttcaaaaaatgtaataatgcttttagaaaatgaggaaaagcaatttctgtgttggggataacatcacgttatcgcccaacacagtaaacacatcccgtacaatatgatcatgtttaattatctagatcagaaacttggaggatcttcaggcccactgccccaggtcattgggctgactgcctcggttggtgttggggataacatcggggat

SEQ ID NO: 6718 - DNA, 692 bp, Homo Sapiens
  misc_feature (503)..(524): n is a, c, g, or t
aatgagcaatgcatgaggggaatgcagtgtcagtacctggcctatttttaaactagtgtaatcaccctagtcataccattcagtatgtttgctttttaaaataagtaaccacaattaagttgttgtagcccttgcacttcaagagatctagtctttactttcagttgtctgttaggtccattctgtttactagacggatgttaataaaaactatgcgagcctgaatgaattctcagccaaatttagtcttgtctctcatcttgattggattaattccaaattctaaaatgattcagtccacaatagctctaggggatgaagaatttgccttactttgcccagttcctaagactgtgagttgtcaaatccctagactgtaagctcttcaaggagcaagaggcgcattttctccgtgtcatgtaatttttctaaggtgtttggcagcactctgtaccctgtggagtactcagtaccttttgtttgatgttgctgacaagacctgnnnnnnnnnnnnnnnnnnnnnncccattaaagtgtagcaaaaccgatgtattattttttctcttttctcataaaccataagatatgtatatcaaaatgataatttatatgaagcatctgctatccttcacataagtatagtttatatgaactacaaatacctttcatcaacattaaagaagcttaaattg

SEQ ID NO: 6719 - DNA, 880 bp, Homo Sapiens
  misc_feature (797)..(808): n is a, c, g, or t
gggggaatggactcatatgcaagattgctgacttcggattggcccgattgatagaagacaatgagtacacagcaagacaaggtgcaaagttccccatcaagtggacggcccccgaggcagccctgtacgggaggttcacaatcaagtctgacgtgtggtcttttggaatcttactcacagagctggtcaccaaaggaagagtgccatacccaggcatgaacaaccgggaggtgctggagcaggtggagcgaggctacaggatgccctgcccgcaggactgccccatctctctgcatgagctcatgatccactgctggaaaaaggaccctgaagaacgccccacttttgagtacttgcagagcttcctggaagactactttaccgcgacagagccccagtaccaacctggtgaaaacctgtaaggcccgggtctgcggagagaggccttgtcccagaggctgccccacccctccccattagctttcaattccgtagccagctgctccccagcagcggaaccgcccaggatcagattgcatgtgactctgaagctgacgaacttccatggccctcattaatgacacttgtccccaaatccgaacctcctctgtgaagcattcgagacagaaccttgttatttctcagactttggaaaatgcattgtatcgatgttatgtaaaaggccaaacctctgttcagtgtaaatagttactccagtgccaacaatcctagtgctttccttttttaaaaatgcaaatcctatgtgattttaactctgtcttcacctgattcaactnnnnnnnnnnnngtattattttccaaaagtggcctctttgtctaaaacaataaaattttttttcatgttttaacaaaaaccaaa

SEQ ID NO: 6720 - DNA, 568 bp, Homo Sapiens
  misc_feature (114)..(114): n is a, c, g, or t
cacctggtgatgatggagaagatctaggggcccatccattcacacatgatccacggtacaagaagccagaaatatttctacaaagggggcctagtttgggatgagaacagcttngacgggcgggtatgtgaaggagaactgcaaacctctgaagagttacatgctccaagactccctggagcacgtgcagctgtttgacctgatgaggaggatgttagaatttgaccctgcccagcgcatcacactggccgaggccctgctgcaccccttctttgctggcctgacccctgaggagcggtccttccacaccagccgcaacccaagcagatgacaggcacaggccaccgcatgaggagatggagggcgggactgggccgcccagccccttgactccagcctcgaccgccaagccccaggccagagccacccaatgaacagtgcaatgtgaaggaaggcaggagcctgcaggggagcagacttggtgcccagctgccagaaagcacagatttgacccaagctatttatatgttataaagttataataaagtgtttcttactgtttgtaaaa

SEQ ID NO: 6721 - DNA, 777 bp, Homo Sapiens
  misc_feature (211)..(219): n is a, c, g, or t
tttggggcctccagttggcaaagttcccaaaaaagccctgttggggcccctgttttgttggccttgaccccctccttcaacaaggcaggcaagccaaggttttttccttgctttaaccaactccattccattagcttctgtctgcccaaaattcctttgaacaccagatttaattcttttggggggctttctttaaatcagaccctttcannnnnnnnntaaagaagcagtgaaaccctttggttagtccagctggagaggtagaccgcaggaccgcgccgtcttcctaacctcgcctcggccttcgctccacagtggagagtgggagcctagctgtgcttgatgctgaatgcctgttttgagagtgtgagtgggatcatctacagtaaatacttgcaaagcatggcactgtggctctggggagctggtacgcctgtgctgtaaccatggtactcagtccttccaaagtgtttattaatcaagcacctgtcatgtgccattgagcccacgatggggaatgaggacagtccctgcccccatgaagcttgtgtcctgttgggaggacagacaggtggcccagcagttgcagcatggtgtgtgcacacgtttggctggtggaaccatgtttctaccactcatggtcaaaaaaagcccaccaaagtcctgggagttcacatctgtgtgatgatacggcaacattgtttgtaatggaaagactggacacccccagtgcccatcagtgggggagtcattaaataaactatggtatgtgcacat

SEQ ID NO: 6722 - DNA, 468 bp, Homo Sapiens
tcacatgcagaaatgctctcttcacaggcagagaagcctgtggctaaagcttccacatcccattaactcagtgcttttgtctttttcatgacatggcacatagagaaaatatttttttctagcacacaagagcaacctgaaaggctgctcctggccagaggactctgtcccgggggaccgtgtcctcccccatgtcctgcctaggccctcagaggaccaggggatcatgtctccaggtaacccgactgtagcccctgctggctgagctccagcctgtgcccactgataatagcagggacggccttttctcttagagcagctgataagtttccctacctgatggccccctctgacataaactgcacacctggggtgatggcttaaagccagaaagagctgagggagttaagagggccaaccttagggcacgtgggcattattaaaggtcttaaaagcattgaagattta

SEQ ID NO: 6723 - DNA, 504 bp, Homo Sapiens
tattgggcgccagcaggctccagccccacctggagggactgccaccaggggcaccagcagagggaagccgtcccaggactgccggatggaccctgctccaaactcagcctgctctccttgtgacagcagagcctttgcaattcctgagggtcatcatggggcaggagacagacagtcctgtaggatctgtggttgtctccttttgacaatctcactgttcttcgtgcctgccctccaaattcagtagcatgtctcaaagccttacatctctcggcacccagagttcagtgcatttccaacctgtgcacctggcctgtgcaaccacccagcctcttctgggggactcactctccctggctgaggctctgtctcttttgtgtctccaaagctgctgtctcccgacctggggcaggaggggctgaggatacctctcttgggtaatagtccctctcggctgaagcagctcctgctggactgttcccataaggctctgcagccttggag

SEQ ID NO: 6724 - DNA, 700 bp, Homo Sapiens
gcagcagtgtcggcccaaacacaatgcccaggttgttggcagacatcttgttttccataaatcgtgcagccaccctgaacagatgggccaccaggtgccgcagggtgttgtagttagagtcaggcagctgtaccaagagggtcttcagcgagcggataacctcagggctggggctgggggtcccagggtcgtccccagggtctgcatgcaaggtcttagccagagagatgaaggcgtcgtagaggtggaaggggatcacgggctcggtgagctcctgaagaaatcgcttgaggacactcgagacgtcatgaggcgagttccccgacagctccaccaacgctcggccattctcgaaagcctggcacagccgctccacacggacccgggacccgctgacccggtaaatgccctgcacatccagggcacggtgttctatctcagccgtgcacttcgtgaccacaaagggtacctcctccgggaagtccctgtgtagctgcaggaagtcaaccccaaaaaggggtgtccgggctgggagccagctgtgtccacagaggatcaagagagtctgcaggcagcgcttgtggcatgtcataaagcactccttacactgcgtacccgctgccatgaaaggcttccactctcggaacttgggttgggctctgagacgtcgctgcttgtgtgtctgatctctgcttgactt

SEQ ID NO: 6725 - DNA, 432 bp, Homo Sapiens
ctccaagctgagacactgaacattacaagtaacagcaattcaatgagctgacacaggaggtgtggcacttggagaacctggatcatgaagcagagcaagaccaggagagggccttctgaggtcttcctcctgcttaggggctcccatagggagtgcggctgcttccttccctctacagggtgaagaatcattcatccctgagcctctctggccagagcaatgtcttcaacagaaattagaagctttgtaacacaggaaatttccacattcaccttatatatgaaagtacctagcaaagtgcctgacacatattagtaactcaataaatgccagcttcctttcttccttcccaactctattttttattttctacatatccagagcataaatatcagggggaacaccaggaaagtgaactggggatgaggagcg

SEQ ID NO: 6726 - DNA, 552 bp, Homo Sapiens
  misc_feature (52)..(144): n is a, c, g, or t
  misc_feature (171)..(246): n is a, c, g, or t
ttgaacccaagattttgccctgcgtgagctttgaatgcaccgcggcactaannnnnnnnnnnnnnnnnnnnnnnnnnnnnnnnnnnnnnnnnnnnnnnnnnnnnnnnnnnnnnnnnnnnnnnnnnnnnnnnnnnnnnnnnnnnngacactacgtagagggttgcctgagannnnnnnnnnnnnnnnnnnnnnnnnnnnnnnnnnnnnnnnnnnnnnnnnnnnnnnnnnnnnnnnnnnnnnnnnnnncaaaaaaaataagttctggttgtcattgaattgggataaacagagagcttgatgctttctgccttctgtctcaggtgatgcattgcacatttgggatatttggaaaggaaatgaggaaagaaattagggcctcctctgatctctcgctatctgcgggtcctgtccttttctcaagaccttcaccattactggtgttttcctgtcttctctttagtatgatccctcaaaacctcactaactggaaggatgattttgtctcagtttgtactcctaaataaaaagtaaacatgacacctctaaaaaaaa

SEQ ID NO: 6727 - DNA, 188 bp, Homo Sapiens
tgtaaagtgctggctccccctttgccttctgccaagaagcaggttctgccatgcttcctgtacagcctgcagaaccatgggccaattaaccctctttctttataaactacccagtcttggatatttctttatagcagtgtgagaatggactaatgcatatgtaaagaagggtggttgccatgacgtgc

SEQ ID NO: 6728 - DNA, 738 bp, Homo Sapiens
gcacacatggacttgtagggccactggcaacatactcctcttggcccttcccatatctactcttctgtgattgggagactgcaaggcactgaggagtatcaaagaagcaaatattttcactttgaaagaaaactgccattttgtatttaatagcctccaggttctttcagtaatgttatttgctctgtgtgtttttgtgtgtttgttgatgtgcgtttgtgcatatgcgtgagtttcattgccggggttggggcacaattgtggactggggccatgaggccttccctggtccccactgaacccaccttagttccacatttggctgcatcttgaattatgccgactccagacttctcctccttttttgcccttggctcttgacactctaaacccctggaccatctgaatggagcagccaagttcagtcccacatttctgtactgttcctctttcacagctggaatatgtcacatgatgaagttgtatagaaacagaaccatggatggatggccaggattgccgtggtccctagctagatccccttcctatcaatcacctgatagcaacagggacagctgccaataccctgctctttactcaatggtacccagggagggagcatgggaagagggtgagctgagggctggaggagggcaacagccactgggtgagctgttcacggtcttatactattgtttgtgattaaaagtgcttcaacccacctctactgtctcaacc

SEQ ID NO: 6729 - DNA, 663 bp, Homo Sapiens
gctacggagtcagagtatacatacagctcccaagaccctagacctgccactggtcgtatccggagacgggagcagcgggaccccaaggctgcatgatgatgtgctggagctggagatggacgagctcaatcggcatgagtgcatggcgcccctgacggccctggtcaagcacatgcacagaagcctgggcccgcctcaaggagaagaggattcagtgccaagagatcttccttcttggatgaaattcctccatggcaaactgggaaatccaatagtaccattaaatatccgtctcttcttagccaagcttgttattaatacagaagaggtctttcgcccttacgcgaagcactggcttagccccttgctgcagctggctgcttctgaaaacaatggaggagaaggaattcactacatggtggttgagatagtggccactattctttcatggacaggcttggccactccaacaggggtccctaaagatgaagtgttagcaaatcgattgcttaatttcctaatgaaacatgtctttcatccaaaaagagctgtgtttagacacaaccttgaaattataaagacctgtcgagtgctgaaggattgttatccatccctatagttatatttgaaagtttcggtaagatctatctaagaaatccgagg

SEQ ID NO: 6730 - DNA, 143 bp, Homo Sapiens
gttgttgttaacattcattgcaaaagtactagatggtgtataactctagagttgaattttaagggattccctaatatgtatactatctttttatctgaagtaataaataaacaatgatcttgaaagtgcctgaatcagaaaaa

SEQ ID NO: 6731 - DNA, 570 bp, Homo Sapiens
tctttctcgatccctgtcccttctatcccctttcctatcacgacttcgactgcgacttctatgcctttccctacttctgctgcgcctgcgttctaacccccggtcaatacttcgggatcttcgccgttctttctccctttctttggcttcacgctctagtcgctggcgttctttctctctttctaattctctgtcaaaactagaagacccatggccctcccgatgatgacttctacttcttgaccttcttggggacctccgtggactcagagatctccttggagaccttgaacgtctgcgttcaacatgtctgtctatttcctcagcaccttccttcccatctttcttgatttttctaggtcgggttttaatctgttgatcaatattcttttgaactggaactggaattcttggaaacaaggtagaaaaccactccagttttgtgagaaaagatcgtagcatttctccaatggtcattacacagcctccaccagccttcacatctaggtccgacagaaacacaaaagataccctagccgtcaaaaaaagtatttccatagcgtaaagctt

SEQ ID NO: 6732 - DNA, 715 bp, Homo Sapiens
gcggccgccgccccagtcacaggccagcagtcagtgcggcgggaagatgtccgcgcactgctgcaggatgagctccaccacctggttctggaacaccatggtcatgggcatgctggtctcttccacctcgggccgcagcagcgtgggcccgaacacaatggccacgctctgcaccgacatgcggttctgctcgccgtgctcgatcacccggcagaggtgctggaagagcatccgcagagtgtcgtggttgggagcgggcagcgagcgcaccaagtcacgcacacagcggctgcgccgggcctggtcctgcaacttgatggccgcaatgaactggcggaagtgcgagaaggggaagaggggctcgggcagctcccgaaagaagagcttcagggctccggtgataacgtggacgtcctcccagcgcccgtcatccaggtcaaggcgctcatcgtggtccaccttatagcgtagcttctggatggtggccaggtttccactgatgcggtacagcccgtcgatgtccagcccgcgggcctcgacggcgcggatgcactgctgcacgaagcgtggcacccggctcctctcgcgctcacacagcgcggccagcgcgcagccgaacacctttgatgtagcccttctcccgcagcgactgcagtgtgggcccgctctggaggaacttgcggagcttgtgccggaccttgctcaagtcggctct

SEQ ID NO: 6733 - DNA, 584 bp, Homo Sapiens
  misc_feature (483)..(536): n is a, c, g, or t
  misc_feature (538)..(538): n is a, c, g, or t
ctttgctgctgcgcccgggcaggtgctgccgcgtgcccaggtccctgcttcgagacgcggcgcggtccaggcgggaggcgactccctaggaagggacccggggcgggaggaggaagtgaggccgcgcggaaggaaggcggcgagccccggggccccgaggccttggccgcgtcacagcacccacatggcctctggagtgggcgcggccttcgaggaactgcctcacgacggcacgtgtgacgagtgcgagcccgacgaggctccgggggccgaggaagtgtgccgagaatgcggcttctgctactgccgccgccatgccgaggcgcacaggcagaagttcctcagtcaccatctggccgaatacgtccacggctcccaggcctggaccccgccagctgacggagagggggcggggaaggaagaagcggaggtcaaggtggacgcaggagagggcagatagaaagcgaggcaggggaagagagnnnnnnnnnnnnnnnnnnnnnnnnnnnnnnnnnnnnnnnnnnnnnnnnnnnnnntnaggatgagagcgatgaggagagtgaagaagacagcgaggaagaaat

SEQ ID NO: 6734 - DNA, 834 bp, Homo Sapiens
gaggctggagaggctcagaatcatggtggaaggcaagaaggagcaaaaaggtatgtcttccatggcagcaggcaagagagcacgtgcagggaaggcggcctttataaaaccatcagattgagtgagatgtattcactatcacgagaacagtatgggaaaaacctgcccccatgattcgattacctcctaccgggtccctcccacgacacatggggcattatgggaaatacaattcaagaggaaatttgggtggggacgcagccaaaccatatcgggtagcaacaacctagggtcagttttgcaggtggtaaagccatttaccaagatagttgtaggtaaagaagggcagatttattagagaaattgtgaaaatatgttgcagtgggcagctcagcagagaaggggctacctgcaaagaggcaagggctggaggaaagttttatagggtcctgctgaagggtgctacgtgtggaatgaggtcattgtgcccgcaggtagttggtgattagctgtctcctaacaattgttcatacaataattgttcattattgttctcaaccttggggctctccccaaccctggggacccttccttattgttgcttacttatccaggtctccacataaaaggtgtggaaacttcatccattcatatcttcaacacaaattgtaggtagcctgttttttaaaacatttattcaacaaatatttagtccaagccactataacttattaccttctctactatggtatgaacttttaactatctctgacactattcactattcttccacattctctattatgtatacctatggtaaaatttggcagtttg

SEQ ID NO: 6735 - DNA, 900 bp, Homo Sapiens
agtcttacacttgggtgaccgtttctcaatgggcgctcgcttgaagggtacagggaaaggatcaggatgcctgaccacaagacacatttgtcactagaaaagacttcctcgtgctggccacagtgggaattctgcacacaggtgcctgctccaccaagcagagaggctcaggagattgtccagggacaaggagacctggccggacctctgcagggaggtgaggcccctgtccccatcttgtcccatcacattctggatgtttggcatccccaggctcctgggaggggagaagtgctgataaaaaggccaaaaatcacacagaaagaagacagaaaactccacgcacttcctacataggtgctaccgtattcctacgagcacggggcctgtgttgaagactccctctggaagttacagaaggaagccaccaagagttcagcctcacagcctctttctcagatgcagtcaccactttaccaaacttggcacatccaaccactcctttcataattttacacctgtttgtggcctggctgacagatattgtgtcattgatctttctaatttcagggattctaaatgtgttttgagaatctgctcagcactcagggactctgtctttaaaaatatgattaaaccaccagatagtgtgatttcagaaagtgtgcgtggctaccaaaaacttctaaacacaagttatatgagtgactcctgtcttctgtggctgagcttgggtactgattgtctttctccatgccttgcatcccctgttagaggagggcctgctgtccatggctgtccatgcactttaaaatgtctcaggtttagctgaagaccagatgggtccaagtttatttatatctgctggcataagaatgatggctaaattacctctttaag

SEQ ID NO: 6736 - DNA, 528 bp, Homo Sapiens
ccaacagaaacagatagaaaaatacttgactagctgttattgaaaggctgaaattcagctgacataagcagtattaatattgagctagaaaataattcgcattgaattcagcccaacttttgttttctgatttgggtctcttctaaaaatcctgtctttttctgaagttgctaggcctctcagccatggttgccaaaatctggacaccatgcatgtgtgtgtatgtgcgtacacacccacgcctgtgtacatgtggtttcataaaacatccttaagcatgagctagacattaaacagtcttggagattctagttcagaatttacctcaaacgtgtgaattatggaaattcatggttcatcacagatggttgggatgttgccaagatacatcctttagcacgcctctgtttgctttatgtgaacattaataactctgttccaggagaaatacaattgaaaagcagcctgtacatgaaacaaagttattgcaaatactcactttttgtgtgttccttctctcccgtgtcc

SEQ ID NO: 6737 - DNA, 467 bp, Homo Sapiens
ccccccgagcatccaaacggaagagatgcatacggcaaggtggggaggggctgcagagtttccatcaagtctctgggcatgctacccacccagtatgtcgagttgttcaccaatccagaagcacatcaaattaggagtttttatagagttcaatctctggccctgcaaccccaaggttggcaagtgggctgacaagttttaaccctcaaatcaagtgattggcctttctgactaaaccaactatgaggctatctaggggccccaccaaaatcacctcacagtagaacaaactcaggtgtggtccaaagtggatcactaggaacgacaaagacactcctagcactctgcaaactccgagtgtttttggagagctctgtgccaagaactgggacaaagaccaaatatttacttactctattacaatgctaaaacaccaaataaagtaacaacttggtatgacatacgcg

SEQ ID NO: 6738 - DNA, 268 bp, Homo Sapiens
cgatctgctgggcaagatgaacagggaccaacggaacatttggataagctgttgagaagaagggagaattcagagaaaaagaactgtcagtgaggtcataataggaactgttacagtgaactaaatatggcctgggaaggactctgtacttctagatttgagtccctgtggacaaactgcaacctaacttaataggtagtaagactgaaaacctaacttaggagtatgtgcctaaaacagtagctgagtcctgtccaatcccacgtta

SEQ ID NO: 6739 - DNA, 301 bp, Homo Sapiens
tgcacacgccgagtctccaaactgagaggttcgggtttggagcgttcattccacactgagaggttcgggtttggagcgggaggaggggagtgaggcataagtgagaaaggaggtcacatggcccaaacaggtacttccaggaggccaatcccagccggtagggatccaggccccgggaggccaggcctgcttgccgagtaccgacggccaggtgaggactgcaccttaacctgggcactgggagcctgtgcccccctgtatgttggtgatgacactagtttgtcattcggcggtaccggag

SEQ ID NO: 6740 - DNA, 305 bp, Homo Sapiens
aattctccagaagtaatctgaagcagaaattagaaggatgagttaatatatgtggggatgggatatggaggtacaaggtgataatgttacaggaagaagtggacagtacattggaaggtatgaagaaaagtagaacctgcagagttgaaactaggaacttaaagattgaagggttgagtggcagggtatgaagttagagagataaaaagaaagggaccagatgaagagtgcctaccatgttgagagtgaccatgtgacttatcttttaaaaatgtttacttattttagttttgggacggggtctc

SEQ ID NO: 6741 - DNA, 164 bp, Homo Sapiens
tgcacacgccgagtgaccagacccggccaacatcatcacttttgaatgaaatttttagtttggtgatgactttattatttgtatttgatccttgtccatttttccctagatctggtactaatttcatgtggaaaataaatcgtttggagactcggcggtgacag

SEQ ID NO: 6742 - DNA, 640 bp, Homo Sapiens
  misc_feature (108)..(155): n is a, c, g, or t
  misc_feature (167)..(175): n is a, c, g, or t
  misc_feature (308)..(308): n is a, c, g, or t
  misc_feature (432)..(481): n is a, c, g, or t
tagaaaccagttttccatacggttggcacagcttgattaggtcctggtcaatggtgcctggtgggaggcctcggatgtaccggttggttttactcaactggtcccccnnnnnnnnnnnnnnnnnnnnnnnnnnnnnnnnnnnnnnnnnnnnnnnnggaggagccctnnnnnnnnnagctggtgcactaggacttggtttggagattatgaggatagtagtaagtgtactgggggtacacattgtggctgatcacggcgtttgcccacagtagctggaatctttatctccgaggcacgggactgatganacgggtatagtgccccacggccgagcttcctcttaaaccactactcctgacacgtccccgtgactgatgaggcttcagagactccaccacactcgctagttcccacacagcaagaatttttttnnnnnnnnnnnnnnnnnnnnnnnnnnnnnnnnnnnnnnnnnnnnnnnnnnggcgaggagtgagatctgtagaaaaaacacccacacacagccttcccagatcttgcctggcttcccccagctgccggggtccacttgggatgaggcagtttgttctctaaccaggctgtctgtagtgatgtcacattgccagcgcttcgtataaggggg

SEQ ID NO: 6743 - DNA, 515 bp, Homo Sapiens
cgcacacgcgagcacaaacccacacacagccctcatttcctctaaacactctgactcaaatgaactgtccctatttggcaaaactctctaacctggaggctgtcttctgtcacctgacattctgtccccaaagtcagccaaactttattatacatctttagcaattgatcagaagaatgccctgccagctgtttccctctctctgagggcaactcccctggccctccctccttcggcctggtgcaaattcgggccgggaaacccgctgtgccttgtggcaaataaagtgaggaaggcaggaacctttagacttcccagtgtgagccaacggcagggctaggactaggttgagcctgtttggtgcaagatttaaggaggcgttcattcacagtccggaccctgacttacaggaccctggagagcgagtgcctccttaatgtgcactccaggtcctcaccgtccttttcctagtcctggtatccgggttctaagcacccagatgtacagatgggatc

SEQ ID NO: 6744 - DNA, 771 bp, Homo Sapiens
catctatgacaaggactcagtgcttcggaaagccctgcatgacagcctgcatgactgttcacattggtcatacacacgcctggaaagattgggaatcatggtattctcagagctatggtttacacttttccttgagagaagaacaatggcaagaagactgggcatttatactctctcatgctagtcagcctcgcgagcaagcttggagcagacgcacatatttgtatctggcaaatattcttagacgaccaattatagtttatggagtaaaatattacaagagtttccgggcgagaaactctaggatatactcggtttcaaggtgtttatctgcctttgttgtgggaacagagtttttgttggaaaagtccgattgctctgggttatacgaggggccacttctctgctttggttgccatggaaaatgatggctatggcaaccgaggtgctggtgctaatctcaataccgatgatgatgtcaccatcacatttttgcctctggttgacagtgaaaggaagctactccatgtgcacttcctttctgctcaggagctaggtaatgaggaacagcaagaaaaactgctcagggagtggctggactgctgtgtgacggaggggggagttctggttgccatgcagaagagttctcggcggcgaaatcaccccctggtcactcagatggtagaaaaatggcttgaccgctaccgacagatccggccgtgtacatccctgtctgatggagaggaagatgaggatgatgaagatgaaaaa

SEQ ID NO: 6745 - DNA, 226 bp, Homo Sapiens
tcagctggtaccatttcagatctatctctgccttcaagataatggtgatattccttagtatggtccttcggcgtgtgcatgcacacgccgaggcaccaaacggtgacacatatcgcgatggacgaagttgttgcaggtcttgatggcgaagttgttgcaagtcccagtggacgaagttgttgcgcaacaacttcgtccatcgtgatttgcggcgtatggatgttcg

SEQ ID NO: 6746 - DNA, 197 bp, Homo Sapiens
gcgagcaacaaacaagcatcacgtcaaaccacttggagagcggttttaaatgcatattcttgggtaccgggtttactgaattagaatctttggagccagaaacatattttatagcctcccacccagatggtccttttctaacccagggtttggagaacaggtaaagcggctcaaaagaattgtctggagtctcggcg

SEQ ID NO: 6747 - DNA, 270 bp, Homo Sapiens
  misc_feature (140)..(228): n is a, c, g, or t
gcacacgccgaattgacagaccgccacaggtcccacatggacgaagtgtagcggcacacgccgagacaccatacccggctaagtgttgtatttttatgtagagacaaggtttcaccgtgttagccaggatggtcttgatnnnnnnnnnnnnnnnnnnnnnnnnnnnnnnnnnnnnnnnnnnnnnnnnnnnnnnnnnnnnnnnnnnnnnnnnnnnnnnnnnnnnnnnnnctgatgcctcttgtctggactctcggcgtgtgcaggggatcc

SEQ ID NO: 6748 - DNA, 446 bp, Homo Sapiens
tgaggacaggaatgtctatagcaagtttactcctattgcgaatcatgtatgctggctttagttgtaacaaacgattttattctaagtaaggccaggtgctactataaaatcatatattcctgttgaagttcttttgaagtcctatctctatttattatatttgaaagttgtcagccaccagtcatccagaatttccttcctgaatctccatgctcatatgcaatgtctacatcaaggtcttcttaatgactattattctcagggtttagttttctaccttctgcctactattttggtctgacatttttgtagccttctgttattattggaaatagtctcttacataagctgatttcgagaactttcaaaatctcacatagctaatggaagttgctttctgctttcttatgactgtttttataaataaactgtttcataaataatgt

SEQ ID NO: 6749 - DNA, 994 bp, Homo Sapiens
agccacggtcctctttggccgatgctgtattctcattttggcccttgttcttaggcccgtctgcccgccttcctccatctaacctttcctgttttatccgcagcccttttcttctttgagttagtaaagatttattctgtaacctgacactcatctggccctttgcagtttgccagccatattcccatgtgatttcccactggatccaggcccccatccggctggcaggagggggctctgacgtacaggttggaaatcagaagtctgtgagagcgcgggagtgaatggcagctctgggtcccagacctgggcccgacccctctgcttcacctccagctctgctgctcctctactcttgggtcgagatccctttggagccacagcgaggaaccctgtggtcctcaggcaggtgtaccttgagtcagccaggagccctcgtttcctgtgccaaagcctgccctcgggctctgctcacctctggtgaccctccaagatgcccctgccctcagtttcccctcatgatctggcctctgcccccttgcttctagccacagcctctagtacactttagcaataccaccagactagttagagttccccactcaccaagcaagacatgcagtttcatgcctctgtgccttcgctcatgctgtttcttccgactggaatgccttcccctgctcctcctgccttgtctgcctggcaagttcatctctcacgatcccctcaaaggccccctcctccaggaaggcaacccctgtgcccctcccctccaggctacctctgcactttgtcaatgcttctcttgtggcacttatcacactgtattttacttgtttacatgtttgtctccccttctagactgtgaatccttaagggcatggactgtatcttatgcatctctgtatttctgcgcctagcacggtgcctagcacacagtaggcgctcaataaatgttgaatgaatgaatgatttaatcaagacttgatcaccc

SEQ ID NO: 6750 - DNA, 617 bp, Homo Sapiens
ggaaaggacgattctgcctggctcttctttgacagcatggccgatcgggatggtggtcagaatggcttcaacattcctcaagtcacccccatgcccagaagtaggagagtacttgaagatgtctctggaagacctgcattccttggactccaggagaatccaaggctgtgcacgaagactgctttgtgatgcatatatgtgcatgtaccagagtccaacaatgagtttgtacaaataactggggtcatcgggaaaggcaaagaaactgaaggcagagtcctaacgttgcatcttattcgagctggcagttctgttcacgtccattgccggcaatggatgtctttgtggtgatgatccttcagaaaaggatgcctctgtttaaaaacaaattgcttttgtgtccctgaagtatttaataagaagcattttgcactctagaaagtatgtttgtgttggttttttaagaagtctaaatgaagttattaatacctgaagctttaagttaagtgcattgatcatatgatatttttggaagcatacaattttaattgtggaagtttaaagcctcttttagtccattgagaatgtaaataaatgtgtcttctttatggaccaag

SEQ ID NO: 6751 - DNA, 614 bp, Homo Sapiens
cgtatccgtgtccggggttgagcgtttagtgagcctgctggctgcagagcactattaaatcatggtacgtagtccccggcacctgtcgttattcctatatcctcctgcaactgtggtttgaaactgcgcattctctagtagtatatatcgtgcctgtcttcaaaaacatttccctttttatactcattccccccaggcatggggtagtgtcagtcggactgcacagggaacacggtttccagtggctttggcccctactcgggaaacgtctgcctgttctcgatggtgatggggtggctgccattcccttggttttcctaagccctttctaacgagagtctcaaacaagcggaggcgagggccaattcaaccccattctttccagcgccccgcaccatagcacctgcccacctgagaaccaggaacgcaccctctctgtggagctctgactggtgtagctggaaacaaacagcaacttgcaaacggacgaagagcctgccgtgtgttaatcatttgccttacaagatgtaccagacggtttccagtactaacaaagggaataaaaatacctcacgccacaatccagcatattgatgttttaaggcaaaacaaaa

SEQ ID NO: 6752 - DNA, 558 bp, Homo Sapiens
  misc_feature (396)..(423): n is a, c, g, or t
acttggagaatattttgcttggcatatgtttggtctgaatggtgtagttgctggttccctagagaggaaaaggtggcaggcccagctttgctgggaaatggctcttaatttccagttgaaaccctagtagaattgtgaatgaaaacctcaaggttgagccccttctgccaagcagcagagctagtagaaggggatgcaggggcaaagcactcagttgccaagcaaggaggagagatgtacgtgggctgtgtggcagtccccacaccctgccctggcttcttcaggttatcgcaccactatggaatcctttgcagaatggtactcatataatggtttaaaacaacacattcataattgactctgtgcaggatgtcactcaatcagtttgggtttgcnnnnnnnnnnnnnnnnnnnnnnnnnnnnggtatcctgtacattgcagtgggtgtgaagatagtattttaatatttgtacaaagtttaatttaattttaattgttctatgtatataactgcatttctaaataattaaaaaaaagttcttatgaaggcaaaaaaa

SEQ ID NO: 6753 - DNA, 808 bp, Homo Sapiens
  misc_feature (22)..(22): n is a, c, g, or t
  misc_feature (36)..(36): n is a, c, g, or t
gagtgtccccaaatgatggccnctgagaacccaaanctgggactcccattattacagtctttgattggtctttttgagttacccgaagatgataccaatcctgatgaggaacattttattgacatagaagatacaccaggatatcagactgccttctcacagttggcatttgctgggaaaaaagagcatgatcctgtaggtcaaatggtgaataaccccaaaattcacctggcacagtcacttcacaagttgtctaccgcctgtccaggaagggttccatcaatggtgagcaccagcctgaatgcagaagcgctccagtatctccaagggtaccttcaggcagccagtgtgacactgctttaaactgcatttttctaatgggctaaacccagatggtttcctaggaaatcacaggcttctgagcacagctgcattaaaacaaaggaagttctccttttgaacttgtcacgaattccatcttgtaaaggatattaaatgttgctttaacctgaaccttgagcaaattagttggtttgtgtgatcatacagttatgtgggtggcttctagtttgcaacttcaagggacaagtattaatagttcagtgtatggcgttggtttgtgttgagcgtttgcacggtttggataatcttaaattttgacggacactgtggagactttctgttactaaatccttttgttttgaagctgttgctatttgtatttctcttgtcctttatattttttgtctgtttatttacgcttttattggaaatgtgaataagtaaagaattacttgtgttacttgca

SEQ ID NO: 6754 - DNA, 690 bp, Homo Sapiens
tctggggctatcgagggaaaattgggttacgagctggattacccaagggccttccacaccttaggttttccctccaaccgtgagggaaactcgatgcagcccatttctgatagtgaaaagaacaaaacatatttctttgtagaggacaaatactggagatttgatgagaagagaaattccatggagccagctttccccaggcaaaatagctgaagacttttccagggattgactcaaagattgatgctgtttttgaagaatttgggttctttaatttctttactggatcttcacagttggagtttgacccaaatgcaaagaaagtgacacacactttgaagagtaacagctggcttaattgttgaaagagatatgtagaaggcacaatatgggcactttaaatgaagctaataattcttcacctaagtctctgtgaattgaaatgttcgttttctcctgcctgtgctgtgactcgagtcacactcaagggaacttgagcgtgaatctgtatcttgccggtcatttttatgttattacagggcattcaaatgggctgctgcttagcttgcaccttgtcacatagagtgatctttcccaagagaaggggaagcactcgtgtgcaacagacaagtgactgtatctgtgtagactatttgcttatttaataaagacgatttgtcagttatttta

SEQ ID NO: 6755 - DNA, 500 bp, Homo Sapiens
ggacggggcacacacaggcccagcctctgtgctgtctcctcctctgtgcgcctcagactcggggtgagggaggcgggcagcctctcgccagccttcccgtccttcagttcaacgacatctttggagtgtttttgttttctcttccaagggccgtcccgttgtgttaggaagggtgagtggctggttccagggtgggccggtgccagctccggggtggactgaacagcggcggctgtccctgtgcatcctttgattactctcatgctgcatttactgtttacatttgttttattgtacataggtttgtaaacattattgcctgagatatttgtatataacttgggctttgtagcttttatttattcagaacgcatacggcatgttaatgactctgatggtgtcctcctctgggcagctgtataggatcatcatgtggttacaaaaaatacttccctcaaaaaaattcttttaatgtggaaacaataaatttcacagaaaaa

SEQ ID NO: 6756 - DNA, 351 bp, Homo Sapiens
ttttgtgtttgaatgcaaaaaccacgcatttattaaacatatgattaacttaaaaacaacacaccagtttgttttaaagggctccttatccaaaaccttaaacaaaactatcagcccaaaatgaattcaaaaaaacagattacaaggcaaacaatgacaataggtatggacaggcactaccaaaaaatgctatttgttctttaattaaataatgccattctcaagggatatagagcagtcatcttgacagaaattcctttttgtataaatattcataaataaaaatgtctctagatattggaaagagctgcaaacaatactttacaacagcagcttaatatctattttagg

SEQ ID NO: 6757 - DNA, 459 bp, Homo Sapiens
accatataataacattttttaactactaaaggagtagtttttattttaaagtcttagcaatttctattacaacttttcttagacttaacacttatgataaatgactaacatagtaacagaatctttatgaaatatgaccttttctgaaaatacatacttttacatttctactttattgagacctattagatgtaagtgctagtagaatataagataaaagaggctgagaattacccatacaagggtattacaacctgtaaaacaatttatctttgtttcattgttctgtcaataattgttaccaaagagataaaaataaaagcagaatgtatatcatcccatctgaaaaacactaattattgacatgtgcatctgtgcaataaacttaaaatgattattaaataatcaaatatatctacattgtttatattattgaataaagtatattttccaaaaaaa

SEQ ID NO: 6758 - DNA, 549 bp, Homo Sapiens
gctggaccataactcaataccatagccatgttgatcctgatatttatccctctagtgtcttacctcacataagccatttgcccactgtgcaatatagaaaggtgttttcaaaagtatttggccgtagattttcacatccatcataaggttggcattcaataaggaaaaagttctaactccagtattaaattgtacataaatcccaaatgttcttaaagaacactcagggacatgtttgttgcctgggattggtaatgaaaggttggtttttgaaacttgaaatttcaccattggtttttttcctatcatttctgcatatccagcaaaaggaatctcatgttgactcctggcagagttcagtggcttcagtctgtctatctgttctgaggggaaaattgtgttctggatccagtaatcaatttggcaactttaatcgaggttttcaaaattccaaggagggttaataaagaatgataatcagttttatttgctaatagctaagacaaatttgtaataaagtgttttataatacttcaaaagcaaaaaaaa

SEQ ID NO: 6759 - DNA, 1016 bp, Homo Sapiens
aaggtaagcaattattttatttccttggcctgatggcattgacttcattatacaagaacttgcagctgacagaactgacacacacatttcccccaagagaaagaacccttttcattagcagagatgaattgaaatgtcatgtctgagtgcaattcctgctccccactcccaccccacaaaatcccaaaagtgaaaataaatcaataaaatccccatgatttactaaaagtcatccctccaaacctttctaactagcagctgcagtggatgataaccaaggagggaagcagctggccatcatgtagcattcctgtgcatgtgagcctgaagggacagcagcatgggagcaagaatcctgaatgagagtagtatataattaccttacttcatacttgccccctccctacataagacacctctttcctgatacatggaaaatactagaggagatgctaagagtggttttagtctacaattggaaagtgcctgagaacttagttaaagttccaaggaaggggtgagataaggggcaccaaaagagaaagagcaggttagacacgggatgctcaacactcttgtcaattccagtctctaatgctatttaataacgaaaaccatcttcttaatcacaaccaccttcatgcctaacacacctattttccaacaggtaagagatccctgtctaaatttctgggttgttagtctactgccaccccatggggtggtactgtgatgtctgagtgaaatagcaaccgggatgggagaaaagaagtgtgagacagggaagatcaggggccacagagtgcatcaattacagtaggtctctatagggtcccaggaatagtccaataagcaacaagtccctttccctgaccgacttggtacaaaatgcacaaaatggaatctatgcgcgaagagaacggagaccagggcagtgcagctgaatgcccacattttgagcccaaacttgacaacgtctgaagcaactatgaactggcaaattaaaacccaggaac

SEQ ID NO: 6760 - DNA, 1046 bp, Homo Sapiens
gctccaaatgctacgacctgaagaatggctgcagattgagatatcaaaaatctcagaaaaatatataatatatttgtatatctctgtatgtctattatttaaatttcacattcctttaaaagtggttattcagtcagtagctgctgaaggaggctcttctgctgggcctggggggtctgtggtcctgacgtgggcttttgagttcccagtggaccaggctggttcaggtaagggtccccgcctaccagattcactgtacactggacgtcagcaaacacctagaacctgttgcacctgctgggttccatctgctatctgtaaagagaaggtcagtggataagagctggttgcagtagaggcctgtgtgtctcagtgcgggatcatatatctgctcagggcacacagtgtgcattcctggcatctgcaaagagctcatctgcatctgggccatcattgggttcaagttctgaacattcgtatttccacctgccatggaaacggtgatgctcatgttgttgtatactcctggctgtgcaggcgtgggctggttctggacagcttgactgaacacattgttgtttcctatcgctccttgctgccaggccttcatgtctggtgactgatacccggaggcaggtggagtttgctggagcagagaactctgaggaggagggattggcatcggcaccatggagctcccagggcttagagatggagcaaagttggcctcaccttgcggaaccattcctgctcctggatactggaagacattctgctgcatctgaggattgattccagtgccaaactgtcctcctatgtttcctgtcatgcctctgctcaccatgctgttgcggttggccaaggatgcttcaggatttgctgctagttgtgaaaacgggctggtagaagcaggtggggttcctggatttgtaccatagtttggtggataggggaattgctgtggagcaccctgaggaagacgggggtcccccatttgaactggtagtccagatgagggagggaggttgtccccaaagctttgctgc

SEQ ID NO: 6761 - DNA, 838 bp, Homo Sapiens
aaaagttggatgcgctacagatcctaaagtaaataccatttcaaggtttttttggtcaaatatactgcagattaatgaagataattctcctttgtaaaattagctatgtggacacatacccttgtagggctgcgtctatctagatagtacttgaatgttgtatgttttcactgtcactgagtcaaaccgggatgaaaaaaacctttaaatgttcgtctataccctaagtaaaatgaggacgaaagacaaatattttgaaagcctagtccatcagaatgtttgtttgattctagaagctgtttaatatcacttatctacttcattgcctaagttcatttcaaagaatttgtatttagaaaaggtttatattattagtgaaaacaaaactaaagggaagttcaagttctcatgtaatgccacatatatacctgaggtgtagagatgttattaagaagttttgatgttagaataattgcttttggaaaataccaaatgaacgtacagtacaacatttcaaggaaatgaatatattgttagaccaggtaagcaagtttatttttgttaaagagcacttggtggaggtagtaggggcagggaaaggtcagcataggagagaaagttcatgaatctggtaaaacagtctcttgttcttaagaggagatgcagaaaaatgtgtacaatgttattataaacagacaaatcacgtcttaccacatccatgtagctactggtgttagagtcattaaaatacctttttttgcatcttttttcaaagtttaatgtgaacttttagaaaagtgattaatgttgccctaatactttatatgtttttaatgga

SEQ ID NO: 6762 - DNA, 519 bp, Homo Sapiens
ctgcttgggcacacgttaaaggaatgtgaaatttattatgcagatatgccagcagaagaaagagaaaagaaattggcttcctgctcaagacaccgattccgctacattccacccaacacaccagagaatttttgggaagttggttttccttccactcagacttgtatggaaagaggttatattaaggaagatcttgatccttgtcctcgtccaaaaagacgtcagccttacaacgcaatattttctccaaaaggcaaggagcagaagacatagacgttgaaacagaaacagaaggatgaaggacagttttttccttcttagttatttatagttaaagttggtactaaacattgatttttttgatcttctgtaaatggatttataaatcagttttctattgaaaatgtttgtgatattttgcttttgcacctttaaaacaataaggcgctttcattttgcactctaacttaagagtttttactttatgtagtgatacctaatacaattttgaaaatacaa

SEQ ID NO: 6763 - DNA, 463 bp, Homo Sapiens
gtggactgccacctggggtctgtgtcacttgtagtttctctgcctccagttgcctcaacagcagaggcacagcagttcaccatctttgaggtgagggtggggtgccccagctaggaagcaagatcgctgtgctaggtctgaccaaaaccagagggcagtctagtcctgggggtaaagccctcagatcccagggtacactcttctccattccctccacccacttgcctgtcaccccagtcacctaagcaatcactgggcccagaggagaggagacagacacacactggctcctggacctaaagggtatgagctggagctaaggccagctagagcttccactgtcagccctcactgtcagccccactgcacccccctgtgcctgctgggcactgggcactagctagatgctttaggttgcttcagctgatccttcaactctgtgaggtggataccaatattctat

SEQ ID NO: 6764 - DNA, 224 bp, Homo Sapiens
gtagtagctgtttcctggtgatagctgtttcctggtgatagctgtttcctggttatagctgtttcctggtaagagctgtttcctggtgatgagctgtttcctggtatagctgtctcctggtatagctgtttcctggtactaagctgtttcctggtatagctgtttcctggtatagctgtttcctgtatagctgttcctggtaagctgttcctgtaatctttcct

SEQ ID NO: 6765 - DNA, 535 bp, Homo Sapiens
  misc_feature (525)..(525): n is a, c, g, or t
ggttaatattttataaagtgtaaatattttattatgttttgaagggaactattgattctaaattattaaacccctgagaaggactatttaaatgaaatatacaattaagtacaattaaatgtacattgtggttagtttgttttcagattctgcacccttttaaattcattgcttttctctttactggagtttcctcttgtccatttctgatactgaaaaaaatctatcatgttaggaaaaagcctaaatgatttaaagttgcattaaacttagaggaaaatgtcaaatacgattaattatgaccagaaatgtattttggatgtttgtagagttgtatttcatatcacattttacaaatttcttccgatttaaaggagagttctaggaagttttgtgatctatgtccggtgtgggtttttgtcctctcgagttttgtctctaataaaggccttttttgtttcaaatacatacgctttttactgcacaatttttgtattgaccttatttcaactgaagcgatatttncaacaggttt

SEQ ID NO: 6766 - DNA, 269 bp, Homo Sapiens
ccacacatcttcagcagggctcatctcaattaatgttgtatctcaaggctttgcatatgcctcggcatacagctaggcattcattaaatattcaacactatgaatagctaattagacctttctcatcctttacctttgtctttctaccttctctctcagttttctttccccaccctgttcctcccacctctgtatcttttctacccatgttctcttctctttctgatcctttatcatttctcctttgaaatgggaaaagagtaaaattc

SEQ ID NO: 6767 - DNA, 648 bp, Homo Sapiens
tttctctgggtcataaaatatgggggtagcaggaggaaagagaagagtatattaagagcctatatctgagaggtacgttcagtttttcctcaaaagtatctggtggttggactagtaatttattcatttattgagaacctattaaattacagaaaatacttagtaaagagcggtgagaaagatagaaactatccctgtcctttacctggattgaaatctaaagtggatatttgtacaataaactcacaaactaaagaaagaaacgtaagtctgaaggtcacgtttttcttttaaccggcttttgatgggactgaatttaaattgccaaaaggtgaattaacataatcttgaaaacttgcaagttcctggaggcagttctggagggagggtggagcaaaagagatggcagaagaagaggagccagcagcactggaattcaaaagtagacattcttgcctcctccctagtggacagggaggaggggtggggagagcacaagagagccgtgacaagaggaagggagagagcacagagtttaagtctatattgatggaactatggttacaaataggggctaccatttatattctcatctggcatgtctcatcagtgatttacaggatttcatcgtgcttcaaggggatctct

SEQ ID NO: 6768 - DNA, 505 bp, Homo Sapiens
tcacgatgacagtaggtgggacactggaaatggctagcacgtccagaggcacaggatccagcgcagccatgcccattcggctcacccaaaaaagcttggaagcactgctgcaaagaacagcgcggatgacgcacatcacctctaggttcactaaagtcaggcactttggggggagttgagagtcagacttccgtgtgctgctgggaatccaggggcgggatcgtcacctcttcgaagtgaccgtcgtccccgctctcatagtcactcatcatgacctcggactccacttcgcagcagggctgacacgtcagagcaggaggcggtggaggcgtacacagacatgggcatgctctcgacagcgggcgcctcgaagtgtctttgataccctggcgggtaaggggcatggggttctctacaagcactattctcatcagtgcctttgtgtttgagcttcagacatatcgaggggataacattgggcattactgattcaagttgtgtcatc

SEQ ID NO: 6769 - DNA, 470 bp, Homo Sapiens
tggttgtgggtaggagagccaaaaccatggtcaggatgggcggactcgggcatggaatcatgagattccagccccttgagtctgccagtccaaaaatattgggggtttgggggtaccaaagcctcagctctgaaatcttctccggaaaaatgtcacagcccctcactcccttcctggagaggatgtgaggggccaaggggtgggagaagttggcgtcctaggctggggattggtcgggggaccttaaagaaaaaggccagggctgagggtcctgaggagagagagagaggccacgtggatggaggactgtcacccccttctcggttctgtcacccccttgagtctaactcactgttgaggggaggaagaagggggatggacggaagggagaccgaggaaaggctttcgggagtggggacattatccacccagaggtgtgctacccacaaccaccgcgagatccttagagt

SEQ ID NO: 6770 - DNA, 566 bp, Homo Sapiens
aaaaaatcaagcatgaactcaggcgtcccaactcagattggaactaagctttcctgaaactctggcctttgtccctgagccatctgactgacttgttgtggccctggcaggtggggggcatgtttgacacggtgcagcgcagcacccaccagaccacagagtgggccatgctcctcctggagatcatcatcagcggcactgtcgacatgcagtccaacaagtaaagcatccccacccgctccctgcagtttcatacccaagaagctccccctactcccatgccaggtgcacccactgagattggtgtggctgttactgtggactccgtggccctgggctccccatacagttgtcatgacctagggatgacatattaagcacctctccctgcattgtgtcctctgctgaggcctttttctatcttcacctctttcttacgttggtatactctctggcttcctgtctcagtgagcgtcttcactactgtagttggacatagctgagcgtgctcatcaatgggacacttggctgcagacatgtctagcatctcgcaacgtagcatggag

SEQ ID NO: 6771 - DNA, 913 bp, Homo Sapiens
  misc_feature (144)..(144): n is a, c, g, or t
  misc_feature (322)..(322): n is a, c, g, or t
tgtttctaaaaggtccctggttctgtttccagccttgaatgacttcagggtttacctgagggcacctgttaaaagccaacatgtgggctgtgaaacagcttgcaccaagaagtatctcagaaacagtaggctatggcaccgtancagctcttcacccgtacttgtccttgcagctgttcctggcatctgctttttgtctggtggcatgagtgaagaggatgccactctcaacctcaattgctatcaacctttgccctctaccaaagccctggaaactaagtttctcttatggacgggccctgcaggcccagtgcactggctngcctggggtggcaaggctgcaaacaaggaggcaacccaggaggcttttatgaagcgggccatggctaactgccagccggccaaaggacagtatgttcacacgggttcttctggggctgcttccacccagtcgctcttcacagcctgctatacctactagggtccaatgcccgccagcctagctccagtgcttctagtaggagggctgaaagggagcaacttttcctccaatcctggaaattcgacacaattagatttgaactgctggaaatacaacacatgttaaatcttaagtacaagggggaaaaaataaatcagttattgaaacataaaaatgaataccaaggacctgatcaaatttcacacagcagtttccttgcaacactttcagctccccatgctccagaatacccacccaagaaaataataggctttaaaacaatatcggctcctcatccaaagaacaactgctgattgaaacacctcattagctgagtgtagagaagtgcatcttatgaaacagtcttagcagtggtaggttgggaaggagatagctgcaaccaaaaaagaaataaatattctataaaccttc

SEQ ID NO: 6772 - DNA, 413 bp, Homo Sapiens
  misc_feature (347)..(356): n is a, c, g, or t
aagcttattttagagatgtttccatcagttgtcagtaaagataattcctgtaatatgttgtaggcttcaagctttgcttggaaacctgaagtattaagtatgattggatttgcaattttacaaaatggtttaaattcatatacatcagactcaaaggtaataggggcatgcattccattgaggaaattctagggaatttttatttattttcattggtttatttctggttttgaaaaaatttcataattcataggaaaaaattggataattactattttgacaaatgaccattaagcttcttggaccttgagtacttcacacagtgttaagataaaagtcacaatttnnnnnnnnnngatgattttcttgtgaaacttgtgttctcaaataaaaattgttacccgtgaaaaaaa

SEQ ID NO: 6773 - DNA, 493 bp, Homo Sapiens
tccgggaaggtgtctcaagtgggtgggcagacttctgacgaagccctgagcatgctgtctgaaggttctgatgccagcacaattgaaattcacactgcaagtgaatcctgcaacaaaaatgagggtgaccctgctctcccaacccatggagacctatgaaggggatgtgctggggtccagaccccatattcctcagactcaacaattcttgttctttagaactgtgttctcaccttcccaacactgcactgccgaagtgtagcggcccccaaaccttgctctcatcaccagctagagcttcttcccgaagggcctttaggataggagaaagggttcatgcacacacgtgtgagaatggaagagccccctccagaccactctacagctgctctagccttagttgccactaggaagttttctgaggctggctgtaaagtaagtgtaaggtccacatccttggggaagtagttaaataaaatagttatgactgaaa

SEQ ID NO: 6774 - DNA, 627 bp, Homo Sapiens
ggccctggacactaccaggcacgagctgcccgtgagtccatccacctggagggagatgggcagcagctcttagacgccctgcagcatgaactggtgaccactcagcgcctcctgggagaacttgatgttggtgattcggaagaaaatgtgcaggtgctggacttactgagcgaactcaaggacgtgacagcgaaaaaggaccttgagctccgaaggagctttgcccaggtgctggaactctccgcagaggcaagcaaagaggcagccttggcaaaccaggaagtctgggaagagacccagggcatggcgccccccagccggtggtatttcaatcaagacagtgcctgcagagaatctgggggagcacccaagaacacgcccctgtctgaggacgacaacccgggtgcctcgtcagcccccgctcaggccacgttcatcagcccaagcgaagatttttcttcaagcagccaggcagaagtcccgccctctctctctcgttcagggagggacttgtcatgactcatggttacattcaggatacttgagcactttatatactaccgtagcactgtagctattttttatgtgataatcttgtttgataaaaaagtaaacctgttttgcaaa

SEQ ID NO: 6775 - DNA, 308 bp, Homo Sapiens
tttcaatttaaattaaacttcctttaatgaaataaaaaacaaatggtgcattgcataatatttgtggtcacagtataaaacaatacaattagttcatataacattggatatggacaaaaatacacaagatcctttctttgtctacggaaaattctgcagatccttatgtgccacacttaaaaagaaagtcagcgttttctcttctagggatctgcacacatatttatcactgagaatttggtcaaacagtggaggagaacttacccaaatcccagttcccttcttcctctgttgtcatcggtgaagct

SEQ ID NO: 6776 - DNA, 409 bp, Homo Sapiens
gcccctcacgggcccccacactctcctgaccgtgagggcactggtcagttccgcccccgtggtaggcagacgcgcggggaaattcggacccaggagcccagccccggctgtgccatcttgtgtatgggcagatatgacctgacagccccctccagtgccacagggtacgcacacgcagagccccgcctgtgcacacgcgtgtcttcgtgcactccccgtgcggtacaggggcacttcgtaacccagggaaagggcggggggcatatttgcaagcgcgctcggtgcgggcaggctcgcattgcacccagggagctggagttgagctgttcccctaaataaaaacccttcggaaaggagaccaaaaaaagcagaaataatgcaaaaaataataatgaaatgaactgcgaaa

SEQ ID NO: 6777 - DNA, 469 bp, Homo Sapiens
aaggccttgctgacaacttgcacaatgttgaacatagcctttaagcatcatttaaattttaaaggaatggagttttttcagcctgtggcccagcactggtcaagaaaacaagatggcaacatatatgctttcagggtcaaatttgagcaaactgtaaactgtcagggtgataaaatgtttctcttgatgtttacatgcacaagctttgcgttctgactataaaaagtgtgaacaaatcaatgccagattcctgttttgcgcattgtcatgggattcttaagtgaacctttctaaatgtggtcttgttcacatgctccacgtagctgtaacttcacatcatcagcttgcagtttgtaattgactaaagcattccagtgtcctctttctagattgccagctcatgacatggtgcttataaagatttaattaaagtaagaatgaaataaagtttttataattataaaaaaaa

SEQ ID NO: 6778 - DNA, 579 bp, Homo Sapiens
ccttcaagaccttgtcccatcacagtctgacaaagtgtcggagccgaggttactccacagctgagcagagccccatcccaggctgcagaaagtagtcaagcaaagaaggatgtactgtattctcagccaccatcaaagcccattcgtaggaaattcagaccagaaaaccaagctacagaaaaccaagagccttccactgctgcaagtgggccagcttctgcggcaaccatgaaaccgcatccaacagtccaaaagcagtcttccaaacagaagaaggccattcaaactgctatccgcaaaaataaagaggcaaacgcagtgctggctcggctgaacagtgagctccagcagcagctcaaggaggttcatcaagaacgaattgcattggaaaaccaattggaacaacttcgtccggtcactgtgttgtgacccccccatggttcaagtgacagtgggtgaccttgtctgccaagatctttcttttgaatgttttgaacccaactacttgtcatagatgtttgactgtgtcaaaagctgtgagcagcaaaatataatccatatgaccttttctcttgcaaa

SEQ ID NO: 6779 - DNA, 1197 bp, Homo Sapiens
ggagcgttggagggaaggaggtggcatcgccgtccgcgccggccccggccatgaacgggctgccctcggcagaggcgccgggcggggcgggctgcgctttggccgggctcccaccgctgccgcgcggcctcagcggcctcctttaatgcgagcgggggctcgtggcgggagctggagcgcgtctacatgccagcgcagccgcatccacgacgagctgagccgcgccgcccgcgccccggacgggccccgccactgccgcctggcgccgccaacgcgggacccgcagccggcccgcgtcgtcctgtcaacctcgactcagcgcttggccgcgctgcgcaaaggagatggtggggctgcggcagttggacattgtccttgttgtgccagctgtggggcctgtacgagtcaatccaggactacaaacacctgtgccaagaccttgagcttgctgccaggacctgtcatcctcccgtccattcggacagcttcctacccaccggatgcgggcctgtctgacgacgaggagcctcccgattgccaagcctgcctccctgacaccgacaacccttactgtgccgccagacgcacaattgcccgtgaccagtggcttgcaggatgccttccacatcagcctctgaaggggcttggggggcaagggggcatgcacccatgcaaaaggctcagaaactccccctccggcaagccctcagacttcggagcctgcgccttcccccctaccgcctcacctcacaggagggccaggcatgtattcctcagaggcgaaactgccaaactctttctcctgtcttgggttggctggcactggggcgggcatctagggtacagcctctgctcatggcactgggcctccagttcttccacatgtgtgcacccccagcttggccaaccctcagccttgcggtggggcccgaagcatcttcccttccgcttggcgtctctgggattgggatgagtgcctggctcccatctcctcctcaccttttgttgctatcggcagctgctggctcaggggcatcccacctccgggctctgggttcctctgccctggaagggctccaggacccgtcccaataaccacccacggccaggagggccaaggccccgtgctggatatttaaatttaggggccggtctccagggcgcgtagataaataaatacactcagcgtcaaaaaaa

SEQ ID NO: 6780 - DNA, 567 bp, Homo Sapiens
atgtcgatcgccacggaggcaagaggaccaggacaccgggcaagatccccgcagtgccagcttcccaggactcaggattccagtcggccatgaagcaataaatacaaacatgccccacaaggtgagaataaagccatcaaggtgatgaggaagaagtcacggggattttcttcttctaagtccaagcacagtggcaatatttcaagtattgcaaagaaaaacacacgtgtgtgtatttttgtctgttatgtggcgtgtgaccctggaaccccccgcatgggtccatggccccaccactgcctcccgcagactggggactcgttcaagtatctactgattcaggcagggctaaccgagggctgggcagaccaagggaggcccaggcggggtttgcagggcatgcccgcctggaatccggaaggcaggcctctctgcagacgccctccgtggccttgggcaaggcagaggcagggagggacagggctgtcatcaggcctaccctgccgaggagctgacatcgaaactgactgtcaaagatggacagggagcttttgccctcgtgccgaa

SEQ ID NO: 6781 - DNA, 811 bp, Homo Sapiens
tttaagtatacaatttgtttttatttacaataccctataaaaatgtaaatttagaaacttttattttcattaattagaaccaatccaaacaaaaaagataaagcacagtaaggaagagataataatcaagtattcacttgattggttgtgaagggaaggtaggaaaggcatgtagtggaaatggtcagtagacaacggtagagggaagctaggtaacatcactggggaacagctggtggagcctggggttacagcatgggaagaaatggagatggagaacaggacagctggttttaacagaggatcttactgttgtacaatacatgtatgtgcaaaatgtttattctctttaaataccataacctgtccctcccaccccccaactacattcgaaaaagtaagaacagcagaaagatcacgaaggccatgtaaaattaattcagatttaattttcttcagggctgtaatcactagggatcaaaactccttagtctggttgattgctgaatgggagaggagtaagtgagaaagatcatggcaggctggccctgcaattattcaaacccaggcccctggctgcctgggaacgggacttgggtgagatgaagtagtaaagacagcagttctgcccatggtgtggagactaaaaagcaaagcaggccaaacttagcttccatggttacatttggaagtttctattcatgacaccaaataaaagtggggaagaaggaagcatggcttactgaagtagtctcaggaagacagggcaagtgtgcaaaaagccacactgccaaagcaggctactagtgag

SEQ ID NO: 6782 - DNA, 446 bp, Homo Sapiens
  misc_feature (348)..(348): n is a, c, g, or t
tggctccttaatcttgatccaaattattgttacatccagaatgtgatgaatcaaaatctcgagatgggggtccagcaatctgaaatttcagtatgccagggcttttctgtatgtcaaagtgggtttgaaatagttaatttttcttctagtctgaaatgtatcgggaaaatttggaaatcctgaaggctggaaattgaaataagtttttctaggatttgtgtctcttactattggaaaactgatgatgaccaattcatgtttacaaataagatcctcatagatctcggtaaattataatttgctacagttttatggttcttcctgtgattttgagcttttttgaaccanaataatacagtctaaaactatagacaaataagatggcacttagactcctgggttttagttagtggaggttaccttagagcactgtggggtcataataa

SEQ ID NO: 6783 - DNA, 477 bp, Homo Sapiens
cagtgtgatacataggaatcattattcagaatgtagtctggtctttaggaagtattaataagacaatttgcacataacttagttgattcagaaaggacttgtatgctgtttttctcccaaatgaagactctttttgacactaaacactttttaaaaagcttatctttgccttctccaaacaagaagcaatagtctccaagtcaatataaattctacagaaaatagtgttctttttctccagaaaaatgcttgtgagaatcattaaaacatgtgacaatttagagattctttgttttatttcactgattaatatactgtggcaaattacacagattattaaatttttttacaagagtatagtatatttatttgaaatgggaaaagtgcattttactgtattttgtgtattttgtttatttctcagaatatggaaagaaaattaaaatgtgtcaataaatattttctagagagtaaaaa

SEQ ID NO: 6784 - DNA, 451 bp, Homo Sapiens
cattaaacccatggttctctgcgaggtggtgggtcagcatggatccgagcctaggtggtgggaaaacaccctttgcctaatgctaatgcgtaagctctggctgctgagtacaccttgtacagactttggaaagatgggagtagggggcatttgctggacttgaatctacacctgtggttgggatccaggacccagactggggagtccagctcttatccccaccagcagttattctgtgattctgaggcagtgccatctggctaccacccttagccaagactcttttacctgggatggttagatatcaggctgctgtgtatagtaaatggaaacactttataatgtgctttattcagagttactgagttctgaatcacgcctatataccaggcccattgctataattgcctattagcatatacagacagtttgacaaatctgtttatttgag

SEQ ID NO: 6785 - DNA, 1793 bp, Homo Sapiens
  misc_feature (1517)..(1517): n is a, c, g, or t
aaggctgctacgacccgaattatgggcatggaagtgcaagccatctgctccagagtacctgaagcggtggagagactctctggagggcagagagatatggtgagctctacctgccaaagttttccatctcgagggactataacctgaacgacatacttctccagctgggcattgaggaagccttcaccagcaaggctgacctgtcagggatcacaggggccaggaacctagcagtctcccaggtggtccataaggctgtgcttgatgtatttgaggagggcacagaagcatctgctgccacagcagtcaaaatcaccctcctttctgcattagtggagacaaggaccattgtgcgtttcaacaggcccttcctgatgatcattgtccctacagacacccagaacatcttcttcatgagcaaagtcaccaatcccaagcaagcctagagcttgccatcaagcagtggggctctcagtaaggaacttggaatgcaagctggatgcctgggtctctgggcacagcctggcccctgtgcaccgagtggccatggcatgtgtggccctgtctgcttatccttggaaggtgacagcgattccctgtgtagctctcacatgcacaggggcccatggactcttcagtctggagggtcctgggcctcctgacagcaataaataatttcgttggaaaaccctgctccggatctcccaccgaataaaacaacaatacccgccatgagcaacaaataactctaatcccgccgggggccccctccggccctcaggaagacttcaacaccagatagttcggtgcggcccggcccaacattagtatacggaccgggggctctcacctactctcccaggataatcgcagattcctgcaccattcccttccgtccttcccctcaatttagtggaatattgctgcgccgccccccgccagtggggttctccaaaacaaagccctacagggcgagttcccagacacgggttattcccgcggtgagcaaaccctcgcatccgcatctcccccgctagttcttaccgcccatcttccacaccaatccctttgcgcatcccggcgcgtcgtgatacaattacgcgattccgacgctcatgagccgccgcttgagaatatttccccccgcacacattatcccttattatagggcatggcactacatatgcccgacataattccctccttctcttatccactagatatgttgttacgcggttcggacacgaaaccgtcggacctgtatagacgctattttgcttctcctcccccgcatctgttcattaataccccccaccccagtccacggctatttataggtgttgcccacccctcattcccttgttatatcgccccatgatcgtacactcggaattgcgtgcggatccccccacggatatatcccaataaaactaaacacgacaccctgagcacgcagacacaaaataaatctacaatcatgttcctacataaacgatccaggtatgcccccacgtctntttcgcagagtgtctccgacgcgacctatgtagctctctgacgaattgtggttcacttatacggctgcacatctgacgtggatttcgtcccccgcgataggaacgttttattatgctctctccgctatccataatcagtccgcctcgatctacagaggtaccaacaaatgtcagcaccgagccttcagttcgtacactgtctccacactccgcgctcgcgccactattctacagcaccgcgtgttactaatgaaccctataatatccctacgagag

SEQ ID NO: 6786 - DNA, 957 bp, Homo Sapiens
ccggtaccctacaacatctcatacgcaacatgctatgtaattcatatacccaattttgcattctaggtagaatttcattactactctaaaactccatctgcagtggccatttccccccagacttaattcaagatttaatctttctgctgttttcttaataaaagccttagagtcaattattatgagtgatcaacctatgaactattatatacaacacagtgattgcatttttttgagcactgaaagtacttaaaataaaacttcttacttccaacttttgccctcctccaaattgaagggccaaaatacttagattttgtaattggggggaaaaaaatctatcttcccaagctgaggcttttcatagcagcttttgccaggagaagagattttatgcctgttatgaacccttgaaaataagggcttattctagaaacattgaaagacccttaaaacacagaggtgctagctggtgccactttaattcacaaccaactattacttcatagcttatattgaagagttaattcatgctcgttttgttcctttaaaaaatactcttgggaaaccattattactcctgtagacacatactctagttacatcatctcttcctgtaaaaataaaggtataatcatgattatctctatttctttgctaaattcaactaccaatatacatttattaatctgatcacttttccagctaactcaaaaccttatagtattctatccagggtcaattttcagcatagaagtaggagcaagtcttgtaagtaagaacaatcttgaaggcaatattttaatctagtcgttaatgtgttcattaccaatgagaactaccaactagaatttacttccagaactaaggccaagaaaacttccatagctaaatgaaggtaaaccactataaagcttatttctgtcatgcactatatgacgtactcctggatttcat

SEQ ID NO: 6787 - DNA, 1084 bp, Homo Sapiens
ttctgcgtatcgagccatgcgttcgagcctcaagacaggttaataccatacaagagtcagatgtgagttccctcggctctggattccaactagggatagagaagtggaggtatgaccttagcacagaggcatagccactttgggaagaagaaagtgcctcacggccacagcagtgctaagggaagtggcaccctgaccaagcatgcgggtgaagtcatcagctggtgtgcggcgggagggcgcagatctcagatagcagctccctgttgattgctcagcttcattcttgggttctgagaataagccatgggcggaggcacttctgtaagaggaagcagcttcattaaaatcttgggaaattttaatttgcattcaccttctctaaacatgaacatgaatctgtaaagtgatacattctttcttgcttaagaaattaaagcgtttgggggatttgagtttttatactctttgaaaattgagtttcttgtgctaaaatcatcattcacaaaatgtcctctcacctgaggaattccaacacagcaaattcaatctgaaataaattgaggctacatttaagagacgggacttccagctaaaaataggtattagagagctgtttttgccaaaaaattgaatacttaaccttattcttcactcttgacccatttgttttgtctcagttctgggtgaactggagggttttctttctttgtattttcatttttgtattcattttcttaatgcgattgaattagatcaacattttatgccttctcttcccgtaacttgcattcacatagacctgatatatgtataagcctaaatctttgtgcttaacacttattattgctttggaataactgtccatatatggaatgattcattcggttggtataaccaggtacagggttattgagacacatttccaaattaacttctaaaaggttttacatgaaaactcttcccatccatagccatcaccagtctcacctcacacacttgctaatgctattaatattacttgttagaatttatgctaatctgatgagcgataaaatgcctcatgttttgtttactttggatg

SEQ ID NO: 6788 - DNA, 966 bp, Homo Sapiens
  misc_feature (573)..(689): n is a, c, g, or t
  misc_feature (712)..(756): n is a, c, g, or t
  misc_feature (779)..(787): n is a, c, g, or t
  misc_feature (836)..(845): n is a, c, g, or t
  misc_feature (902)..(912): n is a, c, g, or t
ggaccggtccggaattcccgggatcgcacccctactcgttcctatagaacacagaggacataggaaacccttaaaacacacatgggattctctggtcacagttttgggttcaggctacgctgctttgggcaggtggagcaccccccgaggaagcctgcaagtccagggcacaggctgccttttggagggagggctggcccataggtgctgctggctccccgccaccagctgggcctcagccctcacggcattcctgctgagcaccgtggggcacccagggagcaggggcgtcagggatcctgctgccggcacccctgtgccgctggcatgagggccgtgtccccactgtgaaggatgaagagcaaggccctcaggacccgtgtcctcagagcaccacacactgagcacccagagacagcgggcctggcagcgggccgggccatgcagggagcgcctccctatgttgcctgccactctgggcaccggccagcaccctctggtgagaagaggtcccccctttttatgtgcactaccccaccatctgtgattataataaatttattattcctgtgnnnnnnnnnnnnnnnnnnnnnnnnnnnnnnnnnnnnnnnnnnnnnnnnnnnnnnnnnnnnnnnnnnnnnnnnnnnnnnnnnnnnnnnnnnnnnnnnnnnnnnnnnnnnnnnnnnnnngggggggcgcccttaaaaaatcnnnnnnnnnnnnnnnnnnnnnnnnnnnnnnnnnnnnnnnnnnnnngtaaaaaggaggggcccctttannnnnnnnnctaattaaaaagagagggccgcggggcccgcttttttaaaaacgccctnnnnnnnnnnaaaaaaaccgcccccttgggggaaactttttgagaaaaaagaacccctctccttgcnnnnnnnnnnnccattttttggggcaaactcccccccaacagaaatattatccccccccaggggg

SEQ ID NO: 6789 - DNA, 540 bp, Homo Sapiens
  misc_feature (191)..(422): n is a, c, g, or t
atggaaatcctagtgttacgcttagaatacatgctctgtaaagagttctccataggttcttgccttctttatttaatagagctaatctgtcatcacttcgcaaacaggtcttacctaagacatgcctcatccttggtaatcacactttcacgatcctatttctttcttctgtgggtaggttggtttcgttnnnnnnnnnnnnnnnnnnnnnnnnnnnnnnnnnnnnnnnnnnnnnnnnnnnnnnnnnnnnnnnnnnnnnnnnnnnnnnnnnnnnnnnnnnnnnnnnnnnnnnnnnnnnnnnnnnnnnnnnnnnnnnnnnnnnnnnnnnnnnnnnnnnnnnnnnnnnnnnnnnnnnnnnnnnnnnnnnnnnnnnnnnnnnnnnnnnnnnnnnnnnnnnnnnnnnnnnnnnnnnnnnnnnnnnntgcctaagcctcccaaagtgatgggagtaccagcatgagccactgcacccaggctcttattattcttacacgtgattctctcaaactcagcttacctgagaggctgggacatacaggt

SEQ ID NO: 6790 - DNA, 646 bp, Homo Sapiens
  misc_feature (25)..(25): n is a, c, g, or t
  misc_feature (46)..(46): n is a, c, g, or t
gggcaaggagatgacaagatctatnggggatcaacaattatcaganaacatgaagcccaaggaacgtctatgggcaatgcctcttccgggatggtgaggaagggccccatccgagcgcccgagcatctacgtgccaccgtgcgctgggattaccagcccgacatctgtaaggactacaaaagagactggcttctgcggcttcggagacagctgcaaattcctccatgaccgttcagattacaagcatgggtggcagatcgaacgtgagcttgatgagggtcgctatggtgtctatgaggatgaaaactatgaagtgggaagcgatgatgaggaaataccattcaagtgtttcatctgtcgccagagcttccaaaacccagttgtcaccaagtgcaggcattatttctgcgagagctgtgcactgcagcatttccgcaccaccccgcgctgctatgtctgtgaccagcagaccaatggcgtcttcaatccagcgaaagaattgattgctaaactagagaagcatcgagctacaggagagggtggtgcttccgacttgccagaagaccccgatgaggatgcaattcccattacttaggtttcccataattcttaaatttaaaaaataaacgttttgttcttttggaaa

SEQ ID NO: 6791 - DNA, 661 bp, Homo Sapiens
ttagttgggcatgctgtgtgttgcctgtagtcccagctacttgggagtctgagctgggaggcttgcttttaagcctgggaggcagcctgggcaacagagtgagactgtgtctcaaaaaaattctcagacaagcacaggacctctgtatgactgcacaggtcacaggtcgcacactcacgaagccagcccagtgctcaatactgtattttagaataagcaggaatcagtttagggctgccagacttgcagaacaatcactgtgagggctgatggcagatccctgattctgtgattcagaaagaggtcattcaagacaggcattgcccagagtctgggttctctctctcctgaagttgttgaggctgtgcagaatgtatgtgtttagtgtttcatccagtctgttagggtaatcagtgtgatttctctggcatctccaggactggaagcagaccagatttaatcaaacgctgttgaagctgcccagggactggctaagctgccaccctgttagtgaggccgctggggagagggaaactgaagcctgcaccacggggagccgtatactggagtctgaatccatttgctccacgcaggagcctgcatctcaagtcaggagcactgcctgaaatctagcatcatgtatactctttgactagtgtga

SEQ ID NO: 6792 - DNA, 638 bp, Homo Sapiens
atgattcctcaagctatccatatatccactgcagattatacaaaaagagtgtttcaaaactgctgtatcaaaagaaaggttcaactctgtgagttcacacatcagaaagaagtttctgagaatgcttctgtctagtttatatgtgaggatatttcgtttttcaccataggcctcaaagcgctccaagtgtccactaccagatacaacgaaaagagtgtttccaaactgctctatgaaaaggaatgtttaactcagtgagtcggatgcaagcatcacaaagaagtttcggagaatgcttctgtctagtttttatgtgacgttattcccgtttccaacgaaatactcaaagctgtcctaatatccacttataaagtctacaagaacagtgtttcaaaactgctgtatcaaaggaaatgtttaactctgtgagttgagtacacgcatcacaaagtagtttctgaaaatgcttctatccactttttatgtgaagatatttcgtttttcactaaaggtctcaaatcgctccaaatgtccacatgcagatttcacaaaaagagtgttccaaaactgctctatgaaagggaatgttcaagtctctgagttgaaggcaacataaaaagaagctttgagaatgttct

SEQ ID NO: 6793 - DNA, 1024 bp, Homo Sapiens
  misc_feature (97)..(156): n is a, c, g, or t
tggcaactaaagcagtagggaccataaggactcgtgctccatccggatgggtcagtgcttatgttgtgtagttgataaacgtgtggtacagattgtnnnnnnnnnnnnnnnnnnnnnnnnnnnnnnnnnnnnnnnnnnnnnnnnnnnnnnnnnnnntgggtctatcatcacacatgcaaaccaagccacatagtaagtaaagtctttttaaaaagttttgagtgatgagaagtgccctttagaggggtgtgtgagtgtgtgctttccatatatacatgtacataacatagtcattcctttgcctcttcccccttttcctgtgttggtggcttcttcacctcttctacctccaatcatggcccactcttttttgaaagtctgacttctggtccctatctctttacctcttctgaaatgcaatcagcgtgtttctaagtgtcagagttgttagggagctgtgcttgaatatatcttagatagcatttttacagcaaatctgttttctctccataatatctagcctgggctttaacactctgctcagtcatttgagttaatctttaggtaatctctttaaaacaaattttaccagaaggatttgggttttgtcattttattcagtctaattggagcagaaagaacctgttctttcttcttacactgggatgaggtagtgtatgctgtctctctttccttcttcattctggtgaggggcttttctgtattaatgttcaccggaaacacctgagacacccatccattcacgtttttcggtgcccttcatactattgctctatagcttatttcttaaggagtatgtatgaaaggttttactttaatctgcatggggcacgggaagaaagaattctgaatgcttagaaaggttctacctttctcaatgcaagggaggttgtgctaagtctcacaactcttgcctacagcagattctgctcagatatctgtagtatgaattatcccagaagtgaacccaaaatggctgattctgtgaatgcttatgtgtcta

SEQ ID NO: 6794 - DNA, 121 bp, Homo Sapiens
actgtctccacttagaactttgttgttcaggtctttttctatgagttccatagcaatattatggccatgattcattgcgtgactgaattcttagcttcgtgagatctcaatcgtgcatgaa

SEQ ID NO: 6795 - DNA, 349 bp, Homo Sapiens
tgctgggattacaggcgtgagccaccgcacctagccaggccagttcagggatcctcttccaggacctccaaagggctgtcctccaggccacaactggggatggttccgactcttggtgaattcctcctgtattgcactgctgcgtctgtctgactctagagtgttttggggtgcgcgggaatatgtctgattcttctccgtgtgactcaccctcagtccttggagggagtcttctggttccctcttcttcttgtcttctctaaggcctcccagctcctttggccaccttccctcctgtttctaagactctcaatgttctcatctccctcatctaaaaatgacactcctt

SEQ ID NO: 6796 - DNA, 493 bp, Homo Sapiens
  misc_feature (127)..(127): n is a, c, g, or t
gagagcatcctggacaccttctcgcccaggctcgctacagcactgagtgaagaaatgaaagacaaaggtggatacatgagcaagatttgcaacttgctacccattaggataatgtcttatgtaatgntgccctgtaccctgcctgtggaatctgccattgcgattgtccagagactggtgacatggcttccagatatgcccgacgatgtcctgtggttgcagtgggtgacctcacaggtgttcactcgagtgctgatgtgtctgctccccgcctccaggtcccaaatgccagtgagcagccaacaggcctccccatgcacacctgagcaggactggccctgctggactccctgctcccccaagggctgtccagcagagaccaaagcagaggccaccccgcggtccatcctcaggtccagcctgaacttcttcttgggcaataaagtacctgctggtgctgaggggctctccacctttcccagtttttcactaa

SEQ ID NO: 6797 - DNA, 256 bp, Homo Sapiens
atgcccctcgcttccgtagggaaagcacttctcctgcaggatggcattgctctctccccttccatggcacgtagtatgtgctcagtaaatatgtgttggatgagaaactgaaggtgtccccaggcctacaccactgccatgcccgaacactatccatgctatggtgggcaccatctctctgatgacagttctgtgtccacaacccagacccctccacacaaacccagatggggctgtgccgctgttttccagatgt

SEQ ID NO: 6798 - DNA, 797 bp, Homo Sapiens
ctaaaatatctgtttgcagtcctcagaatattatttattctgaagattgtccctcttgcacttggcagtttattttcggggatacattgttgggggagaggggtttctgccactctttccagattgagtctgtgctgtttaaggaggactaccatcctgcaactctttttctaattggggcacagaggatgtcgctaaagaaaagttgaagagcccttcaagcactttctcatctgtgaagaagatggaatctgaaaatacatttggagtttcatctgttttacaagtccattgatggcctaagttcctcctgttttctgctgtatgatctctaaggaactcctgttgctaaatatgaagagtatggaacattcatatagtctctgtgaagcatggggggagggaagacatttctttttcttataggctttatgctcaaatgtcatagtctcctttcaaagaattgtgttgcattttaaatgcacccagcttaagtagaagacattgaaggatgcattaattttcaggaactattttgaattatgaaaagattcccaattgaaaaaattattcaacaagtaaaagctaagaaatttcattgaaatcataaggcagtttaagcataaattgataaaaatagctgtgtactactaattaatagaaaatcattcaaccaagagaagagtcaagtgaatatcgtttgtttatttgctagtgagtttctttgtaacgttgattttattaaatgataatatttggttagtatgtcctatgttaataaaaatgaacaaaattaa

SEQ ID NO: 6799 - DNA, 420 bp, Homo Sapiens
gcggccgcaaggcgctggagaacggcatcaacgtgacggtgtcgcagtccaccacggtggtgaacggcaggacgcgcaggttcgcggacgtggagatgcagttcggcgcgctggcgctgcacgtgcgctacggcatgaccctggacgaggagaaggcgcgcatcctggagcaggcgcggcagcgcgcgctcgcccgggcctgggcgcgcgagcagcagcgcgtgcgcgacggcgaggagggcgcgcgcctctggacggagggcgagaagcggcagctgctgagcgccggcaaggtgcagggctacgacgggtactacgtactctcggtggagcagtaccccgagctggccgacagcgccaacaacatccagttcctgcggcagagcgagatcggcaggaggtaacgcccggggccgcgcc

SEQ ID NO: 6800 - DNA, 507 bp, Homo Sapiens
atgaccctcactccgggaggcaactcagtgattgtgggaaacactcatgggcagctggcagaaattgaccttcggcaagggcgtctactgggctgtctgaaggggctggcaggcagtgtgcgtgggttgcagtgccacccttcaaagcctctactagcctcctgtggcttggacagagtcttgaggatacacaggatccagaatccacggggtctggagcataaggtttatctcaaagtctcaattgaactgccctcctcttgtcaggcagggacaactgggaggatgagccccaagagcctcaagaacccaacaaggtgcccctagaagacacagagacagatgaactttgggcatccttggaggcagctgccaagcggaagctctcgggtttggagcagccccaaggagctctccaaacgagacggagaaagaagaagcggcctgggtccaccagcccctgacgcccctgtgcccactttgtaaataaactgctgaacacccaaa

SEQ ID NO: 6801 - DNA, 513 bp, Homo Sapiens
ttcagtgtgtactcagaacacatacacaacaacatagggagttgtatgactgatacggaaaacttccagaaagttttaatcaaagcagtttaattaaggtatcaaaaatatctttgcttactatcaagaagtgtcaaataggttcagcttgctgccaaaatatggatcatttatgaagcaggttcatattttagaggtgttaataaaatcctcatcggaaaagatccaaagtgcaaggatttgattataaacataatttcctagactgaaagtttttggaaaagatgcagggtctgagtcaggccttctggttatattgtgcagtttcaaaagaactatttaaaactcttgaaaactcatgtaaataaaaatcatagggtgaaaattgtatttgttaaaataccttaataatttaaaatgacctgatttcctggaaaattttattattcaaaaggtggaggcattgtaaaaaggaaatagtgatgtaaataaacatgttctctttcaagtaaa

SEQ ID NO: 6802 - DNA, 535 bp, Homo Sapiens
ttcttttaacatcagtgggtaatcttacctcacaaagttagatgtaatatggaaaaacctctacaattttcaaacccataataatcaagttctataatcaccaaaaaagaaaagtacaaaagaaaaccaatggtgagaactcttataaagcaagtacaaagacaaaattggctatgcactatcattaacagaagctatcacggctcctttgtaatcttaagcagctattccatgatcttttctctcgcaatgatgaaccgaacttttgataaaatatttgatctccttttagccaaaactcttctttataagcccatttaatattccagaaggattttctttcgtttgaagaaatataagtttgacattctaaaggcatttgtattttaaagcctacaaaaagatttttggagagtacctggtgaagtaccgacttgcccctgtggctcaaaagttcaattattatagacatttcactcagaacagcatttctgtcttttaaccttcatctaaataaatgttcatttttataaaa

SEQ ID NO: 6803 - DNA, 569 bp, Homo Sapiens
  misc_feature (516)..(516): n is a, c, g, or t
tagcatagtttgaggggttacgctgctccgtcagatcattgtttttgtcatttgtattctctccttccttgttgccagagtctgctgtaggatgttaaggaacagtaaagggttggggtgaagtagtaagaaaaaaacaattagcatttctcttctggaatgaaaagtactgttggtgtacccgactaaatatggatgtttatctgtatcattatatatttgataaattaaaatttattctaacctgaatttcataattggatctaagttattttgtcatatttattaccaggaagaattaacacaaatttgctaatttatgattctgttcttatagttttcaacatatgatttcatcccatctgcaaaattaaagctttctcaaggaatgccagtcaatgatgatttatgttttagcagaaaaagagtatcaagaaacttatttcagaatagtcgggattttaacccgagttgtcttcctttatgtgctgctgggtgagtacaagttgctggatngatgtgcatggttgaactaacagacttctcgtaacttcatagttccagagtcc

SEQ ID NO: 6804 - DNA, 930 bp, Homo Sapiens
cgtgttcaaaggtatctggaactatgagtatgaatgcatttatgatcaaaattaacacaccaaaaaaatcaaaccacatttcacagcagaacctgcaaaaacgttgtattcatcttttttgaaccataaaaaagaatgatttagtcttgtctaatacgacttttaagcaacaaaaataatttaatcatgaagtatcagcttgattatgaatatattctattatctgtatcagttggtaaattaactgtgttacccaaaaaggctgaccagctctaactagtatgaacaggatattgaattcattaatgaatatataactattttgagcatacaaataatctctggttttacacccactacatttcagaatcctgtaaactgtgaggcatacaatatgtttaatgtggcagaaaatcatatgaaatgattattttattctgttcagtccttttcccattaagcatgcaaacaccgtcataaccatctttggtttcacttctacgaggtcatcaggtaatgcatatatccgggcaccgatctttcgagcaactgaaatggcgtatttagcattgttcagcttgtcctcatcagataagttttctctcctgatcatttcttgacgaactgcatttggtgcaatggcatctattaaatctaggacaggtaaacttgtgcttatagatttatccttgaagctggaaatagaaggctttttgtgttgcactgtttaagagtctgattgacccatttaattagaatgtcagcatttactttttcacccgctccaagatccgataacacattcaatgtgtaccttctcatcagctgccataccaatgccagggtaagtgtgtgtagtcccttcatttaggtcctgctcagcaatgccaacctaaggagtatttgctttgttcttctcaagttccactg

SEQ ID NO: 6805 - DNA, 604 bp, Homo Sapiens
gctcgtcctatccggattggaactatgtctagcatggtgagtaggctaagtaagaatgttctagccaggaagataacaggaaatcagttttccctcacatgcttgtgcccgaggggatttgctatctcatgtccatgaaaacaggtacagaatctataattctcaagaaaggaaaaaggtaaaataatatcaaagcagctaccggtttcctggtccattctctacttctagagaaagcagtaactgacagaataatataatgtcagagacttttgtttcctttttctccttcaaatggatccactttactgagaggaaggctatgcacattcactcttgctgactgataactctgaactgtgctgttacacccttgccatctctctctcttggaaaagatggttttctgcctatagagaggacaggaagaacaatttcttatccttgtcagtgcccaacacattttaaacttaatcctaaaatctaaaacagcaaagtcacagaggaccgcatttaaggaaagaaaagtccttgtctgtctttgaacagagcaccctcaaaagctgagagtgacaccttagggtcatccgcctgtaccgacaac

SEQ ID NO: 6806 - DNA, 615 bp, Homo Sapiens
  misc_feature (467)..(518): n is a, c, g, or t
  misc_feature (553)..(564): n is a, c, g, or t
ctaataggattggaactatgcatcagaatactgatgttagtgtgaaatgaaaattcatggatatcataatttatgtaacataatttaacatttctttattaataagactttagattgtccctttcacaaaaaaatggtgcggttaaaacttaatccttgtgtctttttgtgagtagttctatgattcctatatgatggcatccttgaaaaagttggtaaaaataagaatagttcttatttattaaagttcttctcaaatggctcttccaaaacattttagtatatactgcaatgttaaccattttacactcgcttaagtaattttcttcaaatacacacgagtccaggctatttaaccttattttaccgctatagcacaaaacaggttttccaaaatagtccttgcacacctgggattttacaaggatattataatcttggttcagttggacttactgaatttgtannnnnnnnnnnnnnnnnnnnnnnnnnnnnnnnnnnnnnnnnnnnnnnnnnnnagggtaaatttttatgagggtggatgtcatcctgnnnnnnnnnnnnaataaatgtttggtttcagaaggttttttatttacagaaaagttccaaact

SEQ ID NO: 6807 - DNA, 738 bp, Homo Sapiens
gccccacagacagactaaaatcaaatggatcacccatccaaattccatatcaccacactgaagtaagttgtaattcatcttccccaaaatcaggacagagcagtaacagccaatgttccaagcagaccagtttccgtctttaatgagcaggataacgaagttccctctgttttaatccttacaacaaaagtaacccgacgtaacctgatgctaacaaatctgttatttctctattgtcctgtttccttgttctcaccttgtaagggaggtaacttccaaaggacgagtccacacttttgttctttgcttctggtttcttcaaccccctctgtctataaaatgaatcccctctgctcaactctgtgggacacttattctattttatggaatgagacattgcccaatcctagaagtcgcaataaagctagtcgagatcttcaaatctaaacgtgtaagtttgtcctttggccaatcctggtgaccacaaaggaaactgaaggagactgctgaaaaccctgagaccttctgagaaacataggaaaaatgctgtacttccttttggaggggcgggggtgaggggattcctctgtctttctcatggagctcacaggagtcataagtaagttcctctcaggttggagctctgctgtcgttcttgcatttgagcggtccctaatatctttgcctgtggggtacaaagggttagtttacatagttccaatcctgtgaacagccgcc

SEQ ID NO: 6808 - DNA, 490 bp, Homo Sapiens
cggatcaggaactatggataggggcaggagagcatttgtgtttcttcattagaagctgtgcatgttagtctaatgtataagaattaggaaaacaatactaaatctctgatgcaggccatgtcataaatccatttatacttatataatattttcctttttcttattctttcaaccttcatgcttcttttttcatttaaaaaactttggggccagcccttatattaccagatgatttctagtagttgaagcccttgggaaattcatttgtccatccatgctgcctagtttagtacaacactccaaagggaacttccttctaccaaaggcaatgactgattgcacttaaaaaataacttctataaatatgacataatatctggaggccacatttatagctggtcaaatgcactgttagccctacaaaaggctggctcataattatgaggcaataacatgtaaatttccctttctgatgagaaactaaaggtca

SEQ ID NO: 6809 - DNA, 760 bp, Homo Sapiens
tatggtcagctataatactacgcgctattctctcccatttcagaatgttgcttcacttcaagtaaaagacagtaactaaaaattctctttccatcatctgttaccttaaaacagcctaactcacaaaacttcacaacgcaagcccaggtattatggaacccaccaagaatagcaagttcagtgttggctgccatttctaagtggacagtgttaattccctccacttagttgaggggcggagagaggtgtcgaaggaaagagatgagatgacaagtctgaagtggcttcatcacaaagcatccatggctgtgatatgtagctgtgtcatccatggcaacattcgcctgaatggagattgtattatggacattgttctgggatgcctgaggctgatgacatgggacatgccggaaatttatgtatttcctacataaatatgcagctgaacatatttatgtaggaaaattaaagaccagactggtcaatcactggtaagccgtcaatgccccctcaatgattacccttgtcattcgtgccagccaaaacacacccagtccacaatagagacgcaagtaacttttcaaactgcaactgaccgctagaaattgattttagtagttgcctctatcctgtgatattttagaaatcaggttatcatgcataattagctctcctgccccaatcatctggccacattcgacttatcactatacggcagagtctatgactatacaaggaccggcagtgacacgggcagtct

SEQ ID NO: 6810 - DNA, 160 bp, Homo Sapiens
tgggaaacctttagcttttattcttgcctaatatatagcatattttctgcaaaaattatgagttaaatatactttaatgaagatgggtatttaaaatataattatgacaatttaaaaaatcttatgaatacagaaggaaagccagtaaacaaaaaccgat

SEQ ID NO: 6811 - DNA, 1435 bp, Homo Sapiens
  misc_feature (247)..(272): n is a, c, g, or t
ggtgcagttggtcgccagcgagggatgcggagacgcccctgaacgaccatggcatcggcgcgacgagctgaccttccatgaattcgaggaggccactaatcttctggctgacaccccagatgcagccaccaccagcagaagcgatcagctgaccccacaagggcacgtggctgtggccgtgggctcaggtggcagctatggagccgaggatgaggtggaggaggagagtgacaaggccgcgctcctnnnnnnnnnnnnnnnnnnnnnnnnnncgggattctggaccttcagctactatcagagcttctttgacgtggacacctcacaggtcctggaccggatcaaaggctcactgctgccccggcctggccacaactttgtgcggcaccatctgcggaatcggccggatctgtatggccccttctggatctgtgccacgttggcctttgtcctggccgtcactggcaacctgacgctggtgctggcccagaggagggacccctccatccactacagcccccagttccacaaggtgaccgtggcaggcatcagcatctactgctatgcgtggctggtgcccctggccctgtggggcttcctgcggtggcgcaagggtgtccaggagcgcatggggccctaccaccttccttggagacttgtgtgcatctacggctactccctctttgtcttcatccccatggtggtcctgtggctcatccctgtgccttggctgcagtggctctttggggcgctggccctgggcctgtcagccgccgggctggtattcaccctctgggcccgtggtccgtgaggacaccaggctggtggccacagtgctgctgtccgtggtcgtgctgctccacgccctcctggccatgggctgtaagttgtacttcttccagtcgctgcctccggagaacgtggctcctccaccccaaatcacatctctgccctcaaacatcgcgctgtcccctaccttgccgcagtccctggccccctcctaggaaggcccgggtcccacaggcaacacctaagtggaccaacccctctgcctgtcctgccccccagacgatgactgaaggctcctttgacaccttgagatgattctgctactttccagacttttcttacaaagcaaacacttttattttctatgcaaaggtgattcagagaatttatataaaggcgggcgaggggcagccgagcagggagctttgggacagggctggggcccccatatcccccccgggccacctgctttccctcctatggctcccctggaacaggagggagagccaagggggcggcccagcctggacagcgcccgctcctgcctgggtgcacacacggcgggcctgagctccagcatctgagtttgggggtatgagaaacaggggagcagaaggagaagaaaactgcctgtgctgcaaaaaaa

SEQ ID NO: 6812 - DNA, 758 bp, Homo Sapiens
ggagagttcaaagcccgtggtcatgctgatggcgtagcgcagcttctcgcggaggacgctcttcttgctgtagttgggcagcacgagcaggttgaagcaggtggaggaggtgcgcaggcggccgcctggctcccgcttgcggatggtgaagaagccccggaggacgctgcccagagtgtccccggtgtcctgatcgtccgacacctccacgcagcggatggagaatggaggcttgaggtaggcgaatcccaggagcgggggtctggagcagctggtcacgaacttcagaaacatagctctctcatccggtgtgaagtcggaggccagaatatcccagagccagatgatgactctgtgacttccatggaaaccaccgtagtagactgtgtgcttctttaaatcttccagatcaatctcagcattgtcgccagagatgagacgctgcagttcaggagttgagaacattcggatccactcgggtttgataatggaacggaatccgctaatgagggcagctgtttggttttttatttgagtgtgcattcgaaaatgtgccatcagatggatgtagctaattttattttcatttgttacaggaatggtcttccctccaggaatcagttcatggcaaacaagctgacccatgacgtcctcgtcgtaagacagcgtcaggcccaggtcagtgatgtcccatcatagcgcttgatggaagtgagggttttatagaactcggagtccagagaaggcagttcatccac

SEQ ID NO: 6813 - DNA, 850 bp, Homo Sapiens
  misc_feature (825)..(825): n is a, c, g, or t
ttgacccagcctcaccaggccgggcccctctgctcaggaccaggccccaccccagtgccgccctgaggcctggcaggggcctctggagcccgcacacccctctccttggcagccccctccatcctgggcccttcgtctttcccacaggtgtgtccctcaggactttgcagccagggtgtggccggccgcaggtttcggatgcaggcggccggatcgtggggggtcacgctgccccggccggcgcatggccatggcaggccagcctccgcctgcggaggatgcacgtgtgcggcgggtcactgctcagcccccagtgggtgctcacagctgcccactgcttctccgggtccctgaactcatccgactaccaggtgcacctgggggaactggagatcactttgtctccccacttctccaccgtgaggcagatcatcctgcactccagcccctcaggacagccggggaccagcgggatcctgcccgtctgcctcccggaggcctcagatgacttctgccctgggatccggtgctcggtgaccggctggggctatacgcgggagggagagcctctgccacccccgtacagcctgcgggaggtgaaagtctccgtggtggacacagagacctgccgccgggactatcccggccccgggggcagcatccttcagcccgacatgctgtgtgcccggggccccggggatgcctgccaggacgactccggggggcctctggtctgccaggtgaacggtgcctgggtgcaggctggcattgtgagctggggtgagggctgcggccgccccaacaggccgggagtctacactcgtntccctgcctacgtgaactggatccg

SEQ ID NO: 6814 - DNA, 1254 bp, Homo Sapiens
  misc_feature (98)..(98): n is a, c, g, or t
tgaaggtccctgatgacccggagcacttagctgccaggaggcagtggagggacgagtgcctcatgagactcgccaagttgaagagtcaagtgcagccncagtgaatttcttgtaatgcagcttccactcctctcattggaggccctatttgggaacactgcaagcccttaatcagccctctgtgacataggtagcagcccacggagatcctaagctggctgtcttgtgtgcagcctgagtggggtggtgcaggccggtagtctgcccgtcactttggatcatagccctgggcctggcggcacagcagcacttgcgttctcggggctgtcgatttcctgccacctgggcagataacctggagatttccaccttttcttttcagcttgattgcatttgactatattttacagccagtgattgtagtttcatgttaatatgtggcaaaatatttttgtaattattttctaatccctttctgagtactctggggccctgcatttatgaggcacctaccttcattttgctaacgcttattctgaataaaagtttttgattccttaaagacgaaaaaaagaaatcgtaaaccaagaagcaaagaggagcgaggaggagcgcccataaacagcaataaccacgggcgtgcgaggcccacaatcggttcggctggcactgctaccagagggagggaatcccaggaggaggccccgcttacaaagtggcgcaaggctaacccaaggatgacattgaccgggggcccgcaccccattgttaccagatcggtccccgaaattggagcaaaagagggggcctgcctgtgggcgaacaaccatcgggataggaaggaactccgcgtaatcgaaggcaggacggggagataccaaccttagcgctagagatgcgccccacacaaatgcgaggattcaaatgagacgctgaaaagtgggggcgaaaactaagtcccacagcatctgttgggaaaaggtgcacaatagacaagcgcatttgaagagaaacagttagcggggccacaaaatttggccccattcccaattggcctttggtagaaaagaggtttgccccgtccattgcaccgatgtgcaacatatagtattggcctgtaaaagcagatccaaatctataacgtcgaagcggatggtagtacactcgacaaaagaaaagcgagtagtccgaccatagcaataccgccccaacacatcggacgctgcaaccacgggacaaaatcaggagatacac

SEQ ID NO: 6815 - DNA, 477 bp, Homo Sapiens
  misc_feature (83)..(83): n is a, c, g, or t
tctttcgtgaatgttttgattccctgaggctactttattttggtatggctgaaaaatcctagattttctaaacaaaacctgtntgaatcttggttctgatatggactaggagagagactgggtcaagtaagcttatctccctgaggctgtttcctcgtctgttaagtgtgaatatcaatacctgcctttcataatcaccagggaataaagtggaataatgttgataacagtgcttggcacctggaagtaggtggcagatgttaacgcccttcctcccttgcattgcgccccctgtgcctacctctagcattgtaacgaccacatagtattgaaatggccagtttacttgtctgccttcctttccaagaccgttggtgcctagaggactagaatcgtgtcctatttaactttgtgttcccaggtcctagctcaggagttggcaaataagaattaaatgtctgctacaccgaaaaaaaa

SEQ ID NO: 6816 - DNA, 454 bp, Homo Sapiens
agcccccataatggaggaaaggaaggatcctgccctgccagcaccttgacctctgacatccacaattgtaagcatgaggttttgtgtagtcaccatagaaaactcacacacataagaactctgtactgattcaacaatagaacatgtcacacacgaactggaaactgattctgtgggcgacaagagtctatagtaaacgttatgacagattctttgaatgcgctaatctcagactggactaaagttgggattaaatttaatttgtacttgagttcagtgcattgctgttctgggcataggaaatccaggttgctggtgatgaacagctgaaaagagctgtgtcaccatggttgtctctgtcagtcatgtgaccacccttacccttgtaaaatcaagcaagggagagattattttctaatgtaaatgaaaataaaaaataaagcagcgggcagca

SEQ ID NO: 6817 - DNA, 464 bp, Homo Sapiens
actttataaacaagaagtttaattgactcagttccacatggccggggaggcctcgggaaacttacaatcatggcagagggagaaacaagcaccttcttcacaaggcagcaggagagagacagtgacagcaggggaaactgctgtctttaaaaccagcagatcttgtgagaactccctctctattatgataacaacataggggaaaccacccccatgatcccatcacctcccatcaggtccctcccttgacacatggggattacaatttgagatgcaatttgggtggggacacaaagccaaaccatatcagatggtgaaaatgttatactaaaaatgcacagtctctacaaactccctggtttcttttctgtcagtgaagtcaaatatctacacaacggccctggacaatgctacaaggaggacacattaccttaatcatctttctgtcccacttctcagccaca

SEQ ID NO: 6818 - DNA, 1039 bp, Homo Sapiens
  misc_feature (51)..(61): n is a, c, g, or t
tacaaggggagcgagtggtaaggggccacggagctgtcaggcagccaaacnnnnnnnnnnncaaacaagggaaaccgatgcggggtatgaccaggggggggacacatgtccacacccgtgaacacaagcggggctctgggagggccggcgcaaggcatttctgaagacccgttggggtaggcaaaggggttgaccagacgcggtgaggcgcccccttagtagctaccgccgcgaggcgtgcacaccgcagtgagtggaacgaaagagctcagccccatgggcttgctgccttgccaaccccctgcaagaggggaaggcaactccgtgtgcctggggttcccgagggatgctgctggcatgacctgggcccacagagcctggctttggtccccagcattgcagtatggtgtggtgtttgtaggctgtggggtctggctgtgtggccaaggtgaatagcacaggttagggtgtgtgccacaccccatgcacctcagggccaagcgggggcgtggctggcctttcaggtccaggccagtgggcctggtagcacatgtctgtcctcagagcaggggccagatgattttcctccctggtttgcagctgttttcaaagcccccgataatcgctcttttccactccaagatgccctcataaaccaatgtggcaagactactggacttctatcaatggtactctaatcagtccttattatcccagcttgctgaggggcagggagagcgcctcttcctctgggcagcgctatctagataggtaagtgggggcggggaagggtgcatagctgttttagctgagggacgtggtgccgacgtccccaaacctagctaggctaagtcaagatcaacattccagggttggtaatgttggatgatgaaacattcatttttaccttgtggatgctagtgctgtagagttcactgttgtacacagtctgttttctatttgttaagaaaaactacagcatcattgcataattcttgatggtaataaatttgaataatcagatttcttacaaaccaaa

SEQ ID NO: 6819 - DNA, 552 bp, Homo Sapiens
cgtgctttcaaggattggaatatgactctcaaggcacacggaacataggagcaccggtgagcgttatacaagtgccccatagccgcccccattctccacccactgaatcatgttatctggccatgggcaccccacgtgattcttacgggtatcaggtttgaaaatatcagagttataggaggactaaaatcctcccaggttcctgtgacatcgcaacggaaaaagccttaggaatgatctagacgatcatcatctgagattgtgggctcctccgaagttaccacacaagtcccagatcagaacactgagacgggggctagctcagtgccgagtggcctgcgcaatccgcggcggactccggcgcatgcgcaagatcttcttactgcacggaggccttgaagccccgctcccacccaccgcaggaatgcctctccttgaacgagacacaaacctttccctcctccagccgacagcatcagcccataacctctaaaactgcacaccatcacaggtggtggactcccacaaatggcacactctccccagaactgt

SEQ ID NO: 6820 - DNA, 506 bp, Homo Sapiens
gcgtacagcatggaaagaatgacatcatctgagggaaatggaaaaggaaggacaagggtctaagaacaagacctgtgaaaatccaacatttacacttcgaaggagtcagcaaaggagacagagaagaaacagttggagagttgcttcatgatcttaactaatctaggcttgtaactttttttgattcacctctttctagtagcccttcctgatgggcctgaattaattctgattatatctttagcccttgaattcacatttctccctattacttgcctgtatggtgccttttactattttgagctattcctatacactgcttagccaagcataagttttcctgggttgctatgggaaatagagttgatagaagtattcaagcctggagtttaggaaacagtttttgtaggagaaatgtgaaaacccctaggaaaaactgatcgtctcccttctccacaatgtttctgctatcgatgaaatgtgacagtaaagtttagaagcagcca

SEQ ID NO: 6821 - DNA, 134 bp, Homo Sapiens
agcgtgttaaaggattggaatatggaagtcaggtaatgtgagtctaccaattaattttttcccaacattatttggacttttctaggttcttaacattttcatatacattatagaaacaatgtgtcagtttccat

SEQ ID NO: 6822 - DNA, 544 bp, Homo Sapiens
ctatataactttaccctatctgaatgggagtggactgaggaagacctactcctagacttgtattgctgcctgcaatctggaacagcacaagaagattctaatgtccctttcagaggtgaaaaaatttgggtataaacggaaagaaggagaaaccatagctgaaagtaaagaagtgaataaatgagttagggttactaactgaggaaaattcaatgttaggttaacagcccaaaagagtctaagaacaaaagatgatactatctcaagctcaattattccagacgcatgaaagtatgaagctgtgtgtttaccaaggccaatcctgcttttggtaacttgacaagatttaggaaacttgcaaaccggaatggcctcatcctgggagacattcatacaatatgatgtactggactaatgattaatgactgcatatacaaatattgtctgatataaaagatctgtggtcacaaactagggggtgacctgtggtgttatgatatacatactggttttaattacggtttctggcttacactcccatagc

SEQ ID NO: 6823 - DNA, 1010 bp, Homo Sapiens
tctagacgatccaccttatgttctgacccacctcatttctgttgcagtcatactctgtataatagacctggaatcttgtcagggggtggggtaactgtgcaggaattttaataaactggacggatgcactgatagggagaaggtcggccttgtgctcacaggtaagcccacactggtactgccagttcactgaggagaaccttgtctctacaccgagtatctcctgctgagtaatcccttccaccgcgccagcatccgagatgaggatgcggatgctcaggtgagcaggaatatccaggcacatgccgttcacactgctagccagcgggtctgcacctggatcaggggcatctacacgtattatttcgagccagccatcactaagatcagcgtaatcggagttgcctctcattgcaacgtgagtcgcttgtattaatgaatcaagtctttcaacagcattctccctgagctgagtacaattttcattaatcccgacttctaacaggcatccagagagtacattttctccaaataaaatgggtttgaaagttgctgatgtacacagaccccttccagccgattgccaaagatgtaaagtcgtgacattattcatcctgttgatatttagagctcggacaggcttgccaagttggtaacctggatttccagataattcttcttcattaccactattatagcttaaaaattttactacaaatctctgtgtcattatccctttctggtgggcattaatctctgccctaaaaagtggtaacatttatttcactgatggtattattattccatttgaaaatataatgttcgtccacattcacaattctgggggttgatccgttatttaaaggagtttctgtattggtgatgaaattgtcctaggtcagttgtttctctcatagatcacttttgttgtaactatgcctcttataggcaacattctttatcttgcgcagtggataataccattcgttcttggcatatgttccagatcc

SEQ ID NO: 6824 - DNA, 278 bp, Homo Sapiens
attggagaaaactgggttaaggatacacaggagtactctgcactgtttttgtgacttcttgcaaatctatatttcaaaacgaaaagtttctaaaaaattgaaatgacataagatataaactgagaaatttcactcataccgtctcttcaatgtagccaaccgctttcattggtttcaatataattgtccagtgttcctttatgcaaataaaaagcacatttaaatctgcatttcattcccttccctgcatttatccacaaaagtaagtgtaccatgtc

SEQ ID NO: 6825 - DNA, 535 bp, Homo Sapiens
atggaacttagatgtgtcatagctgttactcgtcatggggatcgaacaccaaaacaaaaaatgaaaatggaagtgagacatcagaaatttagatctaaagaaaagtgtgatggatataaatcaggaaaattaaaactcaaaaaaccaaaacagttacaggaagtgctagatattgcacgacagcttcttcatggagctcagggcaaaataatgcattctgcacacattgcaagcaaaaccaagccaaaacttgaacaacttaagactgtattcagcagcatgtcatggtcatattcctggaataaatcgtaaggttcagttgacctatctccctcatggttgtcctaaaacatctagtgaagaggaggacagccgaagagaagaactatctttactttgggttctaaaatggggaggtgacttaactcctgcaggcagggtccaggctgaagaacttggaagagccttcaggtgtatgtatcctggaggtcaaggagattatgcgggatttcctggttgtggtttacttagatta

SEQ ID NO: 6826 - DNA, 378 bp, Homo Sapiens
ctgtcaccgttgaacatccatatcaattaaaagttacaaaaaaattcatagtagtgtcacaacaaaactatctgctttcctctgatcgcacttagaagcagagtagatggccaaactgggcaaagattcaaagcaaagaatactggaagaaaagtgattgaagagggaactgaagctagaggagagaatgaaacacacgaggtgctgggaccagaaatcttgcatcacagcttcaaagctaaagaataacacgtgctgggaaaaggagaatgagcattggaactgaccacggaggctacagtcagaaaagtaggatattaagcattccaactcacgagttgttcttagtcattaaggaaatgcaaatgcctcccacaa

SEQ ID NO: 6827 - DNA, 372 bp, Homo Sapiens
atctggaactatggaggaaggagacctagtactctactttgggctttctctactggttaacattgtaaatagaattatttaagcctgtatgtactttgttgtcagcaacttctaggtctttctatctttgccacttctagttcttcctctcttacatatgttacatatgcacatatgcatgtgcacaatcactggtatgaatgcaaagtcaaaagagaaaatataaaaacagcttattttccaaactgctttactaagccctctgcaaagttttagttctttctgctcagatttatgaaataaaaacttcctgtgttaaatgtcaaaaaagtccagcaagatagccttgattttatttccacatccgtaata

SEQ ID NO: 6828 - DNA, 551 bp, Homo Sapiens
aggaggattgctacagctgaggtctcagctggtgcagcacagaagtgaaatagggccatggctatctgaagccatatgtgcttctgtgtggctatggagtcattccaggagacgttcacaggatgatttgggattacccctgctattgtataccatggacattctgtgtttatattggatgctatttgtatttgtcaagcatagtctggatgcttatccacattttggtataaggccagaattgaaggcccaatatgatgtgtcactttgacatcttgtgaaagtgggacaaccttaacaaggtgtgatgtacaaatctcattcacactctgctctcttgaataatgtatcctagcctaacagcccgttttatcaaggtgataaggcagggttccaggttgttatattttgtggtgggtttcaattccatccctaccagcagagttatggaaacaaaccattgcatattcccaagggaatcatgggccgttataccctcttcatcttgtgaaataattttatttgtaggcgctgggtgtggtggctcaccc

SEQ ID NO: 6829 - DNA, 533 bp, Homo Sapiens
agccatttcatcgagaaggggacagaaggagaaatacacacatgtatacacaaacagaatggttgagaaaacgttttaataaaatgtgagggttgtatgtgtgcgtgtatatatttacacttaacctctaaaattctcttctacagtatctctgttatgaatatgatggaaaagcaacattttggtggtgagactattgttaaaataaatttgagaaagacgaaaattttgtgagtcttgataattacaagtcaacagctatcgaaagttagcacagcttgtctgtggtgctgtttttttccccactgcagtggacttatgctgttttcatgtttagaaacaaaaaggtttcatgtgattcatgtgtaagatgcacagtatttgacatcctgattatgtaatccctattccatctatccagtcttacacttatggttggcctcaaatctattgcatttatgataatgtattatatctagttgagtttaatatttttttattagcctgtaaataaagatggcatcttctacatt

SEQ ID NO: 6830 - DNA, 1124 bp, Homo Sapiens
tttcggagcgtaggggtgtttattcctgtacaaatcattacaaaaccaagtctggggcagtcaccgcccccacccatcaccccagtgtgcaatggctagctgctggcctcctccatctggtccctccagcctaacagcctcctcctgaagccctttccttccaggctccagaagagcaggagacaaacacaccccactgaggcccagctttaataaagtgcctgatacagagccaggggacagaacccaggtgatacagctcccgacagccatcccagaacgacagagggtcgagggagaccctcggaagcccccagtgactccagacaaaggggcagccccaaaggcgcctccaacagttggaaaacctccctgctagagggcagaaaaggaggcctggccctttaagagccaagctaatggcagctggctgaggggctaagaaaacagcttaaggttttgtcccgtttccttcagagtcccccaaccctgaaggagttttgcgcaaaaataccctaaagttttccaggaggtggggaggtcaccccagaccccccaaagagctgagccttccaagcaagggatagtggctgggagggtccagacggggaggacagacccgagggcacttgtagggggaggtggaaagggtctcagactccgcactggaaactggtgtgggcagaagggtgcccagagagggggaagggtttgtccaaggtctcagggcagagccaagacctggatgccagcctcccacctctgggacctccccacccgcccccacaacctccacaaccccacaaattctctggccgggcctccagacagcttctacccccacacaatctctctttctggtgctggaaattgagggggcaacaccaagttcccagctccttgggacaggaccccattatcccagcagagtggggagtgattggggggtccattcctggggctctgaaccaaggcctcatgggaaaggacatgtccttagcctcagattgactcagaaataccccctctaccctgattgactgtgcgcagaccctgactgcacaagaaagacacccctgattaaccacatagactcccaaatccctaattcgccaacagattcc

SEQ ID NO: 6831 - DNA, 447 bp, Homo Sapiens
cagtacgcagactcaaggcttgccgccgccagcggcctgggcgaggaggccgagggctccgagcagagcccgtcgcccacacagctcttcccctggatgcgcccgcaagcagccgccggacgcaggcgaggccgacagacctacagccgctaccagaccctggagctggagaaggagttcctatttaatccctatctgactcgtaagcggcgaatcgaggtatcgcacgccctgggactgacagagagacaggtcaaaatctggttccagaaccggaggatgaagtggaaaaaagagaacaacaaagacaagttccccagcagcaaatgcgagcaggaggagctggagaaacagaagctggagcgggccccagaggcggcggacgagggcgacgcgcagaagggcgacaagaagtaggcttcagctgggactgccagggcgcggccg

SEQ ID NO: 6832 - DNA, 672 bp, Homo Sapiens
  misc_feature (408)..(408): n is a, c, g, or t
  misc_feature (466)..(466): n is a, c, g, or t
gcggccgcaggacgaggctgaggcggcagcggacggcgcggggcccgggggcgcctccgaccaggctctccgcgcggagcagccggaggcggagacgccgggttcccggacagtactcagcagccaggcgcagggcgtcgccggcgcggcccagagccacggtgcccttggcctccaggcgctcaggaagcggggccctggatgacagcgggctcgaggagggggcccgggccggggactcggatcccgcgcggcgctcctcgtcctcgttcccgctggagacggagcggacgcgggccaggcggcgactccttccagcccgcagcgcgcgactcagcagcccgtcggggacgcgcaggaggcggcagcggcggggccccgcagcgagcgcgtcctggggcaggcggngaccgccgggggccgcgggggtggccgggcccggacctcgcgggccgcacagggtccncaggggggcgtccgggcctccgccgccgccgcagctgtgggcccggggccggtgcgcgggcgggcccccgagcaggagcgactccttgcggcgcgtgtgcgggctctcgagcagcgcgcagaagccgtaggtggtgcgcacacggggcaggtggcgcagtgacagcgctgcctgcgagcgcgggtcccagtccgtgcgggcggcgt

SEQ ID NO: 6833 - DNA, 846 bp, Homo Sapiens
  misc_feature (733)..(747): n is a, c, g, or t
  misc_feature (832)..(832): n is a, c, g, or t
ctggtctacctgtaccagcggtggctttatcctgtggataaacgcagagtgaacgagtttggggagtcctacgaggagaaggccacgcgggcgccccacacggattgaaggccgcccgggctgccgccagccaagtgcaacttgaattgtcaatgagtatttttggaagcatttggaggaattcctagacattgcgttttctgtgttgccaaaatcccttcggacatttctcagacatctcccaagttcccatcacgtcagatttggagctggtagcgcttacgatgcccccacgtgtgaacatctgtcttggtcacagagctgggtgctgccggtcaccttgagctgtggtggctcccggcacacgagtgtccggggttcggccatgtcctcacgcgggcaggggtgggagccctcacaggcaagggggctgttggatttccatttcaggtggttttctaagtgctccttatgtgaatttcaaacacgtatggaattcattccgcatggactctgggatcaaaggctctttcctcttttgtttgagagttggttgttttaaagcttaatgtatgtttctattttaaaataaatttttctggctgtggcatttttcttgacctggtataatgaaagtatttcagatatttgagtttaacccttttccagaaagtaatacatgatatggatttatttatgcattaaaagagcaaatttaaagagccctttgccnnnnnnnnnnnnnnngggcgccgctcgcgatctagaactagtcgacgcgtggtcgacgatatcccgggaaccgagcgtacagctgctttatacccgcggnttataggtacatgc

SEQ ID NO: 6834 - DNA, 494 bp, Homo Sapiens
aggtggggtggggtggcccaggcagcagaaggttccctgaggtcccagagcctgttccgttggccctgggccgaggcccacaggtgctgcccttgctgctgctggtcgggcacccaagtgcgtgaggggcttcagcctgtcccggggttgcctgaggcagagcaagacgggttctcacccctgacttctggaggcttcccttgaagctctgtgcaaaaggtgggagacagagctggacctgcaggggtggtcccgccacaaccctgcgtgtggaccctggcaggggggggtgccaggcccctggaaagcaggggttaccgttacgaggctgtggtccggggcaagccaagtacgaagcagcagccatcgcgggctgcatcatcccccagccaggtccccaccaggcctgtctcccagcgtttgtctaataaacgcacccctcctaaaacacgcctacgaaaacagctcctctcctggcacatctgccaacactg

SEQ ID NO: 6835 - DNA, 492 bp, Homo Sapiens
  misc_feature (37)..(37): n is a, c, g, or t
  misc_feature (56)..(56): n is a, c, g, or t
agttatatagttagtataatttttaaaacttttaatnacagcatatggtaaaccanacgggaaattagctattttacttcattattttaaagagttctttttatttctttcataattggatcaacaactgttaacctaaccctgggtgggcatcatgcaatatatagaagtacgtgaaattttctgtgtatgaattgctgatactttgcaaggcattttcaaatccatcaccttatgagagcttcacagctagtctgaggtagttacttcattggaggtaaaacttaaaacaccaagaaagagcccacatgatttgcctagggtcattcagtaagtccgtgatggagctagaacttgttcttgtcagttttttgttctagtcttccctttcatggaggcaagaataaccattatgaaacagttagataatcataaaaatcagcatacaataaaagacttaaatgtcacaagaaaaattcaaaacctttagct

SEQ ID NO: 6836 - DNA, 224 bp, Homo Sapiens
taaatatttttcaaggttttattgcaaaccaaaatcagtttatcacacacaaaaaaagttgtgtgatgggatgagggaaggattgtacgtattataaccatgttaattacagtacattaaaatggtggtttacattacaaataagcctgtaagtttaaatatactagtgttataacccaatgtacagacgttctttatacaatacatacaattatcaggaatgc

SEQ ID NO: 6837 - DNA, 278 bp, Homo Sapiens
acgatctctatacggatctggactatgtaaaatatgtaaggagaagtagaaggtacataaaaataaaacggttgtgaatagaatattgatgataggaaattgatttttttctcctattcagttttaatataatattgtggtacaaccttttagtaaaactaaattatttcatgttcatacggtttcctgtacaaagaccttcatgcacttattattttctcagcagtacttattttcaaaacagaattcaattcaaaacattctattttgttaattag

SEQ ID NO: 6838 - DNA, 355 bp, Homo Sapiens
gaaatggaactacagttagtggggcagtagagccatgggaagggctgtattcactccgagaccaggacattctgtgtagacacagaagaacaaacactaaggacaccttagagaccagtgcaagaagtgacattatggtgtgtgtcggggagagacagaaagataacctggctctagaaatggaatgaaataaaccctcctttaacacaggaagaaaaggagagagaggaggtgaaaaagagagaagcagtgataaaaagagtatacaaaaacaacttaggaggttaaacaagaaatcacaagattaggaataaacaacttggcagagccgaggaattcagtcatagcaggtctt

SEQ ID NO: 6839 - DNA, 382 bp, Homo Sapiens
tggggcaggtgaggtatgtgggtgggaagggtgttgtctgctggacttccattcatctttcaggaaggcaattaagtttcctgctttgggtcttctatttcagaacctcttcttttggtgggttctacagctttctggaatgtatgtaaacacctcctctctgggcttacaacttcaagacttcctcattctttcaaactggccactttgtcctctcccctccttatccagataggtgctgctcaccaagtggagtgaattgagcacacctggaacttaagagtgtttgacggggggtttaacctgtccgtgaatcccagtatgttacagtcattggcatacgttagcatctcctggggagtttagaaacccatactttcca

SEQ ID NO: 6840 - DNA, 636 bp, Homo Sapiens
  misc_feature (362)..(370): n is a, c, g, or t
gtgcctaacaacggatcggaactatgcaaacaatggtacacttagcaatgacaagttagaatcttccagagtttatttattaatgtgcttctgctgttgtatattaggtatacaacttaggtgatgtgtgaaaaagcccattaactttagtgagccttcatatgctgacgacagatatattttatattggtccctgggggaatgttaatgtgagctattgtctatgtctaaaggaaaacaaccactcaggatattagctagtggatacaactgtgcttgcataaagtatcctaaacatccatgtccttcaactcagagtgaatgtggccattgataagtggcacctaggaaagtagagtcannnnnnnnnaaatttgggttttaaattaaagtaacatatagtttaaaaggccaaatggtgctaaaagacttataaccaaaaccagccatctccggtgaccctgccccctactctcagtgtcaactgttttgggtattctaagtaatatgtatgtacttctctctgggttcattcatgttagacattatctgtgtacttttaattttcttatgctttcccttcctctttctccctaatcccttcagaatagctatatcataaatttttattaaatc

SEQ ID NO: 6841 - DNA, 737 bp, Homo Sapiens
taacatggaactatgaagtgtgaactcggtgcctactccggcatagcttagtgcctccctttgagagtcaggctttggggtatcttttgctgatcatatttgggcacaggtggtgtaaattctactccaaatgaatgccgttttctctcacccattctacagtgagcagccccaaatgtgaacactgtctcttgactatggctgggtgaccctgggcagctggtgaacctcatcaaatttccatttgctcatggggagaaggtggagaatcagatccacaccgatcaagttgtggagatcggtggggtaatacacggagtatccagtgggtgcctggcacacagaaagggctccacaaacccttgccccttctcctcaccatattgccgaagggtaaagggaaaggcatgtctggacctctaagaaatccaaaggcatgagaagacagtaggacgggcacccttgggagcgttttctctcacaaactaaaacaggatgacatgccgaagtgttctgatctagcagtcccagatttcccctcaggcaaaacttccctgagcagaaccatagctttgttgcgaaatagagatcagtcacctggcccattaggagtttaaagagtgcttatcctgaaatgaaactgctaacataacgggcctttggctgaacgtactaggatggaaggctttatgattcacttttcattcactgatatgacacacagatactataattaa

SEQ ID NO: 6842 - DNA, 411 bp, Homo Sapiens
gtgatctgccactataggaagatcctgctcatcagacccatgatggtcttagcaaatgccggcaatctaccgagagctgcgctgtgtacaccccgtggtcgaggaagtcggcacacagaggagtactttctgcctcggatgatacaggacctgacaaagcaggaaaccgtacccttcggagatgcggtgctggtgacatgggacacctgcattggaagtgagatctgtgaggagctctggacaccccacagcccgcacatcgacatgggcctggatggcgtggacgatcatcaccaacgcctcgggcagccaccatgtgctgcgcaaagccaacaccagggtgtatctcgtgactatggtcaccagcaagaacggtgggattaccttgcttggcacccagaatggttgaac

SEQ ID NO: 6843 - DNA, 484 bp, Homo Sapiens
aaaaaatgggaataggaggtctagacaaggaattttcagatattttccgacgagcattgcttcccgagtatttcctccagagatgtggagcagatgggttgtaaacatgttaaaggcatcctgttatatggacccccaggtggtggtaagactctcttggctcgacagattggcaagatgttgaatgcaagagagcccaaagtggtcaatgggccagaaatccttaacaaatatgtgggagaatcagaggctaacattcgcaaactttttgctgatgctgaagaggagcaaaggaggcttggtgctaacagtggtttgcacatcatcatctttgatgaaattgatgccatctgcaagcagagagggagcatggctggtagcacgggagttcatgacactgttgtcaaccagatagctgtccaaaactgatcggcgtggagcagctcacacatcctatcattgaatgaccatagttcagcatccc

SEQ ID NO: 6844 - DNA, 416 bp, Homo Sapiens
ccggtctccttaaaccgtaatataaacgcactattatgctttagctttaccgtgctttcttgagaagacaggttaaatgctaatatatcctcataagccacagacacaggtctagtagtttgctagaaccttctgaggcttttcattctccagatctgaactgatcttttctttgtatcttggcaccccagcatctagcacagatctaggcattaggagggcattcacatacattgatgatgtgaattaatgtggcttgaaatgaaacaggaccaagttaaaagaaacaagagaaccatgaactttagctttttcttgggactcgaatcctgtcatgttatgtaggaaaaatgattctacatgtaccttccttccccagttgtacaaagtacaatatctctgataaaaagtggtgc

SEQ ID NO: 6845 - DNA, 382 bp, Homo Sapiens
tagtatataggacaataccctcctcccaggacaacttcaatctgagggtagggcaatgtgcagacagggaaggatgtcaaacatggtaattttaatgatgtaatttatctcaaaagaatgattatggtggtataattaacacttcatatgcagacatttccatctccaaggagctctgagagccttaaggatgattatttaaatatatatcacatccattgctggagacaaggtctattgttttaaaagataattaaaattccttcccctttggaattaagaagatttcctataggatgaatattttgcccaccagacacatgaatagatctaaatctgggaattcctgacacagggctggaaaagatcttgaagagcaatc

SEQ ID NO: 6846 - DNA, 405 bp, Homo Sapiens
ctcagggtgaacatagtcaagttactttaaaagtgataaaagtgtttttccatggtgaaaccttcagtatttggctgaatgtaaagtatgttgaagtggtatattgatggtaagttgttaatcactaaccttgtttgcacttttgtacaccactgcttgcactaggatcttggtgtgaattttcaattgttttacagtgtatacagattattaaggataatttatataaagatgtttctgtttaactttgtgtgttttacaacaaagagctataatagatggttaaacgtttttgaattgtgtttatatgttagtttgattatgttctattatcttttcacctgccatgaatttgagtgttaggaagggaaaaataaaatactaatctggttttgaagaaaaaaa

SEQ ID NO: 6847 - DNA, 402 bp, Homo Sapiens
cagggatagcaggatatgctgatagaggccacttacaaggtccccatgagtccagaagatgtggctgagcaggagggcagccccatcccgcagagtccagtggtcattcagggggttgatggaggcagccagtggctccaggacacagtagaggacactgcccaccagacagcggacatagggccccaagcacaggtgcggattacgaaataggctccgtgccacctgcagcagccggtgcagttgctccaggtcatggcttacagatttcaccccactgaccacataaacaaagtaaggcaggagtgccccaatcttggagttcgtctgcaagtcctggagtgcaaccttcatcagttgcggatcatcccctagcacagcacgagtcacctgcctcgtgcc

SEQ ID NO: 6848 - DNA, 605 bp, Homo Sapiens
gtttgtaaaactgcctatcttaattttcttcaagcataattttaaatgacttaacatttctcttatacataaggatgtcctttacccaaaatgaggagatttggaactgaaactaatatccagggacacaacattgggtatcatcaaaggcccacctttaacatcaaggacaagttgatcactgagataagagctgatagttccatttttattcagtctccacttctgcctgaattgcccatgttcagtccatagagctactttagctccaggtgtgtcccggccaccaatcacatcaagacatgtatcactggcctaaaagggttaagaaatgattaattggcagtagtatgtttgctaaagtaagttgaattaggtcccttttatcttaggtaaacaagtcatagacatgaagtgtgtgtgtgtcttatctaaaaaaatactatatagtataatttcagtaagccttttttaatgtcttctttacggctgtgggtaggagatggtacagaaataaaccaactgaaatagaggtacttgtttttaataggatgtctacatctgacaacagatgttcaataaagatttggtgaattggaattaaa

SEQ ID NO: 6849 - DNA, 436 bp, Homo Sapiens
tttggaggtgtccttatgagtatatttatgtgtcacacacacatgtacacactcaatgctggacgggagggaggttgagacggacaggacaggaggaggcacccaggtggcactggcacaggggaggagaggggacacagcgagtgtgtggccccactttggccccccaccgcctcccaacaggaggtggacctggagctggaagaacaggaaatgcttattctcttagaggacagtttcaaagtgcagaaatttctcttataaaaatcctcttccctccatgctctgccccttgctgaagaccagccccctgcgcaggctgtccgtgaggctggggcaagacaaggtcaaggggaagggcgtaaggccaaagcactggaagcgaccagaacatatgtgcctaaggatagtggctgccgggcgtcagggggtggcc

SEQ ID NO: 6850 - DNA, 441 bp, Homo Sapiens
  misc_feature (313)..(321): n is a, c, g, or t
ccgagcaggaatatccactttatttggactccatgacaccgttcctatgcccttgactagatgtgaatgtattatacattgttctagatttgggggaaaaaaatctcttatgacataaaattggtagggaatgggtttatcagaaaggggatacaaaacataccctaagctccaaatcattcacttcttcttgggtaaagagctaactgaatgaaagaaattgatttaacacttaaattagacaccaaccacctttattggctgccaccctaaattagttttccttaaaacagtaatatttcacttttactgnnnnnnnnnccattaaagcaacaccattgtgctgcaaaactaactctatgcaattaagtacctgatacatgttttctgcttttaacaagtgatagaaaaggttacatcatctcattaagaaaacatttt

SEQ ID NO: 6851 - DNA, 355 bp, Homo Sapiens
aagagagcgcaaagcagtttattctagcgagcaagggagtgagcgagccaggtaggcgtccaggaaggagcaggtgtaacccggcggtcagtggagcctcagtgaggtgtgtcctgttttttcctgcaatcgccgcagaagacaccaatggtcgcgttcaccagctggatcccacacagtactatctccaggcaggaggcggccaccagcagcgagaagagcgtcacattccaggggaccacgcgagggggcgcctcgcaccgatcccatagagtgcggttgagcaagtaagctcccgcggtgtcttcagaaagtaggtagccccactcgccgaacataaaaagtctggttccat

SEQ ID NO: 6852 - DNA, 412 bp, Homo Sapiens
gcggccgctgctctccggcaccagccacttcatgaccatgtccacgcagctcttgcggtaggagctccagacactgccgctggtctgccctttgacctcagtcaggtcgcctacactgactgtctcgaagatccctgtgttgaggtcccatgccaccttgaggctggtgtgataggtctttggtcggagctggccctcctcagtgggggacgggaaggccaggagcagcaggccaatgttgatgaggacctggttggtttctgggcagacctccagaatgacgatgtcatagtcgctgaaagaacagaactgatggccccaggtagcggtcgtggcggatgacctcattgataacatattcgaagtctagtgtgagctgctccactgtcaggtactggccctggacagcagt

SEQ ID NO: 6853 - DNA, 165 bp, Homo Sapiens
tcatagatgtttctccctgatcattgtcttatgcaccagaccccatacctcacacctagtaaggacatcagtctagtaaccacccatttcataatcatttttctccttatgattgaatcactttttcagcacacaaatatactttatttctcccattaaaattct

SEQ ID NO: 6854 - DNA, 1070 bp, Homo Sapiens
  misc_feature (93)..(159): n is a, c, g, or t
aggcattgtgactatagaaccgtgttaaaaaaagcaggctggtacgcgtccggtattatcccgggatatcgtcgaccacgcgtcgccacgcgnnnnnnnnnnnnnnnnnnnnnnnnnnnnnnnnnnnnnnnnnnnnnnnnnnnnnnnnnnnnnnnnnnntgggacctaaatggcaaataagatgctaatctgtggttgcaagccccagtcctcttgaatagtgatgcctatctgtctgtgtcgggacatagtaaggaagcccatgtctagtctggtacctttaaaccaggccatctccaacttttcaaaatgactcaaaagttgagctagccttattttaaaaactaaaagttcaaaatcagtggtgacatgaggacttatttatttaaagtgcttaagccttggttttagagtttctaagagacctagtggaatttgctattatgaaaagcatgaaaagattaagaaacctggctaaaggtcaggtgcccagcttcgaggaaaagttgggcttttagggaccgggaagcattaaaggcacagaaactttacattttgggggtcattttgtcgagtaggtgaagtgagggatttgggcttgatatttggctgccccatctctatgtgggaactcaaagttaaaaacccactgtaggtaaattagaagggcagctcttgaaatctgggccagctatatcccttctgtgaaggtgctaacaaggccacgctaatctgtagccctggggtgggagctccagattaatgtgagctggctaaacacggtacttgccaaaagtggccagaaatggccagcttttggttcgtaacccactattacaagtttatgacctgtcagacggaatgcttgactgatctgcgcggtctatactaggatcccgggtctactggtttggattcttcacaagccgggaaaatgcagggtcctaacccaagactttacggacgcggcaaacaatcctcttaaggacaaagattctgaggccaccagcttatttaacctgctcgcacgacgattacatctcgtccactacaattgcccagaaattgga

SEQ ID NO: 6855 - DNA, 488 bp, Homo Sapiens
tggcagagtaaacaccaaagtcctaagtacactaagacattttaggaaaataccacattatggttgttttttgtgaaacgaccaaaaatactttatgtaaacagagaataagtcactctgcaaacaattatttaaaaagcactaaaatatagatcactaaaaaataaaaactttatgtaacagcaacattctaggtaccttagtcatttttattatatttaattatacccagcccttgttcctacctaccatatatcaagttggtttttaaatccaagttgttttataattccaagataaggttgttttttattcattatcatttctgagaactttgcaggtcagaagtggctactgaacgacacctacgtttgggaagttgaaaataatatcttctgtctgtaaaataacttgaaattgtgttttgttagaaaaaagaaaatattctcacagactttcgacttctaagcatcatagcacacctgccg

SEQ ID NO: 6856 - DNA, 468 bp, Homo Sapiens
cagggtgatatgatgcaaattagtaggagcgattattgagtaaatattatctgagaataaaaatggctaatcatttgcaaaagagcagtgcattcctatctcactcgtggagcaaatgcaaaaagccccaaagagtacatagaataatagtgagcattcgatgtacccatcttcgggcctaaatcatcataaccttggtggaagctttccgtgcccctcccaaatcacattctcccatggcttctgagaagtaagcattatcttaaggctgatgtttaacattctcatgaatccttttataattccacaatataagtatgtacagtattcccccttatctctggttggccttcacagtttcagttacccaaggtacagtacaataagacatttggagagagagagaggctacattcatctaagttttattacaatacattttataattgttctattttattatgttgg

SEQ ID NO: 6857 - DNA, 622 bp, Homo Sapiens
taaatccccgcacctgagcatcggctcacacctgcaccccgcccgggcatagcaccatgcctgcttgtcgcctaggcccgctagccgccgccctcctcctcagcctgctgctgttcggcttcaccctagtctcaggcacaggagcagagaagactggcgtgtgccccgagctccaggctgaccagaactgcacgcaagagtgcgtctcggacagcgaatgcgccgacaacctcaagtgctgcagcgcgggctgtgccaccttctgctctctgcccaatgataaggagggttcctgcccccaggtgaacattaactttccccagctcggcctctgtcgggaccagtgccaggtggacagccagtgtcctggccagatgaaatgctgccgcaatggctgtgggaaggtgtcctgtgtcactcccaatttctgagctccagccaccaccaggctgagcagtgaggagagaaagtttctgcctggccctgcatctggttccagcccacctgccctcccctttttcgggactctgtattccctcttgggctgaccacagcttctccctttcccaaccaataaagtaaccactttcagcaaaaataaatagcgaatttcaaccacggc

SEQ ID NO: 6858 - DNA, 162 bp, Homo Sapiens
  misc_feature (148)..(148): n is a, c, g, or t
tgaatctttttatgcttattgtttgtggattttgtttcattcttacgaatgccctccttattccatgactataaaatatttgctaatggtttcctgtggtatggtttgagttttcttttttacatttaaatgttgatgttcctgagtngtcgcagacatccc

SEQ ID NO: 6859 - DNA, 328 bp, Homo Sapiens
aaaaaatgcacatttctaaaacctacagaaatgcttccactagggctggtctcaactgcagcttcttctactgctctttgccaggaaaaattgacacttttaaccacagaaaacagtactgacaagtgttaaatttgtatacacgaagttattttttcaattaagctaccaaagacattcagtttactagtcaaaaaagccaaagaggtttacaaatcaatacctaccaatcattccgtagatattatttataatatatgcaattatacaaaatgcattttaatacttactccccaattataagaagttcaccaccccttccagtata

SEQ ID NO: 6860 - DNA, 128 bp, Homo Sapiens
tatggatactagttgggctcattactgctgagccacaatgggaactcctggaagtaatcttatttctgatttgaggagctcttctcaaaggtgtgctcactctctcatctctctcatgctcctctcaa

SEQ ID NO: 6861 - DNA, 509 bp, Homo Sapiens
ttttgctttaaagtctttattatcccgaatataaaagacagagtcctctaggatataacagagttctttacgtggaaacattatttttttacaagtgaaaaaataaatacctcttggaataaaggcttatatgctaatatgtgccataaaaaagtagagttttaatatttgacaaaatgtctgtgcaaagaaacaaatgcataaacacattactgctacattaaggcaatatgaaaagtatactcagaaatctcagtaaagtgacagtgtaggtttctagctttaccttagctagtattgcacccgataaggtcatctaggtctcccgacatcccagaaaacctgctagctgaccagcttccaaaatgcccaagtgggagtggaaaacatgtttaagaaaacagaagcaaaaagaaccaaaaccccttcgaaacatacagaggggacaacccaaagttaatacttaagcacttactttaaaaaaacacaacaaaactccccccccaaaa

SEQ ID NO: 6862 - DNA, 446 bp, Homo Sapiens
acatggtgagaaaagtgcagtactacttccaaggtagctagtgtaaaggacactttagtttttaaaactgtggttaaatgttttatgtggaatttgatgagtttgtatattaaataccactgctgctgcttttactagaatcaagttaagggacacgttagaaatagaacagcttaatatcactggcttcagagcaaaatgagctcgggtgactgcagattatgatggtaaatatggctttaattacaaacatgaggaatgattcactgaagatgaaaagataggacggatgtgatatgaaaaaaacccaaacattttggcattgaatgatggctaaggtgttccaagtattccatcttttaagatgaattgcttaattaattgcctcgctaccccaggattctcattctttggaaataatttttattaaatttcaataaactgtg

SEQ ID NO: 6863 - DNA, 1474 bp, Homo Sapiens
  misc_feature (107)..(290): n is a, c, g, or t
gggaagaatgtttgatggagaaaatttgtggccaatgaagtctgaaatacttcctgtcatctgcccctttccagaaaaacttggccgacccttggtctacagcacgnnnnnnnnnnnnnnnnnnnnnnnnnnnnnnnnnnnnnnnnnnnnnnnnnnnnnnnnnnnnnnnnnnnnnnnnnnnnnnnnnnnnnnnnnnnnnnnnnnnnnnnnnnnnnnnnnnnnnnnnnnnnnnnnnnnnnnnnnnnnnnnnnnnnnnnnnnnnnnnnnnnnnnnnnnnnnnnnnnnnnnnnactgttgctgaggttgaaaataatcatgcagtcattcctcaattactgcctgcagcaattcctccatttttatgaatcttgtgagcacttacgctaggagaaatttcttttacaaaacttttaaaatacaattagtgctgataattcctatgtggaaatgattccagccatggtcccctcacttgagcatgtgaatattctcacggagagaagccccagcgagattttccggtgaatacgggattgcacttactctttcatcacggaaacagaccccccgagagaagccccaacgagattttccggtgaatacgggactgcacgtactctctcatcatgaaaacagagccccgttcataaatttttcatctttatttttaaggttatactcctctaaataacccttaagcctcatcaagaaaggtttgtttatagtatttttactatagcttcatccttgataacgtcctaatttccttctggacaacctccttgaccaatggcatattgagatctatgtgacatgaggatatttctcagtaccactttgttactggtacctgatgcacacggattgcgaccagagcatgatgcctccatcaagtggtaatatgtttgcagcctgctgtccagccaagagtgacagatacttctagtgacttccccggtatccactctcatcttcttccaatatcaagagaatccaggttctgtcagattagtaaggtgtgctaatctaaattttaaaaaatctcttacaggttttcttgcagctggtaccatccatgtctcacagccctggccactgacagatcagcagatgtcaccacatgggcttctgagaaagctcttgaatggggatcgttcttaaacatgaattcctccctgtatgttttgttctttgctttacttttcaccttgcaaagagatccagtacctagtattggaagatccaccttaacgaccgtgcatatgaaaaccacagtctaaggaagtgactgcagaaagctcacagcgaccctggcctcccctgtggcctctttgagtgtctgcagcagccctggacttccagacttctatcacatgagaaaaaataaaactgattattggtttaagctgctatggatatttcattgtttttcttttaaatttatttatttaagatagggtaccgacaggggaac

SEQ ID NO: 6864 - DNA, 360 bp, Homo Sapiens
  misc_feature (130)..(142): n is a, c, g, or t
gctttctgaaattcacagaagcctaggaggactggggtaagcggaataaactagagaagggagacattgtttggatttcctttatactgtgaagttacatgcataaaagggtcaaacctgtagatgcagnnnnnnnnnnnnncctataaatacaaatctgtataaatgtctattattatgaagaattgccaatcttgttttaagcaaatgcattctatcgttattataaatgttagttctagctctatttacttctaatcttaaatcagaataaattaatattgtattgctgctgtgcgtggaaaaagacgatgtttatgttcttatagaataaaagctgtggaatgaagctttttaaaa

SEQ ID NO: 6865 - DNA, 522 bp, Homo Sapiens
  misc_feature (88)..(101): n is a, c, g, or t
ggggatttttttaaaatcctgatgcccaacttgcactccacattaattaacatgtctaggagtgggagcctgacagacaccactattnnnnnnnnnnnnnntccccaaaatgattccaatagacaacaaagttgaggaaccactggcacatcccaagctaagatacaaggttaaatggcctttttaagtatgtcatactggatctttaaataaagcaaggcttttgttacactttgtcatgttattaaaagcagacctttgggctgtttaaccgtgtaacaaaaatgccacgtgaaaaataaaaatttttattgtatagcaattctctataaatagtagataatctaagtccttattttctgatggctcttgttccactattaacattgtttttaatttttaaaatcctatcagcagcctcctaattagcagtgttaggaatttgccttatgttttccatctcatctcctgaacctgttattctgagaactcataaataaaattcagccaagattaaaaaaa

SEQ ID NO: 6866 - DNA, 605 bp, Homo Sapiens
ttgttatattcccagcatttcaatatttattagttacttgtaaattactgtggctgtgtagtttataaatgtctgtgcactatattaattagaagacccatagaacatgccagcaggttggctaatgctatgggggtttttaccacagttgccattgtggaagaaattatttggtacattaataaaaaaagttggtaaaacatgattttatacctcagtgtataagatgtgcaagacaaatatgcttatttccttttctagaatataagtgatattatttgcttatgacactaacactattaatgacaggagtcaatcagcctttacagctatcaaaatataatgagatcccaatgatgattcttttttactttgaatgttaattagtttgggactttgattggctggcaaacattttatcattgtcagaatttaatttagatttcaaaaatagcttacaggattttaaacatggtgtggtattctaaagccttttttttaaaaaaagagatctttttgagagaaacaaatgaggattgtaaagtttggggacttacctctgtagcattgtgaaaataaactttgattaagctgatttgaaagga

SEQ ID NO: 6867 - DNA, 736 bp, Homo Sapiens
ggggtgggccgggagccgtggggcggcatggaggggctggttgtcgccgccggcggggacgtctccctgcacaacttcagcgcgaggctgtgggagcagctggtccacttccacgtcatgcggctgacggactcgctgttcctgtgggtgggggccacgccgcacctgcgcaacctcgccgtggccatgtgcagccgctacgactccatccccgtgtctacctccctccttggagacacttccgacacgacctctactggccttgcccagcgcctagccaggaagaccaacaaacaggtgtttgtcagctataaccttcagaacacagacagtaacttcgcattacttgtagaaaacaggatcaaggaagagatggaggctttccccgaaaagttctagctgagtggcagaagtgagaatttgtaaacttatgtacaatgtacgtgtaaataaatggattgaatttcagtttgtcatcaggccgcgctcccgttttgtttttaaggggttaatcttttgagcttccttctcagcagtgtgtgggccaaaaggctcatactgacccacctggtgaaggagaggcaaagtgggcagtatatacttcctcatttggctgtgagtgatagagggatgaaatgggatttttgttgggattgaagactgtaatctaagagtttcaatcagacatgactgtaacgtgcatcctcaattagaattaaagtgatatataaatatg

SEQ ID NO: 6868 - DNA, 140 bp, Homo Sapiens
ctactctgttttccctttttccttccgctccatttggggccctgggggtttcagtcatctccccatttggtcccctggactgtctttgttgattctaacttgtaaataaagaaaatattattcaagttttgagttacctt

SEQ ID NO: 6869 - DNA, 634 bp, Homo Sapiens
agaccccccctgataccgattatctccaaacctctccacatccattgtttaggctcatttgactgtaagtctcaaatgcatggtttaatttttcatcctaaaaaagtaactgtgattcttgtaacttgaggacttctccacacccccattcagatgcctgagaacagctaagctccgtaaagttggttctcttagccatcttaatggttctaaaaaacagcaaaaacatctttatgtctaagataaaagaactatttggccaatatttgtgccctctggactttagtaggctttggtaaatgtgagaaaacttttgtagaattatcatataatgaattttgtaatgctttcttaaatgtgttataggtgaattgccatacaaagttaacagctatgtaatttttacatacttaaaagataaacatatcagtgttctaagtagtgataatggatcctgttgaaggttaacataatgtgtatatatttgtttgaaatataatttatagtattttcaaatgtgctgatttattttgacatctaatatctgaatgtttttgtatcaagtagtttgttttcatagacttcaattcataaactttaaaaaacttttaataaaatattttccttccttttc

SEQ ID NO: 6870 - DNA, 525 bp, Homo Sapiens
  misc_feature (162)..(162): n is a, c, g, or t
agccctagctgctgttccccattcgatgccccttttcagccgaccttgccaggggcagtccatgaaagttgaatatgatctccctgaaacttagcctcgaggtctacaattttaccaggtgagaacacccgagaatgattaccatttaggaggcactcctgnatacagtaaacgacccctccagagaaattgattaagaaaacttagagaacataaaataatagacctacctctgcaatacctggtattcgaagacgggcagaccgaatatttagttcaccttcttgaaaatctgagccaactggactccaagtgccacgagaacagagattgggtctggtccccagcttcagtgcctccaaggcagaaactcaagagacgttgttgaactgtcagcctttacatttatgcattactattgaaggcctggaataaatggatcgtgttttacctgttatcttgctcatctctattactgcttcatcagcagctcttcccaaagcaataaaatgaacaatggcccca

SEQ ID NO: 6871 - DNA, 971 bp, Homo Sapiens
gtacaggtgcgggtggtggggatgaaggcctgaccaggagggagaagcaggtttggagaggaccctgtgcccaccctgacagacaccctggctggccctgactgactgtattctctggccacattcaagtcccccattggtgggggcagagaagtaggaccaggccatccttggctccagagctcgaagacccccaagacagccctctgctctcagcggcgccacagagagcctgggctcagccttctgcatcaggacatggcctcgtccactgagggcacgatttaaacatttgacatcagaagctttatttgtaaacctcacacagataaggaccaagggctggcggtgtggccagaggacaggggaagctgaaggccccgtgcttgagctcggcagtcctgctccttgcagtgaagccaccatgggtgaccgtccagcctcacccggtggcctgcacagtgagggaagggcttcagggccatctgctcccagggcaggggacaggccaccaaggacctttggcaaatgaaggtttacatttctgtagtttgtttgttttagagcttaatttgtagttttttagctattaaaaccatttgaatttttaacgacctgatgagggcatcaggtaaattaaaggattttgggaagattcttattttcaattctaatatctgacagatgccatcaagaataagcattaaggtataaaaaatactgtgtgtataaaacaatgccaaaccacattcctacagcaaatgcactgtgccatttataaccctgacatcacctcccaaggctctcaaggaagatttattttaaataacttaaatagaagtcctagatgatattgtttaggaatttaagagggtggtggatatggtcctgtgaatagcacttcccctgaagccagctcatggtctgttcatttggtttaaaaatgagcttgtattttgcagaagcccaac

SEQ ID NO: 6872 - DNA, 463 bp, Homo Sapiens
taaagagagcatttccatgactttagctggtgaaagggtttaatatctgcagagctttataaaaatatatttcagtgcatactggtataatagatgatcatgcagttgcagttgagttgtatcaccttttttgtttgtcttttataatgtcttcagtctgagtgtgcaaagtcaatttgtaatattttgcaaccctaggatttttttaaatagatgctgcttgctatgttttcaaacctttttgagccataggatccaagccataaaattctttatgcatgttgaattcagtcagaaaagagcaaggctttgctttttgaaattgcaactcaaatgagatgggatgaaatcctatgacagtaagcaaaaacagaaccatgaaaaatgattggacatacaccttttcaattgtggcaataattgaaagaatcgataaaagttcatctttggacagaaagccttt

SEQ ID NO: 6873 - DNA, 785 bp, Homo Sapiens
  misc_feature (76)..(121): n is a, c, g, or t
gcggccgcctgatcccgcagaggaaggtcgcggccgtggagcgatgacccgcggcggtccgggcgggcgccggagnnnnnnnnnnnnnnnnnnnnnnnnnnnnnnnnnnnnnnnnnnnnnnttgttagtcaccgcggagccgccgaaacctgcaggagtctactatgcaactgcatactggatgcctgctgaaaagacagtacaagtcaaaaatgtaatggacaagaatggggacgcctatggcttttacaataactctgtgaaaaccacaggctggggcatcctggagatcagagctggctatggctctcaaaccctgagcaatgagatcatcatgtttgtggctggctttttggagggttacctcactgccccacacatgaatgaccactacacaaacctctacccacagctgatcacgaaaccttccatcatggataaagtgcaggattttatggagaagcaagataagtggacccggaaaaatatcaaagaatacaagactgattcatttgggagacatacaggctatgtgatggcacaaatagatggcctctatgtaggagcaaagaagagggctatattagaagggacaaagccaatgaccctgttccaagattcagttcctgaatagtgttggagatctataggatctgatcccctcactctctcccacaaaaaaaggcagcctaaaggtttttaagagatgggacatgggacattgctccgctcttatcaacgttcttcctgtatttgagaacctcctttatgctcactcaagctgg

SEQ ID NO: 6874 - DNA, 554 bp, Homo Sapiens
atgggctgctgtgtgaatgttgacgttcgtttcatggagaaaggggaggtgaaagattgaagagcaggttcctgtcaatgttctgagttcgagctggaggtgtagattgaatagtctacatggtctgtgagtgtgtgagatgaacccttccatcctttgacacctggttgtatgtgtaggctaagaaggaaggaccctcctgtcagtgtgcaaagctgtaatctcatggactagaggagagggggccaaggggatggacaggagaagtcatgcagaatctaagcaggaatgcagatagaacacatctaggctcttttccccaggagagtgatgatggagcatatagatctggctcaaattcagcctccatcacttaccagtcaggaaccctggcgatatcactttaactttctgaacctcagagtcttcacctataagacggggaaaataataccaccctttcaagattgttgagataaataagtgatataaaacatgtaaagcttagttctggccacagtgtagctactcaataaatgataatactaccaaaa

SEQ ID NO: 6875 - DNA, 442 bp, Homo Sapiens
ccaaggctgccaagcagctggttaccatcaccaccaaagagaacaacaactgacaagggcagggcaccgcctcctctgttttctaggctttataaagtccaatttcaaattcagacgcagaactcttcagatttctacaaaaagaaacatttaatgacggtttaaaactttttaaaagaaaactcagtattatttttgcatgttttctaaccaattttcaactatttaacccacttgccttattttgtgcctatttgctggtttagtttctgatgttcggttgtgttgtcaacaactgttgagttgatcacatacatccaaaagtatagtttcattgtctaaagtttgtgaaaacttttccatcccttaaaactccctgcctatggctgaaactataaatgaaatttttcataaaacattttcttgagagagttcagttaaa

SEQ ID NO: 6876 - DNA, 733 bp, Homo Sapiens
  misc_feature (530)..(543): n is a, c, g, or t
  misc_feature (652)..(652): n is a, c, g, or t
agcggccgcaggtgggggcggcccctagtcctcgatgacgatgggctcgtcgttgacgggcgcaggtggcggtggccgcggcggcagggcctggctctggcgcagggcgatgggcttgtagggccggcgggcagcacgcttggtttccgaggatgagagcagcttgcggatcttcctggtctcctctgtggccatgtagaacacgtcatccggggcgtcgatccagttcatccgccgccgcttgactgggggcagggagcccccccggatcaggcgcactttggtggggtaggacttcccgttgagcaggaggttccggcttggtcccatgtgcctggtctgtccgtggtttgccagacccctactgggcatcaagaggcgcttcttcatgttgccgtccaccccgttgtgctgctcgtagctgcgcttgcccaggatggtgggggagccgtttgttgatgacgggggccaccttggcgggcgtcaggctgctgagcacgctggacacgcttttcacggggtcaggcttnnnnnnnnnnnnnntgtctcaagataccgagcacggcttccagccgcctgcgtacccgctgcttcagcaccagcgggctcttggaggcttcgggcagccggccgtgcactttcgcctgatggncccgcgctgtgattggcaagggtaagtgccgtcagcgtgccacggccgcagatctaccgcacaggcggcccggcgaatccg

SEQ ID NO: 6877 - DNA, 587 bp, Homo Sapiens
cagacaagactcagaaaccgttttattaaactggaacacaaaatgcgtgttataataatgtcaagcctttatcagaaatcagtacataagtgaggatacacagccaaaatgagccatcaacaaaagcagtataaattttaaataagtttcagatttctatactcaatatgctaaagaaaataaaaccgaaagagtagtttcaatttcacaattcacagttgattggttttaatcccatgacacgtttgtcattctgcagccccagaacacagacttccaaagcagtgactggcactccgacccaacagcatacacagatcttaagcctctgtatgacatttagagaaaattttaataaacaaccctaattacacacagtttgggctgacattttttagctatatcctttatcaaagatagttctagtgaaatagcaaaagcagttttaaaagtttgccatgccattcaataaagggttctaaagcctcccttggttttacattttattctctaatttaaaacaataactgcattaaaatgcaaccttaatggtgaaagcaaaatcggttttgcttctgaatctagcc

SEQ ID NO: 6878 - DNA, 1392 bp, Homo Sapiens
ggctggaaatgagcccaagcacacatgcatggcatttgttccacaggagggcatccctggggatgtggctggagcatgagccagctctgtcccaggatggtcccagcggatgctgccaggggcagtgaagtgtttaggtgaaggacaagtaggtaagaggacgccttcaggcaccacagataagcctgaaacagcctctccaagggttttcaccttagcaacaatgggagctgtgggagtgattttggccacactgtcaacatttgttagaaccagtcttttgaaagaaaagtatttccaacttgtcacttgccagtcactccgttttgcaaaaggtggcccttcactgtccattccaaatagcccacacgtgctctctgctggattctaaattatgtgaattttgccatattaaatcttcctcatttatactattatttgttacgttcaatcagaatccccgaaacctcctataaagcttagctgccccttctgaggatgctgagaacggtgtctttctttataaatgcaaatggctaccgttttacaataaaattttgcatgtgccatgggtgagtacgtttttgaagagggagaagcgcccctccactgtagaccttatgaggtaaggctgcgcgtaagggccagcatggcccttacgcgcagatctaagacgcccttttctttgccagccttgtcctgccctccagctgctttcagcgtcggaaattcctcgggagagaaggataacagtcggcttgagccccttaaaccaccttcgtgtcctactggctttccattcagctgtgcccatgactttggtccacctggcactgaatttgtattctcctgactgattgactgtgtcggtttctgcaaattggagacagatttctgcaaacccggctgtcggcagcgactccggcggctgagaggccgtcgcactggaactctttgggtcttgctgatcctgctgtgtgtgcccatcccgtcccgtccttgggtactatcacgatgttggggtcgtttcctttgttttcagacttcaagcttggcaggtttgcaggcggtggcatgcgccgggctgcagcaactttcccaagactctgtaagccatgtctaggaataactgaggatctaatcgcgtctactgattttcctttatacttatcaaacaggctgagagtcgagtactggcttgtcccatccttgcccttggcccttacgcgcagggataattacgtagtctgaggctcatctcgagaggtgagcagggcacactgggtagtgagaatagcctggcaaaagcatggaggcctgagtgtacctgggccatgggagagatgccaggcaggttggttggtctggaacactggcgggtaaggggcagca

SEQ ID NO: 6879 - DNA, 827 bp, Homo Sapiens
  misc_feature (620)..(626): n is a, c, g, or t
  misc_feature (629)..(639): n is a, c, g, or t
  misc_feature (641)..(641): n is a, c, g, or t
  misc_feature (643)..(645): n is a, c, g, or t
  misc_feature (785)..(785): n is a, c, g, or t
gggggcttttaaatttctcttcttattctttgaagcatgttgcatactaccctggtgggatggatggttctgtaaatgaagggatatttaaacttgctactgttgttcaacaccattaatggtcagtgtgaaccattacaaagaatgtggcaacttgcttgtgcctaaaaggaggaattggaactagaatgtgtgactctgtggggactgcataggtttgttaattgacctatagctaaaccttaatgtgtttgtgtgtctatacattgctttccgcatttcaagacatccagacgctattaccaacattttcctgtgcattaacctctgcatgtgaaaacttttaacagttactgaactatgtaaatatgtgaatttttttatttaggtggatgcattttttgtctgtttactgctcttctcagctttattcaataaacttgcattttaagggttgtattggcaattttaacttaaaatgtgcatcatgatggaaggtgcagacttttttggaagtttccgagaggagggtctatagaccatttgtcagaaatcagatcagccctcaaagaatggggtctgtgggctagttaaaatagaaataaacttttaaaatactnnnnnnnaannnnnnnnnnnanannnaaaaacatgttcggcccgccttccggccctcgaagaaagctttcttaagaccatttcgttttgggcgccgcggggcccccagaagggaaaagtgaaacgtgggcccataacctggtttcccctaggaagaatccctgggnccatgaactaaaggggcttggggaatccttccaccaaattaa

SEQ ID NO: 6880 - DNA, 832 bp, Homo Sapiens
  misc_feature (353)..(360): n is a, c, g, or t
  misc_feature (362)..(364): n is a, c, g, or t
  misc_feature (366)..(369): n is a, c, g, or t
  misc_feature (372)..(372): n is a, c, g, or t
  misc_feature (374)..(374): n is a, c, g, or t
  misc_feature (379)..(379): n is a, c, g, or t
  misc_feature (382)..(451): n is a, c, g, or t
  misc_feature (455)..(455): n is a, c, g, or t
  misc_feature (534)..(604): n is a, c, g, or t
ggcgcatttggaagaatttctacaagtgtgaaagaattagaaaacttcaggaacttgttacagaatattcattaaagaaaacaagctgatatgtgcctgtttctggacaatggaggcgaaagagtggaatttcattcaaaggcataatagcaatgacagtcttaagccaaacattttatataaagttgcttttgtaaaggagaattatattgttttaagtaaacacatttttaaaaattgtgttaagtctatgtataatactactgtgagtaaaagtaatactttaataatgtggtacaaattttaaagtttaatattgaataaaaggaggattatcaaattcatatatgatnnnnnnnncnnncnnnnccncnccccnccnnnnnnnnnnnnnnnnnnnnnnnnnnnnnnnnnnnnnnnnnnnnnnnnnnnnnnnnnnnnnnnnnnnnnntggnaaaaccaatgcacggtcccttacctcgttttcaccccgcgatttctccgccgaaaagcacacagggcgcctgcgcattnnnnnnnnnnnnnnnnnnnnnnnnnnnnnnnnnnnnnnnnnnnnnnnnnnnnnnnnnnnnnnnnnnnnnnnagcacatataactcggtggcgcctccaccgcgacttttttggaggcgcgggccccccgcggcgggaggctccccccaacacgacgcgccggtccttccccctctgccaccaacaaaacgtcgcgggggcctcctttccaaagcgttgtttccgcagcccctacccccaaacaaaacataggcgccgcccgtactatcacaccctggcccctttttttataaaccactc

SEQ ID NO: 6881 - DNA, 1095 bp, Homo Sapiens
  misc_feature (37)..(37): n is a, c, g, or t
  misc_feature (78)..(89): n is a, c, g, or t
  misc_feature (122)..(184): n is a, c, g, or t
  misc_feature (213)..(213): n is a, c, g, or t
gggggggtgtggcaacctctcgtgaagagcattcgtncgttatgtgggaagactgcgggcagtgggtgggcatggtannnnnnnnnnnnaaagatgtttaaggggtggttatggtttagtgnnnnnnnnnnnnnnnnnnnnnnnnnnnnnnnnnnnnnnnnnnnnnnnnnnnnnnnnnnnnnnngtttgtatgtagttattttaatggtgtanggttgggggccaataaaatcaaactttaaattggggagccagataaatattgccttttctttccaaaattttaatttatactttttagtaaaaaacataacacatttctcattcatttaaccaattaatccaaaggaaaaaagtgaagtactataatcacaggtacactaacaaacacttttacaaagacattcagaaatatttgcagcaggttttataagactctgatataaaacaaagtaaaataaaacgttttgaaatggcaaaatcggtttacctagcctgaattgcttcaaagaggcatttgcacttcttgtcctggcttaataaaacaaagtaaaataaaacattttgaaatttcaaaatcagtttagcctaaattgcttcaaagaggcatttgcacttcttgtcctggcttaaaaacaaaccctgaaattactttcttttatccaaatcaattgaccatattaatctgcataaagtctatgaggatacgttttgataaatgctataaacacaaaattaaggcaaatctgatagttattgtcaaataaatagcacatttagaagggcctttgttaataaaatgcctctaatgtatccagaggtatagatttcaaagggcaagtctgtacctgttgcacatctgattctcacagcattcatgaaagaggagacaatgatattcccatttcactgaaaactaaggtgacttgtttaaggtcatacagtccgatcagtggcaccaacacatttaccaatggccttggaatacagagtacagggcttcctgttggtagattaccttcctaacctcaggagatgtgatccagtatcaaacaagtgtgagtccttcagtctgaacatatccagcatacggtg

SEQ ID NO: 6882 - DNA, 1244 bp, Homo Sapiens
  misc_feature (1163)..(1163): n is a, c, g, or t
gcttgggtgcaatggccgctcaaagggcgaggcttattcgaagcctcaaattcagaaaacccagccagaccttggaagttaagaaggtggaaggcagatcgcggaaccagtgttctgatagttgtggttctctgagggaagccaattctggggaccggtagtggaaagctcttgcgctgtttccggccacctcagcgggaagcggagacgcaagcagctggatctccggtaactgagacatagggtataactgttgtcgcggcggaggaagtgaggacggcgccaagggccttccgggccagtgttggatccctgtagtttgtgaagatggtgttgctaacaatgatcgcccgagtggcggacgggctcccgctggccgcctcgatgcaggaggacgaacagtctggccgggaccttcaacagtatcagagtcaggctaagcaactctttcgaaagttgaatgaacagtcccctaccagatgtaccttggaagcaggagccatgacttttcactacattattgagcagggggtgtgttatttggttttatgtgaagctgccttccctaagaagttggcttttgcctacctagaagatttgcactcagaatttgatgaacagcatggaaagaaggtgcccactgtgtcccgaccctattcctttattgaatttgatactttcattcagaaaaccaagaagctctacattgacagtcgtgctcgaagaaatctaggctccatcaacactgaattgcaagatgtgcagaggatcatggtggccaatattgaagaagtgttacaacgaggagaagcactctcagcattggattcaaaggctaacaatttgtccagtctgtccaagaaataccgccaggatgcgaagtacttgaacatgcgttccacttatgccaaacttgcagcagtagctgtatttttcatcatgttaatagtgtatgtccgattctggtggctgtgaaataatgaatacagtcactggtaagggagaacctagaacccagtaggtgtatattttcaggaaactgagctcacagagatgtgtattagaatccaagtggaacttctgcctctaaagaccttgcaagaaaagagatgccctgaaaaatgaaaggtgcacctcatttaatgaagcttacccctatgtanaaagtctcttttcgggggcagaagcttttctctggggtgcccagccatatatattaggggaaatagtagaatggttaaatt

SEQ ID NO: 6883 - DNA, 883 bp, Homo Sapiens
gggttgctctggtattctgagagttgctctgtattctgggttctgaagattatttgaaaaataactcctactacattgaaatgcagacttaaaaatttaaacattggattaggcagtcaaaaaaaccaagcaagcataaaaggtcaataagttgtaatcttgatagtaaaggtggaaaacttattataaatggaaagaaagttttatttccttttttgtttgatgggcagtatgccatattatacccaaagttcttttaaaaaatatttccatcaaccatttttatttaaaataaacatttgagggaagttaccaaggcagcttttttcctcaaaagtaacctgttcctctttggaatagcacattttaggggcatggttaatacctgagatttttactcagtaaatcctgatggttactgtgtgtaaaatatctttaagtaggattgaaggcctctgtgggggaataaaatattaccaaagtctataaaaataaattttacatgttctcttttatgacagagagcagcactggttctgttatttttaaaatgaataattgatttcttgataggtgtttaatatttcttccctcactgctgattcttagatagaaaccattctttatatttgatagactgctttcagaaaacccttatcaacaagtgtacaatacttatctaaaactatacatttagaatggagcagtttaatactagatctcagaagttttgaaaaatagcaaagaagactggatttggaaagcatggtctacaattggttgttaaattctgaagctatgaagaataaatgtttcaactttggattatgaaaccccatttatgattttttaaatacacttgaaataaaaatgattaaactaa

SEQ ID NO: 6884 - DNA, 739 bp, Homo Sapiens
  misc_feature (47)..(56): n is a, c, g, or t
  misc_feature (569)..(581): n is a, c, g, or t
gggtagtcccactgtttctagaagtctcttttaagcattatttttgnnnnnnnnnntatttttatagatgaatactcaggctaacctagtggatgtgatcttggaacttccatgattatccacttaaagatcaaagtattatatgctgtgtgctttttaggtgtttgttagtactgtgaaggcaaaaatgctttctacattgacattcattcctattttactgggcacctatgaatgtatgctgtgtgctagaaatagactaaaacatattcctatagcatgttagtgtgtttgcatgtttgctgaaaatcctttgtgtataaaccagtttgtaaggttctctgggttaggtagggactctgcagtttcttcctgtcaaaatctctcctaccaagatggtgttccactgtccagcccagcatgagtagcaggtagagcacagctttactggctgtttgtatgctttggtttagtgcaatgtgtggtagattacttatcagaaaacatatatgtcatctctagaacgaagaaaaagcatagtagttcaattcccagtgtgtccctttgannnnnnnnnnnnnaatagtaaaaataagaatctgtactgacttttcacttggccattctggttttaaaggacaagctacaagctctgtgtttctgtactgatgtgtcacttattaaatacttttgtaccatgagtaaaacttcaggtgtttcgcaagaaccaccattctca

SEQ ID NO: 6885 - DNA, 1348 bp, Homo Sapiens
ggggtcatttccgggcgtcacgtaacggagtggccaacggcctgcagagcaacatgcccaagttttattgtgactactgcgatacatacctcacccatgactctccatctgtgagaaagacacactgcagtggaaggaaacacaaagagaatgtgaaagactattatcagaaatggatggaagagcaggctcagagcctgattgacaaaacaacggctgcatttcaacaaggaaagatacctcctactccattctctgctcctcctcctgcaggggcgatgataccacctccccccagccttccgggtcctcctcgccctggtatgatgccagcaccccatatggggggccctcccatgatgccaatgatgggccctcctcctcctgggatgatgccagtgggacctgctcctggaatgaggccgcccatgggaggccatatgccaatgatgcctgggcccccaatgatgagacctcctgcccgtcccatgatggtgcccactcggcccggaatgactcgaccagacagataaggatagaggggaggccttattgtatcggttttatattacctgttctgcttcaccaggagatcatgctgctgtgatactgagttttctaaacagcataaggaagacttgctcccctgtcctatgaaagagaatagttttggaggggagaagtgggacaaaaaagatgcagttttcctttgtattgggaaatgtgaaaataaaattgtcaactctttcagttaaaaacaacaacaaaaaaggaaacgagatgtggggctgccacacgcaatatcgtgcattaaaaggatcttctactctggatgaaaatatctttgctgatgccagaccaacctaacacaaagaccttttggttttttaatgtgactgtgttttattttacaatgtgtaattcactttagaagggcaaagtacctgtctggggaagactatttaatttcctgcatttatttagaatgttggctgatgttattatgaagggaaacagctctaacaactgagtgccccccacatagccacagctcatgagttcacggggcaaaggaaatgaacagcagcctcctaatagccagccttctttgtgatgtggaaataattatcagcatgtaacagactatatatatattcaacaattctgatcccctgaaaaattcaaatctacaactgatttgcttcctgggctcctgaaaacaactttgtcaaaattgttcagaaatataatcagccaatcgttgccccttggggacgcaggataaaacaagtcagccatgaccaatgaggagtcgaccgtgcacaattacatgcagacctgcaggaca

SEQ ID NO: 6886 - DNA, 1030 bp, Homo Sapiens
gggaggcctatttccggtaggaatcagtggacttggcggcagaggcagtgcggatccggcgttctccactgatcttttccaaggctgtacagacatggcggcggcttttcggaaggcggctaagtcccggcagcgggaacacagagagcgaagccagcctggctttcgaaaacatctgggcctgctggagaaaaagaaagattacaaacttcgtgcagatgactaccgtaaaaaacaagaatacctcaaagctcttcggaagaaggctcttgaaaaaaatccagatgaattctactacaaaatgactcgggttaaactccaggatggagtacatattattaaggagactaaggaagaagtaaccccagaacaactaaagctgatgagaactcaggacgtcaaatatatagaaatgaagagggttgcagaagctaagaaaatcgaaagactaaaatcagagctccatctgctggatttccaggggaagcaacagaacaagcatgtgttcttttttgacaccaaaaaggaagttgaacagtttgatgtcgcaactcacctgcaaacagccccggagctagtcgacagagtctttaataggcccaggatagagaccttgcagaaagaaaaagtgaaaggagttaccaatcagactggacttaagcgaatagctaaagaaaggcaaaagcagtataactgcctgacacagcggattgaacgagagaagaaattgttcgttattgctcagaaaattcaaacacgcaaagatcttatggataaaactccaaaaagtgaaggtgaagaaagaaacggtgaactccccagctatttataaatttcagagtcgtcgaaaacgttgacgtgttatagataagccttgtcattctgtatcaaaaatctgttgtcgttttctagtaacttcaaattccattactccaaatggcatggttttccggtttgtaaccataactaaattgtcagtctgacatttaatgtctttctatggacaacattaaatctccctcccttctgt

SEQ ID NO: 6887 - DNA, 472 bp, Homo Sapiens
ttgaaatgacctgaaatgtagcctctgtccttgtaagtcagttgacttgccgcacatctctttgtgtacttgtacggtactggcagaaaagtcatttttcaaaagccataggcttttccttgcccttagctgtaataatgcatctgattttgatttcctccagagctgtgtttctgtccatcacctgtgtattggccctgtgtttaccactctggcccactcctcacccccttgctcccctggtcttctggagtttgtgacattgatttgaaatggatggtgttctcttgagagcaagtgagattgttagaattaagttccaactatacagttttctaacatagctataaggtccttgttgctgtttgtgataactgatagataactcattggaaacgtgcatacatttatattcagatgaaattatggtttgcactgtctattaaatatctcgattaattttcataaaaaa

SEQ ID NO: 6888 - DNA, 547 bp, Homo Sapiens
gtggtgctggccccgggtggcggcgccgcctacaatctcggggctcctccgcgcacgcagttctcaggtctgcgcagggacctgccgccctcggtgcacactgctcacgctggccagctggggccccgaaatggtgctgctgcgcttggagcaccagtttgccgtaggagaggattccggacgtaacctgagcgcccccgttaccttgaacttgagggacctgttctccaccttcaccatcacccgcctgcaggagaccacgctggtggccaaccaagtccgcgaggcagcctccaggctcaagtggacaacaaacacaggccccacaccccaccaaactccgtaccagctggacccggccaacatcacgctggaacccatggaaatccgcactttcctggcctcagttcaatggaaggaggtggatggttaggtctgctgggatgggccctccaagcccaagcctcctgctccgggggcagaccagactctgactctcctcttgggctgctgccattaaaacgctactactaagactcaaaaaaaa

SEQ ID NO: 6889 - DNA, 954 bp, Homo Sapiens
  misc_feature (773)..(773): n is a, c, g, or t
ggggcagctggcttggaggctccgcgctctggaggctcaggcgccgcgtggggcccgcacctctgggcagcagcggcagccgagactcacggtcaagctaaggcgaagagtgggtggctgaagccatactattttatagaattaatggaaagcagaaaagacatcacaaaccaagaagaactttggaaaatgaagcctaggagaaatttagaagaagacgattatttgcataaggacacgggagagaccagcatgctaaaaagacctatgcttttgcatttgcaccaaacagcccatgctgatgaatttgactgcccttcagaacttcagcacacacaggaactctttccacagtggcacttgccaattaaaatagctgctattatagcatctctgacttttctctacactcttctgagggaagtaattcaccctttagcaacttcccatcaacaatatttttataaaattccaatcctggtcatcaacaaagtcttgccaatggtttccatcactctcttggcattggtttacctgccaggtgtgatagcagcaattgtccaacttcataatggaaccaagtataagaagtttccacattggttggataagtggatgttaacaagaaagcagtttgggcttctcagtttcttttttgctgtactgcatgcaatttatactctgtcttacccaatgaggcgatcctacagatacaagttgctaaactggggcatatcaacaggtccaacaaaaataaaagaagatgccctggnattgaagcatgatgttttggaggaatggagaatttatgtggtcccctgggggaaatttgtggggaacttgggcaaaccacctggggtctcctggttttgggccttgggggaaaaaatttttaaatttcccccattcccttggggagaaaaggggaacccctctttttttgaacactgtggg

SEQ ID NO: 6890 - DNA, 733 bp, Homo Sapiens
  misc_feature (515)..(515): n is a, c, g, or t
tgctccccgtcctcagcaggagctcatttaggaggttgaggctgggcccttcccaggagtgctgcctctcagtcctgaacatgggaggggcccagggtatgttcacggggcgatgctgccctcccagctggcccatgggtgaccctgggaacattaactgcctcacaacgtttgtgcctcagttacccgtagatgtagtgagggtaacaatacttactctcgttggtgataaggaacagctaacacaacacacagggtttttctgctcccaaaatgggattcttcagtgcaccaaatcgaagaaagcactggagctcacgctggtttctccattgtttctccttaacagtggaaaccgtaacttttgttctagtagcatctagcatgctcaataattatttgtaaataaaagttatacttttccctcccaaaaggggggacaaggtatttgttatgacaagggcttttaaaataataaaaagctccctgcgaaatagcttaacggtcccaaaatnaaaccccgagtcaaccgaatatccataaaaattgttcgggcccgccctccgggcccccccaaagaaacctttttctaaaaacccttttcctttttgggcccgcccggggccccaccgtaaagggtaaaaggagaaacattggggcccaaaaaccggtggttcccccctaaaggaaaaaacccctgggcccattgaaactaaaggggtctttgggattt

SEQ ID NO: 6891 - DNA, 1214 bp, Homo Sapiens
  misc_feature (116)..(341): n is a, c, g, or t
  misc_feature (345)..(345): n is a, c, g, or t
  misc_feature (441)..(449): n is a, c, g, or t
  misc_feature (524)..(571): n is a, c, g, or t
ggcgggctctttgtcttgtttgtgtcagaaggaggggacaggtgtggctcgcctctctctaggagtgacccccgcggccgccgcaacaaccggcgggatgatgataagtttttttnnnnnnnnnnnnnnnnnnnnnnnnnnnnnnnnnnnnnnnnnnnnnnnnnnnnnnnnnnnnnnnnnnnnnnnnnnnnnnnnnnnnnnnnnnnnnnnnnnnnnnnnnnnnnnnnnnnnnnnnnnnnnnnnnnnnnnnnnnnnnnnnnnnnnnnnnnnnnnnnnnnnnnnnnnnnnnnnnnnnnnnnnnnnnnnnnnnnnnnnnnnnnnnnnnnnnnnnnnnnnnnnnnggtntttccttttcacaatagtgcacatttttaccataatttagttatggctacaaaacatcagaagattttttttaatgtatcttctctatggtaattnnnnnnnnngttgtgcccttctagtctttaattggcagaaatatgtcccaaaaaagaaactattgcatttaagccacatcaccnnnnnnnnnnnnnnnnnnnnnnnnnnnnnnnnnnnnnnnnnnnnnnnnccaacagagcataatacccttttactgatgtgtcttacagattgacatgaccaaagtcataggttttcatttaatttccaattcccccttccacaacatgcaccaactgaatatatgctctgggagccataaaatgtaccaaacatctacctcttcaaaagaatgcattaaaatattttaaagaattttttgtttaaaaggtgaaaaaaatataaacaagaaactgattcactcccttacttcatgcatccataatctaaaccaaaaacgaaattttaaagcaagaacaaactactgctgcaagtttttgtaagtccattttctctgtacatacaaactgctcactactgaagggaaaaaaagaatataatccatggtgtccgctgattcaaaggggagaaacaaggctgtcatttagtatccaaaaactggtacatgtatgttctgcttttataatgtatatttttctctcttctgtttttcatatccaaaacttctaaatgctattttaggggcacagcagattagattccagcacttggtgaacagaattcacaagctgtgacaaaactctgtcatcttcagggtgcaatcttgtttatatacactgtatgtatatatttcttttagatttggctgtagt

SEQ ID NO: 6892 - DNA, 616 bp, Homo Sapiens
ctggctgaaaagtgtaccatcataggacagtgcgtgaacgatctcgctcctcggagagtccccataaatgcaagcgccttggtggcagtcgctcaggacatggcaggcacaggcgctgactttctcttcctttgagcctgcatcagttcttggttttgcctatctacagtgtgatgtatggactcaatcaaaaacattaaacgcaaactgattaggatttgatttcttgaaaccctctaggtctctagaacactgaggacagtttcttttgaaaagaactatgttaatttttttgcacattaaaatgccctagcagtatctaattaaaaaccatggtcaggttcaattgtactttattatagttgtgtattgtttattgctataagaactggagcgtgaattctgtaaaaatgtatcttatttttatacagataaaattgcagacactgttctatttaagtggttatttgtttaaatgatggtgaatactttcttaacactggtttgtctgcatgtgtaaagatttttacaaggaaataaaatacaaatcttgttttttctaaactgcttcaaataccttatttaaataaattattaaaaaggaaaattttaatag

SEQ ID NO: 6893 - DNA, 748 bp, Homo Sapiens
  misc_feature (713)..(713): n is a, c, g, or t
gggatggaaagtaaatggtagctcggaagggtcaaaagagtccgcggtttcgccgcgtgacttgctttttgcggctggggaggtctacgcttctagagcttgagccagcggggcgaccctgcagtggcaggactcggcaccgcgccctccaccgccggttggtggcctgcgtgacagtttcctcccgtcgacatcgaaaggaagccggacgtgggcgggcagagagcttcatcgcagtaggaatggcagccccatctatgaaggaaagacaggtctgctggggggcccgggatgagtactggaagtgtttagatgagaacttagaggatgcttctcaatgcaagaagttaagaagctctttcgaatcaagttgtccccaacagtggataaaatattttgataaaagaagagactacttaaaattcaaagaaaaatttgaagcaggacaatttgagccttcagaaacaactgcaaaatcctaggctgttcataaagattgaaagtattctttctggacattgaaaaagctccactgactatggaacagtaatagtttgaatcatagtgaacatcaatacttgttccctatatacgacacttgataattaagatgatcaagaaccagaagatctgtgaagaaatgaaataaaatggtatttagtaagaaatctctattttaagaaaaaaagtaaaacctgttataaacacatganaacttgctacaactagaacaaagaaggccttgtcg

SEQ ID NO: 6894 - DNA, 403 bp, Homo Sapiens
ggggccccgccaagcagatgctgcaaacagctaaactgtcatattgctgtcttgtatatacagcttttccttcttttgtttaggatcataattgtctctacagtctgatattaaaggcattggatctatcttggatatcatacatggtcagagaagcctttaggagaagaatcagatcatgtatataattgtaacatcacattgattttacggaagatgttatatggactttaatgacacaatgtttagagataaaatgtacattattttggttcagttttttaaaaaaaatatgctttaacaaaattcttaggaattcttttaagcaatgcaggtattgcgataactgtagattttacaataatgttactctacaaatgggaaaataaattctttaaaattg

SEQ ID NO: 6895 - DNA, 674 bp, Homo Sapiens
  misc_feature (618)..(626): n is a, c, g, or t
ggatatcagttatatctgtgatcaggaatggtgtggattgagaacttgttacttgaagaaaaagaattttgatattggaatagcctgctaagaggtacatgtgggtattttggagttactgaaaaattatttttgggataagagaatttcagcaaagatgttttaaatatatatagtaagtataatgaataataagtacaatgaaaaatacaattatattgtaaaattataactgggcaagcatggatgacatattaatatttgtcagaattaagtgactcaaagtgctatcgagaggtttttcaagcatctttgagtttcatggccaaagtgttaactagttttactacaatgtttggtgtttgtgtggaaattatctgcctggtgtgtgcacacaagtctttaccttgggaataaaatttactggtcccccccgccccacacaaaccaaaataaaaaacatgtcgggccgcctccggccctcaaagaacttttccaaaacctttccttttggggccccggggcccccgttacggtaaagggaaacctggggccataagcttgttttccctaaggaagaaccctggggcccttgaacctaggtggcttgggattttnnnnnnnnnaattaaaaaaaccgccctcggggggggaaatccccgaagcggtttctg

SEQ ID NO: 6896 - DNA, 1144 bp, Homo Sapiens
  misc_feature (19)..(19): n is a, c, g, or t
  misc_feature (738)..(741): n is a, c, g, or t
  misc_feature (743)..(744): n is a, c, g, or t
  misc_feature (747)..(750): n is a, c, g, or t
  misc_feature (804)..(864): n is a, c, g, or t
  misc_feature (896)..(914): n is a, c, g, or t
caaacccctctccacacanccgcggagctgcctgccaggcctgctcactgcagagccgccgctgcctgcgggacgggcaaaagccaagccgccaggtggacctcggggaagccgccgccaacactcacctcacaggaccaggaggttccatcggggcgctgccgcgaatcgcgccacttacagccctcaccccaggggcaggtttgcgcctgcgcaggtcgcagcctcggcctccaactcccagaatcctcctcgccgccggcttccgttcgcggactttggcccaggcgcgtgggcgctgccgagaggctgggagcccgggaaccggttcctggacttgagcggagcgagaaagagcgcgccgcctgcacgactggactggagcggccgggtgccctggaggcccctgggaattgcagtccttgcgcaggtggagagtgagcccttatgagaaaactcaagactcagaaacaataaaggttacagagatgaaattgacagagcctgaatttcaggttatgattctgtatggtttctttggtgctgcattagacctgagctctgattgaaaattcttccacgctcgctacattccaaaactttatctccaatatgaatttccagatgcctcacaaggtctgagctccatctgaaggctttcccatgcttgtcacattcatagggcttttctccactatgaattctatgatgtcgaataaagtgtgagctctgattacnnnnannaannnnagggggaggaaaaagcacggaaaacaggaccgagcccagggagggtcggggcannnnnnnnnnnnnnnnnnnnnnnnnnnnnnnnnnnnnnnnnnnnnnnnnnnnnnnnnnnnnccggaaggaggagcgaggggccgtgtgcgcannnnnnnnnnnnnnnnnnnccctcggggactgataaaattcttccacaccgtcgtcctgggggcggccggcgcgccttccggacaggcgcggctcggggggccctctctgttcccaacaaagaggaccggtggcgcgggcgtctgcgcctgccggaccacaccccaccgaaaaaagactggccccgcgggggggcaccgcccgcgagggtgtcgacgccaccgcgcctctcatgtttatcggcccgccc

SEQ ID NO: 6897 - DNA, 1559 bp, Homo Sapiens
  misc_feature (1465)..(1468): n is a, c, g, or t
  misc_feature (1472)..(1473): n is a, c, g, or t
  misc_feature (1475)..(1477): n is a, c, g, or t
  misc_feature (1481)..(1482): n is a, c, g, or t
  misc_feature (1484)..(1489): n is a, c, g, or t
agctcagactctgagcatacacacatcttcacccatcagatttcctcacttgaggagtgggatggggagaacagagagtagctgtgtttgaatccctgtaggaaatggtgaagcatagctctgggtctcctgggggagaccaggcttggctgcgggagagctggctgttgctggactacatgctggccactgctgtgaccacgacactgctggggcagcttcttccacagtgatgcctactgatgcttcagtgcctctgcacaccgcccattccacttcctccttccccacagggcaggtggggaagcagtttggcccagcccaaggagaccccaccttgagccttatttcctaatgggtccacctctcatctgcatctttcacacctcccagcttctgcccaaccttcagcagtgacaagtccccaagagactcgcctgagcagcttgggctgcttttcatttccacctgtcaggatgcctgtggtcatgctctcagctccacctggcatgagaagggatcctggcctctggcatattcatcaagtatgagttctggggatgagtcactgtaatgatgtgagcagggagccttcctccctgggccacctgcagagagctttcccaccaactttgtaccttgattgccttacaaagttatttgtttacaaacagcgaccatataaaagcctcctgccccaaagcttgtgggcacattgggcacatacagactcacatacagacacacacatatatgtacagacatgtactctcacacacacaggcaccagcattacacacgtttttctaggtacagctcccaggaacagctaggtgggaaagtcccatcactgagggagcctaaccatgtccctgaacaaaaattgggcactcatctattccttttctcttgtgtccctactcattgaaaccaaactctggaaaggacccaatgtaccagtatttatacctctaatgaagcacagagagaggaagagagctgcttaaactcacacaacaatgaactgcagacacagctgttctctccctctctccttcccagagcaatttatactttaccctcaggctgtcctctggggagaaggtgccatggtcttaggtgtctgtgccccaggacagaccctaggaccctaaatccaatagaaaatgcatatctttgctccactttcagccaggctggagcaaggtaccttttcttaggatcttgggagggaatggatgcccctctctgcatgatcttgttgaggcatttagctgccatgcacctgtccccctttaatactgggcattttaaagccatctcaagaggcatcttctacatgttttgtacgcattaaaataatttcaaagatatctgagaaaagccgatatttgccattcttcctatatcctggaatatatcttgcatcctgagtttataataataaataatattctaccttggnnnnaaanngnnngaannannnnnnccctgtccggccgccctcggcccctcaagaaagctttcctagaccaattctttttggcgccgcggggccc

SEQ ID NO: 6898 - DNA, 775 bp, Homo Sapiens
gggagttctcgcgaggtttcgtcttcccggaagcgttggaggacattccctgttgactgcgtcgcgatgtgtggcgactgtgtggagaaggaatatcccaaccggggtaatacctgcctggagaatggatctttcttactgaactttacaggctgtgcagtgtgcagtaagcgggattttatgctgatcacaaacaaatccttgaaagaagaagatggagaagaaatagttacctatgatcatttgtgtaagaattgtcatcatgtaatagccagacatgagtatacattcagtatcatggatgaatttcaggagtataccatgctgtgtctgttatgcggcaaagccgaagatactatcagtattctccctgatgacccccgacaaatgactctcttattctaaggatccttctacagatctgttataactatattgtgttggtttacaatacagcaagcctgatggtttgtcttatttcattcatactgaaaattctttgcatattttttttctgcttagacttacttattctttggaggaaaaaaagggaatgtagggagcctcattggttcctcttagaagctggagctccttcctgctaaaagtttcaaaggtttcaccatccaggtggtaagcccagaaggtggaaagccatccttttgggttaagccaggttaattggttggggccacgaaaaaacccacccttagaaaaatggggggaacccaacccccctgtgggtgggccccccaacgaaaatttttttgggggt

SEQ ID NO: 6899 - DNA, 1355 bp, Homo Sapiens
  misc_feature (854)..(862): n is a, c, g, or t
  misc_feature (877)..(893): n is a, c, g, or t
accggactgcggcggtgtggagattcggcgtgtgcagtttggattttcggcgtgtgcatgcacacgccgagtacccagaccacttactatcatgctggctgcctccatttccttctggaccaccaataattcccccaccacctcccatatgtccagattctcttgatgatgctgatgccttgggaagtatgttaatttcatggtacatgagtggctatcatactggctattatatgggtttcagacaaaatcaaaaagaaggaaggtgctcacattccttaaattaaggagaaatgctggcatagagcagcactaaatgacaccactaaagaaacgatcagacagatctggaatgtgaagcgttatagaagataactggcctcatttcttcaaaatatcaagtgttgggaaagaaaaaaggaagtggaatgggtaactcttcttgattaaaagttatgtaataaccaaatgcaatgtgaaatattttactggactctattttgaaaaaccatctgtaaaagactggggtgggggtgggaggccagcacggtggtgaggcagttgagaaaatttgaatgtggattagattttgaatgatattggataattattggtaattttatgagctgtgagaagggtgttgtagtttataaaagactgtcttaatttgcatacttaagcatttaggaatgaagtgttagagtgtcttaaaatgtttcaaatggtttaacaaaatgtatgtgaggcgtatgtggcaaaatgttacagaatctaactggtggacatggctgttcattgtactgtttttttctatcttctatatgtttaaaagtatataataaaaatatttaacnnnnnnnnnaaattaacacacacnnnnnnnnnnnnnnnnncgcacccaaaaagaacagatcaaacaagaacaaagcaaaagaaacaacacaggagggggcgcgcgtcaaaagatatcacccgagaggggcgaccatgttgagcgtgcgccaccacagtattgtgtcaacaagggggccccacaaggaggaggcgcatcattatacacacgacacaggggcgcgcatataaaaaaacacgaccgggggacgggggagaaaacaggcgtggcccgagaaacaactcgggggagaagaacccccccaacaccatcggggggagggcaaacaaaaaggggagcaacaacaccacaagaagaaagaaataaaaaagcccccggaggggaaataacagacagacagagagacaataacatgcggcgaacaacacgggacgataagcggcgggcgatagaaaaatgtcgccgcaacggcagaagtaagagaaaaaaagaaataacgcgg

SEQ ID NO: 6900 - DNA, 607 bp, Homo Sapiens
gggcattgcagccttcctacttgggctaatcttccttctggggggaatcgtcatccagctaagggctcagaaaggatatgtgaggacgcagatgtctggtaatgaggtctcaagagctgttctgctccctcagtcatgctaaggtcctcactgaagcttctctctctggagcctgaagtagtgatgagtagtctgggccctgggtgaggtaaaggacattcatgaggtcaatgttctgggaataactctcttccctgatccttggaggagcccgaactgattctggagctctgtgttctgagatcatgcatctcccacccatctgcccttctcccttctacgtgtacatcattaatccccattgccaagggcattgtccagaaactccccctgagaccttactccttccagccccaaatcatttacttttctgtggtccagccctactcctataagtcatgatctccaaagctttctgtcttccaactgcagtctccacagtccttcagaagacaaatgctcaggtaagcacctgtttccttttcactgtttttaaaaacccttttattgccaaataaaagggagatcccccttcacatcaaaacat

SEQ ID NO: 6901 - DNA, 1306 bp, Homo Sapiens
aagaaaagtatattccaattatgaaaatattcttaatttacattaagagatcactttttgtaggatgcacactaatgtgacaaggagcattttccgaatctttagaaacttctttagaaacattcatttcttatcaagttacttctgaatatttgttctactaagtttcaaaaacatcaattaaaaatcaacttctgttttctttttattatccctggttatacaaaatccccatgttcttttattatattgaatgttcagtctactgatttactggccccaagtaaccctcctatactttatccaattttttcaaagttattttccagttttccatagtttctagtaacgcccaacaggaacacattgaatgaaagatcatctgaacagaagcaatacaatttgagtcaaaagaaacaaaggattttacgttgtgtagggaccgaagaaatcaacactgagtataacatttcagtgttctcagaatgagttttttcattataacaaggtaatatgtataaaccgaatcatatacaatgtgctgagttggcactgaaaagcaaaacaccaaaaacagcaacaacaacaatgcactgaactgtttctccccagccgcccagtctaatcacaggtcatctaccttcacagtaggccagcggtaatcttcggcaaaaacactagaacgattctctaagtaaaaaagaaaatgtgtcaataattacttctttattttcaagggtcttccattcttgctttaaaataaacaaagtggttttataatgttctctcatcccaaagaatgataatctgggaaaacttgaacagaaattcactttgatgtattccatcttccgtttccaagggcacccatgaatgcaccttcacattcctctcaattacaatgcagtctttcttcaaattgatgaaacgtgcacctcctgagaaaactcttttgaaggagtcccctcatgcaagtttttgatgcagtcaggttcctgagcagaagagtttggatatcagattcagaagtttctgccggaagttcagtttgtctccaaatctcctgagttgagtagcacactcgacttccagctctgctggagcccgcgcggggctcggttgagcgttcttgcgcgccttcttcccaggcatctccgccggtgccgccgcccactcagctacagagcccgggaacctcagcctccaactggagcacctcggacagctgcaggacgcgagctgaacacgaacagtcctgcaggcagggatggggaatcgggtgtccggacgcgcgatcccgaaaatt

SEQ ID NO: 6902 - DNA, 1475 bp, Homo Sapiens
  misc_feature (56)..(93): n is a, c, g, or t
  misc_feature (97)..(118): n is a, c, g, or t
agtagataatcactaataaccttcattagagcatgtattatttgccgcacctagtnnnnnnnnnnnnnnnnnnnnnnnnnnnnnnnnnnnnnnaggnnnnnnnnnnnnnnnnnnnnnnattggtggtgctcgcttactttaataacaatacatataccatgttaacaccatggaatgcaaattcagattagacaagagaatttcacaagtgtgatagccttctgtatattatataaaagtttgggtatactgtctggccaaaccagcttgctcataagtcattaaccaaatccattataggtaatttgttcagttcaatgtttacaattcttatggaaaaaattagcaacacacacatttaaaacgtgttcatttacctttgcgtgagtgcttaaaatacatatttctatttcaagatgacatttaaaaattattctaatatatcagcagcaaaaatataatttgcaattacaaaaaactaaactagaatccttaagttattctcatgtttacagttgtgattctttaataaatactattatgcagctctattgtttaagctttctggatttggtttaaacacatgcatatatattgtcaattgtgggaagctttacaagttatattccatgcactttttggacagagttctaacagagccagccagtccacaaaacaggcagacaaaagttgaattaactggggcaaataggactcttatgcaacatccaaaatatctgacattctgcagcaaacagggagtaccttcaggattggcctgttatcttctttagaactaagttcatcttaaaaatttaagaaggtggacatttcaacaccatcaagtgcatttaggtgacatgtttaagttaacttgacttccttgaatgacctagttagtaaactagtcactagtaattcggtcaccaagcaaatcaagcctgcaagaaaggaagccaatattcaaaatgccatgttaccatctaaacccatacaaattagtttatttccaacaataataggtaactttaataataagacatctaactaaagcaagctcctccaacaagaccaagacagcatctcttcttctaaggcttaggttttgcccagaattcccgatacatggaatagcccataccaacagtcattgctcctacaacaaagccttgggctgccacacgcatgtggatcagatgaatggacattttagtatttcccctgctcttcagtttatataatccatatgcaacaattgctgcaaaacccgctattccaacgggtacgaatggtgcctctttagcttttcgaatgagttttgatccctgatcttcctcatatgaaggaagggaaacacctgtgtctgttgacatagtgattgcttgaagaatctccctagagcgagaaaacctctcacaccccaaccggcttccgatccctgcaggcgcacccagtcctcccggcttctccccccc

SEQ ID NO: 6903 - DNA, 2318 bp, Homo Sapiens
  misc_feature (1536)..(1536): n is a, c, g, or t
  misc_feature (1692)..(1702): n is a, c, g, or t
  misc_feature (1882)..(1897): n is a, c, g, or t
  misc_feature (1921)..(1935): n is a, c, g, or t
  misc_feature (1945)..(1945): n is a, c, g, or t
  misc_feature (2064)..(2075): n is a, c, g, or t
  misc_feature (2133)..(2133): n is a, c, g, or t
gggagagcgattgacggaaacagaaattgctttgcggcccgcacggaaattgctttccttcggcttccgttcttggtccatgtgagagaagctggctgctgaaatgactgcgaaccggcttgcagagagccttctggctttgagccaacaggaagaactagcggatttgccaaaagactacctcttgagtgagagtgaagatgagggggacaatgatggagagagaaagcatcaaaagcttctggaagcaatcagttcccttgatggaaagaataggcggaaattggctgagaggtctgaggctagtctgaaggtgtcagagttcaatgtcagttctgaaggatcaggagaaaagctggtccttgcagatctgcttgagcctgttaaaacttcatcttctttggccactgtgaaaaagcaactgagtagagtcaaatcaaagaagacagtggagttacctctgaacaaagaagagattgaacggatccacagagaagtagcattcaataaaaccgcacaagtcctctccaaatgggaccctgtcgtcctgaagaaccggcaggcagagcagctggtttttcccctggagaaagaggagccagccattgctcccattgaacatgtgctcagtggctggaaggcaagaactcccctggagcaggaaattttcaacctcctccataagaacaagcagccagtgacagaccctttactgacccctgtggaaaaggcctctctccgagccatgagcctagaagaggcaaagatgcgacgagcagagcttcagagggctcgggctctgcagtcctactatgaggccaaggctcgaagagagaagaaaatcaaaagtaaaaagtatcacaaagtcgtgacagaaaggaaaggccaagaaagccctaaaagagtttgagcagctgcggaaggttaatccagctgcagcactagaagaactggaaaaaattgaaaaggccagaatgatggaaagaatgagccttaagcaccaaaacagtgggaaatgggccaagtcaaaggcaattatggccaaatatgacctggaggctcgccaagctatgcaggaacagttgtctaagaacaaagaactgacacagaaactccaggtagcctctgagagtgaggacagaggagggaggcccagaagatgtggaagaactccttgtccctgatgtactgaatgaagtgcagattgaatgcagatgggccgaatccctggatgctcaggagctggaccacgtgacaccaaagaaggctggggcccaggcaggaccctggagcaactggccagagcttggcggcccctgggagtttctcgaaagggcgggggagaaaaaaaagaaccagtgggcaaaaagcacaaaaatttttggggcgaacccaaaattttgaggggaagacggcgcgaccgccctttaacaaccgaaagaaggtttgaaggcctccacacgccgcggagaatggcgcctggagagccgcccagcccggggggtgggaggcccgcgaggcggaggcctccgatanatagccaaggttcgtgcgggggcgccgaaagctgcccacgccggacaagcgggggggccccttcctgtataccctttgggggaaatattttctggcggaaacaaaacaacgcgtttgggggcctttccaaattccttcctccccttggccggcggnnnnnnnnnnncattttttcgtccgagcgaataaacccggggtgaaatataagaacccgcccgccgccgctcgttcgtgcccgggggccgtttccccccccaagcgcggggggggaaaaaagacggttctacagcggcgcgatgaaagggcgccgcccagcaaggtggcccttcctccgcgcggactaaannnnnnnnnnnnnnnnaaaaagccacacacaccgctgttnnnnnnnnnnnnnnnaaatggcatntcctcccccccttggtgccgcagacgaatgcaaaaaggggggaggaccaacgccccggtggtgtgcggcctccccggccccgggaggacaacgtcaacaagctcctaaccgggctgcgnnnnnnnnnnnntgtttagggtgtttcttgggcgtgtgctcccgcgctagtggtgtcacccccgtcactnacttcaacgaggatggagtctgcccggatcacagctccctgtttctggtgtggcaggacgccacgccctcgtgggtgaacgagaaagccttgtggggtgtagacagaatggggtgacctcccagcgggggggttctcctcccgccgatcgacgcagccgacgctccgcgcgcgctctgggcgctg

SEQ ID NO: 6904 - DNA, 647 bp, Homo Sapiens
ggcaaaaactattgaacagttggttttagtgtgttgtataactttgctgtatatcaaactaattttgacaagttttcatcctaagcctcaaatcatgtaattaataatttgcctgtttatttatgacctaattgtgattcttttattaataaaagctaatgggaaaaggatccctgattaagctgatgactagacctacaattaattttcctgcagtatatgaagtattgtaccagagtattaaaagatatgtaatattttattgataaatctatcctttaaaaggaatacgttttaggatgtcatcattttgatgtgaatcatgtaaatgttgataatatgctgtttattatacatttagtgtttcaagagattcacttaattgcctttttgcccacgtatattatgtagtctatttgcaactgttcttaaaaaaatgacattaaaagaatagtttatgtagagaaacattagtggatgttaattgtctccccacctatatttatgggtgttagcgcaactgctttgctagttgcaaagctgtattatcagagtaaaagtgtatttgtaaactgtatgggaactaaaaattaggaataaaaccattttcttatatgatttgaaagaactgtaatttgcgcttgtca

SEQ ID NO: 6905 - DNA, 975 bp, Homo Sapiens
  misc_feature (621)..(645): n is a, c, g, or t
gggacccccagcttttcttccgccagagctgtttccgttcctctgcccgccatgccgttcctggagctggacacgaatttgcccgccaaccgagtgcccgcggggctggagaaacgactctgcgccgccgctgcctccatcctgggcaaacctgcggaccgcgtgaacgtgacggtacggccgggcctggccatggcgctgagcgggtccaccgagccctgcgcgcagctgtccatctcctccatcggcgtagtgggcaccgccgaggacaaccgcagccacagcgcccacttctttgagtttctcaccaaggagctagccctgggccaggaccggatacttatccgctttttccccttggagtcctggcagattggcaagatagggacggtcatgacttttttatgattgggcacggagggatccagggcatctgtgaactggctgcttcttccagagagatctcttggcagagtgagggcctggagataaccagctttggattatcccgcatgcaacattcctgtgatcacataatcctcttcttcatcctcatatgaaataaatgaagagagcttcctcattcaaaaaaagccaggaaagaaagaacaacaactaacnnnnnnnnnnnnnnnnnnnnnnnnngggccagctcgcaacaagaaagagattcccacggagggcccacagtattacgcctgacgcccacgcggctctgcccacaagtggccacacatactaaaagtcaggacataaatatatcaagcatcacgcagacgctacccgcgtgaatcaaaccagactgccacaggaacggcgtacgaaacagcattctcacgcaacgacgcgcaaacctccatacagacgaggacacttctagacatatgcccgacggggagccaccacaattctactgaacaaccaacatctctagaccaaacatatgctacaggcccgactcgaggagaaacatcc

SEQ ID NO: 6906 - DNA, 436 bp, Homo Sapiens
gtatttagtagacataactgttgaatagttactgaatcatgatgtaaagaatatgtgaccatcttcaggtatgggatttctgaacgtttcaaatttcaatcaatgagcactgtcaacacccacaggagagaataaaattacctgtgcaaaggtgtattgtggtgtgtgtaacttaagattacagttctgtttgagagttaaatgatgtcatagctcacttgctatgctgcttccaggattttgttatatgctgaggtgtaaccatttgtgttgtctgactttcgtatgatttaattgagccaaatttgggtcagaacacaaatttgaagatgacttttcagtatatgatgggtatttacatttgaacactagaattttaggtctctcaaataattaagaatagagccagttttgaataaagtctagcagaactatg

SEQ ID NO: 6907 - DNA, 1399 bp, Homo Sapiens
atctgcaccatcagtgggagagctttaatcggttagacttctcaagtgcaattcaagatatccgaaggttcaattatgtggtcaaactgtcgcagctaattgcaaaatcccagttaacttcattgagtggcgtggcacagacagaattacttcaacattttggataaaatcgttcaaaaggttcttgatgaccaccacaatcctcgcttaatcaaagatcttctgcaagacctaagctctaccctctgcattcttattagaggagtagggaagtctgtattagtgggaaacatcaatatttggatttgccgattagaaactattctcgcctggcaacaacagctacaggatcttcagatgactaagcaagtgaacaatggcctcaccctcagtgaccttcctctgcacatgctgaacaacatcctataccggttctcagacggatgggacatcatcaccttaggccaggtgacccccacgttgtatatgcttagtgaagacagacagctgtggaagaagctttgtcagtaccattttgctgaaaagcagttttgtagacatttgatcctttcagaaaaaggtcatattgaatggaagttgatgtactttgcacttcagaaacattacccagcgaaggagcagtacggagacacactgcatttctgtcggcactgcagcattctcttttggaaggactcaggacacccctgcacggcggccgaccctgacagctgcttcacgcctgtgtctccgcagcacttcatcgacctcttcaagttttaagggctgcccctgccatccctattggagattgtgaatcctgctgtctgtgcagggctcatagtgagtgttctgtgaggtgggtggagactcctcggaagcccctgcttccagaaagcctgggaagaactgcccttctgcaaaggggggactgcatggttgcattttcatcactgaaagtcagaggccaacgaaatcatttctacttctttaaaaactccttctaagcatattaaaatgtgaaattttgcgtactctctctctctatatatatagttcaaaaatactttaggtggtcagctccacattctttgttgacgtgacactaacggccaataatatgcttcttaattatcaaattatagtttcccaattgggaaactaattgggggtgggttacaaaacatttgatccttgtaaatacattgtacagaatatttattttttctcaaaatgcattttaactactacattggctgtgcccaaatgagtcctctttgaatagaaagtgaacccagggcaatgacagccattcttgtcttagggattatggatcggggcatgaattgtgcacacgcagcccaacaacgggcagtggtctctgtgctcctaggcatcc

SEQ ID NO: 6908 - DNA, 507 bp, Homo Sapiens
  misc_feature (397)..(460): n is a, c, g, or t
  misc_feature (477)..(477): n is a, c, g, or t
gactttgcccacaagaagccttgtggagattttattatatagagggtaaaatgaattgtcagtcaaataaaaagaacactttgttttcttaaaaaccccatgcataacattttccaattgtcttttttaatagttagacatttcaagcattataagaaaaataaggagaaaaaaccagaaactgtaacttcagtacatttcaaacggaatgtccctcaggccaattagaaatgcaagaaaaaatagcttcaattccgttttttttcctttaaaaatacatggtatctgtacaagatacactacagtaaacactggaaatcatattatccctttcattaaatcaaaattatttaattcataatgcggttaatactagatttatttattcatctagttnnnnnnnnnnnnnnnnnnnnnnnnnnnnnnnnnnnnnnnnnnnnnnnnnnnnnnnnnnnnnnnntagttataactacattnttatacggtttaatgttccacagtgtgtgt

SEQ ID NO: 6909 - DNA, 522 bp, Homo Sapiens
ggacacaagaagggtaggagagaaaagccatggccgacaaggtcctgaaggagaagagaaagctgtttatccattccatgggtgaaggtacaataaatggcttactggatgaattattacagacaagggtgctgaaccaggaagagatggagaaagtaaaacgtgaaaatgctacagttatggataagacccgagctttgattgactccgttattccgaaaggggcacaggcatgccaaatttgcatcacatacatttgtgaagaagacagttacctggcagagacgctgggactctcagcaggtccgatacctggaaattagcttagtacacaagactcccaattactattttcttccttcccagctcttcaggcagtgcaggacaacccagctatgcccacatgctcaagcccagaaggcagaatcaagctttgctttctagaagacgctcaaaggatatggaaacaaaagttgcagaggtgccatgttcagaatacaataataaagtggagtgaaagac

SEQ ID NO: 6910 - DNA, 360 bp, Homo Sapiens
gaccaacctccagcaggacccagaagctcccacagtgcccaagaaggggaggaggaaggggcgacaggcagcctctggccactgcagaccccgaaaggtcaaggctgacatcccatccttggaaccagaggggacctcagcctcttagcaggaggctctccttgattgcaatcaccctttcttattgtcttgccctgcatctgggggtctgaatttttgggagcaggcaatatctgaaggtgcaaacaggccctacggctgttccctgcacaactctcatggttttaattgtaccccatcttccacatctttaaagctcatgtgaaaaatgctgcatttttaataaaaaaatacatttga

SEQ ID NO: 6911 - DNA, 846 bp, Homo Sapiens
  misc_feature (253)..(349): n is a, c, g, or t
  misc_feature (408)..(618): n is a, c, g, or t
  misc_feature (818)..(818): n is a, c, g, or t
cagccatattttgttcttaaagtggggtctttattaacttgtggacatcatggattgtctaacaccatcacagtccctggctcaggattctaatgtaccattatttattggtttggataaacccagctgtgctacactgcagagtaaaatctctgaggcatgattctggactttgggagctagttttgaaactctgatttattgtagaacttaggcttgtaccaattttacaaataaattctgttctaagttnnnnnnnnnnnnnnnnnnnnnnnnnnnnnnnnnnnnnnnnnnnnnnnnnnnnnnnnnnnnnnnnnnnnnnnnnnnnnnnnnnnnnnnnnnnnnnnnnttatccgaatagcctcgccccaccaccaatagatttttttaaacacctttccaaaccannnnnnnnnnnnnnnnnnnnnnnnnnnnnnnnnnnnnnnnnnnnnnnnnnnnnnnnnnnnnnnnnnnnnnnnnnnnnnnnnnnnnnnnnnnnnnnnnnnnnnnnnnnnnnnnnnnnnnnnnnnnnnnnnnnnnnnnnnnnnnnnnnnnnnnnnnnnnnnnnnnnnnnnnnnnnnnnnnnnnnnnnnnnnnnnnnnnnnnnnnnnnnnnnnngagatgctactctccccgagaaagcttccaacaccctaacgccgcacacccccctaccaataggccccttaccctcccagactcacggaaccaccattctcccacctcccacactctaccaccctaaaaaactctgcccacccacactgcacatagtgtattcacccaaccaacgccccccataaccctacctctgcganctcttctccggcgcagacgtttcacccc

SEQ ID NO: 6912 - DNA, 2276 bp, Homo Sapiens
  misc_feature (1369)..(1370): n is a, c, g, or t
  misc_feature (1372)..(1399): n is a, c, g, or t
  misc_feature (1405)..(1405): n is a, c, g, or t
  misc_feature (1612)..(1612): n is a, c, g, or t
  misc_feature (1761)..(1761): n is a, c, g, or t
  misc_feature (1834)..(1834): n is a, c, g, or t
  misc_feature (1857)..(1857): n is a, c, g, or t
  misc_feature (1898)..(1898): n is a, c, g, or t
  misc_feature (2053)..(2053): n is a, c, g, or t
  misc_feature (2067)..(2067): n is a, c, g, or t
  misc_feature (2093)..(2093): n is a, c, g, or t
  misc_feature (2213)..(2213): n is a, c, g, or t
  misc_feature (2229)..(2229): n is a, c, g, or t
ggccccgggtggtaatcggcacgaggagggaacagcaatgcctaaatttccctctctcgtgagatgggggatcctgtgcaggctgatgaggcacccatgagaaaagccgaaaaagcatgcatcttagaaatagcccctcaattccaggagtcaacatgccaaagaatgaggctggagacagatagctccgagggaggacttctggcatgagatctcggcacggcaagcccagcatcgcctcagcccagacaggctccaccaggagatcaagcaagggctgcctttcaggagtcacctcctgagccacttcagagttctggaagtgaccacggaccagggtggaggaatagacttctagttcattctgggacacttgagccagagagttgaaagcttggaaagaccagataagaaacctgcccttagtctccctagggacatgagacaccacattccatttgtgctagaaaaacctatccactgatgagtctaactgttccaaacggcctcccacctggtgtgcacagctgcctgggtccattgtcacttgggtgcatcaggttgtcctccgatttttaggatgagtttcctgtctagagatgtcctagtctgctcactggctggtggcagtagggtaccctgcgtcctcgaaaagccagagggttcacctagtcagacgaaactccagaacagtgcttgtggagggcctgactgtcctgctcacccacagccgatctgctgcaggtcagcaactgtgtcgtgagcagctgccaaccaccagcctttctggtgctgttctccagttcacgtctgccagctggtgagggcagaggcagacctggtcagacccagcgcccctcctccctgagggagcatggcacagcctcacacttgaaagacggtgtttggtttcccatctaatcaacttaagggaagccggcatgtacccttcaaggccctgtcaccacctatttcctgatcagttggtataaactgagggtggcttttagagacccagacttggttggcagcgctgccatggaacaccccagcaagcacctcccagcctgcctttcggagcagcacccaggaggggatgccgcgctccagcaacaccaggtcaggcctgtgcagacccctgccctgccgctgcagaaatccagaagcatccttaatgcttctcagtcttcagccagagggagggctgttatttccagaggtgcgctttttatgtacttttagctagatgtggcatgcatctgtgagctttagatcattaaatccaaaatgtttgcctaaatgagtttatcagttgttaacttcaagaatattaaatgatttataataaagctcctgcatttctctccgnnannnnnnnnnnnnnnnnnnnnnnnnnnnntgtgtnggacgactgtcgggcctggacaacttggcccaaaccaattcttttgcgagccccgtttctgatgagggcaaggggaccatgaaccctaatctggtttgcggaccaagagcccctgtacccaagaaaatgaccgtgggggcaatgccttcacccacctatgaaaaaaccccccgcggggaaaaaccgaagccgggttggggcaacccnaatcccagaattggaaatcccccggcgcggaacgtggaacggggtttcttattcaaaccagggggtcctcaaaggccaagcggggagggcctcaaagttaagcgtccccccaactccaaggaaaacctcccctgggcccttgggctggnttgaattcttaacatttaagggggcgtttcctgccgcgataaaggcgaatatccccgttcccagaaatggggnaaattcaattaagaacgtttggnactgggggcgggaaaggcctatcaacacaccccccgggggngggccttagtggcccctataatgttccctcccgccccggaagagaaaaaaataagcgcgcggcccggggaacgagaaaattggtggacacaatattatggagaccacccggtctccaaaaaaatttggccgccccgggcggggtgaaaaaaggtnccacctctcggggnggagtagagcgcctctcccccacganagaaaaaatatcgcggtgtgtgtgggcaccacaaaaaacacccgccccttctttctggggcgaaaataaacagccgccctcaaagagagggaataataatagctgggaatcagaacgccntcccccttgcccgctngaagagcagaagaagaaaaacagggccgtgggagaaaacacaatgcc

SEQ ID NO: 6913 - DNA, 405 bp, Homo Sapiens
cagtgttaacaacaatcatgataattaaattaaaacactagtttgttcacttgtaggactgcagttctgaattttgggttaaaggttttggctgctgtaagaatgtgaatttgaatgtattttgaattgtaagagcaaaagaacgtttttgtacaattttttttcatttaattggaatgatcttcaggtttctacaaatagggtaattgtaaatttaaagcattagcatttattggtgaataatgtatatatccccattccaagaaatataagtgagtgaagttgaaataaaatctttaaaatttactatattgccagtggtttcacaacagttctcttgtatttatttatcaattaaatcaaataaaaatgattatgtcaatgcgttttcagttatttaagtaa

SEQ ID NO: 6914 - DNA, 577 bp, Homo Sapiens
gctcaatgtacaccatgcgaagtatagtagcattgctgacgctgctgtagactgatgatggtacaactgctcctgtatatgctgcatctatgtcgtaaggatgtggaatgaaaaaagaagatattgcaatgtgggaagtaaatgaagcctttagtctggttgtactagcaaacattaaaatgttggagattgatccccaaaaagtgaatatcaatggaggagctgtttctctgggacatccaattgggatgtctggagccaggattgttggtcatttgactcatgccttgaagcaaggagaatacggtcttgccagtatttgcaatggaggaggaggtgcttctgccatgctaattcagaagctgtagacaacctctgctatttaaggagacaaccctatgtgaccagaaggcctgctgtaatcagtgtgactactgtgggtcagcttatattcagataagctgtttcattttttattattttctatgttaacttttaaaaatcaaaatgatgaaatcccaaaacattttgaaattaaaaataaatttcttcttctgcttttttcttggtaaccttg

SEQ ID NO: 6915 - DNA, 1515 bp, Homo Sapiens
  misc_feature (669)..(688): n is a, c, g, or t
  misc_feature (940)..(1039): n is a, c, g, or t
  misc_feature (1059)..(1071): n is a, c, g, or t
  misc_feature (1312)..(1324): n is a, c, g, or t
  misc_feature (1443)..(1454): n is a, c, g, or t
ggggagctcacacacgtgcctacgacccgccgcggcgcctgcgcggtagcatcgcggagtcggtgctttagtacgccgctggcacctttactctcgccggccgcgcgaacccgtttgagctcggtatcctagtgcacacgccttgcaagcgacggcgccatgagtctgacttccagttccagcgtacgagttgaatggatcgcagcagttaccattgctgctgggacagctgcaattggttatctagcttacaaaagattttatgttaaagatcatcgaaataaagctatgataaaccttcacatccagaaagacaaccccaagatagtacatgcttttgacatggaggatttgggagataaagctgtgtactgccgttgttggaggtccaaaaagttcccattctgtgatggggctcacacaaaacataacgaagagactggagacaatgtgggccctctgatcatcaagaaaaaagaaacttaaatggacacttttgatgctgcaaatcagcttgtcgtgaagttacctgattgtttaattagaatgactaccacctctgtctgattcaccttcgctggattctaaatgtggtatattgcaaactgcagctttcacatttatggcatttgtcttgttgaaacatcgtggtgcacatttgtttaaacnnnnnnnnnnnnnnnnnnnnccaacctcatggcctgtgggttattttggtcttgtaaggatccatttctttaaaatactgacatatagagttgtaccttatatagaatatagttgtatcttgaagtcaacatattaaattattctcaaaattatgtatttgcagattgtacttgtaagtttcaaagaaaaattaccatcttttcatattgacctggaaactaaataggatgtgattcagctacattaatttcttaatacaatctaggaaagnnnnnnnnnnnnnnnnnnnnnnnnnnnnnnnnnnnnnnnnnnnnnnnnnnnnnnnnnnnnnnnnnnnnnnnnnnnnnnnnnnnnnnnnnnnnnnnnnnnntaacactatccttggtgggnnnnnnnnnnnnnttaaaaacttttcaataacccttttttggggcccgggcccccccaggaaagggaacctgccccaacttgtttcctaagaaaaccggggccagccctagggcttgggttttccccccaaaaaaaccccgccggggggaacccccggtggttttaaaaaaaccccaaaagggccccttcgggggccctttcgggggtattttcccctcggggatccaatagcgccccccaattatcaaatttnnnnnnnnnnnnnttgccattctctcccccaaaagggggcccaatttccttacacccctcccccccgaaattttggaacccccttcccacaacccgggtggtcccaaccctgactttccgctggggggcctnnnnnnnnnnnntgggcgcctctttcgggaaaaaattttctcctccgcccgggggggaaaatatgggggccgc

SEQ ID NO: 6916 - DNA, 527 bp, Homo Sapiens
  misc_feature (87)..(112): n is a, c, g, or t
  misc_feature (153)..(193): n is a, c, g, or t
taaaaaatataaattatatgaaaatacaagttggaaaatagtcaaacacaatataacatctttttcatccctatacttctcagcttnnnnnnnnnnnnnnnnnnnnnnnnnngttcaataactgaggcagtattcctgataattttattttannnnnnnnnnnnnnnnnnnnnnnnnnnnnnnnnnnnnnnnnggttccttgaaacttctttggaatgtaggtaagagttcaacaaatttatatagaccccaacagagtaagcggcatgcacagcatgactagaagagagatggtgtatttctcaccatgaaggttaggcaggttaatgctgtaaaacccagagtgttcatctccaaagtgaggaaaagcacatctgatctttgaatgctacctccaatccccacagccacaaaaatcagggctctatgtaggggaagtccctctccagaatggagaagggaacaaaagtgactctgaaccctaaagccaaaaccaacaaaggttaaggcatctctgggaaaataag

SEQ ID NO: 6917 - DNA, 532 bp, Homo Sapiens
agaaatgcactcaatctcaccactgaagtatgtttctatagataatggcacgtattaaaaaaagttttagatacttcctactgaaaatttggaactccaaaatagcactcactactttaaaaaaattttattgtagatagcaaaatttccatttctatgtttttgcaattaataatagaaatatataggagacaatgtcaggaaacagataaaattgtaatttaaataaaaacaaacagtgagagcataagatttataaacatgtaaaattagtcaaattttgttttacaacaaaaagacaaatctggctaatggcccacttgttcaaatagcattaaaaacagaattgtcacacacaccaaaaataatttgttccagttatttcaactgtacattggtcctcattaaaagagaatgaaaagtacagagaaaatattttttaaaaatctcatcaggctaggtatggtccctcggcgtggcaacaacttcgtccatcagacttgccatcaggtctgggtactcggcgtgtgca

SEQ ID NO: 6918 - DNA, 299 bp, Homo Sapiens
  misc_feature (92)..(115): n is a, c, g, or t
gattccattttagttaaagaacaaatttcctgaattttaagcattcagtgagctgccaattttgattttgtgttgctctttacccaaattannnnnnnnnnnnnnnnnnnnnnnngggggaggaggggaaaaaagcagcaatactgtgtttggaaattatactctgtatctggttttcctgtgtatgttaaccacttaaatgttattatcctgctttggttttagagtgattgtgaggcattcaatgcaagtatacagttattttctcattaaaatccaatgtgtgttgagtttttctc

SEQ ID NO: 6919 - DNA, 458 bp, Homo Sapiens
ccagacatcggtgacatgccatctgtgcccgttccatctccttccctgaggcagacactggcatcttgcatcctatgagggggtcagtgacatgggtccagtcgatgcagcactgcagttccagctggtagtgggactggatatagagaaggagatgctggtagaagccaataccagcaaccaggtgcgtcctgtaggcacattccaaagtgctccggctgtggatgtgctttttgttagtcttgataagctggataacttcatagtatacctttctccacagcagctcctcagcctttctcccatagtccactgggtgcaggaacataagcttgacgcagagctcacgcagcttgttcctcaggctaatgttttctggtttgaatacttcttgataagcagttttgttgcaaaggatgaggtcaagtcgatgcacagcctccaccgcagcccggtaa

SEQ ID NO: 6920 - DNA, 792 bp, Homo Sapiens
tccccatgttctttaaaatgcatttgaaaaacactagccctgtggctatttctctgtatttgaataatggcaactgctttaaaggaaatggtcaaataggcatgttttcctctggcagggtcaatcatgcttagctgcaggtgatttaaattagattactagtcaccttcacttacgatcctgccagtttttgctctctatatactttaaaactctttcacattagatatgattagtatgcatttacatacattttaaaagagtatgaaaacatctggaggcttttaataagactttccaattccctttggcagcaaagaggcagaatcagttcaacacaccgatgtaggagaaaaaggaaaatctcaacaaatcaaaataatattcaaaccacaacatttagtttatctacatcccgctcaacagcaacatttataatatatcaataatctgtatcagaattttctctgtagggtacctttttcatatgttctgattatttacaactgtacaagcgaagcacactccaagtgcacggtatttaatacagtattgacttatttgcatttacaggattttccaacattctgaaaaaagatcaactgttgaagatctttaaggtatattacaaaaactactactagctcttgtactacagtatgcttactcagtaaaactagcgacaggagatccacgcagtaactgagtaactctgacccactcacgccaacccagggccgggctccatggactctaagctgtcttatacaaaagttaaggcaaagtcatttt

SEQ ID NO: 6921 - DNA, 687 bp, Homo Sapiens
  misc_feature (115)..(115): n is a, c, g, or t
attgcctgccgcctccgtgggaaggggacacaggtcctgcggatgtgatggcccagctatggctgtcctgcttcctccttcctgccctcgtggtgtctgtggcagccaacgtggncccgaagttcctagccaacatgacgtcagtgatcctgcctgaggacctgcctgtgggtgcccaggccttctggttggtagcggaagaccaggacaatgaccctctgaccttatgggattgagcgcccccaatgccctactttcttcgctgtcactcccgaaaaactggggaaagtgaaagcttggccagcgctcttggactacgagacactctacacattcaaaagttcacccatctcccgtgagcgacccctacatccaggtgcagagggagatgctggtgattgtggaagatagaaacgacaacgcacccgttttccagaacaccgctttctccaccagcatcaacgaggtgacacctgccttaatgtggttgtggggcagggggcatcccaaagtgcttctcagagtaggaagagccagagacagtcagtggggcattcagagttgggaaaaacctctcctagcaggggcagcttcaagaaccaaagccagggggatgtaaccccacaaactggttacagcaatattttgcaatcagtcaggttaggaattctttcagtgatgaaagca

SEQ ID NO: 6922 - DNA, 336 bp, Homo Sapiens
  misc_feature (32)..(32): n is a, c, g, or t
  misc_feature (47)..(48): n is a, c, g, or t
  misc_feature (62)..(62): n is a, c, g, or t
  misc_feature (92)..(92): n is a, c, g, or t
ggggaaattgtggctctggaagcattcacagngtttcccagaatgtnnggaaaatatatgcntgtgcaggaatagaaatccctgcccagagngctgtttcatgtctcattgtgagctctccgttcatgtggcagagcatggctgtggcgtttaggagcctacattttagaaaagcttacctcaaagttctgcattgagcctgagactggaaaggagataaaataaaacagctgacaggagctttggtagtcacacatgcctgatggggtgcacagggccacagtctctgaaaggcaatttggcattgtctgctccccactatactatttatccatt

SEQ ID NO: 6923 - DNA, 752 bp, Homo Sapiens
  misc_feature (21)..(21): n is a, c, g, or t
aaagcctcttagttcaaagtnccttgagcaactgggttcacaggcccaggagcacaagtggggcagtgaggaggaactatcactgcaccctccaaggcaagagaagtccctgagtagctggtttcccttggcccagaggcaaggggtgcgcctgacggtcatggggtttgaaaatccaggacgtggaggttgtaagacagggcagcatagagatgcttggtggtgagacgcaggcaggacacagggctgctgaggggagtcgacgtcagcgggaaggcgtgcaggcaggccctttgacgccggtcccacagccgtacaacaccgtagtaggaggaacctgtggccagcaggtggttgccatctgtctgcaggcagtacagggtgctgtcgtggggctcctcccactccatgacacatttccggacgctggtgcggaggtcccagtagcgaacataggtgtcatagccacaggacagcagtgtgaaaggggactcatacatgacatccagcaccccagcccctgggggaaagtcactgcccaagtgtgtcatcagctgcccactgttgaggtcccagattctcaggggtgagaagtgcccgcaacaagccgtccctgtcacaaaagagctgagtaatgggctgatagcaatggaccagactcggtcttcagtctggatggtgtgtaagcactgccccagccggcctgaggccaaaggccacaccttggccgtcctgcctgtcccaagcgatcc

SEQ ID NO: 6924 - DNA, 607 bp, Homo Sapiens
  misc_feature (99)..(99): n is a, c, g, or t
aagcctgaactcaccatggaaacccatgtcagcaaacagtgaccagcaaatcctcttcccttaattctaactgctgcccccctaggagactccaggggncaggcattgcttcctccctagtgtgaactctctggtattccatccaccatcctggcagcccagagctgcttctgggttaggacaacaaataagggggccctacagtcagagcagctcttacccaaagtggtgagcgtcaacttcctgtccagattgcaagttaatggcctttacagctgactcgggctcctatgtcgtcattaataaatattaaagctgataaggaccaagaaagtggcctgcagcctgagtgtgggaggcccaatgtctttctggttgctctgttgatgttagaatcccaccatcacccctctcgtgggtcatagttggagagctctggcaagggttagggcagaggtggctttgtgaacactgggccctttgagcaattaaccccaggccctagtgggtcatcagttgtagagagacggtctctggcaggatcgttgcccttcacagagcgtccaaagatgctgtccaagaaccaggatgctgcttggcacttctc

SEQ ID NO: 6925 - DNA, 460 bp, Homo Sapiens
  misc_feature (439)..(439): n is a, c, g, or t
cacataagggttttatggggagtaaagagttaaggcattaggctggactgtaaatatttgatttctcttagtgcctctggtttaatattggtgacagggtctgcacatcagcgtatgtggcaggctaagtcttttccccagttctcctattcctcttctatctgctcaactctttgcctctatgacttatttatttccttttaaatctgcttggttctttggacttaacggaggaccttatgtagggggagaaacacgtgtattatgggaacaactgaaaggtcagcctgaagacttttgccctgttgctttctgagagtgctggatatgagtccctgtctctgaaacttctaaaaatatgcacccttaaccagctttccacggagggataagcctttgtcaatacaaatggtacagtgagcagcagaagagaggaatnggactgatagaaggtggggat

SEQ ID NO: 6926 - DNA, 527 bp, Homo Sapiens
  misc_feature (216)..(226): n is a, c, g, or t
ttgagcaccacgcctggctccatccactattttgaggattcctttaacctttcttgtttattgaatttcatctttcctctatcacatcttccttttcgtagaaacatccagtagctttctagaatagggcatggaagttagatttttttaagatattgcaagtttattttagcccccattctgggatataatttatagcagtgacgtgtgttgacnnnnnnnnnnnctaagaacaaaatttctgataaaaaattctgaattgacatcataactaagaagcacatgactagagaaatctgtatcagaatttataatatatttaagctagcctaaagtcagtattaatggtttaaagaaagcctcatgaaactggcagcaagtagacactgaataaaagattattattaataacaacaaccacatttatacctgtaagttataatataaactaagtagataaatttgacctaaaagaaggcaaaccaggggttttggtttctcaaggtgcctaatcctgattagccccc

SEQ ID NO: 6927 - DNA, 386 bp, Homo Sapiens
gcagacctccttcttgtctggggactagactaacattagccacaggattagaaattacggtttaggagtcacgcagctggaggctacaagattctgaccctccctaaactgcttctaagatcagtgcttgagacatgttgcagaccccgcacttgctggatcagctgacgccacacagatggataaactgcctcgtctgatcttgtggcccccacccgggaactgacgaagcgcaagaagacagcttcgactccctgtgagttcatccctgaccaaccagcactcctggctcactggcttccccctaccaagttatgcttaaaaattctgctccccgaattctcgaggagactgatttgagtgataataaaactccagtctcccgc

SEQ ID NO: 6928 - DNA, 2391 bp, Homo Sapiens
  misc_feature (74)..(74): n is a, c, g, or t
  misc_feature (109)..(109): n is a, c, g, or t
  misc_feature (124)..(124): n is a, c, g, or t
  misc_feature (138)..(138): n is a, c, g, or t
  misc_feature (263)..(263): n is a, c, g, or t
  misc_feature (406)..(406): n is a, c, g, or t
  misc_feature (436)..(436): n is a, c, g, or t
  misc_feature (550)..(550): n is a, c, g, or t
  misc_feature (555)..(555): n is a, c, g, or t
  misc_feature (750)..(758): n is a, c, g, or t
  misc_feature (1014)..(1088): n is a, c, g, or t
  misc_feature (1215)..(1225): n is a, c, g, or t
  misc_feature (1506)..(1515): n is a, c, g, or t
  misc_feature (1595)..(1616): n is a, c, g, or t
  misc_feature (1774)..(1782): n is a, c, g, or t
  misc_feature (2043)..(2057): n is a, c, g, or t
  misc_feature (2097)..(2106): n is a, c, g, or t
cgaggatgcgccacggggcgcgcgcgctcgggccgaccattcccgtcgcgctagcaaccgagctgcatcgggtngcggtgacgccgtcggacagactctgacgagtctncgcgcgcggttctcngcggcggagatgcntctaacacgcgcgcgcgcgggacacccgcgtctcgacgagtaatctatcactgcagcgcgggcgcgcctcaagagactctgcgccgcgggcctgtcgcgcggctgctcttagcaccggttctgcncggtcccgcgctcgccagcagccgctcgcgtctcagaacatgcagagagtggcgcgggcggtacgcgtcgtgtttatgatggacggcggcgatggtgggtatttgattatgttgcggctggtcttctgccgtgcactgcactnaccaggatgtatcatcgctggttcgtggcntcgcacccacaggcggtggtggcgtcgcatcggcaggcgtgtcatcgctagcagaacatctctcgttgtgctcagcgcactccgtgcactgcgggcgtctctgtctctcgtagnggccncgctcggcggccgcgcctaacaccacctgttgttccattctcctgtcgtcccgcggcagagtctcctatctcgggcgcgccgcctcctatcacccccagccatcccgctgtccccgtgccgcccgcacccccggccctccccgtccactccgcggggtgggagctgtcggcggaaacgcgggcggggcgttcgcnnnnnnnnnccgctcggctacgccttgcggaatgggcgtgaggggctcggtctcgcgcctcggggggccccttgcggtgctgcttgctcggcgccggctcatgggggttgttcggagagcgcgccggcagtagagcaagcgcgcggttgggtccacgctccgtggggggggcgcgcccgcgccgccctccgggggcgccttggcccctgtttcggggaggggaaggggcttcggttttcctggggggtgtttcggcgttcttgcnnnnnnnnnnnnnnnnnnnnnnnnnnnnnnnnnnnnnnnnnnnnnnnnnnnnnnnnnnnnnnnnnnnnnnnnnnncgtaaattttcttccagaaatattttaataaaaattggccatttccaagtaacacccactgcatgcccatcaataaaagagaaccataacaaaatagaaaatttaccatatggctatgattttaagnnnnnnnnnnntgcggacacgagcacatgagcaaagtccaatattaaagtaacattccttcttacgggctatgattaggaatctgattagataccagaataaaaatacaaatgctgaactatttaggtcaaagaacctctatagaagcatctgtcttcaaaggcattccagtttgagactcaattttagaataaggcataacaaatatgttaacaaaagacatacacaaagtgatgaaagagggattctataattccccacatactctgaacctaataaaacaaatctagannnnnnnnnnaaacaattgccaagactgaaatcaaagataaatagaaggcacaacagttttgctctggttgtaatctgggttttgggaannnnnnnnnnnnnnnnnnnnnnacaaatacaaattaaacatgaaaaaactacttcaaaaaaactaacagttcaagaaaagcctatcagttgcattctagacatttaaaacctattatcacaatttaaatttcaatggtaaaaacagttaggttttagaattgttttgtgatcctttatcnnnnnnnnnttctattccttttattcagtttttaaacataccagtgagaatcaaaattgtcaaattttccaatggcaatttctccacaccagaaggtagtcatgactctcaaagaagaaacaatttgggtttttcctgccttcaaaatattatcaaatcctgtatttcttacaggcttttcaaacacgtagaaaataagaaatattccaatgaatgaaacataccaaatgtcagtaatatgcaagacattcctttggggaaatggctgtnnnnnnnnnnnnnnntccagtctgtatatgcaaagtaagcaaggaaattcagtcnnnnnnnnnngcttctttaaaagtccgttattcctaaaatatcattccacaaaattggaagtgaaagactaaaggtcaggaaagggaagagagggagagggagcacacaccattaacacacaaaaaaagtaaaattatacaaacttaagcagtttataacagactggggtcatactccaagataccaaaggctgtcgaaaattcaccattctgttggaaccagggtttgtatggctgcatgaagatccatgaagattcactgccgtggcgcaagcccccttcccactccaaatcc

SEQ ID NO: 6929 - DNA, 942 bp, Homo Sapiens
  misc_feature (789)..(789): n is a, c, g, or t
gggatgccctgcgatagaaacacagttacctctcccctttcacgtagttttcatttgtggtgagattctctcccaggccacaagacatttcctgctcggaaccttgtttactaatttccactgcttttaaggccctgcactgaaaatgcaagctcaggcgccggtggtcgttgtgacccaacctggagtcggtcccggtccggccccccagaactccaactggcagacaggcatgtgtgactgtttcagcgactgcggagtctgtctctgtggcacattttgtttcccgtgccttgggtgtcaagttgcagctgatatgaatgaatgctgtctgtgtggaacaagcgtcgcaatgaggactctctacaggacccgatatggcatccctggatctatttgtgatgactatatggcaactctttgctgtcctcattgtactctttgccaaatcaagagagatatcaacagaaggagagccatgcgtactttctaaaaactgatggtgaaaagctcttaccgaagcaacaaaattcagcagacacctcttcagcttgagttcttcaccatcttttgcaactgaaatatgatggatatgcttaagtacaactgatggcatgaaaaaaatcaaatttttgatttattataaatgaatgttgtccctgaacttagctaaatggtgcaacttagtttctccttgctttcatattatcgaatttcctggcttataaactttttaaattacatttgaaatataaaccaaatgaaatatttttttcccccgggacaaanacgtatcattaaaaatttccttggggggccggccttcgggccttgaagaaagctttctaaaaccattccgtttggggcccccggtgccccgttagggaaaagtggaacattggtccattaactggttttccctaggaggattcctgggcacac

SEQ ID NO: 6930 - DNA, 684 bp, Homo Sapiens
  misc_feature (57)..(107): n is a, c, g, or t
  misc_feature (111)..(145): n is a, c, g, or t
  misc_feature (579)..(587): n is a, c, g, or t
gccccctcgccccgccgtacgcgggcgggcccacctggagtcctatatggcgctagnnnnnnnnnnnnnnnnnnnnnnnnnnnnnnnnnnnnnnnnnnnnnnnnnnnccgnnnnnnnnnnnnnnnnnnnnnnnnnnnnnnnnnnncagtcgacggtaccggacatatgcccgggaattcagccattacggccgggagctgctcctgcaacaacagcaaacacttagtcacctctcacagcagcaccatcacctgccacagcatctacatcagcagcaggtgctagtggcccaatctgctccttcaacagcgcacggaggtatccagaagatgatgagcaaaccacagacatcaggtgcatatgttcttaacaaagttcctgttaaacatcgtcttggacatgcaggtggtaaccagagtgatgcatcacatttgttgaatcagtctggtggtgctggagaagattgccagatattttcaactccaggccatccaaaaatgatttacagctcctcaaacttaaagacaccttcaaagctctgttcagggtctaaatctcatgatgttcaagaagtgcttnnnnnnnnncaggaagcaatgaagttacaacaagatatgaggaaaaaaagacaggaagtgttagaaaagcaaatagaatgccaaaagatgttaatatccaagttag

SEQ ID NO: 6931 - DNA, 378 bp, Homo Sapiens
cttactcttcacttttctttttattattcaaaagtcaaatgtttttaaatcatccatcctcaattttgatttaatgtaccgccatttccccaagaaaagaaatttcaaaatctctttggaatactaatttcatgtttctagatttaacaaaactgttgaagttttaaattccattctatgtccctgaattctcaagacagttgctgatgtaaattttaatataaaatatttagtcacaaaatagtattgcttttgtatgcacatagttgtaagattactttgcttttgtcaataaaaactataccatctttcataaaactctaaacaaattaagaactgtgatgtagaacaaaaattacacatggtaaaacaggtacc

SEQ ID NO: 6932 - DNA, 973 bp, Homo Sapiens
  misc_feature (443)..(469): n is a, c, g, or t
  misc_feature (473)..(569): n is a, c, g, or t
  misc_feature (630)..(707): n is a, c, g, or t
  misc_feature (749)..(761): n is a, c, g, or t
  misc_feature (934)..(934): n is a, c, g, or t
gggacgccccgcctcttccgcttctgtggtctgatcttcctgcggctgaaccgcccggctgagccgacattgccggcgtcttggcgattcggcccgacgagctccgctttcgctacagcatggtggcctactggagacaggctggactcagctacatccgatactcccagatctgtgcaaaagcagtgagagatgcactgaagacagaattcaaagcaaatgctgagaagacttctggcagcaacgtaaaaattgtgaaagtaaagaaggaataatctaccctgactaaagcttgaaatgctacatttccaaggtgaagatgtgtgggcacatgttatggcagattgaaaaggatctcattccatgggaaaaaaaaaaatcctgtcttgttcataaattgacaatgtcaataaattgaaatatggttcactgttactcttggnnnnnnnnnnnnnnnnnnnnnnnnnnnggannnnnnnnnnnnnnnnnnnnnnnnnnnnnnnnnnnnnnnnnnnnnnnnnnnnnnnnnnnnnnnnnnnnnnnnnnnnnnnnnnnnnnnnnnnnnnnnncgcgagggagccccggggcgccgcccgccgcggcccggaccccgcccgccagcaaaggcgnnnnnnnnnnnnnnnnnnnnnnnnnnnnnnnnnnnnnnnnnnnnnnnnnnnnnnnnnnnnnnnnnnnnnnnnnnnnnnactagcgccaggctttcacgtctatgtccttggcggcgccgnnnnnnnnnnnnngacgaacgacgcgcctgcgccccgcacgtcgcgctgcgttccagtaccaccaccccgcccccggctcgccactgtgcgctctctctcgcccgccgccgagaatagtaagcgccccgcgcgcacaccccccccgcctgctgtcgctcgcaatctgtctacacgcgccgcgcgcngcgcgcacagaagtcttgtgtgcgcccgatccgcgcacc

SEQ ID NO: 6933 - DNA, 857 bp, Homo Sapiens
ttaaaaaatataaataaaatggcgctgcaggcctaggctggaaggactctgcaggactctgtcttcgcacaacggcttcttggaggctactgtcagaaaacatcacaaactagcaggatgacagaccacgctgacgtcgactgggcggcaccgtccaccccacccctgggggcttcaaattttctcagaacttaagggctctcgagcttccatccgaaaactgccacacatcttgagctctctgggtactacgccgaatgggggtgtgtgaagaacccgcggggtcaggggacttccgtgttcgctttctaagtagattcttaatccatgagtgttctgtgcgtgttgcaagagaaaccatgcactggtgaatggctgtttacaagttgtacatgtgtagctgctgggctcatctttacaaataccctgcggggcatattctgcactcatcccaggcgtggggattagagctccatgtacagtattttgtcctagcagcataaagacctagctcttttcttacaagaggcagaaacaagacaggctagttcataaacaaactgaatgtgtaactaacttctcaaaatgaatctatttcataactcggacaatttctgggtggtgactgagtacccctttagtgagtacccctttagtgctatatttgtgccattcattatctggttcatatttctttgctgttagatgatacacatttcttcaaaaaaatttctaatgtcacttttgtacttttttaaataaagtatgtttaactgttgggctctcaataatttgtgaaatttcagtgttttctataatgttaatggggaaattcagcaataaactttatttgtaag

SEQ ID NO: 6934 - DNA, 669 bp, Homo Sapiens
gggcttctccctataaaagtaaagcctttttctgccccagctctgagacacttgcagatcttaaggtctgagacttgctgattttctggttggagtgtttttttgtattgccatagtcccttccccctgaagcaatagcccctccccacctcctgcaatacgcctttccaatctttattggaagtctctccctgcctacttcctaatttattcttatttgacagagggtatggaagacttgcaatttgaaaactggggaccagttccaaagtcagtaattgtgttaaccacgtgtataacagctctgctggacacccaagaaagccatgggaacaccaactggaaaggtcccccttccccaggggagcctgcgaaggagaggttctgtagaatcccaagcccacatttccaaagtcacccccaacgcgtcctctcacacccgtccactgtgcgtttgtatgtgtctgggatccaaggcaaggtgaattttctttttatttgggagattgttcacggaaaacagatcttcttctctcttgtccacctattaattgtttacaatatttgtacatctatgcaaaataatttgaatgggccctgggggccctttttccctgccagcactttaattaaaaaggaattggtctgggcatttggcacaccccacca

SEQ ID NO: 6935 - DNA, 633 bp, Homo Sapiens
  misc_feature (192)..(214): n is a, c, g, or t
cttcccaataaaagaaaggaacagtgtcaatccataaaggcagaccagcagtttaataagatcctcttcatagctcagttctcagtgcatacagagattcaatatagccccatcgctctcagttattagaatctgagagggataaaagcaataactattgtttaaaagcctaagagtgaaaacagatgtccnnnnnnnnnnnnnnnnnnnnnnngccaaattctttcatcccaggatgtctgaaaaggagagactctatggagcgtggatgtagaaaaggagttattcctaccggaaaaaaatgaactgtggacacagtcactcaagaccagagaaacaaccactatgagtaagtagcttcaatttcactgttaccaggagggcacacaccagaaagcctgggacaaagcctgggctagagccctcaggattcattctcaggcttcctggtgctgtggttcaacagcctttgtggggatggggagaaccagagactatcaccatcacatgtcaaaaatattaccacagcaacagcgtgcagaaaccaggtggagctggaggtacacaccatttgagatccacactggtacttgcttttatagagatgggctgggagacagtgctgagacacct

SEQ ID NO: 6936 - DNA, 984 bp, Homo Sapiens
gcacgaggtagtcccaaaatgctgggattacaggcctgagccactgcgcccagccaggatttgaattattttaactcatccatgggctgccctagaatgtcacaaatgagggttgtttaatgcctttcttatagctgctactggaacactattatgacctaatttatgagccatccttactcatctacaagtgctgaagcaatgttacatactttttttgctaaactcagattttttagcctaatttcttgtcctcctatccacctgcatccacacatggcctgcatggggctgccttccctgcagtgttctgcagccatgcttcagggtatagctgttggtggacagcctcaggtcttgggggcactatagccactaaacgaggtgtgaaaggctcaagaggatgaccagcaattaattatccccagaaagtgaaggaaaagagacctttagggatgttgctggtcaagtcttgatttgaccggagtcaaatcaatcttcaagcaatcttggaatcctcaactgcagtaagcatttcaaaatgcaaacaaactgcttaacaactgacaagacaccagcccatacgctgctcttccaacagtgggttctagctttgaacaaaagtgctaaacatttccttgaatatattcttcctctttttgtcctcatcactcaatactggtgctcttgtcacaggtagaacagcttgtttcttttccatctattcaagtgtgtttctaattctaaaatgctgatcttctctggagtctatggtaggcaattatggtcactggaatagtttgtcttgttttaaaatattattggtgcatgtacaacagcatccaacatatctgtcttgttcctagatatatagctctgattttaggccttttgtgcataccattacaatatggtggggtaagacattctacagtagcctgtgctgaactgatctcttaaataaacttgcttctggttaactat

SEQ ID NO: 6937 - DNA, 777 bp, Homo Sapiens
gggatgatttcttttccctgcacacatctttccggtgcaatatctatcaattgtgaatctggctgctggtgtataaaaacctggatgtaaagctgagcctacagacctgtcctcaccaactgttttgtgatttctactcaactacaaagatttatttaatgtactcttaatctaactgagttttgttaccaatgacctgttgcatgcttcaataccgtgtactgcatgagttgtgcctcttgtgtgctagattaaaagtgagacagagacttgacttgatcctctgagctcaagctattgagctggtagtggcagaggactgagggtacctgcacagtttgattcttttccacgtgtaagtctccattgcagaattgtcgtgctttgagaaaacacctgaggcagtgtgggagttgaacgaccctgctgtcctttttaacctgtgttgtcctagaccctgtcggggcagtcaggggacactagagatttgatctcatgcgagtcatcaataggacaaaaaaagttgtggtttggggaggtctgtttgttacataaaaaggacctttcggtgtaagaaattgccgtttttaccctgccctggctggcatgtgagaagccatggaaggttgtggttgtaaatgagttgtctaaaggggtgcagaggcctgaggtttctaaaagaaggtagatttctacagagctgagtgttggttactttttcttattggttgaaaattacctggtagtgatcagaaaacttagatgctatgtaactaa

SEQ ID NO: 6938 - DNA, 822 bp, Homo Sapiens
ggggtaggaaccggcggactcggttggcgttgtggggcagggggtggtggagcaagatggcggctcatctgtcctacggccgagtgaacctaaacgtgttgcgcgaggcggtgcgtcgcgagctgcgcgagttcctggacaagtgcgcaggaagcaaggcaatagtttgggatgaatacctaactggaccctttggcctgattgcacagtattcactattgaaggaacatgaagtggaaaaaatgttcacacttaaaggaaatcgtttgccggcagctgatgtgaagaatataattttttttgtcagacccaggctagagttgatggatataatcgctgaaaacgtgctcagtgaagatagacgaggcccaacgagagattttcatattctgtttgtgccacgccgtagcctgttgtgcgaacagcggttgaaggatctgggtgtcttgggatcctttattcacagggaggagtacagcttagatctcattccattcgatggggatctcttatccatggaatcagagggtgcattcaaagagtgctacctggagggtgaccagacgagcctgtaccacgcagccaaggggctgatgaccctgcaagctctgtatggaacgatcccccagatctttgggaaaggagaatgcgctcgggtgagaaccggctgctttgtggtgggaaaaggagggcccttcacaccccaaaagggagggaggaaacggaaagctccttacaaacaaattcaggtgatccttaattatttatgaatactgtactcatgaatttgcctactgattaaaatgcacttataaccctcca

SEQ ID NO: 6939 - DNA, 2718 bp, Homo Sapiens
  misc_feature (268)..(268): n is a, c, g, or t
  misc_feature (2303)..(2316): n is a, c, g, or t
  misc_feature (2434)..(2539): n is a, c, g, or t
  misc_feature (2555)..(2563): n is a, c, g, or t
  misc_feature (2617)..(2634): n is a, c, g, or t
  misc_feature (2661)..(2669): n is a, c, g, or t
ggggccgtcgccaccctctctggacagcccagggccgcaggctcatgccctctccgcgtccagtgctgcttagaggtgctcgcgccgctctgctgctgctgctgccgccccggctcttagcccgaccctcgctcctgctccgccggtccctcagcgcggcctcctgcgccccgatctccttgcccgccgccgcctcccggagcagcatggacggcgcgggggctgaggaggtgctggcacctctaaggctagcagtgcgccagcaggngagatcttgtgcgaaaactcaaagaagataaagcaccccaagtagacgtagacaaagcagtggctgagctcaaagcccgcaagagggttctggaagcaaaggagctggcgttacagcccaaagatgatattgtagaccgagcaaaaatggaagataccctgaagaggaggtttttctatgatcaagcttttgctatttatggaggtgttagtggtctgtatgactttgggccagttggctgtgctttgaagaacaatattattcagacctggaggcagcactttatccaagaggaacagatcctggagatcgattgcaccatgctcacccctgagccagttttaaagacctctggccatgtagacaaatttgctgacttcatggtgaaagacgtaaaaaatggagaatgttttcgtgctgaccatctattaaaagctcatttacagaaattgatgtctgataagaagtgttctgtcgaaaagaaatcagaaatggaaagtgttttggcccagcttgataactatggacagcaagaacttgcggatctttttgtgaactataatgtaaaatctcccattactggaaatgatctatcccctccagtgtcttttaacttaatgttcaagactttcattgggcctggaggaaacatgcctgggtacttgagaccagaaactgcacaggggattttcttgaatttcaaacgacttttggagttcaaccaaggaaaagttgccttttgctgctgcccagattggaaattcttttagaaatgagatctcccctcgatctggactgatcagagtcagagaattcacaatggcagaaattgagcactttgtagatcccagtgagaaagaccaccccaagttccagaatgtggcagaccttcacctttatttgtattcagcaaaagcccaggtcagcggacagtccgctcggaaaatgcgcctgggagatgctgttgaacagggtgtgattaataacacagtattaggctatttcattggccgcatctacctctacctcacgaaggttggaatatctccagataaactccgcttccggcagcacatggagaatgagatggcccattatgcctgtgactgttgggatgcagaatccaaaacatcctacggttggattgagattgttggatgtgctgatcgttcctgttatgacctctcctgtcatgcacgagccaccaaagtcccacttgtagctgagaaacctctgaaagaacccaaaacagtcaatgttgttcagtttgaacccagtaagggagcaattggtaaggcatataagaaggatgcaaaactggtgatggagtatcttgccatttgtgatgagtgctacattacagaaatggagatgctgctgaatgagaaaggggaattcacaattgaaactgaagggaaaacatttcagttaacaaaagacatgatcaatgtgaagagattccagaaaacactatatgtggaagaagttgttccgaatgtaattgaaccttccttcggcctgggtaggatcatgtatacggtatttgaacatacattccatgtacgagaaggagatgaacagagaacattcttcagtttccctgctgtagttgctccattcaaatgttccgtcctcccactgagccaaaaccaggagttcatgccatttgtcaaggaattatcggaagccctgaccaggcatggagtatctcacaaagtagacgattcctctgggtcaatcggaaggcgctatgccaggactgatgagattggcgtggcttttggtgtcaccattgactttgacacagtgaacaagaccccccacactgcaactctgagggaccgtgactcaatgcggcagataagagcagagatctctgagctgcccagcatagtccaagacctagccaatggcaacatcacatgggctgatgtggaggccaggtatcctctgtttgaagggcaagagactggtaaaaaagagacaatcgaggaatgaggacaattttgacaacttttgaccacttgcgctaatnnnnnnnnnnnnnnctactcttatgtccactttacaaaagaaaacagcattgtgattactcccagggaccgtattttatcttcagtggctgcctgattttacccccacaattaaagttgaaggaatcctgannnnnnnnnnnnnnnnnnnnnnnnnnnnnnnnnnnnnnnnnnnnnnnnnnnnnnnnnnnnnnnnnnnnnnnnnnnnnnnnnnnnnnnnnnnnnnnnnnnnnnnnnncccatcaaccaccctnnnnnnnnnactacccttgcggccacccgacagacaacccgataaaaacaacccgggtggcgnnnnnnnnnnnnnnnnnnggaaatatttttccacaaatctttgtnnnnnnnnncgcgccccgcgaggggggaaaggagagcagggcgttttgcgggttctcc

SEQ ID NO: 6940 - DNA, 306 bp, Homo Sapiens
ggatacacataaaggcatatagctatatataaagagataagggtgtttatgaaatgagaaaattattggacaattcagactttactaaagcacagttagacccaaggcctatgctgaggtctaaacctctgaaaaaagtatagtatcgagtacccgttccctcccagaggtgggagtaactgctggtagtgccttctttggttgtgttgcccagtgtgtaagtgtttgtttccaggatattttctttttaaatgtctttcttatatgggttttaaaaaaaagtaataaaagcctgttgcaaaaatg

SEQ ID NO: 6941 - DNA, 218 bp, Homo Sapiens
  misc_feature (69)..(69): n is a, c, g, or t
accttgggccctgcctgtaattttttatcagccacaaatccaagcaacaaactgaggattcagctcatnaaaacaaggcttggtgtcttggtgatctcacataaccaagatgctaccccgtgggaaaccaaatccccctggatgccctcaagccttggtttgggctggagtcagggcctggatacagtattttgaatttgtatgccactggcgaggac

SEQ ID NO: 6942 - DNA, 640 bp, Homo Sapiens
  misc_feature (119)..(119): n is a, c, g, or t
ctcatttaggatttgcctcgagcaagattcgcacgagcccaactccatgatgagactgctctgaggcagaggattacgcagcagtggagcttgtcaggggtgggcgtttcagcctctgncttggccttgcttcacacgtgtaaatatccctccccattcttctcttcccctctcttccctttcctctctccccctcggtgaatgatggctgcttctaaaacaaatacaaccaaaactcagcagtgtgatctatagcaggatggcccagtacctggctccactgatcacctctctcctgtgaccattcaccaacggggtgccttcttggcctggctttcccttggcctttcctcagcttcaccttgatactgggcctcttccttgtcatgtctgaagctgtggaccagagacctggacttttgtctgcttaagggaaatgagggaagtaaagacagtgaaggggtggagggttgatcagggcacagtggacagggagacctcacagagaaaggcctggaaggtgatttcccgtgtgactcatggataggatacaaaatgtgttccatgtaccattaatcttgacatatgccatgcataaagacttcctattaaaataagctttggaagagattaaaaaaaa

SEQ ID NO: 6943 - DNA, 392 bp, Homo Sapiens
  misc_feature (15)..(15): n is a, c, g, or t
  misc_feature (36)..(36): n is a, c, g, or t
  misc_feature (48)..(48): n is a, c, g, or t
aatttccactgggtnatttgccaaggaggaaggggntaaaaaaaaccngccatccaggagtgccaaccactggaagtgagctttacttttaattggtaagtgaagctgttgctgaacatgaccactatcgttgctgaaatataaaattatactcactgattgtaatggttgaaattttcctgaataatcattagccaaagatcaactctctaatggtgctaatggcaatctagctaatgtgcaaatttaggaagtcttcagtactaagtacataattttcaaataatattttttaattgtctactttggatgttagctatgtcttgtgagtataaattcccaattttaagcactattttgatgcaaaaaaatgaataaaaaatttaatttat

SEQ ID NO: 6944 - DNA, 1146 bp, Homo Sapiens
  misc_feature (15)..(15): n is a, c, g, or t
  misc_feature (22)..(22): n is a, c, g, or t
  misc_feature (34)..(34): n is a, c, g, or t
  misc_feature (57)..(57): n is a, c, g, or t
  misc_feature (74)..(74): n is a, c, g, or t
  misc_feature (91)..(91): n is a, c, g, or t
  misc_feature (111)..(111): n is a, c, g, or t
  misc_feature (129)..(129): n is a, c, g, or t
  misc_feature (672)..(742): n is a, c, g, or t
  misc_feature (747)..(755): n is a, c, g, or t
  misc_feature (983)..(996): n is a, c, g, or t
aaattgctgggtccngggaaanaccagggtcccncggaaccctaactaccactggcnggaactgcatatcttcnggttacatgaagatggntgctaatggaaatcccaaanccttccagagattacacnctgtcatttcccatttccgtcctggatctacggagcttctaaagagattttgcaatgaggagaagcattgttttcaaactatataactgagccttatttataattagggatattatcaaaatatgtaaccatgaggcccctcaggtcctgatcagtcagaatggatgctttcaccagcagacccggccatgtggctgctcggtcctgggtgctcgctgctgtgcaagacattagccctttagttatgagcctgtgggaacttcaggggttcccagtggggagagcagtggcagtgggaggcatctgggggccaaaggtcagtggcagggggtatttcagtattatacaactgctgtgaccagacttgtatactggctgaatatcagtgctgtttgtaatttttcactttgagaaccaacattaattccatatgaatcaagtgttttgtaactgctattcatttattcagcaaatatttattgatcatctcttctccataagatagtgtgataaacacagtcatgaattaagttattttccacnnnnnnnnnnnnnnnnnnnnnnnnnnnnnnnnnnnnnnnnnnnnnnnnnnnnnnnnnnnnnnnnnnnnnnngaggnnnnnnnnncccacaaaaattctccccgcgggggggccccaatttggccccccccgtttttttaaaaaggggggccccacaaataggggcacgattattaaaacgcagagcgcgaggggcgcgcgagtatataaaaaacccgcggtgcagctaatggtagcgaagcaacacctcgttccgacgagcgaggggtctcatagtatgaggagaaggagcaccccacacaatccacgtgannnnnnnnnnnnnnacaaccaataatgcggcggacacgcaacaccaacgcaagaagaatatttctacgcccccagcggaggcaaaatatccaaacagcttgacggaagttcattctatgtgtgttacacaccacacggccgcgattaattcggcagcgggcatc

SEQ ID NO: 6945 - DNA, 538 bp, Homo Sapiens
gcctcgtgttgacccatttttctgaccaatatcaccttcttgaaggttcctctctggttggtcctgctgggactgtttgtggaactggaatttggcctggcatattttgtcctgtccttgttctattggatgtacgtcgggacacgaggccctgaagagaagaaagagggagagaagagcgcctactctgtgttcaatcccaggctgtgaagcccatccagggcaccctggactgcagagcagttggagcgcgagttacagttgagacccctggcagggagataggacccagctgtgctgtcatgcagctaacctctgatgtggtcttcctcaccattggctatggatttgatttcaggtgtataggactaagggcagcttgcgggttagctctgtgactgcatagtttttctaccttctttccctgatcttttgctgccatttgatctttgatagttttggtgaaactctctaaaatacattcactgtgggtccgacgcaatttataaaaattatgtactcaagaagggaaaaaaaa

SEQ ID NO: 6946 - DNA, 461 bp, Homo Sapiens
  misc_feature (260)..(260): n is a, c, g, or t
  misc_feature (276)..(276): n is a, c, g, or t
  misc_feature (297)..(297): n is a, c, g, or t
  misc_feature (408)..(408): n is a, c, g, or t
agagacaccgcctgtttcagtcccaaagagctggccagaacggtggggcgtgtgtggggaaaatggtgtgatgctgggctggcttgggaccctgtgaggggagggaacggaagcaaaagcttgatgttcttggctccacttgggaaactgaaaccagccttctctgtggtttactggcccagaactgaagtatctccattcccactcaaggattgcaagggtgggccagggggtgcagctcagctgtgtccaaagaatanggctctcaggagaacngggctgggctctctcaagccngaggctggggtcaagaacttcaggaaatctaagtcctggactcgttagccccaagcttggggtgggtcccatgctgtgctggcctcctggagggtgggggcaaaaagcctnagcatatggcgagcttgtggtctccttgaaggaggagaaggcgcactcctgga

SEQ ID NO: 6947 - DNA, 256 bp, Homo Sapiens
  misc_feature (25)..(25): n is a, c, g, or t
gaatgtgctggctgtggctacgccngcagcgggagaagcttacctttctggaggaggatgacaaggacctgtacatcctctggaaggggccctccttcgatgtgcaggtgggcctcacgagctgctgggccatggcagtggcaagctcttcgtacaggacgaaaaaggagcattcaactttgaccaggaaacagtgatcaacccagagacgggcgagcaggtgagggaggcctcaacagagccccagggtactggg

SEQ ID NO: 6948 - DNA, 580 bp, Homo Sapiens
  misc_feature (25)..(25): n is a, c, g, or t
  misc_feature (529)..(529): n is a, c, g, or t
atgccacgagtcctcctgctggaanaatgggaacagtgttacaacacccgggaactctgtgccgcctcctctgccacggtccaacagccttccacattcagcagtctcaaatgctggcagcaaaagcagtgtcatggacggggccattgcttctggggtcagcaaatttgcaacactttcactacatgaccggaagagaaggcaccacgagaaagatcacaaagccgaaatcatagcatgggacacaatttctagcaagaagcaagtgacaaacttgaatctagttaccaaaaccaaaaccggaccctgctaaaactctgggaacgcccctgtgtcctcgaatggaagatgttcccttgtttagagccgctgatatgtaaaaagatagcacatgagagactgactgtactaatattactggaagactgtatagtcactgcttgtcaggagggatttatttgcacatgggggaaggcctggtaaagtggtaagttttaatccttaatgctggcaccagatctagaacttnggaataggtagtgacttttttccttttcgtgggaggagaggggctctcaaa

SEQ ID NO: 6949 - DNA, 388 bp, Homo Sapiens
tggcctcaaatacacacacacacatattgcctacaaggattctggggagctccaaattatcatactatggaattcatattcaggagcatacaaaggatcctgagagcagagcttctgtcctagggtcaatcctaaagttgccttattctcaaaagctccagttcctgaaggaaggattgaaatatactgagagccatgaagagacagtagtgatttcagctgagggtgagaatttaggtggctcagagataaccacagccttaggcaacccaaagcaaagcaaacaatggaaggaatcaaccgataccaaatgtgttgggctttggttactggggacttctagaaaaagtagagactgagtagctagtataaatgatcagaatatcat

SEQ ID NO: 6950 - DNA, 643 bp, Homo Sapiens
caatgggtttggagggcagatgagggcccgctggagagctgtacccctcagtgagggccgccaccttgatggtttttgatggataatggggttgacctctttgttccttccacatgtttttatgtttgaccatttagtcagctgagcttgtcttaatcatatgattcgtggtgaatgagccccacatgggcgagagggcgaccttcattctgaacccatttaggcagcacgggcagccctcctcgccgtgggatgcatcagagccccctgcccagtcttggggttgctcccggatgctgtctgggaggcttgctcatggtgacatcctcatctccccatgcactttacctgcattcagagcttgggtcacctggacactgaactcaggtgaattttctctgagatcccgggagaaggaggacagttctctggaaggttttccacggccgatcacggaaagggtgagaaaggagaggtcctggtcggcgacacaattacggtggcagtgtaacaccaggaaactttattgcgtgaagtccctctcactccctctacctccctcttttacgtggactctgccaaagaccaggataccagaatgccactgcagtgaccaaacgtagtgggaccttggggacgcgag

SEQ ID NO: 6951 - DNA, 883 bp, Homo Sapiens
  misc_feature (616)..(682): n is a, c, g, or t
  misc_feature (712)..(713): n is a, c, g, or t
  misc_feature (789)..(789): n is a, c, g, or t
agtgacttcagcgtcctcatgtatgtctctacctgattcagaaatctctaacccagtatcggaacgttaagcggcttctccgctttcctgccgtgaggaaactcgaggtgacaacctccgtttccggttggctccggttgcagagttgagtgtcctgagaggtcagattgctgtcagacatggcccatgaacatggacatgagcatggacatcataaaatggaacttccagattatagacaatggaagatagaagggacaccattagaaactatccagaagaagctggctgcaaaagggctaagggatccatggggccgcaatgaagcttggagatacatgggtggctttgcaaagagtgtttccttttctgatgtattctttaaaggattcaaatggggatttgctgcatttgtggtagctgtaggagctgaatattacctggagtccctgaataaagataagaagcatcactgaagataatacctggaagcatcatagtggtttcttaactctccaaaataagatttcttctctgtagcctacttgtctggtttatcccttacagaatattagtaagatttaatcaattaaaatatatatatatgccaaaccannnnnnnnnnnnnnnnnnnnnnnnnnnnnnnnnnnnnnnnnnnnnnnnnnnnnnnnnnnnnnnnnnnaccgcgcgaatccacccatcacaattaaanncccaaaaattggcgcgcccccccggcccctcaaaaaactttttcaaaaccttttttttggggcgggcgggcccccngagggaaaggggaaacggggcgcattaaccgtgttttccataagaaaatccccggccccaagtaaccaaggggtctgtggtcctccccccacac

SEQ ID NO: 6952 - DNA, 926 bp, Homo Sapiens
tttcagggcattctcagcccatgctgctttattgctaaaatatatatatacacaggtgcagagcttccaacttttttaacagttcctttttacatcaaagaattaaatttcttcaaaaaccccaaagatgcatagattaagaagcaagctgccttttgtaatacttaaaataatattcaatgaaactcttaacgttatacaccaatggtgcaatggagaatatggaggacagcaagtaaacacagtgagcaactcttattcttacaaggcagtaggtaaagtataatgtgaaggacagtctaagataatctttctggttataagaaatgggtcggttttgtgataagtgccaagactgttactgtttaaggattgatgataatgtattaccagaatacctttcttatccctgggagaaaatattttttcactgatggaatgacatatcaccaagggagaaaaaaacctgaatactgtcagtaactaagatacctatactgaccttaaagaagatttaggacttcatggagaaatctgtgatgtctaggtttcccaaaattaagtatatttaatgtgccttagtggaataatcggaggaatttagagaaactctgttcttaatctttactaggctgacagacaatgctatcaagtaattggggaagacaaactatattcaggatatgacatctcacttcatatatttcaatggaaaccaaacatacacagtcacaagaagtctaattcaattctgaaccactggaaagttaccattccactttattcattcccaaagttatttgtagcaaaatcctacaggaaagaatgaaataaaaagtttcaaaaaatttcttcaatcatagaatgtaaaaccttgaatgtgctttgtgaaatcatatagtctaatcttgaatctatataggctg

SEQ ID NO: 6953 - DNA, 750 bp, Homo Sapiens
  misc_feature (568)..(568): n is a, c, g, or t
  misc_feature (595)..(595): n is a, c, g, or t
  misc_feature (597)..(666): n is a, c, g, or t
ggggcgcgctgaggctccggcggacctctggtggacatggctgcttcccgcttacccccagcgacgctaacgttaaagcagttcgtaagaaggcaacaagttcttctcctctacagaaggattttgcaaacaattcggcaagttccaaatgattctgatcgcaaatacctggaagattgggcaagagaagaattcagaagaaacaaaagtgccaccgaagaggatacaatccggatgatgattactcaaggcaatatgcagctcaaggagttagaaaaaacacttgctttagcaaaatcttaactatagcattattctgaaggattttcaaagtctccatgtgttttgttgcatttaggattaacaatggacaacacaaagcccagtcttactatttatatgtacagtatttggtgatagagagcaaaggaaaaacacatcagaacagttgccttaacactgaaaaacataccctgcattttgaaaatgtttatggatgtctcagcagttcttaaaagaagaaaaaaaccactaacaaatggccagtagatgctggacacatcatttngggaagtgtaaatcgaaactactatgnannnnnnnnnnnnnnnnnnnnnnnnnnnnnnnnnnnnnnnnnnnnnnnnnnnnnnnnnnnnnnnnnnnnnngaggtccagggagttcaagacccaccctggcccagcatgggggaaaacctcctcctcctactaaaaaatacaaaaatttaccct

SEQ ID NO: 6954 - DNA, 435 bp, Homo Sapiens
gacccccagggcagtgggtgggtggcgggctagagacccttgcctgtgtccgggaccctggcgccgctctcccctcctgtggatccctccgcactaacagtgttctcagtgggcagacgcctgggcacccctttggccctgcccagcatggccatggcgcaggctctcgaacccgcatggctttcccaggcctggtgattctgctctccagggacggttggcaccttcctccggggcgggccccacgcaccccagaacacacagacccacctttctggcgttctttctacctcccttttcgttgcctgaggagctggtggtttcatgagttaatgatacatcttgcaaggtgtacacatagagaaaaaaacctaaaaatgtggaaaagcacgccaaagccttatttaaataataactattaaactattcaaaaag

SEQ ID NO: 6955 - DNA, 377 bp, Homo Sapiens
  misc_feature (39)..(39): n is a, c, g, or t
ggcggcggtggctgtaggttgtgcggctgcagcggctcnttccctgggcggacgatggacagccagggcaggaaggtggtggtgtgcgacaacggcaccgggtttgtgaagtgtggatatgcaggctctaacgtttccagaacacatcttcccagctttggttggaagacctattatcagatcaaccaccaaagtgggaaacattgaaatcaaggatcttatggttggtgatgaggcaagtgaattacgatcaatgttagaagttaacctaccctatggaaaatggcatagtacgaaattgggatgacatgaaacacctgtgggactacacatttggaccagagaaacttaatatagataaccaccgaccaaaaacg

SEQ ID NO: 6956 - DNA, 679 bp, Homo Sapiens
gaagaagaaacaagttccgtgggccgagaacaagtaaataaggcctatcatgcatatcgagaggtttgcattgatagagataatttgaagagcaaactggacaaaatgaataaagacaactctgaatctttgaaagtattgaatgagcagctacaatctaaagaagtagaactcctccagctgaggacagaggtggaaactcagcaggtgatgaggaatttaaatccaccttcatcaaactgggaggtggaaaagttgagctgtgacctgaagatccatggtttggaacaagagctggaactgatgaggaaagaatgtagcgatctcaaaatagaactacagaaagccaaacaaacggatccatatcaggaagacaatctgaagagcagagatctccaaaaactaagcatttcaagagtatctgtagcacagcctggagtgcagtggcgcaatcatgggatagcatgaattttgaggactgttccctcttcgcataagaatagaagtagccatcagagttcatatactttttcaaccctttttcctcaaatacgtatcatttttacttaagtaacttcaattctgtgttttaagctatctaataattgttgtttctactatgttaagatagcctctctacattgttaccctccatccaataaaaaatactgatctaaaa

SEQ ID NO: 6957 - DNA, 730 bp, Homo Sapiens
  misc_feature (463)..(485): n is a, c, g, or t
  misc_feature (488)..(488): n is a, c, g, or t
  misc_feature (492)..(495): n is a, c, g, or t
  misc_feature (497)..(498): n is a, c, g, or t
  misc_feature (503)..(503): n is a, c, g, or t
  misc_feature (505)..(505): n is a, c, g, or t
  misc_feature (514)..(541): n is a, c, g, or t
  misc_feature (552)..(561): n is a, c, g, or t
caatgatagcagaaaactgtacaaatgtacagttagttatagaggttcttgttgaaatgaacttaccatctgatgatatgtatgtacagctgtgtacttgagtcttttttagtttacttagaaagactagcagtttgacctgttaaacaggactagttcaagtcaagaaactaaggttgttgtatacacctggaggcatctgttattcagcttatcctttgagtgggtatttggcacaatgaggataaacttatgtgacccacttgaatggctgatctaataatgttgacattatgcattctgtacttagtgaaatgtcagatgaaaataactgatgaataatttttttgtattaaaggggatgggaaaagaacacatgaatttgttaataaagcactatgatctgcaaacgatggaatgtttcataaagatctaaagaaataaaggaaactttaaaacgggnnnnnnnnnnnnnnnnnnnnnnnaanaaannnnannttttnanaacgaaatnnnnnnnnnnnnnnnnnnnnnnnnnnnnttttttttggnnnnnnnnnnaaaatttggggggccccctccgggcccctaagaaaattttctaaaaacctttggtttggggcgcgggggccccgcaatggaaaggggaaaaagggggctcccacggggttctccccaagaggaatccgcgggcccaaacccaaagggggttggggtctccccccccaat

SEQ ID NO: 6958 - DNA, 262 bp, Homo Sapiens
  misc_feature (186)..(186): n is a, c, g, or t
aattaagttctagttctgactcatcacaagaggtcaaaagtatttgctactgtaacattcaattcacatttgagaatcatggtaaaaataacttgcatttgccttaccatcatgatcctactgttgagttaggaaaatatggttagacagactcacattactttttttcagaggtaaactctaganttactgtgtcaacccaatactatttggccatagatgtaaaaactaccaaataaaagtggattttgtggtctacaaa

SEQ ID NO: 6959 - DNA, 639 bp, Homo Sapiens
aactggcatccttgagctgacaacacttttccatgaccataggtcactgtctacactgggtacactttgtaccagtgtcggcctccactgatgctggtgctcaggcacctctgtccaaggacaatccctttcacaaacaaaccagctgcctttgtatcttgtaccttttcagagaaagggaggtaatccctgtgccaaaggctcccaggccttctcccctgcaactcaggacccaagcccagctcactctgggaactgtgttcccagcatctctgtcctcttgattaagagattctccttccaggcctaagcctgggatttgggccagagataagaatccaaactatgaggctagttcttgtctaactcaagactgttctggaatgagggtccaggcctgtcaaccatggggcttctgacctgagcaccaaggttgagggacaggattaggcagggtctgtcctgtggccacctggaaagtcccaggtgggactcttctggggacacttggggtccacaatcccaggtccatactctaggttttggataccatgagtatgtatgtttacctgtgcctaataaaggagaattatgaaataatttcaaaaaccaacacctatactcccaccctcaacatgt

SEQ ID NO: 6960 - DNA, 772 bp, Homo Sapiens
ggcaaaacttggaaggaaagaacccttaaaagagaggctcacaaacaagtaacttgtgagaattctccaaagtctcctaaagtgactggaacagcttctaaaaagaaacaaattacaccctctcaatgcaaggaacggaatttacaagatcctgtgccaaaggaatcaccaaaatcttgtttttttgatagccgatcaaagtctttaccatcacctcacccagttcgctattttgataactcaagtttaggcctttgtccagaggtgcaaaatgcaggagcagagagtgtggattctcagccaggtccttggcacgcctcctcaggcaaggatgtgcctgagtgcaaaactcagtagactcctctttgtcacttctctggagatccagcattccttatttggaaatgactttgtttatgtgtctatccctggtaatgatgttgtagtgcagcttaatttcaattcagtctttactttgccactagagttgaaagataagggaacaggaaatgaatgcattgtggtaatttagaatggtgatagcaataccttcttcttgcatatggtaatacttttaaaagttgaattgttttatttatttggatattttggaaagaataaagttattgaaagaaatgtaaagttatctacatgacttagcatattccaaagcataatacatacattaatataaaacatcattttattaacaaaattgtaaatgtttttaataccttacacattcaataaatgtttagtagttctgaatcac

SEQ ID NO: 6961 - DNA, 522 bp, Homo Sapiens
  misc_feature (51)..(51): n is a, c, g, or t
ccattgcctgcaccccaagggccccatatttgcccctccccatcacagtcntgcccttcaccctcaagcacggtcctaaacttgtctgcactttagaaacacctggagagcattgaaaactctgctgcctaaggtcagcatcaatcaaaacaatgaaatcaatgaaacaatgaaaccagagcttctaggtgtgtggcctggatagtggtagattcaaagctccacccacctcatcccaggtacatttgatgtgcagctgagattggggcacattccaggtcatcgtcttctgtcagtcatttccctgctttcgtttgaattttaccattcttgtatgcagccttatacgacatagttgtgtttgcttttgagtgttagataaatggaatcctgtgtatgtgcttttgtgtcgtttttgtcactcagcattgtataatccatccttgttgggtcctggagttcatttttaatgctatatggtgttctgttgtatgaataatacctcaagtgatacaaaaaaaa

SEQ ID NO: 6962 - DNA, 468 bp, Homo Sapiens
  misc_feature (437)..(437): n is a, c, g, or t
aggccctctttggaatgaacgaccgcttgcttggaggaaccagacttggttcaaagggagacacagctgttggcggggatgcatgctcacaatcgaagctccagtggcagaaagtcctttccagccccaatctatggacagacatgactcttgtcctgcactgacatgaaggcctcaaggttccaggttgcagcaggcgtgaggcactgtgcgtctgcagaggggctacgaaccaggtgcagggtcccagctggagacccctttgaccttgagcagtctccatctgcggccctgtcccatggcttaaccgcctattggtatctgtgtatatttacgttaaacacaattatgttacctaagcctctggtgggttatctcctctttgagatgtagaaaatggccagattttaataaacgttgttacccatgtctacganaccaaaaatccagcccccaagcgatacctgt

SEQ ID NO: 6963 - DNA, 228 bp, Homo Sapiens
cagaaataatgttttttaaaagacaaaaacaaagggaagaatatttaattactgagcagaagtaaatactgttggtattttgtacataatctaatttttatatgcatgttcatgctttttaatttttttatcaaaaattaagtcatctacctactacttgtaaccagcttgtttcataacatgttattttcctgtgtcattaaataattacttcaatgttgaaaaaaa

SEQ ID NO: 6964 - DNA, 1003 bp, Homo Sapiens
acgcgtagacgcgccgcggtccccgctgccgctgctccgccgcagtcgccgctccagtctatccggcactaggaacagccccgggcggcgagacggtccccgccatgtctgcggccatgagggagaggttcgaccggttcctgcacgagaagaactgcatgactgaccttctggccaagctcgaggccaaaaccggcgtgaacaggagcttcatcgctcttggtgtcatcggactggtggccttgtacctggtgttcggttatggagcctctctcctctgcaacctgataggatttggctacccagcctacatctcaattaaagctatagagagtcccaacaaagaagatgatacccagtggctgacctactgggtagtgtatggtgtgttcagcattgctgaattcttctctgatatcttcctgtcatggttccccttctactacatgctgaagtgtggcttcctgttgtggtgcatggccccgagcccttctaatggggctgaactgctctacaagcgcatcatccgtcctttcttcctgaagcacgagtcccagatggacagtgtggtcaaggaccttaaagacaaggccaaagagactgcagatgccatcactaaagaagcgaagaaagctaccgtgaatttactgggtgaagaaaagaagagcacctaaaccagactggatggaaacttcctgccctctctgtaccttcctactggagcttgatgttatattagggactgtggtataattattttaataatgttgccttggaaacatttttgagatattaaagattggaatgtgttgtaagtttctttgcttacttttactgtctatatatatagggagcactttaaacttaatgcagtgggcagtgtccacgtttttggaaaatgtattttgcctctgggtaggaaaagatgtatgttggctatcctgcaggaaatataaacttaaaataaaatttatatcccccccgggcacacaacagtccgcat

SEQ ID NO: 6965 - DNA, 1125 bp, Homo Sapiens
gggacgtggttgttcggagcgggcgagcggagttagcagggctttactgcagagcgcgccgggcactccagcgaccgtggggatcagcgtaggtgagctgtggccttttgcgaggtgctgcagccatagctacgtgcgttcgctacgaggattgagcgtctccacccatcttctgtgcttcaccatctacataatgaatcccagtatgaagcagaaacaagaagaaatcaaagagaatataaagaatagttctgtcccaagaagaactctgaagatgattcagccttctgcatctggatctcttgttggaagagaaaatgagctgtccgcaggcttgtccaaaaggaaacatcggaatgaccacttaacatctacaacttccagccctggggttattgtcccagaatctagtgaaaataaaaatcttggaggagtcacccaggagtcatttgatcttatgattaaagaaaatccatcctctcagtattggaaggaagtggcagaaaaacggagaaaggcgctgtatgaagcacttaaggaaaatgagaaacttcataaagaaattgaacaaaaggacaatgaaattgcccgcctgaaaaaggagaataaagaactggcagaagtagcagaacatgtacagtatatggcagagctaatagagagactgaatggtgaacctctgaataattttgaatcactggataatcaggaatttgattctgaagaagaaactgttgaggattctctagtggaagactcagaaattggcacgtgtgctgaaggaactgtatcttcctctacggatgcaaagccatgtatatgaaatgcattaatatttgactgttgagaattttactgccgaagtttacctccactagttctttgtagcagagtacataactacataatgccaactctggaatcaaatttccttgtttgaatcctgggaccctattgcattaaagtacaaatactatgtatttttaatctatgatggtttatgtgaataggattttctcagttgtcagccatgacttatgtttattactaaataaacttcaaactcctgttgaacattgtgtataacttagaataatgaaatataaggagtatgtgtagaaaaaa

SEQ ID NO: 6966 - DNA, 872 bp, Homo Sapiens
tatgatgtgaaacttgctgtgatcaggtaagctaccaccagattataagggtgttatgctggatcctgagaagctttcaagaaccagagaacctgattgctgatgattggccttaaaggtggtcgagggagatacttgggggcagagcagactttgccagtgcccctcaggtcaaacgcaagccaagagcaccctgtccccattccaaggggccagcagcactttggcccaaagtattttctttaaggtgccattccttcatgttttctcagtttggagggtgatgggctagagctttccagaaccttctccattccaagaatctctgcccctgtgtaatctgaaggaaggctgtgccatctttgggcactgccaagggagcttggggtgatgggcttctttctgcactggagtctcacatctgttagctttgacactcaagcaatgttggaaaatgcagggtgactgagttccctgcccagctttcgggatctctggcccccatccccttgtgtgtgtccctctgcccagctcctgctgtaattagctccacgtgtacccccttcactccctcccaccagctctgcagccagcctatggcaattatattttaagaggtgttcccaggacttttgggacctactaaaacaatgatggttattttagatgtgatgatttatatttatgtagagatatttctggaccactcaagctcttcgataccaaaatcaggagcatcttgggatttattaaattatgtaagaagatagcacagatatcgggatattattgtgtgaaaatgctgcttttactttgatgtgatctcattgatgtacacaaccaagttccaataaagtgctagaatgtgaaaa

SEQ ID NO: 6967 - DNA, 1428 bp, Homo Sapiens
ggggcaacaagaggggtcaagtgacacaaccagctgactcccgtagaggaagacactgtggaggccagttctggagctattgcagcctcggttgcccggccggggacccgagccgaaaagttatcgtcagaatgtcgggcaaagaccgaattgaaatctttccctcgcgaatggcacagaccatcatgaaggctcgtttaaagggagcacagacaggtcgaaacctcctgaagaaaaaatctgatgccttaactcttcgatttcgacagatcctaaagaagataatagagactaaaatgttgatgggcgaagtgatgagagaagctgccttttcactagctgaagccaagttcacagcaggtgacttcagcactacagttatccaaaatgtcaataaagcgcaagtgaagattcgagcgaagaaagataatgtagcaggtgttactttgccagtatttgaacattaccatgaaggaactgacagttatgaactgactggtttagccagaggtggggaacagttggctaaattaaagaggaattatgccaaagcagtggaactactggtggaactagcttctctgcagacttcttttgttactttggatgaagctattaagataaccaacaggcgtgtaaatgccattgaacatgtcatcattccccggattgaacgtactcttgcttatatcatcacagagctggatgagagagagcgagaagagttctataggttaaagaaaatacaagagaagaaaaagattctaaaggaaaaatctgagaaggacttggagcaaaggagagcagctggagaggtgttggagcctgctaatcttctggctgaagagaaggacgaggatcttctatttgaataatctttcctgttctggttctttgagaaaccctaacactggcttcattttaattcacagtgtgtaggtttgatttgtgtggctatttattttttggcctaagaatttcactggttgtaaaatttacctagatgtctatttatgggattacttttgcagaatcataatttagcaaccatttatcatggatgaaagagatctgtaaaacctgcccaggaacttacagaatttactttgcagaagcgttatcatactccatttacatctgtgttacacgtgatctgcttaccaagcatattaggaaatacctcttaggaagcattagcggtctcaggccaattactgtggagcagctttcattcctacccacttgcaaaccttggcgctgttgtctgagattgctgcagccattcttgttaccatggtacttctcaaactttgtgaaaacctgcacttttccttgcatgacaggttcctgtcttgtctgtcatgggagccattctgccaatttaaatgcgactgtggtataaacagtaaaatgatttaaaagtaaaaa

SEQ ID NO: 6968 - DNA, 1106 bp, Homo Sapiens
  misc_feature (741)..(742): n is a, c, g, or t
  misc_feature (749)..(749): n is a, c, g, or t
  misc_feature (751)..(752): n is a, c, g, or t
  misc_feature (754)..(760): n is a, c, g, or t
  misc_feature (762)..(762): n is a, c, g, or t
  misc_feature (764)..(765): n is a, c, g, or t
  misc_feature (767)..(773): n is a, c, g, or t
  misc_feature (775)..(775): n is a, c, g, or t
  misc_feature (778)..(788): n is a, c, g, or t
  misc_feature (790)..(790): n is a, c, g, or t
  misc_feature (793)..(794): n is a, c, g, or t
  misc_feature (796)..(796): n is a, c, g, or t
  misc_feature (838)..(838): n is a, c, g, or t
  misc_feature (853)..(853): n is a, c, g, or t
  misc_feature (856)..(865): n is a, c, g, or t
  misc_feature (963)..(1001): n is a, c, g, or t
  misc_feature (1052)..(1060): n is a, c, g, or t
tgactacgccggtcgatctgactacgcggctcgatctactaccggctatgggccctgcccacaagcacaccctcaggccgagggtgcagactgatgctcttccctgatggagaccctgagatcttccccacccccaatcatgatgtcttcagtgtgggactggggtcctcttggttctgcctgcagcctgcctggctccgcccctagtgccccctcctcaccacactggccccaggtctcaggaggggtgtcctgggcagggaaggtcagtgtcactgatggtttgctgtttggaagccattggcagggctgccgtgcatgtggctgtgagggctgcacagtcctgccaaggggcttcctccttgtcaccccgaaccttgtaatcgtgtgctggcgtggcagccctggctaagttaatccccaccgctttcagtggtagaaagaattccctgagtgggccaggctggtgccctcctcctaccctggcttttctgagtgagctgcctggagccctcatcccctctcccaggctgggctggccctgggcggggccactgtgtgctggcccactgtgacctgacccgaccttgtgcagcccccctgccctggtgtcctgggttttcgtgatgatctttgctctgtttccagtggggtttgaagcagagttcagggaaccctgcccaaggtcctcctgttcagacattcctatgttgaataaagtatgtttgacttccccggaannaaaaaanannannnnnnnanannannnnnnnanaannnnnnnnnnnanaannanggggggggagagaaaaaaaattccccagaggggggccaaggntaacccgaacccaanttnnnnnnnnnncgtttataaaattaccctcaggggggcccaaatttttcggccccccgcttttttttaaacaaaggggccccctaaaggaggccttaaaaataaggaannnnnnnnnnnnnnnnnnnnnnnnnnnnnnnnnnnnnnnagaaaacggcgaccctcgggaaaattttttgaaaaacccctctcttctttnnnnnnnnncataattggggaaccctcccaacaccaatttttaaacgcttggggg

SEQ ID NO: 6969 - DNA, 698 bp, Homo Sapiens
aattccttgcctaagctcatgcagtttggagaccgggaattttacccggaatgttggaactccgagtttgtaactaaattcttgcagaactggaacatccctgtgcacaagtggtgcatcagacactactacaagcccatgcttcgacggggcagcagcaagtggatggcaggacaggggtgttcctggcctcggccttcttccacgagtacctggtgagcgtccctctgcgaatgttccgcctctgggcgttcacgggcatgatggctcagatcccactggcctggttcgtgggccgctttttccagggcaactatggcaacgcagctgtgtggctgtcgctcatcatcggacagccaatagccgtcctcatgtacgtccacgactactacgtgctcaactatgaggccccagcggcagaggcctgagctgcacctgagggcctggcttctcactgccacctcacacccgctgccagagcccacctctcctcctaggcctcgagtgctggggatgggcctggctgcacagcatcctcctctggtcccagggaggcctctctgcccctatggggctctgtcctgcacccctcagggatggcgacagcaggccagacacagtctgatgccagctgggagtcttgctgaccctgccccgggtccgagggtgtcaataaagtgctgtccagtgaaaaaaaa

SEQ ID NO: 6970 - DNA, 377 bp, Homo Sapiens
  misc_feature (232)..(260): n is a, c, g, or t
gtaaataaggtaactgggcaatcaaacaccttttggggattctggctttagtattttatcagccattttaaaattaaatataaaaatcctttgtaagaaacttgcatcctaatttttctttattgcaattgaaagtgtaaataataagacaatgtaagtaagaccttcctaatgtctaatacaaactgggctccagcaagtggccctatttttattagggttttgaaggttnnnnnnnnnnnnnnnnnnnnnnnnnnnnnttttcttttttaaatgtatagtagagtggtgtctgtataagtgttacctgtagtggggttttgtccagcaagcctgaaatttatactttgaaataaaactactgggtttttaaaaaa

SEQ ID NO: 6971 - DNA, 611 bp, Homo Sapiens
aggtctcatggactcttacccatacagattggatactgcggcaacaagagactgctatcaggatgcaccaggcccttgggttttggacatataaattacccaagatggttgccatatacattccctttgaatggcagctactagcctgctattggactctaatttaaacagaacacttgaccactgaagcactgtatgtgaccttaagacctgagctgcccatctcatgcaggtattattaacgaaaaataaaaatggaagccccagtttagaaataccctaaggctgactacccgcaaccgtgtaaccaaaactaatcattctgattttcctgaaatgctgtctctgatcataaatgaaatgcaaaatgtaagctttacatccttgccagcatgattcactaaaattaaaccaatcagctatagaccaacaagcttaaacagctcaacttgccctaacaagaatgtataacagccaattataacaaagctctaaatattccccccctttatgcattatacaactgtgacgtaactgctgtaagattaacttcttaccacttgatatgagtattctagattatggtctgtacatcttgtcatacaataata

SEQ ID NO: 6972 - DNA, 469 bp, Homo Sapiens
  misc_feature (434)..(434): n is a, c, g, or t
ttgtgaatatttaaatttaatgtagttcttccctatttaacagttttctgtaactcctatttagcctaccaattaccctgtgaaagttatcctccccccttttttacagatgagaaagcaggctgagagatcaaataactcaaggtgactcagaaaataattcaaggtgactcctccttttaaaactaaatatgtaatggataatatgcaactgatttcttgtgaaatataacatttatgtttttagattttctttgcctttaagtcaaggtaagtccagtttaaacctgtactttttgtaattagccaaatcaaatgatcataattcaaaagatgctaaaacagaatgctaccatagtgatgctgagaaatactgtcaattagccagcaaacagtaatctgaatttgcgcaggatgatcattctaatttaggntataatagaaagattttagataaaatagaaaactt

SEQ ID NO: 6973 - DNA, 498 bp, Homo Sapiens
  misc_feature (157)..(185): n is a, c, g, or t
gtccccttccccctagacggaatttaaaccgtggtcctctggtggggccctggaaggggatgtgcaattcaggggggacctgttcaacttccaccaaggagcctccagagggcccatgtcagagccggagccctctttttttctgtccgttttgcannnnnnnnnnnnnnnnnnnnnnnnnnnnnccctcttttaaaaaccaaatgaaaataagcaaaagaagccaatcgtctctgtgaaatgtccagaagagggaactctgtagagacagagaggatattattggctgccggaggctgggaatgggaaggtgaggggcctggggaggtgatggttaaaagattcttctttgtggtgatgaaattgtcttaaaatggactgtggtgatagttgtgcaacttggtgaatatataagttattgaattgtacactttaaatgggtgaattgtatggtgtgtgaaacatatctcaataaagctgttatttgaaaaataaaaa

SEQ ID NO: 6974 - DNA, 852 bp, Homo Sapiens
  misc_feature (259)..(259): n is a, c, g, or t
  misc_feature (726)..(759): n is a, c, g, or t
agaaaattggatgaaattagctgctgagattgagtttctgccttaaaatctgaaacaaaaaaagggacaaattgctggtagatctactgactgtagccatcaccagaacacttagtttcttcccagacatgaatttcctgacaggctctgagccagaaacacactgtgggcgggcatctggttcagccctggatatgcctccactgtggagggaagcattggaactggagttgtgcacagcaccgcagctagtgggccntggcgtgggggtgcagaagggcagggtagttctttccatttccccttgcagctacacttactttctccctgactaccaaaatggagtgacggttgaagaatcaagctcataatatgatacacccagacagacccagaaatcttttgatttccccagcgagatacttaccactctcgtcttctctttcccatggttaaaacaggagttgtgttctctgtcgctgctaaattattcttcacttgagtgaagcaaatatttagcttccaaataaagtatattttgttctgaactggcagtttaagaggagataccgtagtctagatgtctttgaggtagaatatatgatggaccacatagtttaagattacaaggtactttccctcttctctcaggccatgcatttgaataaagtgcctcccttagcctgagctcctaaagacctcttgtacttggttgcaaactcagannnnnnnnnnnnnnnnnnnnnnnnnnnnnnnnnnatgtgtgactgtgtactgagataccactagcccagtttgctgggtctctatgttttggaagttgggggtttaataataattatgtctttttag

SEQ ID NO: 6975 - DNA, 766 bp, Homo Sapiens
  misc_feature (535)..(535): n is a, c, g, or t
cctgaggccgggctatggtggttgtgctgctgggccttccaggtggtggtggttgtgacagcctgggtgatggtgagtttggtccccttgatggactgcaactgctgcctccctgatctccgggtgtccagctcgactcggcagaaatacacagactggtcctccttccgcaggtttgagatcctgaggaagccgctctcctgaccctctgtccagttcagaaagagccggttcacataatccttgtgaatggaaggcggccttgtgctgtagaaggactgcccgtggaagtggccccgtctccaggatattctcacgtagggaactatggctaactcccaggggtaatagaaggagaaggggatttccacagagccacccatggaggctgagaggtgttttggttgagtgaccccataaaggtagcttggaccagatcctgtggagccaccaggctgcagaaatgctggcggctgcagcaggagcagcaggggcagcagcaggggccgacccatggccttgttcttctccaggngacggggagaccagcagagctgtccaggcaggagagggggccctgttgggaaggggctgctgagggcctgggtgatggtgagttgggtcccctttaatggacggcaagacaggctccctgatctgtatgtccagctggattggcagaaggtaccagactggtctccttcccactatactcttaccagcagggatcttaagtgactcggctcagtggctgcggtaatgaggg

SEQ ID NO: 6976 - DNA, 551 bp, Homo Sapiens
  misc_feature (515)..(515): n is a, c, g, or t
atgtgagccaccgcacccagcctgagtttctctttctctctttttaactttattttttgaaaaacccggtagactttgtggggagcatttttgttgataattttactgatctaaagctgagtgattttttaaaagaatttgaatttggcttcctcaccagtaatatgtctccttgcttctttgatgtgatagttttgaagatgggtgagaatctaatagatctgtggttgaatttgctgtgttgttatgaagtccaccctgtgggccacaataacataactgttggtaggagttgtttgaacctattctggagattatttggtaaagtatactaaaagccttaaaaccatgtatgtgcgctgtttgaaccaagtaagccacttctttgacattagaagacattaagaagaaataatcagccttgcataaaacttatggatgaaagtattcatcacaatattatttataataaaaaattgccaatgttataaatgaaccattgggaaatggttaangaagtgatggtgcattgtgtggtaggaatattatgc

SEQ ID NO: 6977 - DNA, 1267 bp, Homo Sapiens
  misc_feature (19)..(19): n is a, c, g, or t
  misc_feature (42)..(42): n is a, c, g, or t
  misc_feature (124)..(124): n is a, c, g, or t
  misc_feature (895)..(928): n is a, c, g, or t
aacacttgagtcggcaagntccaatctccccaccccttcggnactcctaagtccaatagtgcaaaacaaagggcggggcaccaaaggaaagccagagccttccccgcacctgccctctccttcnacatcacgggggccccaagaggttgacgaggctggggctgagtgtgatgctctcctgccccttctccagcccccaacatctgtgggcttttacaagctcagcttgtgcccctgcgctggggggagggatggcgagaaaaagtccaaggggtcccttctgccatctgcccgagctgggaagaaactgcaggtaaagtgggtccagcccttcttccataaaagatttccccgcagggacaagcccagggcctctccctccacttctccccattcaagtgctgatccatttcatgtgacaggtccaaccaaccccctacttctgccatggcccactctgctctctggggggacctccaaaacatttgctggggatggacctcctaggcgggcttgcagactgtccttcctctgagcctcacaaagcggacagtgcggaaagggaagtggggtccagatggagggggcgcccctctcagtctcagtccgtcgacaccaggagctcgccacactccctggacctcagcacaggctctgggtcaaagctcgccagggtctgggcgcaggcgcctgctccaggctaggacccctcaggccaggatctgttccctccacttgggggggtcaggacggggtaaggctggatttagcctttgtcctggttggctgaggctcctttgtcagcggtccctcctttggggccaccgccactgccctctgctcccgacaggctgaggaaggggttggtctgggcagtgaggactggaggtccgcnnnnnnnnnnnnnnnnnnnnnnnnnnnnnnnnnnggccatgagacttgtgttgttgccaagcgacgggagccactagggctccagcgggcagcagggttggagcagacgctgtgggcagcaggccaggggtacccgcagacagcagcggggtggagcttcctgccagacaggctggccatgggcagctgggagccgcccagccatctgcaggcgctgcagctcccgtttctgctggatctgctggatcatctggtagactacagtctggtgttccggggtcagctgcgacgcgtggtcgacgatatcccggaatatccggaccgtaccagccagctttttttacacactggtctatagtgtcaccatgctctc

SEQ ID NO: 6978 - DNA, 340 bp, Homo Sapiens
catgatggtcgcacagccttcatgctaatactgtcctaacacagcctggagctaggcgatttcctttgaccacaaagtacctggagtctaactcagcaccacaggcctctgcatggctcccaggtgcccaccacctggcgaagctcattcacagatgacaggcaaagggggagcttgatcatctggcgactccttcctgctgcttctcccaacacccaaaacagaaagctctgcatccccaggtcacacctgggttggtcagaagaaggaaacagcttgtccgagcacaacatgctgacagagctggctgtggccagtcaatggtccacagcctggtcca

SEQ ID NO: 6979 - DNA, 728 bp, Homo Sapiens
  misc_feature (145)..(145): n is a, c, g, or t
  misc_feature (508)..(508): n is a, c, g, or t
gctgtgctggcacccaaccaaggaaggttgcttagcttttggaactgatgatggaaaagtgggattgtatgacacctactccaacaagcctccacagatttctagcacatatcataagaagactgtatatactttagcctggggncaccagtaccccccatgtcacttggaggagaaggagacagaccttcccttgctttatacagctgtggaggagaagggattgtcttacagcataatccctggaagcttagtggagaagcctttgacatcaacaaactcatcagggacaccaattcaatcaaatacaaattgcctgtacacacagagataagttggaaagcagatggcaaaatcatggctcttggcaatgaagatggatcaatagaaatatttcagattcccaacctgaaactgatctgtactatccaacagcatcacaagcttgtgaataccattagctggcatcatgagcatggcagccagccagaattgagctatctgatgnctctggctccaacaatgcagtcatttacgtgcacaacctgaagactgtcatagagagcagccctgagtctccagtgaccattacagagcctaccggaccctctcagggcatacggccaagattaccagtgtggcgtggagcccacatcatgatggaaggctggtatctgcttcctatgatggtacagcccaggcaaaaaaaagtattgaattggagaaaa

SEQ ID NO: 6980 - DNA, 598 bp, Homo Sapiens
  misc_feature (49)..(57): n is a, c, g, or t
  misc_feature (279)..(453): n is a, c, g, or t
  misc_feature (458)..(534): n is a, c, g, or t
ccatgtaaactatgaaaatcaaggaagttgaaggcaaacaaggcaattnnnnnnnnntacgaagtactcttcagaaagtactcctcatcacaatatataaatatgttttatggaaaacaagggcgggggaggaaaactggcattttccagaattctgcagaagccgacagagactacaatttgagggctttggtttggggaaaaacaaagaggcacaaattcaaatacaatttagaacatgacttcaaggctgggcgcaatggctcacacccacccagnnnnnnnnnnnnnnnnnnnnnnnnnnnnnnnnnnnnnnnnnnnnnnnnnnnnnnnnnnnnnnnnnnnnnnnnnnnnnnnnnnnnnnnnnnnnnnnnnnnnnnnnnnnnnnnnnnnnnnnnnnnnnnnnnnnnnnnnnnnnnnnnnnnnnnnnnnnnnnnnnnnnnnnnnnnnnnnatacnnnnnnnnnnnnnnnnnnnnnnnnnnnnnnnnnnnnnnnnnnnnnnnnnnnnnnnnnnnnnnnnnnnnnnnnnnnnnctatttaataacatactatatgcttacttactaactaatatctattatcatgttctgctttttt

SEQ ID NO: 6981 - DNA, 1636 bp, Homo Sapiens
  misc_feature (97)..(106): n is a, c, g, or t
  misc_feature (197)..(233): n is a, c, g, or t
gttcccctggtttcccccccggaaaaaggatatacctttaaaaaagaaatatgggccctttttttgggaaccccgggcccccttttggggggttttnnnnnnnnnntttggggggcccgcccaggaaaattgttattcccggtgtaaggggggaaattttttgaaaaataagtttttctttcccaaatccctttggnnnnnnnnnnnnnnnnnnnnnnnnnnnnnnnnnnnnnttggggggtggtcccttaaactattttgaaaggcaggtagcttagtctaagctaaaatatttttttcattcatagcaataatcctcccctcaaatgccctttaaaaaaatgcatgaaaccgtacaatagcaaaaatcaaagagcacagactgtattttcaagaacagaaaaatctctaatgctgaaagatatagtagaaagcagatttctttggggacattaatcaattagtttataattcattatgaagatttctcttttttattccggggagagtctgctacatttgaagttaatgttccattcacaccattttctgttccttttttagaagatctgcctttagttactgttggtttcttcttcacagctggtgcctgaaaagcagaatgttccctccaccttcgaagctgaaaattaatgaacttccacatcataaatgcctgagtaacgcaaatggatgccagaacagcgattctaacagctaacacattgaagtttccagtactgaaatccagcttctgattttctgctcttgcaaggccaaaaccaacagtcagtactgaaagaattaaagtcagaagtcttcccaaaacaaaaagaactgcccacagagaaaatcctttctgatacttttcattgctaaaataaaacaggcgggaaatgtggaaaagaaattcaacaaaataatgtagcaccagaagaacaagtcctagatgattcaagttcaaaaggtaagctccagcaatgtggaagaggtaaagaccaatgtagacaagctgacgaggaatatcttcttttttggttttctggaagtagagttcaggaaaagcatgaagccagtaagccagctgtgatatgtagaaaaacttcatttgaaatgtcatcaggttatggggataagccctccataagatagttgggtctgagatgtagttttcagagatgagaatgaatgtgccccaaacacaggcaaaaaggtagaacgcactaagctgaccagattcattaaacttgctgtgttttgttttggagaaggtgcattcgcctgttaattttatccaacatatactcttgaattacggcatgaataattatcgccaccagcatgtagaagaaaacagtagccaaatctttgatgccatagtaataaagggacactgattcagtagcttgttcttctgttgctgggagggggacattgaactgaagagtaacaaaaatgatagaagcttttgccgttatctcaaacatgagccccagcaggaagaccatcgccacacaggagacgatgtccgcgtgattctgcaggacgaattcgtggctcagcactggggggctcttggtgcttttcttgcgaatcgccatggtagggcccccgccccgcgctatcaggtgctctc

SEQ ID NO: 6982 - DNA, 773 bp, Homo Sapiens
  misc_feature (485)..(493): n is a, c, g, or t
cagctaacagccaaactaaaatggctagattccagaggccaaaagggaatattttgtaaatatatgtacatattcaggcaagatatggtctcccaagctgagttctagaaatgatgtttctagacatttctaagtggtattgttagtgctcacttggctcactcttctaggtttaagttagcccagagattgtatttactcatggatcactttatttatttcacatttactcagaatgatcctttgggttctataaggacataaaaacatacaagtcagtgtcagcttaccaacatgacattttttcagtcagttgtggtaggccagccttgaagccatcgcacagtctagaaacttgtgtagctgagtgtgcagctcacctttaagggtgaagttaggtaaaagcaattagcagaggcgttatctatgtgattatgttgcttccttgtcagtatgttgaattttatagccctttcaatgaaatnnnnnnnnntttgtatattaccaatgtttttagtttaaataaagagtcacccttactactgttgaatttcatcccaagtgtaaatcattctataatggctgtgtctgttatagtatattacagtaactgcatgtgtcaccaagtgttctatatcaggctaggataacctagaggcagtaattttttaaatgataaaataaatctaatgaatataaactctcatgataaacctattttttccatcatcagccttttcaagtatttaaataaataactgctgtgtactgtg

SEQ ID NO: 6983 - DNA, 402 bp, Homo Sapiens
ggggctgcacacgggtgagaagccctacgcctgcagccagtgcggcaaggccttcatctggagctccgtgctcatcgagcaccagcgcatccacactggcgagaagccctacgagtgctccgactgcggcaaagccttccgcggccgctcgcacttcttccggcacctgcggacccacacgggcgagaagcccttcgcgtgtggcgcctgcggcaaggccttcggccagagctcccagctcatccagcaccagcgggtgcactaccgcgagtagccgggcgggggctcggggctcggcctcctacctgcccccaacccaccctccaccccgtcccccacggtgggcactgcccagcaccgcatgccacgtgtccggaataaattctttttgattgttgcgaa

SEQ ID NO: 6984 - DNA, 975 bp, Homo Sapiens
ggtgtttacagcgccttgtgcagccttagattttaatattcttttgtcattgttacatctcatagagtaaagctcttattaccttgatcctgagtcaaaaatcccacctgaaatcaccttttttcccccttgatcaaacatcccatccttcagctaccatactgttgctacagggattttgtggactgtggcccctgtcccgaggttggcaccttcagttcagcacagcctgagcagtgagaatgtctgaaaggagagtatataggtaagatccttgagaaagggctgactgaggaactgacctcttagagatctcaggatctttacgacaacaagttaggttcctactgtagttacctgccagaatgcgcctcttaattaactcaggtaatgaagagctaactgcgttataatcatcttgcttttgcctgaatttggagagagtattataattaagttcccagtatcagagatgtccttacataagattaaaatatcttgatgactaataccattctatgagaaagagtagttatatgcccagactgtattaatttactttaagaaactaatggtttgaagtaatggaaaaaattttaaattataaagctaaggtgcaataaccattttgctacttatttatagaattatttgaagaattttgtttttgaagtaatgctttaaggagtataagatattcaagataaattatactataaaatgattttattgaaagttgaaggttacacaaattgttttaggtatgagcagaagaggttaaggtatttctaaaggtaacatatagtcaagagtttcctcaaaatagttatttggagaagaatcagaatgtctgtgtatttcttgtctgtttctatgttgtcttatagctctgactaaatgtgtttacctatgcaaaagatttattaaagcatagaaaaggtgaatgaataaaaatataaaataattgtccttttt

SEQ ID NO: 6985 - DNA, 488 bp, Homo Sapiens
cacaggtcacttccttgacaacacaatcatttctgatctttatcactgtaaccacgtcttctattccataggagtttcttttgattctctcagttgcggggggcatctcttaatcctggggtaaaaggagagattgccatacttagactcactgtgagtctccccggccatttcacgaggagaccacagtgctgccaccagtgcctaaacaggtggctggcattcgagacttcctcctgttccctgggtcagaggatagcggtttccatcataaaccaagatgatgagttcagcctttatccctcgtggttccgctagatgtaacttataggagttaacatttgaggactttgttctgcatcagatcttactatttgaatgtttactgttggattttgggcatcttattactgttactcaaaaacattgactctgcatcaagaaagaaacaagaaagcaataaaacaagaaataattcatgctcacaa

SEQ ID NO: 6986 - DNA, 474 bp, Homo Sapiens
  misc_feature (237)..(320): n is a, c, g, or t
  misc_feature (362)..(371): n is a, c, g, or t
  misc_feature (451)..(451): n is a, c, g, or t
ccctgaaagtaattttagggtttaggacttcagggagggcttttaacaaagtttgggtccttaacgggtaaaaagggtggcttatttttccccggataaccatcatttacttcccatcccttacttaagggtttatccaaaagagggcttggggaataaagtaccatttttacagcccgggtttggttgcttaacgccctgtaatcctacttaagcactttgcgaggcccaagacannnnnnnnnnnnnnnnnnnnnnnnnnnnnnnnnnnnnnnnnnnnnnnnnnnnnnnnnnnnnnnnnnnnnnnnnnnnnnnnnnnntaaaaaacattttcatttacatagcaccaaatataagagccnnnnnnnnnnaacctagaaagagtattttggagagagaaactaaggatcagaaggtttaagagtatcaaaaatctgaggccagtcctcancatcgtgtaatcccacgaccttt

SEQ ID NO: 6987 - DNA, 664 bp, Homo Sapiens
gtagtagaaatattaaatatgcacacacaaagcctgcaacttgacattggtcactgaaacaaaaattgaattcctaaatccaagcaatcaaaagatgtttattttttatagaaagatctgtaaaaaaataataatttttcaaacagctttactttcatagagaaaactttctacagaagtggactaagattttaaattggtaccatcattaaataaggtgggacaccatatgaatttcattgcactggaagaaatgcaaagcattttttaatataaagtatacagagcattctagtcaactacagctgtgttacagctatgtgttcttttggatttggtccaaagaaacctgagtctgtttccagagagaatgaaaaatgttatagacacctgatcagttactcctcactgtaggatgcacaaaaatgacattccttgtagatcccactgaatccagtttcccaacacttgatactttcctttttcccttcccccaccccagttcactttgggtttcaggttcaattctcgaatcacaggcatccagattttcttcataacaaacacatcccatggtcagatgaactacccagttttccaggatgacatcacctcttctgctcccaaatttcggccatatttaggtccaaatctttaaggcccc

SEQ ID NO: 6988 - DNA, 478 bp, Homo Sapiens
agatgtgttgcattcattgggtttctatgagatgtggttttatcagacaattttttcttttatttcacaattactttaatatctgtaaaataaagaattattttaattcattttcccagtcccaaaagttaaatacaggccacttacttctttaaccaaatgatatagtttggctctgtgtccccacccaaatctcatgtcaaattgtaatccccgcatgtcagcggagggacctggtgggaggtgattggatcatggggagggatttcccccttgctgttctgttgatagtgaacgagttctcacgaaatctgatggtttaaaagtgcagcacttctccctttgctctctctctcctgctgtgccatggtaagacgtgccttgcttcccctgtcgttccgccatgattgtacctttcctgaggcctctccagccatgtggaactgtgagccaattaaacttcttttctttagaaatt

SEQ ID NO: 6989 - DNA, 964 bp, Homo Sapiens
gggaattccatgtgtggatgctggattgatttcaccactggtgcagctgctaaatagcaaagaccaggaagtgctgcttcaaacgggcagggctctaggaaacatatgttacgatagccatgagggcagaagtgcagttgaccaagcaggtggtgcacagattgtaattgaccatttaaggtcactgtgcagtataacagatcccgccaatgagaagctcttgactgtcttttgtggcatgctgatgaactatagcaatgagaatgattcgcttcaagctcagcttatcaatatgggtgttattcctaccttagtgaaattactgggcatccactgccaaaatgcagctcttacagaaatgtgtcttgttgcatttggtaatttagcagaacttgagtcaagtaaagaacagtttgccagtacaaacattgctgaagagctagtaaaactcttcaagaaacaaatagaacatgataagagagaaatgatttttgaagttcttgctccattggcagaaaatgatgctattaaactacagctggttgaagcaggcctagtagagtgtctactagagattgttcagcaaaaagtggatagtgacaaagaagatgatattactgagctcaaaactggttcagatctcatggttttattacttcttggagatgaatccatgcagaagttatttgaaggaggaaaaggtagtgtatttcaaagggtactctcttggatcccatcaaataaccaccagctacagcttgctggagcattggcaattgcaaattttgccagaaatgatgcaaattgtattcatatggtagacaatgggattgtaggaaaacttatggatttactggacagacatgtagaagatggaaaatgtaacagtacagcatgcagcactaagtgcccctcagaagacctgggccatttcccagttataaaataaaaggcaaaagatgtt

SEQ ID NO: 6990 - DNA, 540 bp, Homo Sapiens
  misc_feature (24)..(25): n is a, c, g, or t
gagcctcggttactccttcgacgnngtgttctgcatgtaagaaacacaatgccttgccctattcagacctgataggattgcctgcttagatgataaaatgaggcagaatatgtctgaagaaaaaaattgcaagccacacttctagagattttgttcaagatcatttcaggtgagcagttagagtaggtgaatttgtttcaaattgtactagtgacagtttctcatcatctgtaactgttgagatgtatgtgcatgtgaccacaaatgcttgcttggacttgcccatctagcactttggaaatcagtatttaaatgccaaataatcttccaggtagtgctgcttctgaagttatctcttaatcctcttaagtaatttggtgtctgtccagaaaaagtcgatttatgtgtattaattggccatcatgatgttatcatatcttattcccttttatgctatgatttattctatcttttgtatttcagaagacatataattaaatctatttaataaataaaaatatatagcttttcttagaaaaa

SEQ ID NO: 6991 - DNA, 463 bp, Homo Sapiens
cgtgatgaaacttactattcaaatgctaaatgttttcaagctttaataaggtatatatcaattccaagtaccaagcataatataaaaattcaaattcatgggtttactcttaataagcatcaaaagcaaattttgcgcactgaatcctatcttactcttgattggcacaatgcattcagagatgagttataattaggaaaaaagagtgtccactgaatgcatcatgtgtaaaaatgcaattaacatttcaaaaccacattaaaagggaaaatacctaaaaagttaactcttaataaaattatttgaaacaatattatcctgcagataaaaatacatttcttgtattatacatgtagatttctacatgaaagaaaagattccagctcccaaatagaaaaggggctgacccttgataaagacatcttagattgccaaactgatgtgattaccactgtaagaacta

SEQ ID NO: 6992 - DNA, 1331 bp, Homo Sapiens
  misc_feature (647)..(647): n is a, c, g, or t
ggggaggtagggacggtactgtcccaggtatattcgaaagtccataatggttcagaaatactgttttcctatttccaagacctagtgattacacttcctttcgagttaaggaaacataaactaatagatgtaatctcgatgtatagggaactgttgaaagatttatcaaaagaagcccaagaggtatttaaagccattcagtctctcaagaccacagaggtgctacgtaatcttcaggaccttttacaattcattttccaactaatagaagataacattaaacagctgaaagagatgaaatttacttatcttattaattatatccaagatgagatcaacacaatcttcagtgattatatcccatatgtttttaaattgttgaaagaaaacctatgccttaatcttcataagttcaatgaatttattcaaaacgagcttcaggaagcttctcaagagttacagcagatccatcaatacattatggcccttcgtgaagaatattttgatccaagtatagttggctggacagtgaaatattatgaacttgaagaaaagatagtcagtctgatcaagaacctgttagttgctcttaaggacttccattctgaatatattgtcagtgcctctaactttacttcccaactctncagtcaagttgagcaatttctgcacagaaatattcaggaatatcttagcatccttaccgatccagatggaaaagggaaagagaagattgcagagcttttctgccactgctcaggaaaaaattaaaagcccaggccatttgcgacgaagaaaataatttctgattaccaccagcagtttagatataaactgcaagatttttcagaccaactctctgattactatgaaaaatttattgctgaatccaaaagattgattgacctgtccattcaaaactaccacacatttctgatatacatcacggagttactgaaaaagctgcaatcaaccacagtcatgaacccctacatgaagcttgctccaggagaacttactatcatcctctaattttttaaaagaaatcttcatttattcttcttttccaattgaactttcacatagcacagaaaaaattcaaactgcctatattgataaaaccatacagtgagccagccttgcagtaggcagtagactataagcagaagcacatatgaactggacctgcaccaaagctggcaccaggggctcggaaggtctctgaactcagaaggatggcattttttgcaagttaaagaaaatcaggatctgagttattttgctaaacttggggggagaggaacaaataaatggagtctttattgtggatc

SEQ ID NO: 6993 - DNA, 460 bp, Homo Sapiens
aattcccccagtatctggccctaactgccctatatagccttaatcaatcatgattctcctctacaatcccaatgctctagtataaccgagccagtcactaaagctgccctcctcctactgttccctatgtttcatattcctttttctgaggctctacctgtagacatcttcaagacccaacccaactgtcatgaagccttctccatgaaggctatccatataaccagaataagaagtggtctttgcctccttgaacttttgtttgtaccacttttatgtttcttatccaaaaaatggccttaagttgtaattatctgtatagtcatcttccccactaggataaaggattgctgaatgatacaatttgttgtatacttctgtaacacccctcctcttcattatctggcatgtacatcgatattaaaaatattcattaaatgaatgaatagctgattgactc

SEQ ID NO: 6994 - DNA, 928 bp, Homo Sapiens
ggcgccacagcaggcgcctcgggtcccagatgtctgcagccctcagcagctgcagaccgcccctcaccaacccagagaacctgctttactttgcccagggacttcctccccatgtgaacatggggaacttcgggccctgcctggagtccttgaccgctctctgtgggccccacccactctgtcctgggaaatgaagaagcatcttccttaggtctgccctgcttgcaaatccactagcaccgaccccaccacctggttccggctctgcacgctttggggtgtggatgtcgagaggcaccacggcctcacccaggcatctgctttactctggaccataggaaacaagaccgtttggaggtttcatcaggattttgggtttttcacatttcacgctaaggagtagtggccctgacttccggtcggctggccagctgactccctagggccttcagacgtgtatgcaaatgagtgatggataaggatgagtcttggagttgcgggcagcctggagactcgtggacttaccgcctggaggcaggcccgcgaaggctgctgtttactcatcgggcagccacgtgctctctggaggaagtgatagtttctgaaaccgctcagatgttttggggaaagttggagaagccgtggccttgcgagaagtggttacaccagaacctggacattggccagaagaaagcttaagtgggcagacactgtttgcccagtggttgtgcaaagatggaatgggtgtctctgcatcacccacagccgcagctggtaaggcacgctggaaggcacacgcctgccaggcagggcagtctggcgcccatgatgggagggattgacatgtttcaacaaaataatgcacttccttacctagtggcccttcacacaacttttgaatctctaaaaatccataaaatccttaaag

SEQ ID NO: 6995 - DNA, 624 bp, Homo Sapiens
cagaaatttggatttgaagtggggccggcttgcttcatgggctaggagccgccgagccgggctcccgagagcaacctcgtgacctcagcatgccattcgttcgtgagtgtcccgtgcacgtcctgaccctggacagtgaaggcttctccctcccctcccacctgacttcatctacgcctcggcaccacggggtgtgggaccccagcccggagagaacagagggaaggagccgcgcccccacctggagctgaatcacatgacctagctgcaccccagcgcctgggcccgccccacgctctgtccacacccacgcgccccgggagcggggccatgcctccagccccccagctcgcccgacccatcctgttcgtgaataggtctcaggggttgggggagggactgccagatttggacactatatttttttctaaattcaacttgaagatgtgtatttcccctgaccttcaaaaaatgttccaaggtaagcctcgtaaaggtcatcccaccatcaccaaagcctccgtttttaacaacctccaacacgatccatttagaggccaaatgtcattctgcaggtgccttcccgatggattaaaggtgcttatgtttttgtgagttttaagt

SEQ ID NO: 6996 - DNA, 1713 bp, Homo Sapiens
  misc_feature (917)..(1018): n is a, c, g, or t
  misc_feature (1024)..(1034): n is a, c, g, or t
  misc_feature (1174)..(1185): n is a, c, g, or t
  misc_feature (1211)..(1221): n is a, c, g, or t
  misc_feature (1258)..(1269): n is a, c, g, or t
gggccaccccacttcgcctgccgcggtcgggtccgcggcctgcgctgtagcggtcgccgccgttccctggaagtagcaacttccctaccccaccccagtcctggtccccgtccagccgctgacgtgaagatgagcagctcagaggaggtgtcctggatttcctggttctgtgggctccgtggcaatgaattcttctgtgaagtggatgaagactacatccaggacaaatttaatcttactggactcaatgagcaggtccctcactatcgacaagctctagacatgatcttggacctggagcctgatgaagaactggaagacaaccccaaccagagtgacctgattgagcaggcagccgagatgctttatggattgatccacgcccgctacatccttaccaaccgtggcatcgcccagatgttggaaaagtaccagcaaggagactttggttactgtcctcgtgtgtactgtgagaaccagccaatgcttcccattggcctttcagacatcccaggtgaagccatggtgaagctctactgccccaagtgcatggatgtgtacacacccaagtcatcaagacaccatcacacggatggcgcctacttcggcactggtttccctcacatgctcttcatggtgcatcccgagtaccggcccaagagacctgccaaccagtttgtgcccaggctctacggtttcaagatccatccgatggcctaccagctgcagctccaagccgccagcaacttcaagagcccagtcaagacgattcgctgattccctcccccacctgtcctgcagtctttgacttttcctttcttttttgccaccctttcaggaaccctgtatggtttttagtttaaattaaaggagtcgttatcgtggtgggaatatgaaataaagtagaagaaaaggcnnnnnnnnnnnnnnnnnnnnnnnnnnnnnnnnnnnnnnnnnnnnnnnnnnnnnnnnnnnnnnnnnnnnnnnnnnnnnnnnnnnnnnnnnnnnnnnnnnnnnngcccannnnnnnnnnnaacccacaaataacaaaccacacccccttcctgatcgaaccgccccgcacccagtaatgttgtggggggcgggccccttcgccccccaaaaaaaatttttccaacagacttttcgttggggcgggcggcccccccacagnnnnnnnnnnnncacggggatccattggctttctcccnnnnnnnnnnnccccgctataaacaatgcgtgtttgttcctctccccnnnnnnnnnnnnccagcgccggggcgggaaacccaagcggtcatacacaaaacactcccccacggggggctttggcgcgggcttctacccgggagctttctcacaaggggggacccccatcgcgcgagcgcctaaataataagtatcatatccccccccgcgctctggtcgccttttatcgcagaacaaggaggagggtgatatacattatataaacaatctttcccgccccacccaagaaaaaactctactcccacagagggtcgtgataataaacactggataccccgcccggcgcccttcatccccacctagtgggtcacatcgggtggaataaaatactcccccccacgcggtgggaagaaacgagcgcgcgaaacaaagaacagactctcctctttatgatcgccggcgctttatgcaactaaacaagccgggggcacgccctcctctccc

SEQ ID NO: 6997 - DNA, 596 bp, Homo Sapiens
acgccgagagtccatactggagccctcgcaaacacacggcttgtggcattggcatacttgcccttacaggtggagtatcttcgtcacacatctaaatgagaaatcgagtgtacaacaagtctttgaaatggtgctatggatttaccattccttattatcactaatcatctaaacaactcactggaaatccaattaacaattttacaacataagatagaatggagacctgaataattctgtgtaatataaatggtttataactgcttttgtacctagctaagctgctattattactataatgagtaaatcataaagccttcatcactcccacatttttcttacggtcggagcatcagaacaagcgtctagactccttgggaccgtgagttcctagagcttggctgggtctaggctgttctgtgcctccaaggactgtctggcaatgacttgtattggccaccaactgtagatgtatatatggtgcccttctgatgctaagactccagaccttttgtttttgctttgcattttctgattttataccaactgtgtggactaagatgcattaaaataaacatcagagtaactcaaaaaaa

SEQ ID NO: 6998 - DNA, 1033 bp, Homo Sapiens
  misc_feature (355)..(355): n is a, c, g, or t
ggggggtgacttggctggcgggatcaagtgcagctgcttcaggctgaggtggcagatagtgagcgctggtggcggagttaaagtcaaagcaggagagtaattatgaatagcgcagcgggattctcacacctagaccgtcgcgagcgggttctcaagttaggggagagtttcgagaagcagccgcgctgcgccttccacactgtgcgctatgacttcaaacctgcttctattgacacttcttctgaaggataccttgaggttggtgaaggtgaacaggtgaccataactctgccaaatatagaaggttcaactccaccagtaactgttttcaaaggttcaaaaaaaccttacttanaagaatgcattttgattattaaccatgatactggagaatgtcggctagaaaaactcagcagcaacatcactgtaaaaaaaacaagagttgaaggaagcagtaaaattcagtatcgtaaagaacaacagcaacaacaaatgtggaattcagccaggactcccaatcttggaaaacattctccatctgaagataagatgtccccagcatctccaatagatgatatcgaaagagaactgaaggcagaagctagtctaatggaccagatgagtagttgtgatagttcatcagattccaaaagttcatcatcttcaagtagtgaggatagttctagtgactcagaagatgaagattgcaaatcctctacttctgatacagggaattgtgtctcaggacatcctaccatgacacagtacaggattcctgatatagatgccagtcataatagatttcgagacaacagtggccttctgatgaatactttaagaaatgatttgcagctgagtgaatcaggaagtgacagtgatgactgaagaaatatttagctataaataaaaatttatacagcatgtataatttattttgtattaacaataaaaattcctaagactgagggaaatatgtcttaacttttgatgataaaagaaattaaatttgattcagaaattccaaaacccccac

SEQ ID NO: 6999 - DNA, 646 bp, Homo Sapiens
ggaattcccgggatgatgccaataaagcagactattcctacagcgggacaccctgaccccacggctgccctgaccccaggaggctccagttctgggctgggagctgtgacctccccaacgctcacccctcaaccccaagtcctctgcttggggagttctccaggagctccggaccctgagtcaatgttgggaggaagggtacctggtgtccccagtcaagcccatgaagcccatgcggcctgctacatggggtggggtcgtagggaggctgtttgcctccacgtctaggaaggcctgtgagaggagcagtcaggacttccggacaacttagctgggccctacttgggcccaagtttcagaatagtgttcccctatcaaggctgtgactagatcaggcagggatccattccctgtcccctgcccactaccttcaggccatttagagttgtaaatttacaaagatccacggtgggctccagctgccaagccacccaagggagtctgggccctaggcctagccccatccctccccatgaggggccaagacactgcctaaggtgtgggagggactggctgagattgcagcccatggtaggagctggaccaactgtatatagttttcaataaactttttccttttctgttc

SEQ ID NO: 7000 - DNA, 950 bp, Homo Sapiens
gggctcctcacttgctgcagtgtcatagcaataaaatgtgattcttggggtccccccagggagctgcccatggctttatttatgaacctggttttcgggagtcaggggaggagatgactttgcttctgtgcacagccccgtcttccaggagccacgactcagaagaaaagggtgctcagacttttgttatacacatttgctttgtgtaaataaatgtttacaattttatatgaaagatggaataagcgctagagcttccaactgtatattttttacttttatagattttaaaactatgatcctttatatgtgtgttttgggggagctatgataagttttatggcaaacggttggtattgttaactttttattgtcatcaaaagttcataaaagtcctattaatccccatattcttctactgcccttaactctggtatacaccaaaaagaaatctttactttccttgttttatcattataaaaataaagtattttgctagtatggaaaaactaacggtttaaggaaaaattttaacatgtcgggccgccccgggaccctcgagaaactttctaaacccattcttttggccgcgcgggaccccgaaagggaaggggaacatggcccttaacttgtttccctagggaaatccttggaactggactaaggggctggggattccccccccaataaaaaacggcccgggggggcaacccgacgcgtctcttgaaacaaatcccccaaggggactttctgaagggcactttacctggaattcctattcacacaggggagatcgccagcggaacgctcccaatttcctaaatttaacggccccctgacactggccggattcttttcgaaggacaaccgggatggggaattttcatttaaaaggcattcctgggccccaaaatgggagacaccacactccaccacaaacggtgaattgg

SEQ ID NO: 7001 - DNA, 744 bp, Homo Sapiens
  misc_feature (425)..(520): n is a, c, g, or t
  misc_feature (594)..(595): n is a, c, g, or t
  misc_feature (607)..(622): n is a, c, g, or t
ggggagcctagagcgccgcggccccgagatgaagccggcggtggacgagatgttccccgagggcgccgggccctacgtggacctggacgaggcgggaggcagcaccgggctcttgatggacttggcagccaatgaaaaggccgttcatgcagacttttttaacgattttgaagatctttttgatgatgatgacatccagtgagatgccctctggctgcaggcggggccaagcccttggtacagagccgcagtgtgagcctgcgcaggacagtttcaggtggttttaaagaacacgtggaaatcccttgaatttaggacctggttaaccagaaagataagactgttcttaacgacctagatgattctgttcatctctgaacgggatcaggttttgtcctcactccaattaaaagaaagcaatgtcnnnnnnnnnnnnnnnnnnnnnnnnnnnnnnnnnnnnnnnnnnnnnnnnnnnnnnnnnnnnnnnnnnnnnnnnnnnnnnnnnnnnnnnnnnnnnnnnggagaaccccaccaacacgaaaaggcccaaagaagttccgacgagcacacccccgcgcaggaacaaaaaagacnncctttggcgcgnnnnnnnnnnnnnnnnaaaaaacttttttaaaaccctttttgtgggggcgcggggccccccgagaggacaaaaaacaggggccctttaggtctctcttccgaaaaaacccccgggcttacaaacaagggggttttttt

SEQ ID NO: 7002 - DNA, 866 bp, Homo Sapiens
  misc_feature (785)..(785): n is a, c, g, or t
  misc_feature (788)..(818): n is a, c, g, or t
ggggacctggaagtgatgcctaaagctgtggaccgcgtgggctcgcctccctgggactaggtttcagcggccgctgcgatgaccaaaataaaggcagatcccgacgggcccgaggctcaggcggaggcgtgttccggggagcgcacctaccaggagctgctggtcaaccagaaccccatcgcgcagcccctggcttctcgccgcctcacgcggaagctctacaaatgcatcaagaaagcggtgaagcagaagcagattcggcgcggggtgaaagaggttcagaaatttgtcaacaaaggagaaaaagggatcatggttttggcaggagacacactgcccattgaggtatactgccatctcccagtcatgtgtgaggaccgaaatttgccctatgtctatatcccctctaagacggacctgggtgcagccgcaggctccaagcgccccacctgtgtgataatggtcaagccccatgaggagtaccaggaggcttacgatgagtgcctggaggaggtgcagtccctgcccctacccctatgaggggctccggtagcacctgggcacctgccgctggaagctattgggctggcagcaggacgactggctgtcctcctgcccacccacactgacggcatcttcccagttccccaaggcacgccttcttcccaggcagctctaacagccctttcatgaaggtaatgctagtcttctgtccatcagtgccatttcctgtagaactaaaggctgttccaagaatgtggggtggggaaagtaaatgcctaggnccnnnnnnnnnnnnnnnnnnnnnnnnnnnnnnncttggtcgggccgccctcggcccctcaagaaggctttcctagaaccat

SEQ ID NO: 7003 - DNA, 669 bp, Homo Sapiens
  misc_feature (90)..(90): n is a, c, g, or t
  misc_feature (95)..(95): n is a, c, g, or t
cttagattgggcacccaaactgacttcagaacaatgactaccatcattggcagtttcctccttgcttcctccagaacccttctcctcctncccgncttttcaatgttttcataggcaatggcctgagtttaccattttctataaaaggactacagaggggctctaattagcaccctagtcagttcccagtcttgaagctagttcttctactttggacagtatctctgggtgtgaatactctcactcaattttttattatactaagatgttaaaagagtggggaaaggcttacctaattctcttagaaaaattctcttagaaaaacatataccagtaagatcatgatattgatatattaatattacttttacacacacgcaattatatatatccatccattacagtttttttaaatagagtaaaagaggaatgaagttttacctgtttttgcagaacatataaaattcataagattcttgaaaataaagattattcatataacttcaaaatttagtaggtaactgtcaccctgctaatgatatacgatataatctagtcaaacaagttcctagaaagcaatagaggatttgagttaatcaagtattaccaaaagtacggttgcccagcaaagatcaggaaactatttcttgtttctacctccagaatctc

SEQ ID NO: 7004 - DNA, 683 bp, Homo Sapiens
tgtgataaacctgctttctcctcaggggcatatcagacttgaaattgacaatttggggtcctgagattgaaacaggagtcaaaaccagagcccagggtagctgcggcccccggaccacgacgcccacttccccacacctcctgctgtccccctctccgcaggtccagccctctcctggtggccgcgtttggcgccatgctctctcaccaggcagtgcaaccaccaagccttccagaagcacggtcgctccaccaccacctccgacatgatcgccgaggtgggggccgccttcagcaagctctttgaaacctgagcccgcgcagaccagaagtaaacaggcaccttggacgggggagagcgtgtgtgtgatgggaaaatccggacccacgcgtgtgctgaaggcgtacggtgccttgccagattttcaacttgagcataaattggttgccattgagaatttaagaatctggaatattgcagcttttggttaaacttaatgcatggttggagatgttatggcgacactaaacaaagtattcctgaactttccttagctccttggtagtaactgggaagacagaaatggagaaaaccacatgagaatgaagaattctttagcagctcaacagagtttctcggcctgctcccagatcggagaagtttctacttgtactctctctact

SEQ ID NO: 7005 - DNA, 308 bp, Homo Sapiens
  misc_feature (115)..(115): n is a, c, g, or t
  misc_feature (117)..(117): n is a, c, g, or t
  misc_feature (120)..(120): n is a, c, g, or t
atgagcaccgcgcccagcctgaacagaacagctttttatcatcaaactttggagtctaactgcaaagactttggattataatccaagttccaccctccgaaaagcagtaaaaatntntcngtcgctgagccatctcttctgtatctgtaacttagctatgccctcagccacagcaactgtcagtgttaattatcattgtttttgttctagcacaacctctaccaccaagtggacactaaaagtacaccatcgagtaagggagagtagagggacatgaagtattttgctatctgaaatgagtcctcaaa

SEQ ID NO: 7006 - DNA, 263 bp, Homo Sapiens
tccagcctgagagacagagtgagactctgtgtcaaaaaggaaaaattgccaagtggagataaaggtgtccatttgggtagggtcaggaagctgtggtattcatgcctcatggcctttcattttcttagagccgtaggggtaaaatcatgccattttttgcctctgtgcctcataagtttgtactccttcctcctttaaaaatcagctgtaagagctggatgtgctgtaagggctggacgtggtggcacatgcctgtagttcct

SEQ ID NO: 7007 - DNA, 562 bp, Homo Sapiens
acctggtatgagagcctgcatgccgtgctgaaggctctaaatgccactcttcacagcaatttgctctgccggccagggccagggctggggccagacaaccagactgaagagaggcgtgccagcctacctggccgtgatgacaactcctacatgtacattctctttgtcatgtttctatttgctgtaactgtgggcagcctcatcctgggattacaccccgtcccgcaaagtggacaaagcgtagtgacccctatcatgtgtatatcaagaaccgtgtgtcttatgatcttaacacgagagggctgggacggtggaagaccaagacacctggggattgcgtctggggcctccagaactctgctgtggactgcatcaggtctcagtgtccctatctgtaagatcaacaagaaacacggttaagggaggtcgtcactggggtgggagaagaggggctggtagaccgaagccttgtgcataaggattttttcccaggaaaagatagactttataaacagtgggagcccatgaacaaacatataaaagtagcaacagataatgacca

SEQ ID NO: 7008 - DNA, 398 bp, Homo Sapiens
ggcacgaggtggcagggcaccacagcgccccccttactgaacccatcagcatgtcagtggcattttaaagccatgcagcttggaggggccactgagattgtctctgagtattactgagaagcaacagaaaagagccatggatggagcccttgggctctctgggaaatgggaaatcagccaaaggactgagaaggagttaccttaaggtcagagaaaaccaagagagtgtggcgttctggaagctgagctttctttattcaacctcattcccttctccaaataagccacttgtgtagttgggcccctccagggttgaaggcaagaggagaaaggcacagcgtttgggaaacaagacttttcctgcaatagcctgggaaggaataaaaggatagagtgtt

SEQ ID NO: 7009 - DNA, 528 bp, Homo Sapiens
  misc_feature (370)..(370): n is a, c, g, or t
  misc_feature (405)..(405): n is a, c, g, or t
  misc_feature (412)..(412): n is a, c, g, or t
  misc_feature (434)..(434): n is a, c, g, or t
tagctgtacctgctggaatgggatggcactcttttctttactgccatgggacagggagctccagaatttccgaggactgcagggagaacctggtgagcagacccagggtccccttttggggtcttcggtatacagggtgaggttttcagaggcaaacccttctacgcatgcaggaggcccagggcttgagctctctggttcctgctcggcactgttaccggcctgggcctcggcctcctatctggaaagtgggactgagggaggattcacccaggcttcctcccggggttccctggaggacacaacaggctgaggttctgaaggaaagttcatgttggaggcagctctgtgatgccaattttcaaagcangcgctatgctgaggcacagcttggggtgcaatctngccttgntcttgagagcgggtgtgcaaangacgccatggtggcctgtttttcgacagcctctttctcacttgtccctaaaagctaaaaatggctttttaaatttattttttaggtggagtctc

SEQ ID NO: 7010 - DNA, 585 bp, Homo Sapiens
  misc_feature (174)..(174): n is a, c, g, or t
  misc_feature (328)..(328): n is a, c, g, or t
  misc_feature (432)..(432): n is a, c, g, or t
  misc_feature (482)..(482): n is a, c, g, or t
  misc_feature (513)..(513): n is a, c, g, or t
ttgggatgagaacacatcagctgggcgctatgttcgtgagaactgcaaaccgctgcggcggtatctgacctcagaggcagaggaacaccaccagctcttcgatctgattgaaagcatgctagagtatgaaccagctaagcggctgaccttgggtgaagcccattcagcatcctnttcttcgcccagccttcgggctgagccgccacaacaagttgtgggactccagtcgggatatcagtcggtgacgatcaggcactgggcccccctgcatcttttatagcagtgggtgtccagtccaggacactggtgctttttccatacaagaganacgagccagagttcactccttcctcctggctctctatatacctgtgaatatgtgaaatagtgtaaatatgaaagaacttgtacctatcacttcaacccctgccntgtacataatactattccatccacacagtttccaccctcacctgcccccncatacggagttggatgggggccgagtgaggnaaccaggtggcatctaccccatgttttataaggaattttgtacagtctttgtgaaataaaataacgtgcttc

SEQ ID NO: 7011 - DNA, 796 bp, Homo Sapiens
  misc_feature (90)..(90): n is a, c, g, or t
  misc_feature (110)..(110): n is a, c, g, or t
  misc_feature (118)..(118): n is a, c, g, or t
atccaagaggacatggaactcacaacaaacccattgagaactttgggagtttccaaattcgaactggaagggaaagaaaaccttttcacntcagagcccccccaagctanggaggatncaggtctggagctatcagctgtcatggctccaaatgcacggcgaaggctcatgtgcagcaggaggaaaggaagccaacaaagaggcctggttgagtctgcttgttgtctcccaatggccattcttcccccactcctttttactagcagaatctccttcctcagagttttggctgcccaagtagaaactaaatttacagcctcctttgttgctaactgtggccacatggcaagacagtaggaacctgggtgcctgatgacatcatggaccagccccttgcctggcctggaccagctgactatcactgcactgttatgggagagagaaataaacttccatcttgtcgaagctatgtattgtggtggttttatgtataaacattttaaaaataacaaactagaaaggagttctagatggaactagtggcaatgattacatacagctgttttgttttgcaaaccccacaactggatattaagtcaggatagctcctgctaaattctaacctcaaggctgaactgttctgccctattcacttacagatcagagcattaggcaaggacaaccttcttagcccctcacttctgaatcttccttctaagctaagaggtcagagcagaacgaggaaatgttgtgctatttggccagaaggagatggtgacagccctagtaacttcat

SEQ ID NO: 7012 - DNA, 691 bp, Homo Sapiens
  misc_feature (407)..(413): n is a, c, g, or t
  misc_feature (418)..(418): n is a, c, g, or t
  misc_feature (420)..(504): n is a, c, g, or t
  misc_feature (533)..(533): n is a, c, g, or t
ggggggcagtctgggacgcgccgccgccatgatcatccctgtacgctgcttcacttgtggcaagatcgtcggcaacaagtgggaggcttacctggggctgctgcaggccgagtacaccgagggggacgcgctggatgccctgggcctgaagcgctactgctgccgccggatgctgctggcccacgtggacctgatcgagaagctgctcaattatgcacccctggagaagtgaccacgctgaaacccacccacccgctgtgctgaccatgggccctgagcgtcctaccccgaattcacgaggctgaggcatccgggagctggcgtaatgcctggccgcagtgtgtgtgtatcccataccccactctggaaggaaccatccagtaaaggtctttcagaaccacaagaannnnnnnaaaanannnnnnnnnnnnnnnnnnnnnnnnnnnnnnnnnnnnnnnnnnnnnnnnnnnnnnnnnnnnnnnnnnnnnnnnnnnnnnnnnnnnncatttcccccctaacctaaacaaaataanaaaattctttggcgggccccctccgcccctcaaaaaaatttttcaaaaacaatttctgtggggcccccgggccccccaaaggggaaaggaaaatggggtaaaacttggttctccagggaaaaccggggcccaaaccaagggggtgggaattccccccc

SEQ ID NO: 7013 - DNA, 968 bp, Homo Sapiens
  misc_feature (402)..(404): n is a, c, g, or t
  misc_feature (406)..(408): n is a, c, g, or t
  misc_feature (412)..(453): n is a, c, g, or t
  misc_feature (459)..(463): n is a, c, g, or t
  misc_feature (476)..(476): n is a, c, g, or t
  misc_feature (496)..(496): n is a, c, g, or t
  misc_feature (517)..(528): n is a, c, g, or t
  misc_feature (544)..(575): n is a, c, g, or t
  misc_feature (599)..(651): n is a, c, g, or t
  misc_feature (882)..(921): n is a, c, g, or t
ggagaggaaactaaaaggactgatttaacccaagatgatttccacttgaaaatcttaaaggatattttatgtgaatttctttctaatatttttcaggcattaacaaaggagacggtggctcagggagtaaaggaaggccagttgagcaaacagaagtgttcctctgcatttcaaaaccttcttcctttctatagccctgtggtggaagattttattaaaatcctacgtgaagttgataaggcgcttgctgatgacttggaaaaaaacttcccaagtttgaaggttcagacttaaaacctgaattggaattacttctgtacaagaaataaactttatttttctcactgacagttgaaattgacttattggaaatattaactaaagcccatattagaccataannnannnaaannnnnnnnnnnnnnnnnnnnnnnnnnnnnnnnnnnnnnnnnntttttnnnnnccccccacaccancccaaaaaatacccccccanactccctttcgcccattgtgnnnnnnnnnnnnaacctaacaacaggannnnnnnnnnnnnnnnnnnnnnnnnnnnnnnngggccggcgcccacaagcgttgtnnnnnnnnnnnnnnnnnnnnnnnnnnnnnnnnnnnnnnnnnnnnnnnnnnnnntagaagaaattccactcccgccccctaataaagaagctttcccgggccccatacccagggggggtttttcaaaaaaccccccgctggggtgtttttttgtaaagggccgcgccctcggggccctttcccccccaaggcaaccgcagggggaccctccccacaaaaccatattggcgccccccggcgatggcccctttcttacacggccgctcggtttagtaattttatctnnnnnnnnnnnnnnnnnnnnnnnnnnnnnnnnnnnnnnnnaagggggaattattttgaacccccggaccgggaaaacggggtgggtc

SEQ ID NO: 7014 - DNA, 425 bp, Homo Sapiens
gagactctaaaccctcagtaacataagcacgggctaaatcagagggtgattcctcttgtttaaggtccgtgtcaaagaattcttcttctgttctgaccaaaacactattcatcagttctgtgctattttgctcactgaatttggatacatgagcatcattaaatgatggctccacagtcatcttagggtgatgaatttcatctgggaaagtgtctgcttctagggcgtctggaggctcaggaaaatcagatgactgaatatcactatcgactgtcagttctgcttgggatatggaagaagtgatgtcctctgtggcaacagtctgaatgatgactcttggtgtgtgacactgcactgtaacattatcacttgtgttcaacaaatgttctggctataaaacattaaagaacctgttaaagttgtaa

SEQ ID NO: 7015 - DNA, 676 bp, Homo Sapiens
gtctagaggatcccttgctatggcaggccaagcaggcacacaagaggaaaaactggaaggtgcgtcgctttgttctaaggaaggatccagctttcctgcattactatgacccttccaaagaagagaacaggccagtgggtgggttttctcttcgtggttcactcgtgtctgctctggaagataatggcgttcccactggggttaaagggaatgtccagggaaacctcttcaaagtgattactaaggatgacacacactattacattcaggccagcagcaaggctgagcgagccgagtggattgaagctatcaaaaagctaacatgacaaggacctgagggaaccaggattcctccctcctaccagatgacacagacaagagttcctggagaatgggagtgttaagacttttgacttctttgtaagttttgtactgctttggagagtgaatgctgccaagagttcctcagattacaaacagcagtggtgccatttccttccccatcttcatgttacaaacctggaaaggctagaacagccattaggcgtcagcatcttgacttttccccagcatcacaaacagccatttcctcgggcaccaaagtaggttccctttgttggaacaattacactggccatgccataatgttgaataaaactctcttcttatgaaaaaa

SEQ ID NO: 7016 - DNA, 1342 bp, Homo Sapiens
agaacacatctggtgtctgaggttattgacattgcaatgtaccgccagctgccttgctgtgcaccccattttcaagctgctggtggcacacgtgagattcaccattgcaatcaacaccaaggcccgtgagcagctcatctgcgagtgtggcctctttgacaaggccaacgccacagggggcggtgggcacgtgcagatggtgcagagggccatgaaggacctgacctatgcctccctgtgctttcccgaggccatcaaggcccggggcatggagagcaaagaagacatcccctactacttctaccgggacgacgggctcctggtgtgggaagccatcaggacgttcacggccgaggtggtagacatctactacgagggcgaccaggtggtggaggaggacccggagctgcaggacttcgtgaacgatgtctacgtgtacggcatgcggggccgcaagtcctcaggcttccccaagtcggtcaagagccgggagcagctgtcggagtacctgaccgtggtgatcttcaccgcctccgcccagcacgccgcggtcaacttcggccagtacgactggtgctcctggatccccaatgcgcccccaaccatgcgagccccgccaccgactgccaagggcgtggtgaccattgagcagatcgtggacacgctgcccgaccgcggccgctcctgctggcatctgggtgcagtgtgggcgctgagccagttccaggaaaacgagctgttcctgggcatgtacccagaagagcattttatcgagaagcctgtgaaggaagccatggcccgattccgcaagaacctcgaggccattgtcagcgtgattgctgagcgcaacaagaagaagcagctgccatattactacttgtccccagaccggattccgaacagtgtggccatctgagcacactgccagtctcactgtgggaaggccagctgccccagccagatggactccagcctgcctggcaggctgtctggccaggcctcttggcagtcacatctcttcctccgaggccagtacctttccatttattctttgatcttcagggaactgcatagattgatcaaagtgtaaacaccatagggacccattctacacagagcaggactgcacagcgtcctgtccacacccagctcagcatttccacaccaagcagcaacagcaaatcacgaccactgatagatgtctattcttgttggagacatgggatgattattttctgttctatttgtgcttagtccaattccttgcacatagtaggtaaccaattcaattactattgaatgaattaagaattggttgccataaaaataaatcagttctttt

SEQ ID NO: 7017 - DNA, 900 bp, Homo Sapiens
gggagagactgcgagaaggaggtcccccacggcccttcaggatgaaagctgcggtgctgaccttggccgtgctcttcctgacggggagccaggctcggcatttctggcagcaagatgaacccccccagagcccctgggatcgagtgaaggacctggccactgtgtacgtggatgtgctcaaagacagcggcagagactatgtgtcccagtttgaaggctccgccttgggaaaacagctaaacctaaagctccttgacaactgggacagcgtgacctccaccttcagcaagctgcgcgaacagctcggccctgtgacccaggagttctgggataacctggaaaaggagacagagggcctgaggcaggagatgagcaaggatctggaggaggtgaaggccaaggtgcagccctacctggacgacttccagaagaagtggcaggaggagatggagctctaccgccagaaggtggagccgctgcgcgcagagctccaagagggcgcgcgccagaagctgcacgagctgcaagagaagctgagcccactgggcgaggagaatgcgcgaccgcgcgcgcgcccatgtggacgcgctgcgcacgcatctggccccctacagcgacgagctgcgccagcgcttggccgcgcgccttgaggctctcaaggagaacggcggcgccagactggccgagtaccacgccaaggccaccgagcatctgagcacgctcagcgagaaggccaagcccgcgctcgaggacctccgccaaggcctgctgcccgtgctggagagcttcaaggtcagcttcctgagcgctctcgaggagtacactaagaagctcaacacccagtggagcgcccgccgccgccccccttcccggtgctcagaataaacgtttccaaagtgg

SEQ ID NO: 7018 - DNA, 1454 bp, Homo Sapiens
acgcgcacgacgacagcgctgccgccgccccacccagacaaacgcgcgccaccccatggacgcccccgcgctgctgccaacgcgggctacgacggaggacaggcgccgcccggcgccggcgacacagggcagggacagccgcctcctgtgtcagacggcggtcgagggccgagcgggtcgagcacggcaccgcagcacgcagcatgagggggcgagctaccacagtcgagagcgcgcggggggggccgcggtgctcaggaaaagaagaaaatgtctttaggccattatccaggatggtaactcttctcctgtgcatacctgaaaatgtcagaggtgcattttgtacattggcattttaatagattgtatgacaaattgtatgttacagggcaattcttggaaaagtcaaacagaccacataatttatagtttccatttttactgaatttgtaattccaagaaaattgttggctaggaggagattggaaaactgaattcacatcagatcctaatgagaagaaatcaattttaactaagtgggtgaataggagttgtattatttaattagcatataatttgaaagagttcattagcttcacaacaggcacaatcaacacttaggtaaagcacttaattgttgcaaaactttagaacactggtattgcaagttcttgacctccatgactgcgttattaaaacctgaaaatcttcctgtgattcttgctaaagatttctcatccatgggaggcttccttgggctgccaggctgtagaaacttcttcactgtgggcaggttactgattctggttttcagggccttcagcagagggaagctggaaataagactagagtcaagctcctccacgtagtagagaagttccaccagatgaatgtcagcccggctcagcttgttgccaaacaaggtagtcttgtccatggctctttaagactttgttcaaaggcagggaagtagcgattttttattttctctttgatcaaggcaagcttggcatctttttcctcaggtggacatacgggcagaaggaggatcatttcacccaaatctgctataccttctatatacatatcaatcagggctctctcctttatgtctttcccatagaggttgtatttgctggcaatgtagttgagaatggctctggtctgcaccagcttcatcccatcaatctcaaccattggcacttgctggaacatcaaatatccatcatttcttaacttgtccaaatcttctgcagattttataaatttctcttcaaactctactccagctgcagccaggagccaccgggtggactccattctgccccgtgcattgaagtagtggagcttgggcttctctgccatgatagcagtctcctggaggtttctctaagctttgttaaacgctgtcaccgtcctggctcgacaactgaattccaggtcctaatgtattt

SEQ ID NO: 7019 - DNA, 216 bp, Homo Sapiens
gaataagccactgtgcccggccctttttctcttctgtaacagagtttattactgcctagctagcaggttatttggccctcacatgtgttgaggcaaactctatactatattcttactctccagagttccaaaatcctttatttttaaagaaaaataaacaaacatacttcattctgcccagtatattctcttgatctgtacaagctacgattttaa

SEQ ID NO: 7020 - DNA, 1473 bp, Homo Sapiens
ggggatagcccagcagcagcagcggcggcggcggctgcggagcgggcgtgaggcggctggaccgcgctgcaggcatccgcagggcgcgacaagatggaggtgacgggggtgtcggcacccacggtgaccgttttcatcagcagctccctcaacaccttccgctccgagaagcgatacagccgcagcctcaccatcgctgagttcaagtgcaaactggagttgctggcgggcagccctgcttcctgcatggaactggagctgtatggagttgacgacaagttctacagcaagctggatcaagaggatgcgctcctgggctcctaccctgtagatgacggctgccgcatccacgacattgaccacagtggcgcccgccttggtgaatatgaggacgtgtcccgggtggagaagtacacgatctcacaagaagcctacgaccagaggcaagacacggtccgctctttcctgaagcgcagcaagctcggccggtacaacgaggaggagcgggctcagcaggaggccgaggccgcccagcgcctggccgaggagaaggcccaggccagctccatccccgtgggcagccgctgtgaggtgcgggcggcgggacaatcccctcgccggggcaccgtcatgtatgtaggtctcacagatttcaagcctggctactggattggtgtccgctatgatgagccactggggaaaaatgatggcagtgtgaatgggaaacgctacttcgaatgccaggccaagtatggcgcctttgtcaagccagcagtcgtgacggtgggggacttcccggaggaggactacgggttggacgagatatgacacctaaggaattcccctgcttcagctcctagctcagccactgactgcccctcctgtgtgtgcccatggcccttttctcctgaccccattttaattttattcattttttcctttgccattgatttttgagactcatgcattaaattcactagaacccctcccgcatttattctaaaataaacacaaattttgtcggccgctttaggcctatctagaagtttttcaagacccattctgttgggccccccgcggcccaccaatgttcacccggaaccttggccaattatgccgtcttccataaggagaatcccttggttcctttaacttaagggccttgggatctccccacttaaccaacaacaccccctcgctggtgcaacccaaaacctttttcccgaccaaacccccaaatgcgaatttcctgaaggaccatttactggcctcccacttaaccccggttccccacccgccccctctaaatatccaaccttacattcccttccgcctggccccttcctccgccatataaccgtctgccaattcccatataaatattctctcggccgaacctcggaaagaccttctccacaccgcggacttgccataaaccccttgaatccccatattcgtataattcaccccccc

SEQ ID NO: 7021 - DNA, 403 bp, Homo Sapiens
  misc_feature (56)..(56): n is a, c, g, or t
aaaatgtaattggtggtacagctatgggccagatggtggaggggagggtggggacncctgccggcaagcagagtgtcacagctggctttcctcacttgggaaaagggtactgccggtctaacagcctcctctgtactcagccaggacacccagcgcgtgggacctgtttgtgtctgttttgcttccttgggaacggcacagtcactcaccctgccatttgcggaaatgacctggtgcactttgactgttaagcaatgcgttattgctgtagtcaaggttagtgcaagcaaggaaacattcccagtaaggtatttgtttccattttctgtctgtgcttctgtcagaaacttgctaggactttagtggccaataaaaaagaaattcctaatttcaaccttagaaa

SEQ ID NO: 7022 - DNA, 552 bp, Homo Sapiens
ggggagttcgcagccggaacgttgcaggcacttgtttcctcagtggatgcctttcggcgcgccgccgcccggcgccgcgggactgggagaccggtatctgagaacatatttcttccctataggagttgagaagaggaggaagaataatgggaggagacaggacctttttcaacttgacaaatagatttctgagagagcagacaccatcttatttctgttgaattgtatttagtaactcaaaaggcatataccaagctgtcagaagcagcttcatttaaaagaaataaaatttctagtcctgcctgaagtttaagctagcccatgactacacaagtgcaactgtatttcccagaataaaagcagcagccttggatccagagatggacgccaattgatgaagacagcagaactgactggctagtctgggttccctggagcagagctgtctctccaccctaggttatccaccttacttttgtactgttatgtgagagagaaataaacttctatcttctttagaaacgccgccctcctttacataaccccccctgg

SEQ ID NO: 7023 - DNA, 591 bp, Homo Sapiens
ggggcttccctagcctagagagggtgagtgttgattagattctgtcccaatcatggtaattggcttacttgatcattggatggaatctaggctaacgagacaaaggaagtctgaaggctttgaataagaaattttctgttgctcttaacaattgatacaagttagggatttgccagcatccctcttctgcttctcagtgaagatatgtgatatggatgtttgaagctaatctgcaacagccttctgatggccatgaaaggacaagtatggagatgaaagctatcacactgagaatagtgggatgtagatagaaagcacctgaattgtgcttctgaattaaccaatccaggaactgctttacctttggactttttgttatgtgagatattctttatattgttccatttgctttgggtatatgtatattgttacttgtagccaaaaagaaacctctcttagtagaaacaaagggagagttaggttattcaaaaattagtatgggacaattgaatatgcctttttctgcgggagtaggtggggagaaacttaaaggttcacttgtaaaacaataaagtactaaagaaaatgtga

SEQ ID NO: 7024 - DNA, 1335 bp, Homo Sapiens
  misc_feature (632)..(808): n is a, c, g, or t
  misc_feature (822)..(838): n is a, c, g, or t
  misc_feature (920)..(991): n is a, c, g, or t
  misc_feature (1115)..(1124): n is a, c, g, or t
  misc_feature (1177)..(1191): n is a, c, g, or t
ttattttttacaaaatatatatatggagatgctccctccccctgtgaaccccccagtgcccccgtggggctgagtctgtgggcccattcggccaagctggattctgtgtacctagtacacaggcatgactgggatcccgtgtaccgagtacacgacccaggtatgtaccaagtaggcacccttgggcgcacccactggggccaggggtcgggggagtgttgggagcctccttccccaccccacctccctcacttcactgcattccagattggacatgttccatagccttgctggggaagggcccactgccaactccctctgccccagccccacccttggccatctccctttgggaactaggggggctgctggtgggaaatgggagccagggcagatgtatgcattcctttatgtccctgtaaatgtgggactacaagaagaggagctgcctgagtggtactttctcttcctggtaatcctctggcccagccttatggcagaatagaggtatttttaggctatttttgtaatatggcttctggtcaaaatccctgtgtagctgaattcccaagccctgcattgtacagccccccactcccctcaccacctaataaaggaatagttaacactcnnnnnnnnnnnnnnnnnnnnnnnnnnnnnnnnnnnnnnnnnnnnnnnnnnnnnnnnnnnnnnnnnnnnnnnnnnnnnnnnnnnnnnnnnnnnnnnnnnnnnnnnnnnnnnnnnnnnnnnnnnnnnnnnnnnnnnnnnnnnnnnnnnnnnnnnnnnnnnnnnnnnnnnnnnnnnnnnngccgggtggtgggnnnnnnnnnnnnnnnnnaaaacgtcttcccacccccctcttttggggcggggcgcccccccaagggaggaaaggacaaaggtggccaattgggttttcnnnnnnnnnnnnnnnnnnnnnnnnnnnnnnnnnnnnnnnnnnnnnnnnnnnnnnnnnnnnnnnnnnnnnnnnacaccaccagggcgtttaataaacaaccccccagaaggggggttcccccggggggcccctttttgggcccctctcacacaggcgggtttccccccgcggcactcataacccacaaaaacttttnnnnnnnnnntcgcggtcatatatttttcagaaacaaggggtgggagaaattttctctataannnnnnnnnnnnnnngccttggtgggcacacctccacaaaaagcgcgggccttgtggacaaccctatatgttcctccgccgcagacacatcccacacttttggtggcgcccgtgggtaataaaatattttttcccccgcggggaaaaacacgcgggggg

SEQ ID NO: 7025 - DNA, 643 bp, Homo Sapiens
gcgtccgcctgtcgattgcatggagactcggcagagatgaccaggaaccacccctctgacgaggtctgtagcggcccttctcagagtggaacagcccacagtgctagttgtgcctggtcttacctgtactccacggacctcggtgaagcaaaagcttcagggcagagggaatgaggcaacccagtggcagccccgctgggccccgtggctcctgctctcctattggacgtagaggcaggggagagacttctctatacaaatattctcatcacagaagggatgatccttgctgctctgccgtagggtttttgatgctgagctatgctgcacatgacgttaacctaaagaacttggactgagcttttaaaaaaggacagcaaacaattttataatccttaaagtgtaatagacggttacactagtgcagggtattgggggggctctttgggtgtggaggctgtcacttgtatttattgtgactctaaatctttgatagtaaaacaaatgtaaaaagaaatgtttgccaccagatgggaatagaagttccaataagcaggctggaatgggtggctatacgttgtatcacgaggaagttttagactctgaaggataataaatggatgatgtgtcaactggaaaaaaa

SEQ ID NO: 7026 - DNA, 482 bp, Homo Sapiens
gcccggcaaaaggcctttaaaaatgggtaatgaaattggaatgcagcactgcagctaataaaaaatttgagatagcaattgttacaaccatatgcctttatagctagacattagaattatgatagcatgagtttatacattctattatttttcctccctttctcatgtttttataaataggtaataaaaaatgttttgcctgccaattgaatgatttcgtagctgaagtagaaacatttaggtttctgtagcattaaattgtgaagacaactggagtggtacttactgaagaaactctctgtatgtcctagaataagaagcaatgatgtgctgcttctgatttttcttgcattttaaattctcagccaacctacagccatgatctttagcacagtgatatcaccatgacttcacagacatggtctagaatctgtacccttacccacatatgaagaataaaattgattaaaggttaaaaaaaa

SEQ ID NO: 7027 - DNA, 504 bp, Homo Sapiens
agagagagaaaacaggagtgtttcagaacaattttataagcatgactatgtcctcataagatatttgtgagttaagcctgttgcatctaactctgcccactgacaaggtagagcaatggtggcagatcccccagcagtgaacagttctggggcccaggctggggttgcttcacagcaaaagaagcagtcctggcagggtgcttggctccaggtctggggaagaccctgcaagatgggtgtggagtgctctgtcatgctggagagcgaggaagctattgcagggtggctggggctgggagacagggttagggagcctgtctctagctggtcatgggcagaaacttgaagcattcatgaaaacagctaactctgagttcgcaagggtgctaacaaaacccttcgtcatcatatttgtaggatgcaaaggaaccatctcattattttgaatgctgttttgaaaaaaagaagtactcaagcatttaacccacctttcatttataaact

SEQ ID NO: 7028 - DNA, 569 bp, Homo Sapiens
  misc_feature (435)..(435): n is a, c, g, or t
tgcacccgcacctggcctatgagtggtcttttaattaggaacaaatctaatggaaaggagagttgactgaagttggcccacaggattgtgagcctgggcagtgcttcatgaaggcttgcacctttgggacgcccagtttactggggtgtcttgcggagtgcagaaggctttctggcagctgctgggtttggccagaccctgcctcccctcccgccggccaacccctagtccccttcctgtctccacttgcattcaggggtggctgctgttctgagaacattagaactgggaagagagatggagtcacatggatttttggtgggcattattctgaactttcgtatccaagttagtcccccttattccactgtggcattgccgttctaagcagttacctgatgcctgctgctgaagagctgctcacaggaagcggcngcggcctggcactgcccttgcattaagtcctgtgtttgagtgttcctgtgaattactttgtcagacaaaatattacgcgttgggttcagaattcttttagctcccactggctgtgaaattcagaaactccgttg

SEQ ID NO: 7029 - DNA, 574 bp, Homo Sapiens
  misc_feature (205)..(205): n is a, c, g, or t
  misc_feature (335)..(335): n is a, c, g, or t
  misc_feature (441)..(531): n is a, c, g, or t
tggagagaaataaaacttcctgtgatctatgtatcggcccagtacatagatcctggatagaggcgattgagctaagcatgggaccaagcatttctgtgcagtgcctgcagaattgagtttccttctggctatgggagattcttctgagctgtctcagttgtctgacatctggcatctgcaatggccaggacgtctggggcagggncagaagaggacaggaggagactgccctagaggattctgggaaaacgggaaaacagcaaaacagagctaccccacccaatctcaggctgatgcattattaataaaaagtgactgttgactgaagtttgtangacataaatattgtttgaggtacttggcctagtaagcaccatacaagtgctattatttctaaatgattttatcaagataaaagacaccagccgggcataagtgtgnnnnnnnnnnnnnnnnnnnnnnnnnnnnnnnnnnnnnnnnnnnnnnnnnnnnnnnnnnnnnnnnnnnnnnnnnnnnnnnnnnnnnnnnnnnatgcaaaaagtttaaaaattggctgggcatggtggtgcacgcg

SEQ ID NO: 7030 - DNA, 311 bp, Homo Sapiens
  misc_feature (137)..(223): n is a, c, g, or t
tgatcgccaacctttcccccaccagctaaggacatttccccttcctatccctaccataaaaatcactagtgttccttcaaaagtccctaatcatgtctccagaaaaagaaaggggctgggcttggtggcccacacannnnnnnnnnnnnnnnnnnnnnnnnnnnnnnnnnnnnnnnnnnnnnnnnnnnnnnnnnnnnnnnnnnnnnnnnnnnnnnnnnnnnnnctctccaaaaaattaaaaaattagctgaatatggtggtgcacacctgtgtcctacctcaggaggctgaaatgggaggatcccctgagc

SEQ ID NO: 7031 - DNA, 374 bp, Homo Sapiens
taagtcaaattactattccagttgtcatgctattggggaatgcaaaaggcaattttttagacacacaattacaaccttacccctgtgggccaatgagaacccagccttcaaataaacaagcttctcattgttaacacagggttcaaaggcagggaggttggaggtgttttgcagggtatccagaattctgatcgctgaatactttagggcaaagagtaagatttcccacacctccccctaaatcttacaattccctgatgaggcaggaacatgggaaaaaaaagatacaggttaaattacaaagcagaaaaatatgcccagctagaagctaaagacctggtctcaaaacactgaaccgaggagcactgattcca

SEQ ID NO: 7032 - DNA, 753 bp, Homo Sapiens
  misc_feature (488)..(488): n is a, c, g, or t
  misc_feature (635)..(635): n is a, c, g, or t
  misc_feature (674)..(674): n is a, c, g, or t
  misc_feature (729)..(729): n is a, c, g, or t
gaattcagttaaggttctcataccaatgctgcctgcttgcattgcacattctgtatactaatgtaaacatttgttctacctgaaaatcaaaagcaagatgtgagctctttggctaaacctgtattgatatgtcaggcagcaaaactcagtgtttgagaattatcaaaagccttctaatatgcccttataggcaatcctgaagcattggttatcatcagggagatgtgccactgcggtgtctttcctgctccccctccaatctcatttatcagccccaccccaactcctcagccctccctttttattttaaagtgcctgtctggaccaggcaagaggtgcctactggagggtcttggtgaagcggtaactccattcctttcccttgggtcccccaaaggtaataaaagtacctggaggcagaatagtcaggtgattgacctctgactgtctctctgacggtgatgtaggtgcatgacaccgccgtgccntgaccttgtcctggggtatagtaaactgcagctttgacacaggcattcttccctttgaagcacacagcttgcttttccagcacctagacttttacctctcttcatgccttaagacttagaccataactgggcttgaaatgctcaccnctttccttgggtctggtcttgggcacctaaggctattcnttttccaaaacttgaaagtgaagtcccagtttccagaccaatctcttttcctgtnctccaaaaaaccattttttgtttc

SEQ ID NO: 7033 - DNA, 465 bp, Homo Sapiens
  misc_feature (45)..(45): n is a, c, g, or t
  misc_feature (150)..(150): n is a, c, g, or t
cctggaggttcaatcatctcctttccagggaacaaattttccctngacccaccccccacttccaggtttcacattgatggcatctctacggtttatatctcggtagcatcacagcctctccattgcaactgttaggtatgcatgccattntctatttaacggtgtcattttttaaaattatctattacttagcactactaaagtcagagttcatgctggttttttcccattagcctcaagcatctatatgcctgccaaaaaatagacacatatactctacctattgactgaatgacaataaatgaatgtctgtccacatacacacataaacactggcaggcaaccagaggattgaacagaggagtaagcaaaatacatctctttgtgaactttgtcagccattagcatttatactgacccagggtcctatacatttttgtcctatttaatcaattaggctgttct

SEQ ID NO: 7034 - DNA, 606 bp, Homo Sapiens
  misc_feature (372)..(372): n is a, c, g, or t
cctgatcctctgcaattgctgtcacagatgcattcctggagcaagctgtgtcatatcaacagtttgtggacaaccccgctattaatcgatgacccaatccccgtggtaaagattgggagtaaatattatacctggacaacagcagcacccctcctcctggcaatgcaggccttccagaaacctttgccaaaggccacttgtggaatctatcatgagggataaaatgcccaaaaagggaggaagatggtggttttcatggaggggaagaaacaccacaatcaaggaggtaacccagaagacaaagcagtgctcacacttagcaagttttggttttgtgtagtgagattggttttcatgtacttacatcagagnaatgaagataggccttagtgctgagtttccatgagccactctgccatgaagttaggcgagtcgtcgtgacgtgggggatgtggggaggaagtcaagagccacagcatagcgtcactcatggctctgtactgttgggaactgtggtcagtaatcctcatggaagattcgtcatcttaaagaagggatcagctgggaatcagttcttagaataatatctcgtctgctgtgggaatt

SEQ ID NO: 7035 - DNA, 304 bp, Homo Sapiens
agtgatgatgttgtaaaagccacccaagcaatctatctgtttgaactctccggtgaagatgggggcacgtggtttcttgatctgaaaagcaagggtgggaatgtggaaaaggaaaacccttctgatcaggcagatgtggtgatgagtatgacaattaatgccttggtaaaaatgtttccagggaacctaaacccaccaatggcattcaggtcagggaaattgaaaattaaaggtaacatggccctagcaatcaaattggagaagctaatgaatcagatgaatgccagactgtgaaggaaaatat

SEQ ID NO: 7036 - DNA, 813 bp, Homo Sapiens
  misc_feature (411)..(415): n is a, c, g, or t
  misc_feature (417)..(418): n is a, c, g, or t
  misc_feature (422)..(470): n is a, c, g, or t
  misc_feature (473)..(553): n is a, c, g, or t
  misc_feature (556)..(557): n is a, c, g, or t
  misc_feature (562)..(656): n is a, c, g, or t
gagatttataattacattcaaagtatacttttttcttgaaaaaaattacagattttttgaaaagcaattgatgtaatttaactctcaaattcatgtttttcttcattcctattatattcacatgtgaaagcaagtgatctgttgttgctgaatcagagatatgagagattcttttttataggtgggcattatttatgcccctttctgtggaagagtaagaaaattaaaatacaagatgcatgaggaaaatgtagagatgctctttgtgattaacttagaatattaagtgctacttgaggtacatgttcagactaacattcttttgcagtatagtgagaaaaaaacattttaaaattaattatcattttgttgattgtgcttttatgtaataaaatgcagtactttaaaacnnnnnannaaannnnnnnnnnnnnnnnnnnnnnnnnnnnnnnnnnnnnnnnnnnnnnnnnccnnnnnnnnnnnnnnnnnnnnnnnnnnnnnnnnnnnnnnnnnnnnnnnnnnnnnnnnnnnnnnnnnnnnnnnnnnnnnnnnnccnnaaaannnnnnnnnnnnnnnnnnnnnnnnnnnnnnnnnnnnnnnnnnnnnnnnnnnnnnnnnnnnnnnnnnnnnnnnnnnnnnnnnnnnnnnnnnnnnnnaaaaaattctttaaacccccttctttttccgccccgcgccccccaaggaagaaaagaagcccttttctcttttttttccaaaaggaaacccgccggaaataaatttgcggggtccccccccaccaaaaacaccgcgcgggcggccccgggggtttat

SEQ ID NO: 7037 - DNA, 915 bp, Homo Sapiens
  misc_feature (560)..(649): n is a, c, g, or t
  misc_feature (831)..(839): n is a, c, g, or t
ggcacgttcggcacgaggcagtccagatcaaaaatggcggtagttggtgtgtcctcggtttctcggctgctgggtcggtcccgcccacagctggggcggcctatgtcgagtggcgcccatggcgaagagggctcagctcgcatgtggaagactctcaccttcttcgtcgcgctccccggggtggcagtcagcatgctgaatgtgtacctgaagtcgcaccacggagagcacgagagacccgagttcatcgcctacccccatctccgcatcaggaccaagccgtttccctggggagatggtaaccatactctattccataaccctcatgtgaatccacttccaactggctacgaagatgaataaagagaatctggaccactacccgggcaccagggaccacagcactggtttggaccgttactctgcacatggaccagaaaaagtatatgggaccttaagctcaccttctttacttgtatcaaatgatgactggtatactggtctcccatccctttgcttgtggcaggagatggcttaaataaataacttaaacttaaaannnnnnnnnnnnnnnnnnnnnnnnnnnnnnnnnnnnnnnnnnnnnnnnnnnnnnnnnnnnnnnnnnnnnnnnnnnnnnnnnnnnnnnnnnaaggggggggccgccttaaaagttccctcgggggggcccagttttccggaacccacttttttttgaaaaaggggccccctaagggggccctttttaaactttgggccgggccccccttttacaaccctcggggtgggaaaaaccggccctttggggaattttggggaggaacctttcttttnnnnnnnnnccattatggggccaccctccccccaggaattttaagcctcagggggaaaataaatctttttagggggaaagggggg

SEQ ID NO: 7038 - DNA, 1287 bp, Homo Sapiens
cggcatgccaatggcctcacgttggtgtctagagctcaccagctagtgatggagggatataactggtgccatgaccggaatgtagtaacgattttcagtgctccaaagctattgttatcgttgtggtaaccaagctgcaatcatggaacttgacgatactctaaaatactctttcttgcagtttgacccagcacctcgtagaggcgagccacatgttactcgtcgtaccccagactacttcctgtaatgaaattttaaacttgtacagtattgccatgaaccatatatcgacctaatggaaatgggaagagcaacagtaactccaaagtgtcagaaaatagttaacattcaaaaaacttgttttcacatggaccaaaagatgtgccatataaaaatacaaagcctcttgtcatcaacagccgtgaccactttagaatgaaccagttcattgcatgctgaagcgacattgttggtcaagaaaccagtttctggcatagcgctatttgtagttacttttgctttctctgagagactgcagataataagatgtaaacattaacacctcgtgaatacaatttaacttccatttagctatagctttactcagcatgactgtagataaggatagcagcaaacaatcattggagcttaatgaacatttttaaaaataattaccaaggcctcccttctacttgtgagttttgaaattgttctttttattttcagggataccgtttaatttaattatatgatttgtctgcactcagtttattccctactcaaatctcagccccatgttgttctttgttattgtcagaacctggtgagttgttttgaacagaactgttttttccccttcctgtaagacgatgtgactgcacaagagcactgcagtgtttttcataataaacttgtgaactaagaactgaaaaggtcaaattttaattgtatcaatgggcaagactggtgctgtttattaaaaaagttaaatcaattgagtaaattttagaatttgtagacttgtaggtaaaataaaaatcaagggcactacataacctctctggtaactccttgacattcttcagattaacttcaggatttatttgtatttcacatattacaatttgtcacattgttggtgtgcactttgtgggttcttcctgcatattaacttgtttgtaagaaaggaaatctgtgctgcttcagtaagacttaattgtaaaaccatataacttgagatttaagtctttgggttttgttttaataaaacagcatgttttcaggtaa

SEQ ID NO: 7039 - DNA, 541 bp, Homo Sapiens
ggcagaatattctttttatattctgtggaaaaataaaggaaattcagattgtttaaatgcctaaaagttttgagataagttttgtttcaattagaaaaggaaataggttttaggtggcatagtggcttaactggactgaattcaaatattctttcaacttcatctcaatagtgatttttgtatcagaatcttgtccaagttgtttcattgatttagtaagtgttctgcttccaacatctttctttttaagaaattcctagtgtcttttttggcctttgaggttttggtaattgtagacctgtttcataagctttgtaattcagaaatccttgtatttagtaagtgcttgttttacataactgataattttaaaatgttttctttgtgtgctgttagtattgattcaaatgtcagcagctttaagcctaatatttatgactttcacatttggaatttaaagacaaaaatacatcaaggagttatgctgacataattctaaggagttttgttgtattttagaataaaattataaagtaaaatg

SEQ ID NO: 7040 - DNA, 467 bp, Homo Sapiens
  misc_feature (28)..(28): n is a, c, g, or t
gcctgggcccccaggattctaggacccncaggcagccccttggactggtcccgggtgccttccaagcacagtctccatgctcccagattctcgaccttcccccggcccgggaggtgcagcctgcgtctgcctctgtcgtgtgtgctgatttgagtggcttagcttgccacagcgcaacctcttctgtccctttcagtcatttgctgtacttccctgtggcacgttaccatgaaagccgctccagggtgggtcagggtgcaagctgctggtgaggtttggaagcatcaggctcacgggtgttcatgtgtgttcgtgcgtgtgtgtgcgtacgtgtatataactgaagtgtctgtacggaatgccctttgctagccatgggctggtcaccagattgttttgtaatgcccgccccttgcctcgatattgccagtttcttgtgcaataaacaatcaaaaactgacaaaaaa

SEQ ID NO: 7041 - DNA, 649 bp, Homo Sapiens
cttcccacttggcacccagagggggctgtgggtggaggcctgactccaggcctctcctgcccacaccctctgggctgagttccttctttcccttggacgcccagtgctggccttggaggacggtcagctggaggatggcggtgggggaggctgtctttgtaccactgcagcatcccccacttctccacggaagccccatcccaaagctgctgcctggccccttgctgtaaagtgtgaagggggcggctgagttctcttaggacccagagccagggccctcaacttccatcctgcgggaggccttggacgggcactgccagtgtcttccagagccacacccagggaccacgggaggatcctgacccctgcagggctcaggggtcagcagggacccactgccccatctccctctccccaccaagacagccccagaaggagcagccagctgggatgggaacccaaggctgtccacatctggcttttgtgggactcagaaagggaagcagaactgagggctgggatattcctcatggtggcagcgctcatagcgaaagcctactgtaatatgcacccatctcatccacgtagtaaagtgaacttaaaaattcaatcaaatgaacaattaaataaacacctgtgtgtttaagac

SEQ ID NO: 7042 - DNA, 657 bp, Homo Sapiens
tacataaatctcctccaggtggtggcggccgcggaagtagtgaaggagcctggcaaacatgcggaggtcctcagggttctgggctgcgggtacactgaggatggctgcgcgttcatgctccgacaggctggccagcaggttctccgtcatcctctggttcagtggcgagtccccgctgggaagtagctctgcgctggagttgtccatgctggggctggtgagggtcatgtcatcgctgctggttggggagccaaagctgagggcgttgggcgtgctgaggctgcgaccgccgacccgggcagtgaaggggacgtcgtcctctcgcggacggggctcctcctcgctgggtgaggccatcaggcagacataggtgtgcagctggatgagaagccggcgctgcagcatccacaccaccatctggatgagctgggtctcctgcacagcaggggccaggggattcctaaattctgacaaggagaccggcaaggagaacgtggcaagaaccgacggcaggtcatgagatgggaactggtgggagaactgctcggccagcggggagtaaagacataacctggcattgggagacagcatgtagacattgttctcacacagcgggtagatgatgatggccttgccaaccccggacacggataggga

SEQ ID NO: 7043 - DNA, 979 bp, Homo Sapiens
  misc_feature (88)..(88): n is a, c, g, or t
  misc_feature (99)..(99): n is a, c, g, or t
  misc_feature (124)..(124): n is a, c, g, or t
  misc_feature (724)..(725): n is a, c, g, or t
  misc_feature (728)..(728): n is a, c, g, or t
  misc_feature (731)..(733): n is a, c, g, or t
  misc_feature (735)..(735): n is a, c, g, or t
  misc_feature (738)..(749): n is a, c, g, or t
  misc_feature (762)..(857): n is a, c, g, or t
  misc_feature (863)..(863): n is a, c, g, or t
  misc_feature (866)..(867): n is a, c, g, or t
  misc_feature (869)..(869): n is a, c, g, or t
  misc_feature (881)..(896): n is a, c, g, or t
gaaagctcgccggccggcaatctcggctggggacctgacatcaagctgacgaatgagatggtgatgatcatggggggcaagatggagnccacaccttcnaagtggttcatggagatgtgtgtcngaggctacctggctgtgcggcccgacatggatgtggtcgtctccctggtcactatcatgttgaacacgggcctgccctgttttcgcggccaatcaagttcttgaagcacaggtttagccccaacatgactgagcgcgaggctgcaaatttcatcatgaaggtcatccagagctgcttcctcagcaacaggagccggacctacaacatgatccagtactatcagaatgacatcccctactgaggaggggaccttcgagggcctctgccccatgtgccctcaaagctgccccacaatcatggagccctgcgacctccctgccctgccgccacatgcagtggaggagaggcctgtggcccaaagaacctggtagcgcctcctggggcagcacgtgggtggcgcagccttggtaacgccatggactgcagcgacaatcaatggatggtgctgtctatgcacaggtgtgagtcctctgtttgcactggacatattccctacctgtcttatttcataggtacatgaagtattgtgtataaaaaaagagataagatttaaccaacatcaacaaaataaaaacccaaaatagtgctgtgttggaaaannaanacnnncnacnnnnnnnnnnnnccacacaaaacannnnnnnnnnnnnnnnnnnnnnnnnnnnnnnnnnnnnnnnnnnnnnnnnnnnnnnnnnnnnnnnnnnnnnnnnnnnnnnnnnnnnnnnnnnnnnnnaacaanaanncnaaaatggggggnnnnnnnnnnnnnnnnaaaaaagtttttaaaaaaccttcttttgggggcggcggccccccacaaggaaaaaggaaaagggggctatactttgttccccc

SEQ ID NO: 7044 - DNA, 787 bp, Homo Sapiens
attctaacctgcattgtccttctccgacagaggctggcactgattcattctactcatactacccacccagtttggaatgtccagagtctcgaagaaaataaatgactttagaaggggtatacatttttaagtcgctctgcctccaaatctgaacaagtcactgtaatcattcttaagcccagatatgagaacttctgctggaaagtgggaccctctgagtgggtggtcagaaaatacccatgctgatgaaatgacctatgcccaaagaacaaatacttaacgtgggagtggaaccacatgagcctgctcagctctgcataagtaattcaagaaatgggaggcttcaccttaaaaacagtgtgcaaatggcagctagaggttttgataggaagtatgtttgtttcttagtgtttacaaatattaagtactcttgatacaaaatatacttttaaacttcataacctttttataaaagttgttgcagcaaaataatagcctcggttctatgcatatatggattagctataaaaaatgtcaataagattgtacaaggaaaattagagaaaggcacatttagggtttattttttacacttggccagtaaaatagggtaaatcctattagaattttttaaagaactttttttaagtttcctaaatctgtgtgtgtattgtgaagtggtataagaaatgactttgaaccactttgcaattgtagattcccaacaataaaattgaagtataaagcgttgagctcaacgctttatacttcaacaggtaaacggata

SEQ ID NO: 7045 - DNA, 619 bp, Homo Sapiens
ctcgttaaaggcaaggcggcttctggctcttccgcaggctcagttatgggttcctgtgtgcattagtcatcgggtccgacacaggcgtggaacctgatctaggggagccgcgaagggcctgccttcacaaagggaccgtaacgcaagtactgcgggacagatagtttgaatatggccctgaacaatgtgtccactagtcctccgagtgatcagaggagcagaggtaggcctaccgctcttcccatggcgacctcagaccgcgggcgtcagcgttggcgatggtctccggagacggcttcctcgtttccaggcctgaagcgattcatctaggacctcggcaggcggtgcgaccaagcgttcgggccgagagccgtcgagtggatggtggcggccggagcccaagggaaccagatggccggggccggagccgccaagccagattctcaccttacccaatccctgccgttgaacccgatctcctaagaagtgtgctgcaacagcgtttgattgcattaggaggtgttatcgcagctcgaatttcagtttaaacgaacacctttcctctggccctcacttagcttgtgaacaggcctttttaaaatcctttcttggtgtaaaa

SEQ ID NO: 7046 - DNA, 1696 bp, Homo Sapiens
  misc_feature (1495)..(1496): n is a, c, g, or t
  misc_feature (1501)..(1501): n is a, c, g, or t
  misc_feature (1504)..(1504): n is a, c, g, or t
  misc_feature (1506)..(1506): n is a, c, g, or t
tctgtgaggcatctgtcattcgcactcctggtgtggtcagcctctctcacacaaggaggaacttgggtgaaggctgagtgtgaggcacctgaagtttcccctgcggagtcgataaattagcagaaccacatccccatctgttaggccttggtgaggaggccctgggcaaagaagggtctttcgcaaagcgatgtcagagggcggttctgagctttctataagctatagctttgtttatttcacccgttcacttactgtataaatcaaaatcatttatgtagctgagacacttctgtatttcaatcatatcatgaacattttattttgctaaatcttgtgtcatgtgtaggctgtaatatgtgtacattgtgtttaagagaaaaatgaaacccacatgccgccattttcctgaatcaaattctgcagtggaatggagaggaaaatacttctaggcaagcagctagactggtgaattgggggaaatagaaggaactagtaactgagactcctccagcctcctccctattggaatcccaatggctcctggagtaggaaaaaagtttaaactacattcatgttcttgttctgtgtcactcggccctgggtagtctaccatttacttcaccccaagtcctgctgcccatccagttgggaagccatgattttcctaagaatccagggccatgggagatacaattccaagttctcgcttcctcctttgggcatctcttctgcctcccaatcaaggaagctccatgctcaggctctcagctctcgggccagtgctctgctctgtccagggtaggtaatactgggagactcctgtcttttaccctcccctcgttccagacctgcctcatggtggcaacatggttcttgaacaattaaagaaacaaatgactttttggaatagccctgtctagggcaaactgtggcccccaggagacactacccttccatgccccagacctctgtcttgcatgtgacaattgacaatctggactaccccaagatggcacccaagtgtttggcttctggctacctaaggttaacatgtcactagagtatttttatgagagacaaacattataaaaatctgatggcaaaagcaaaacaaaatggaaagtaggggaggtggatgtgacaacaacttccaaattggctctttggaggcgagaggaaggggagaacttggagaatagtttttgctttgggggtagaggcttcttagattctcccagcatccgcctttccctttagccagtctgctgtcctgaaacccagaagtgatggagagaaaccaacaagagatctcgaaccctgtctagaaggaatgtatttgttgctaaatttcgtagcactgtttacagttttcctccatgttatttatgaattttatattccgtgaatgtatattgtcttgtaatgttgcataatgttcactttttatagtgtgtcctttattctaaacagtaaagtggttttatttctatcnncccgnacngnccctcacactgagacctgaccagccacaccggaccatcctgggcatggcactggattaggggcccgactcccaatgaataatgccctttcagttccaaaacacctccttcggcaataaatgacactcttgaaggtctcccatgggagaacctccaatagggggttttgtgggccccccgcccgccccccg

SEQ ID NO: 7047 - DNA, 625 bp, Homo Sapiens
gcggccgcggcggccctgcgggacgtgcggaggccggcggtgacagctgtgcggtgccaggagaggcggggtcggcgggagccagctgagccacgggagcgagccaggctaaccttgccgcgggccgagccctgcctcgccatggaccaggactatgagcggcgcctgcttcgccagatcgtcatccagaatgagaacacgatgccacgcgtcacagagatgcggcggaccctgacgcctgccagctccccagtgtcctcgcccagcaagcacggagaccgcttcatcccctccagagccggagccaactggagcgtgaacttccacaggattaacgagaatgagaagtctcccagtcagaaccggaaagccaaggacgccacctcagacaacggcaaagacggcctggcctactctgccctgctcaagaatgagctgctgggtgccggcatcgagaaggtgcaggacccgcagactgaggaccgcaggctgcagccctccacgcctgagaagaagggtctgttcacgtattcccttagcaccaagcgctccagccccgatgacggcaacgatgtgtctccctactccctgtctcccgtcagcaacaagagccagaagctgctcc

SEQ ID NO: 7048 - DNA, 561 bp, Homo Sapiens
  misc_feature (336)..(365): n is a, c, g, or t
gtcttgtgggatcgattcctgtttacaggggttgtctctctaaatgtcagatatttccccactgctctatgaaatttggctgggtgatacttctgctggtttctttaccttctgtgttacagttctgcatgtcctacttttactcagttctgttttgcattttctttgccctagagacacaagtgtaatctctccctttatccctccactactccacctcagagtagattgtagcctgccaaaggattccttccctcatcctattgaagttgttttttcaatgcccccatattaatatgactatagaagagccaattaagtagaaatcaagatatnnnnnnnnnnnnnnnnnnnnnnnnnnnnnncccatacatgtatttatgtggtcttcagagggtccttaaagaatgaattttagattgaaaaatatttagttgtctcattacctcttctaaacacaaaccagctgatgtattttaatctgtttctgttctatcttgtaattaatttggtgggttctacttgttttaacataaataaagagtatgcagcacgtttaat

SEQ ID NO: 7049 - DNA, 280 bp, Homo Sapiens
ccgcccctccccagggcccccacctccacggcccacttcattttctgttctcattttgcagagttgcacaaggagagaactcagcatggggggttggttctttgggttctgtttgtttatttgtttaatttaatgatttgtaaagtgatgttcctcttccttttttacacttttcagctcatatttaacctctgtttggaaaatgattcttgtaactgtacatttttttgcttcctaataacaatgacaacaaaaaaaataaatgaccagttttgtgtta

SEQ ID NO: 7050 - DNA, 425 bp, Homo Sapiens
  misc_feature (164)..(190): n is a, c, g, or t
  misc_feature (196)..(197): n is a, c, g, or t
  misc_feature (203)..(207): n is a, c, g, or t
ctatccaccccaatgtcaaaatggcttggagggcctaacagcaagcagctatggggcttggctttatgaaagattggcctccagttcccatcttaagtacccatttttgaaggttctcttgtttccatttttctagcatcaaaaaccttccaaatattatgaannnnnnnnnnnnnnnnnnnnnnnnnnncgtcanntttggnnnnnacatgaggtatataaattcaaattagtatccagaggaacttcccccaaacacatagttcaaagaacccactttcaaagggggaattgggtttcccttcttgatcccccctgttctcctccctggcccccaattcgttccttactgggaccaaaggcaataagaatgttggggaggagatagggtcttgggacacaacaagatgcagattggaccagac

SEQ ID NO: 7051 - DNA, 517 bp, Homo Sapiens
cagggccaaggcccgaaaagggcgtgtcttcggcaagcttcaccacgacagtacagccggctgccagggcggcccccaccttccgggtgatcatggcactggggaaattccacggggtgatgactgcagcccacgcctatgggctgcttgaggaccagggcccgcctgtcctttgccggggtgtagataatgtctccgtaaacacggcgggcttcctcagagaaccactctaggaaaaaggcggaatagagaatttctccatgtgcctccttcagtggctttccactttcagctgtgattattctggcaaggtcatccttattttgtatcattaaattgtaccacttccgaagtaatgaactcctctccttggcggagacctccctccagcggcagaaagcctcgtaggcagcgcgcacggcggcgcgggcctctcgcaccccacaaacgcccaccatgcccagagcggcgccgctggcaggagtcttgcacggggaaggtggcggcggccgggagc

SEQ ID NO: 7052 - DNA, 294 bp, Homo Sapiens
  misc_feature (273)..(273): n is a, c, g, or t
ggaagtgaagagccccagaacagtcatgggcctctagcacaccacagctgttgtatggaaaagcagccagactgtcttccttgtgggtccctgtctctgctactcctcactgggcagggcatcctgacctgggcccccagcacatccaccctgcccccacctgattacttcagtcagtggaggctctgtgtttctctgggatggaattcccagaaacacctgacaggctctctaccattgctgctgcagcagtaaccaaaccttgctaccctnaggcgggggaacaaagaccct

SEQ ID NO: 7053 - DNA, 270 bp, Homo Sapiens
  misc_feature (139)..(139): n is a, c, g, or t
ctttccctctgtcccccagcctttggactgtcagcaaacaagccattcgttcatcaaatactttttaagcgcctaccatgtgcctgacaggggagatgtaacggtgagaaaaactaggtgtggtccaggcccttcaggngtcaaggtgctcgtggaagaagtggacattgaagtacttatcacacaaatgaggataaaagtacgatagcgatatctaccacgaagctgttgttccccaccagaaccaaatgagcgcaagatctgacaaag

SEQ ID NO: 7054 - DNA, 470 bp, Homo Sapiens
  misc_feature (32)..(32): n is a, c, g, or t
  misc_feature (42)..(42): n is a, c, g, or t
  misc_feature (65)..(65): n is a, c, g, or t
  misc_feature (69)..(69): n is a, c, g, or t
  misc_feature (423)..(423): n is a, c, g, or t
  misc_feature (429)..(429): n is a, c, g, or t
  misc_feature (437)..(437): n is a, c, g, or t
  misc_feature (451)..(451): n is a, c, g, or t
gtcttaataatgctgaagctgctgaagaaatngtggattgcnttactgagtcgttgtccatcttnaagncaccccttcctaaaaagattgccagattatatttggtttctgatgttttgtacaactccttcagccaaagttgctaatgcttcatattatagaaaattttttgaaacaaagttatgtcagatattttcagacctcaatgccacctatcgtacaattcaaggccatttacaatctgaaaactttaagcaacgggtaatgacttgcttcagagcatgggaaagattgggcaatttatccagaaccatttttgatcaaactacaaaatattttccttaggacttgtaaatattattgaagaaaaggaaacagaggatgttccagatgaccttgatggtgcccccatccgaggaaagnacttgntggtgcanctctggaaagatgnagatgggattccctattgg

SEQ ID NO: 7055 - DNA, 367 bp, Homo Sapiens
tggcaacttcctcactcgccgctgggcccaggatggatgacttcgatgggcttcaagctggggggtgggcttggagctgatgagtgcggagtacgtgacagccatggctcccttcacaagctgtaggtcctggagggacagctggctttggggaagcttgtctttctgggtgacccatggatgctgcagaacctgcttagctgtgaggcgctggcggggatccacgtgtagcatcttggacaccaggtccttggctgtctctgaaactgtgttccaatttcccccactgagggtaaacttcccactgccgatccgagataggatttcctctggtgtgtcactgggaccgatggcaaatggagtatat

SEQ ID NO: 7056 - DNA, 664 bp, Homo Sapiens
  misc_feature (416)..(416): n is a, c, g, or t
  misc_feature (418)..(418): n is a, c, g, or t
agactataccaaccagctgctccaggcaatgcagcgcgtctatggagcccagaatgagatgtgcctggccacacaacagctttctaagcaactgctggcatatgaaaaacagaactttgctcttggcaaaggtgatgaagaagtaatttcaacactccactatttttccaaagtggtggatgagcttaatcttctccatccagagctggctaaacagtcggcagacacaatggttctacctatcatacaattccgacaaaaggatctcacagaagtaagcactttaaaggatctatttggactcgctagcaatgagcatgacctctcaatggcaaaatacagcaggctgcctaagaaaaaggagaatgagaaggtgaagaccgaagtcggaaaagaggtggccgcggccggcggananagcaatctctcctcccttcagtactactgtgccctcaacgcgctgcagtacagaaagcaaatggccatgatggagcccatgataggctttgccaatggacaagattaacttttttaagaagggagcagagatgttttccaaacgtatggacaagctttttatcctccgttgcagacatggttcaaagcattcaggtagaactggaagcccgaggcggaaaaagatgcgggtgtcccagcaaagaat

SEQ ID NO: 7057 - DNA, 746 bp, Homo Sapiens
ccagcacttccggtacggaaaactcgctgctgccccaacctggcttgacaggcttggtctctgcaagtggctctcagcccttcttctttcctgcctcaccttccaattcgtttgccgccgccgtcccgcagctgctgtttccggagttgccccttccccatgttccggggcaggagtccgcaaagcgaagatccgcccgccggttcctcatcatgtccgaactgactaaagagctgatggagctggtgtggggcaccaagagcagccccggtctctcggacaccattttctgccgctggacgcaagggttcgtgtttagtgaatcagagggatctgcattagaacagtttgacacggtggcccctgtgctgttattgcacctgttcaggcatttcttttgaagaagctcctgtattcttcggagaagtcttcttggcgggattgttcagaggaagagcagaaggaactcctttgtcataccttgtgtgatattttagaaagtgcttgttgtgaccactctggatcatactgcttggtttcatggttaagaggaaagacaactgaggaaactgctagtatttctgggagtcctgcagagtctagttgccaagtggaacattcttctgccttggctgtcgaagagcttggcttcgagcgatttcatgcattaattcaaaaaagatcgttcagaagtttaccagactctacccagatgctgtcttggaccagtattcaatgtggggcca

SEQ ID NO: 7058 - DNA, 698 bp, Homo Sapiens
aacgatggtcctcagctcaggacgagctgctgtgttttggaatgtgaaagacaaaactatgaagcatgtgatgaaagttctagaaaaacatgaaattcagccctatgaaatcgcactggtacactgggaaaatgaagaacttaactacataaaaatagagggacagtcaaaacttcacaggggggaaatcaagttaaattcagagctggatttagatgatgccattctagagaagtttgctttctccaatgctctatgcctttctgtaaaactggcaatttgggaagcatcactggataaatttattgaatctattcagtcaattcctgaggctttaaaagctgggaagaaagtgaaactatctcatgaagaagttatgcagaaaatcggtgaactctttgctctaaggcaccgtataaacttgagttcagacttcctgattactcctgatttctactgggacagagaaaaccctggaaagactttacgataaaacgtgtcaattccttagcattggccgaagagttaaggtcatgaatgaaaaacttcagcacctgcatggaacctaacagatcctaatgcggaaatcaccctgaaatgagaaagaagggcactccgctttggagtggaatgattgtcatcctccatttacccatagagggtaatgttttggagcttgggaacgaagtaattttttc

SEQ ID NO: 7059 - DNA, 756 bp, Homo Sapiens
  misc_feature (671)..(671): n is a, c, g, or t
  misc_feature (674)..(674): n is a, c, g, or t
  misc_feature (677)..(680): n is a, c, g, or t
  misc_feature (684)..(684): n is a, c, g, or t
  misc_feature (688)..(693): n is a, c, g, or t
gggggagagaatcaaccgtaaaaatgtcttcattaattagacccagttattccacttttgttaatgtctctcaaattgtacaaagtataaaaaatgatatgcacaaagatgttccaagtgacattacttttagtagcccaaattataaaccactttaaagtttggggtaaagattggcaaactttttctataaagggccagaaagtaactattttaggtttttaaacctactgtctctgtcataacttgtcaacactgctgtatgaagcacaaaagcagccatagacaatacataaacaatacgggcgtggctttgttccagtaaaactttgtttacaaatgtggtgccatagtttgtcatccctgggtctaggaaatagtcaataaacagatatatacaaatgatacataatgtacttattaaaaattagtaatgaatattattaaaaacatgaaaatattaccttaagtaaaaattgcaagacggaaaagtgtataagtgggtgtaatcatggctgaaataacagaccaagcatatgataaaaagataacaaagtaaatcaaattactaactggttatagtgggataggaggcagaaaatggatgactttgtcttttctcaatgtttttatttgtattttataataaaaatgttttaaaatcaaaaaanaanaannnnaaanaaannnnnnccctggtcggcccgcctcggcccctcgaaaaagcttttcttagaccaattcgttttgggcgcg

SEQ ID NO: 7060 - DNA, 928 bp, Homo Sapiens
  misc_feature (311)..(396): n is a, c, g, or t
  misc_feature (398)..(399): n is a, c, g, or t
  misc_feature (401)..(401): n is a, c, g, or t
  misc_feature (403)..(403): n is a, c, g, or t
  misc_feature (410)..(410): n is a, c, g, or t
  misc_feature (412)..(413): n is a, c, g, or t
  misc_feature (415)..(417): n is a, c, g, or t
  misc_feature (419)..(419): n is a, c, g, or t
  misc_feature (424)..(437): n is a, c, g, or t
  misc_feature (441)..(441): n is a, c, g, or t
  misc_feature (458)..(460): n is a, c, g, or t
  misc_feature (476)..(476): n is a, c, g, or t
  misc_feature (479)..(537): n is a, c, g, or t
  misc_feature (651)..(729): n is a, c, g, or t
gggggacatgggcacctcgggaggcccgggccctgcccagctacagttccacccctcagcttgaggaccaatgactgagtgtctatgccagttcctgatcccatctcactctctggacctaccagtgtgactgctgctgggtgactcccctgaggcggctatacccttaagccagccccactacttccttccctgcctcccaactcagtatttaaacatcatctcccttctctttctcgcataactccccacccctttctccccgatccacccaggcctttctgtaaataaaagctcccaagttgggtacnnnnnnnnnnnnnnnnnnnnnnnnnnnnnnnnnnnnnnnnnnnnnnnnnnnnnnnnnnnnnnnnnnnnnnnnnnnnnnnnnnnnnnannananaaaaaanannannnanaaaannnnnnnnnnnnnnccanaaacaaaaccaaaccannnccaaaccaaacccccncannnnnnnnnnnnnnnnnnnnnnnnnnnnnnnnnnnnnnnnnnnnnnnnnnnnnnnnnnnagaccgccacccacaccttaaaaccgcgccctccgcgcccccgacaaaacaaccaacgggccccggaaacaaaaccgaaatcctccacaacaaaaaccgcaaccgggtggctcnnnnnnnnnnnnnnnnnnnnnnnnnnnnnnnnnnnnnnnnnnnnnnnnnnnnnnnnnnnnnnnnnnnnnnnnnnnnnnngcgctcattcgatttagaccccccagagcgtgggtcgctcccattcccccatccctccgccctcagcccccacggtggcgcggggcacccgccgaagccgcgggaaaaggcgtaaccacccgcaaattgggcgcagtacaaacaaaacacacccgtctcgtgggcccgattactacaccacacgcgggagccgacaaaa

SEQ ID NO: 7061 - DNA, 735 bp, Homo Sapiens
  misc_feature (457)..(466): n is a, c, g, or t
ggtgttgatgatgaaagtttacaggtggatcagagtatgctggaactcagtgtgcataaaatttcagtcagtgaatatcactgaacgtcatatactacttggtatgtgactttggtttgtgttaagaaagcttgtatataatattttttgccatagtaagtgagaaattgtccttaatcatgcctgtttgatggtactaggaaagaaaggggtagagattaattcttgcacagtataagcaacagtgcaacaaactatgccatttaccttttacctcttacttgaaggcagaatcgcaaaacgtttgaaatggcttttctaaactactctactctggtgagagctcatttaccacaagaagccttataaaaaagtatattttgtaataaccccgtagatactgtacctaacaaaacatgactcgtattagctctataaaatatttgtggcttaggannnnnnnnnnacatatatctttttataactttccaggaactaagcacattatctgataattgttgtaaatttttttgtcagtgctttagttcaggatgggcaataaattatttctaaaggaggtctaaaagtggaaagaatggtttgattttataaaatgagttgctagttcattacagctttttacttttgtacatattttgcaaaacatttgcctcttgctattaatatttgctttgtaaaaattactgacatttaataaacatttgtaaacaaaaa

SEQ ID NO: 7062 - DNA, 540 bp, Homo Sapiens
ggcacagaagggggaacgcaagaggcatcccaagacctcatctgcctgcagtgtcaaatcgatggcctggccttggcttctgattatttgcagctgcgatggatgtttacaggaacccagccagagtttccctccctgcacttcatcccggagcgcacctgcttcccccacttcaccttcggagaggacacttcaaactgcaggacacacgcaaaagcgactcccagctccgtttgatgtgagttgagccttcaggccagctgggtttagcccgaggctggtcttagatgcagcgactgtttcaggggtgactcagaagaaaaagaagctgaggaagctgttggggggctgagggtgggattctcgctccttcatttcaggttactcgttcttcagcaagttggcaaaacagacatcatgctggtgagtgccacgttactcccctggctggaaatgcttttctgaaagtatgagtgttgtgcctacttaattctgataaacctgtctaagcaatacttaggaggcttacttctttggatt

SEQ ID NO: 7063 - DNA, 875 bp, Homo Sapiens
ggggtcaccggctgcgcccttcagtatcgcggacggaagatggcgtccgccacccgtctcatccagcggctgcggaactgggcgtccgggcatgacctgcaggggaagctgcagctacgctaccaggagatctccaagcgaactcagcctcctcccaagctccctgtgggtcctagccacaagctctccaacaattactattgcactcgcgatggccgccgggaatctgtgcccccttccatcatcatgtcgtcgcagaaggcgctggtgtcaggcaagccagcagagagctctgctgtagctgccactgagaagaaggcggtgactccagctcctcccataaagaggtgggagctgtcctcggaccagccttacctgtgacactgcaccctcacggccacccgactactttgcctccttggatttcctccagggagaatgtgacctaatttatgacaaatacgtagagctcaggtatcacttctagttttactttttaaactaaggcatataaaaaccgtatgcctctaaacacaccaaattgctaaaaaggacacacctgtctgcccgccctccgcccctcgagaaagctttcctacaccattttgagttgggcaagtcgcgcccccggtaaggcaagcagtgcacacggggccatcaacgggctatcacagaagaagataccggcgcccatgtactaacgagggctggaagcccctccccaatataagaaaacgtcccgcgcgggacaataggagctgttcccataaactataccacgaaaggcgagttaatgggaatcatttaatgggggtccaagttacgccgaggaatccataatgaaatatctaccaacaagtaatcgcccgccccgc

SEQ ID NO: 7064 - DNA, 1442 bp, Homo Sapiens
gacgtgtctattgacgaacgcacatctgggcgtgggtgttatggggcagtagtacgaaggcgaacgggagctaccgcggtggagagcgcgcggggctcacggtgtcttatggtgtcgatggcgaatggccgcccaatgctggggtttgtgtaggggggaggaaagtgaagcagtgcggggagtcaacacggagggggggtgggtgaacccggggttggcgccaagatccatttccctgcgggggccgcgcgccccaaaatgaaatgtgttggaaaacttttggaagggccgagggcggccggcagaaatgaattcctgcgaggggcggctgcggtcgtgaggtaaacaactttattaacatagtcaagcagtgattaacattcacatctattatgtcacatcatacaaatgtaaatacaaaattactacagtacaatatatattctctgcatgatccaaaatatttggtggccccaaaaaactctctttaaaattcagcagcttatcaaaaattaaaaccgtattctatttaaaatggagatctgttagcacagagttagacttcaagaaatatcaatttagtacagtttgagaagttgcaggaggatatgtttgaaggacacattctaacatagtgtggcaggtacaggaaacatcagatttaaagcttttaagcataactcatacaacctaagttgtcagcagaaagatccagttatatttgtaactaaagctaatgctactaaattattgcacccaatgttaacatattaagtgtaaaactgttttgtaatatgaagtgatttaccacgtttaaacatctcttctcacaagatgataatctattaagtaaaactaattatacagtattgtctaattattgtctccataaaaatcacccaagctcaatttgcttatatatccacaaaggaaaacaacaacacagtaatatgcggaaagtacagtggaacccctttatgaggccaatattagaaggggaccaacactgccttataggctaaccatgttataataggcttttaaaaagatgtaataccagcgaaatagctaatcttgaataataccaagccacagtataaggaaattctatggcagataaacaaaaactgcaataaaaggaaaaactgcttttcttattagtgatacactgcttggcaaatagatttggcctggttttaaaatgtacaagaggtgaaaaaaaatcaccattttaacttctttcaaagtcatgcatacattcagctattatgcatcttttaaaaaacacaacacattctgggatacaaaccacaatgaacaattgtgtaatttaaatgtataccttaaaaattaatatgtataataactaggcataaagaattatctacgtaagtaatgctaatgggtgaaagatctatgtaagattgaaaaaattagtcacc

SEQ ID NO: 7065 - DNA, 664 bp, Homo Sapiens
  misc_feature (598)..(622): n is a, c, g, or t
gggccgccttcggggcccggatctcaaacagccgggaagaagcaccgtggctgctattatctgctctccgcgcctgacccctcccaggactcgtgatgccaaggccgctgcgagcggctacgaagagtcggggttgagccccagctgagccgagggctcgcactcttctggtctcccaggcccaacccacctgaagaaatgagtggtggattggctccaagtaagagcacagtgtatgtatccaacttgcctttttccctgacaaacaatgacttgtaccggatattttccaagtatggcaaagttgtaaaggttaccatcatgaaagataaagataccaggaagagtaaaggggttgcatttattttatttttggataaagactctgcacaaaactgtaccagggcaataaacaacaaacagttatttggtagagtgataaaagcaagcattgctattgacaatggaagagcagctgagttcatccgaaggcgaaactactttgataaatctaagtgttatgaatgtggggaaagtggacacttaagttatgcctgtccgaaaaatatgctcggagaacgtgagcctccaaagaagnnnnnnnnnnnnnnnnnnnnnnnnnctcctgaaccagaagaagattgagcgaagtataacgcgttga

SEQ ID NO: 7066 - DNA, 1041 bp, Homo Sapiens
  misc_feature (514)..(567): n is a, c, g, or t
  misc_feature (642)..(701): n is a, c, g, or t
catgaaatggcagaagctaaatcccactggggctgctccagcaggctgtgctgcccactcagctgtggccatgggaaaacatgtgtacatctttggtggaatgactcctgcaggagcactggacacaatgtaccagtatcacacagaagagcagcattggaccttgcttaaatttgatactcttctaccccctggacgattggaccattccatgtgtatcattccatggccagtgacgtgtgcttctgagaaagaagattccaactctctcactctgaaccatgaagctgagaaagaggattcagctgacaaagtaatgagccacagtggtgactcacatgaggaaagccagactgctacactgctctgtttggtgtttggtgggatgaatacagaaggggaaatctatgacgattgtattgtgactgtagtggactaataaaacccacatttttattacctgtcagttactttcagaatagttaagtaaaacattagctgttttatacctccnnnnnnnnnnnnnnnnnnnnnnnnnnnnnnnnnnnnnnnnnnnnnnnnnnnnnncacaaacaaaagagaggcgggcagcaacacagaagacaacaagcagggagagaaaccagcgaagggagagcaacnnnnnnnnnnnnnnnnnnnnnnnnnnnnnnnnnnnnnnnnnnnnnnnnnnnnnnnnnnnncaggcagcgtacaaacaaaacagagcgaagcgagggaggaacaacgagggatggaagaggaaaaagaacgagagagcaggcaaagcgacgaagacaagacggaggagaacgaagaacaagcaaaggcagggagacaacacaacaccgcaacaccaagaggagagaaagaacagcagcgccagagagacaagaagaagaagtaaaggaaacaaagccaacgacatcaacacagaggaggccagcacaacaacagagcaagacaaagtcagagaaaggatcataacgcaaagaaccgcacacagagccggagcacgaccgtgaaggaaaaacacacagaaga

SEQ ID NO: 7067 - DNA, 787 bp, Homo Sapiens
cactactagcaaccaacgcctgctgtttcaaccaccacacacgccacggcctggtacggtcggaatcccgggatatcgtcgaccacgcgtcgcccttctcagccccaccagacacacacaggagggcctggccactgttgagggggcacacagggcaagggtcaccaagtcggggcctagggactcctcatgcctctgagatggaatggtggtatcctgccgtgcccaagcctgaaggaccctcaaaactgcctcctggagtccacggttcctgacctccgagcctcagctatgccctctgggtcaaccagaattagagccagacagggaaagtgagagctggactggaggcagacaagatgctcagagcgactattaaacgaacgaaagcctctgctacggagcgcttctgtcctctgtcaggcccgagcgacgtgcctgacaccgggttggatcctcagatggccccatgacactagctgcaagtgggctcacaggagcgcctggccacggcatgttgcttcctcttggccactcggccatcagcaggcagacatgacacaggaacccaggcctagacatcacacacggtcctaccaaccccacttggcctgtctggcctctcagcgctgctccgggcccactccacgagctgcacgaccagcccttgcgcgggacaagctgtgcactgcccgactcgtcctccagccacgcggcacccgttccgcccccgcgcctccccactgcgctcccgcccggcctccccagagggctccggcgctcgccc

SEQ ID NO: 7068 - DNA, 672 bp, Homo Sapiens
aatttgcagtgaaaaaagctatctctttgttcacaaccataaatcaggagatggagattaattctattggctcttagtcacttggaactgattaattctgactttctgtcactaagcacttggtatttggccatctccattctgagcaccaaacggttaacacgaatgtccactagaactctgctgtgtgtcacccttaaatcagtctaaatcttccagacaaaagcaaatggcatttatggatttaagtcattagattttcaactgacattaattaatccctcttgattgattatatcatcaagtatttatatcttaaataggaggtaggatttctgtgttaagactcttatttgtaccctataattaaagtaaaatgttttttatgagtatcccttgttttcccttcttaaattgttatcaaacaatttttataatgaaatctatcttggaaaattagaaagaaaaatggcaaggtatttattgttctgtttgccataatttagaactcacacttaagtattttgtagttttacattcctttttaacccattcagtggagaatgtcagcttttctcccaagttgtatgttaagtctattctaatatgtactcaacatcaagttataaacatgtaataaacatggaaataaagtttagctctattaaaaaa

SEQ ID NO: 7069 - DNA, 497 bp, Homo Sapiens
gcggatcccacccagcccaccccgccccggccgacggctgcagctgacctggatccttcgagcgcccgccgaccgccagcgatcttccctcatcttccgggctggtttctgctgcgcgaggaagcgctgccctcgccgcccctctcgccggacccccggcccccgatggctcggatggggcttgcgggcgccgctggacgctggtggggactcgctctcggcttgaccgcattcttcctcccaggcgtccactcccaggtggtccaggtgaacgactccatgtatggcttcatcggcacagacgtggttctgcactgcagctttgccaacccgcttcccagcgtgaagatcacccaggtcacatggcagaagtccaccaatggctccaagcagaacgtggccatctacaacccatccatgggcgtgtccgtgctggctccctaccgcgagcgtgtggaatttctgcggccctccttcaccgatgggcctatccgcct

SEQ ID NO: 7070 - DNA, 441 bp, Homo Sapiens
aagtgctgggaattaaaggtgtgagccacccatgcctggccctatggggtgttttttaactacttaaaaattatttttggtaatgattgagtcttctttatggaaacaactggcctcaagcccttgcgcccttactgtgattcctggcttcattttttgctgatggttccccctcgtcccaaatctctctcccagtacaccagttgttcctcccccacctcagccctctcctgcatcctcctgtacccgcaacgaaggcctgggctttcccaccctccctccttagcaggtgccgtgctgggacaccatacgggttggtttcacctcctcagtcccttgcctaccccagtgagagtctgatcttgtttttattgttattgcttttattattattgcttttattatcattaaaactctagttcttgttttgtctctccgaaa

SEQ ID NO: 7071 - DNA, 946 bp, Homo Sapiens
ttgatatgtaacaaggagggacctccaccttcttgatgcagaaaaattaagtgaaagcctatgaaaaggcaaacttgttggaccaaccatcatctcgaatgtcagcccaaatatgacctgttacaaagaggagatttttggtccagttcttgtggttctggagacagaaacattggatgaagccatccagattgtaaataacaacccatatggaaatggaactgccatcttcaccaccaatggagccactgctcggaaatatgcccacttggtggatgttggacaggtgggagtgaatcgtccccattccagtgcctttgccaatgttctcattcaccggctctcgatcctccttcaggggagacaccaatttctatggcaaacagggcatccaattctacactcagttaaagaccattacttctcagtggaaagaagaagatgctactctttcctcacctgctgttgtcatgcctaccatgggccgttagaaacaagtttgtttaagactgactccatcctgagtaatctccctttatttttgaccagcttcatttgtcagctttgctcagatcagatcgatgggattggaatacattgtaactaaaatcttcctcaggactattaacccctgcaaagtttctatagggaactgcctagtgtaacaatgaaaccagatttctcacttgctcttcatacttctattttgaggtaactgttgtaactatgaaatgcttatctgaaagtagtgcttaaacctgatttctaaaaattatcccattttctgatgatttgaaggggagaaaagccagtgtatgtaaagaaaatgttccagccaggcgcggtggctcacgcctgtaattccatcattattgggaggccacagtgggcagattgcttgagcccaggagttgaagaacgtggcgaaaccccgtatctattattt

SEQ ID NO: 7072 - DNA, 346 bp, Homo Sapiens
ctgaaaaaaagcaaaacaaaacgagaaggctttcaaaattactctgcggtacactaatttaacagattagatcactttccaggctttaagttggcctttgttctaccctttttttagtgtatgataaaagttgtgttggttcgttgatcagcatgcaatgaactctggctctggttaatcaggtgactacagttttgtccttacatttgtatgtatgtcatgagtggttttgtatgggcaggaggtaaacaacgcacatttaaatatacttaatgatttatcattccaatgttttctggttgttttagtctttcatttgtctcttgaacaatctgaaacatcccta

SEQ ID NO: 7073 - DNA, 311 bp, Homo Sapiens
ctcaactagttaagtcaactgcttctgaaataactctgtattgtagattatgcagatctttacaggcataaatatttaaactgtaatatgctaacttgaagagattgcaataaagctgcttcagctaaccctgtttatgtttaaatactagggtttgttctatattttatacatgcattttggatgattaaagaatgcctggttttcgtttgcaatttgcttgtgtaaatcaggttgtaaaaaggcagataaattgaaatgtttgtggtatgaggaaataaaagaatggaattagctttcattcaaaaaaa

SEQ ID NO: 7074 - DNA, 369 bp, Homo Sapiens
aagcttttaccgcccccactgccttgtgtccaaggccctggccttcatgtatccatggaggagagacaaaaatacacatcaataaaataagatagggaatccataaatagacattcagaagtatggccaacggatttatcttaaaaccaatggaggaagaagagtttcaataaatgttgtggacttccatttgtcaaagaccaaaacaaaggaaccccaaccttacatgtaatacaaacttaactcaaaatggatcatatatctaaatgtaaaatggaaagctataaaactgaaaacagactatctttacaacctaggcgtaggtatagtttttagacattacaccaaaagcacatgcggtaaaagctt

SEQ ID NO: 7075 - DNA, 1050 bp, Homo Sapiens
  misc_feature (578)..(662): n is a, c, g, or t
  misc_feature (671)..(746): n is a, c, g, or t
acagaacaaacactactctagcagagcctttcttgcactttaaagtgagattaatttagctgtaatttggttaaaaacttcctaagagagaaaattaagtctactgatttggtataggtaaatggacattaaacttttttaaagtaaaggagatggtagataccgttagattatagtcttgaggttcatgtgaagccagtggtgttaacttactttgatttccttgttcaggtcagggcctggaacgcctgtgcggggaggtcactcaattcaaaattttctgtatgaaagcatttttcaccaaaatgagcctcatccctttatgcaacacataaccttactgagggagggaaatacggaagccacctttttatttctcttcactgtgtacaagttcacttgttgtcttgaacactgtctcaaatacctgctttttgttttggatagtaccttgtctgtataagaagctggcctttccatagagaggccctggagtctaaaattatgagaacaattaatttatttgtgtcttctattatgatctcgttttgacaataaaaatccttactactttctcnnnnnnnnnnnnnnnnnnnnnnnnnnnnnnnnnnnnnnnnnnnnnnnnnnnnnnnnnnnnnnnnnnnnnnnnnnnnnnnnnnnnnacgcacaannnnnnnnnnnnnnnnnnnnnnnnnnnnnnnnnnnnnnnnnnnnnnnnnnnnnnnnnnnnnnnnnnnnnnnnnnnncagaacggggcgatctaacagagagcaggaggtggtgggcaaggacagaaccccgcgctccatggagagcgagcttttgtgcggaccgagaagagagacgtactagagaatgagtgacgagggatgtgacacaccatagagaagcgtgaggagagatagaagtataatgttgtcaacatcagtaagagccggggcgtcggcctgtaacgtgcacatgaggatagtggctctgactacgagagttcgtaagagcttgtgttgtctatacatacggaagttggagtatataatcgacatagaaggt

SEQ ID NO: 7076 - DNA, 475 bp, Homo Sapiens
gagccagaaaacaaattcaaggcctgatacaagttccccagagttagaacatgcagtccaagagttgggagtggagccttaactctctaaaatcttagagatgtgaagccagttgactgaacccaccttataccacagtcaaaccctcaagagcataaattgaataaaagataccaaaaaatccaaagggcagccactttaaagactgaaggaacatcagctcctaaagatgagaaaaaacaagcacaagaaccctgacaacacaaaagccagagtgccttcattcttccaaatgatgacactacctctccagcaagggttctgaactgggctgagatggctgaaatgacagaaaaataattcagaatgtggaaggaacgaagatcattgagatgcaggaatacattgcagcctaatccaagaaagctaagaattacgttaattatacaggcggtaaaagcttggggatcctcta

SEQ ID NO: 7077 - DNA, 227 bp, Homo Sapiens
aagcttacggacatccttttgaattatctttttcactcatagaatatgaatacatttatttagactttttctagaactttcctgttttcatgtctttgcttcatctggaattggcttaacacccttttataaagtttgtgtttgtaaaatttccattgtgacatcaatacgcaatatattttgtaatataggagtttctatttttttattaaaatggcaatgaaagc

SEQ ID NO: 7078 - DNA, 1127 bp, Homo Sapiens
catcgcggtctctaaattatccatatattccatacagggtgtggtttaaaccagctgccccagccaaaacatttcaaaaggcagccagcgctgctttcaccgaaaggaagcaaaggcaggaacaaaccttacctggttgttaagaaaggcttcggcttgcttcgtgtctctgaggaactgctggtaggcatgtgactgggataggagattttgtctgttctcccacatcttgtggagctcgttccatccagtgtccagagcctgcagccgctgccgcagaaacatgtactgggcatcggtctgcccctgggtgaccatctcgcccatgtccctcatcttctggtagtcctcctcgtagttgtcgatctcgttcttgatgttctcgtgctgcgtgagcagcttctcagcctcggtcagggtgtttggcatgtcctccgaggcgatcgctgtctgggtcctagagagccaggactggaagtcgtccaagtcccgtaggaactgctgcagcttgctggcctctcccagggaggcctctcggtttttcagggtggtcttcatctcctcccacacggcgctgatctcggccagccgagacaggatggcctgggcctggtcggggtgctcggactccagcttctccgcctccttctgcaggtcactcagctgtgcctcaatggccaccaagtcccgctccatgccggtcagcatgcgctgcagggccatgacgccagccaggtcattgcccaggtcctgggtggactcgatgaccttggtcttttcccgaatccaggatttggtttcattgcactcgaggtggtagttctggatgctcagggcagacaggagggcatccttcttcctgtcaaccagttctctgaactggctccaccttgtgttgagtttgtcctgctgggctttgatttccttctcacttgggtggccgctgtgcatcagctggcgtgccatctggttcaccactgcaacccgggaagcctggttgttcatttctggttctacggctctcaatctgtgctggatgtacctccacgatcctccagcttctctgggatctgcatgttgttgagccactgctccttctcgtcgatccagagctcacggcatagcct

SEQ ID NO: 7079 - DNA, 1509 bp, Homo Sapiens
  misc_feature (829)..(838): n is a, c, g, or t
  misc_feature (943)..(975): n is a, c, g, or t
  misc_feature (1001)..(1011): n is a, c, g, or t
  misc_feature (1143)..(1143): n is a, c, g, or t
  misc_feature (1340)..(1370): n is a, c, g, or t
  misc_feature (1446)..(1446): n is a, c, g, or t
ggcagctcggcccgccgccgctattaccccggccaggcctggggctcatgtacttcatccactactacctgcctgaaggcctgcggcgccgcttcctgcaggccttcttcatcagtcactgtctgcctcgagcactgcagcctggccagcctggcactaccccaccacaggacgcagcccaggacccaaacctgagccccggcccttccccagcagtggctcggtgagccatgtgcacctatggcccagccactgcagcacaggaggctccgtgagcccttggttcctccccgaaaacccccagcattacgatcccccaagtgtcctggaccctggcctaaagaatcccacccccacttcatgcccactgccgatgcccaatccaggcccggtgaggccaaggtttcccagtgagcctctgcgcctctccactgtttcatgagcccaaacaccctcctggcacaacgctctaccctgcagcttggagaactccgctggatggggagtctcatgcaagacttcactgcagcctttcacaggactctgcagatagtgcctctgcaaactaaggagtgactaggtgggttggggaccccctcaggattgtttctcggcaccagtgcctcagtgctgcaattgagggctaaatcccaagtgtctcttgactggctcaagaattagggccccaactacacacccccaagccacagggaagcatgtactgtacttcccaattgccacattttaaataaagacaaatttttatttcttctaaaaccaaacaaacacccaaacgagccccgacacacataaccctccgccaatcaannnnnnnnnnattccgtacaccatctaaacccttcccttccccgtctcccacacgacccaacgcccccttatcacctacccaccaactgcgccgcctatcccaccacgatacctnnnnnnnnnnnnnnnnnnnnnnnnnnnnnnnnnatccattcttcttttattccaatatnnnnnnnnnnnattacccctttgccccctcttatcgctacattccatccttatcgcgttattatccgcccccttctccctcctcactacctcgtcccggcagaaaatgccccgctttccgtcgccacctccaccccctatgtnaatcgctccccaccccccctctcatattttccgctcgccgcgtcctcctctcgatctcgccacctcttcctcagccatcttctccccacatttacgcaggcgacatgcacgtgcaccataccttatcacactaataccaacgtaccccccacgcctattacccatagccccccgcctcccccaattaccgcgatatnnnnnnnnnnnnnnnnnnnnnnnnnnnnnnnatatcgcccgatataatatacaccgtcgacccgctacaccggactctccacccattgattccccacatcgcgagancctctcacaatcagccgcgccaactcactatatatcacgaatctcccttacctcccgcgaccc

SEQ ID NO: 7080 - DNA, 802 bp, Homo Sapiens
ctaaggctaggtaggaggcccggtgttactcggccgaggcagacgccttggaggacttggaacacctgtaacaggacaaggagtcctgctcaggcacgtggccacagaaaactacttaggaagcctgtggtgagaacaacaacagtgcctggagaatcccacggctctggggaagtgagccccgaggatgaggctgctcgcctggctgattttcctggctaactggggaggtgccagggctgaaccagggaagttctggcacatcgctgacctgcaccttgaccctgactacaaggtatccaaagaccccttccaggtgtgcccatcagctggatcccagccagtgcccgacgcaggcccctggggtgactacctctgtgattctccctgggccctcatcaactcctccatctatgccatgaaggagattgagccagagccagacttcattctctggactggtgatgacacgcctcatgtgcccgatgagaaactgggagaggcagctgtactggaaattgtggaacgcctgaccaagctcatcagagaggtctttccagatactaaagtctatgctgctttgggaaatcatgattttcaccccaaaaaccagttcccagctggaagtaacaacatctacaatcagatagcagaactatggaaaccctggcttagtaatgagtccatcgctctcttcaaaaaaggtgccttctactgtgagaagctgccgggtcccagcgggggctggggcgaattgtgggtcctcaacaccaatctgtactataccagcaatgcgctgaca

SEQ ID NO: 7081 - DNA, 391 bp, Homo Sapiens
  misc_feature (217)..(237): n is a, c, g, or t
tcctcagaaatcgcggctattgaagacaataaaacgtattaccaacaagttgaaaacaaagataaacatgcaaacttgcacatgccatacataatatttctatttaataattaaaatgcttaattgaaaggatagtaattcaattatcttcaacttctgttggtcaatcacatattgtcagttactactatttaagggaaaaatcttggcctcaagnnnnnnnnnnnnnnnnnnnnntcttatggttagcaaaatcagtgttatgtttgctaataaagactggaaaaaaaatgaatgccctataagtttcatatcattttaaagaacaaagtaatgaacagaagacaagtttcaaaaatattagggaggtctctgatctccagaattcaag

SEQ ID NO: 7082 - DNA, 496 bp, Homo Sapiens
aagctttttgaagataagccaagtccaaccagggaggagccgagaaagttctttttaataggtgcttccttgctccatgttggggcttgaaacggattccggtgttgctatcgtgcaatctttgtcccacaaatgcgatgccaggcttgatgtgcgggggcaagcttgaaggagtttctcaggctgtgcagctgctggaccttccccgggctgccctgcatgaatagccccggtgatctcaaaggcccaggcatcccgcttcctctcgagaacaggcctccaggaagtactccgtggatgtttgagtcttcagcttaatgaggagcggtcggttttcatactccaggcaggggcaggtgatggtgcagccatccaggaggatccggcccttgggaggggtcactctccgacccccctcaagcttgtagtacaccagcgtgttctgccgaaggatgaaccatcgcgccttccagttgtggacatgggcaggggagat

SEQ ID NO: 7083 - DNA, 301 bp, Homo Sapiens
ggtttttttggtattaatttttttctgaaacaaagtcttgccttgttgcccaggctcctgggctcaagtgatcctcccgcttggccccccaaaatgttgggattacagatgtgagccattgtgcatttttaaggcagataaagggaaagtgatctggaagtggcagtaaggagcaaggaagcacttctctttaggccaggaaagaggttgtgtatggagagaagatagtcgcacgttgaggggatgccaggaagttagtgcctaaaaggaagagccaggctgaagcaagaaagtgaagagc

SEQ ID NO: 7084 - DNA, 393 bp, Homo Sapiens
gacaggcgctggtagaattccacagtgtccgagtgtgggggtggcatctggtggtggtaggggggcgtcgggcaggggttccgggggaggtactgccgaatacgctcagagtcagaggggtgaggcatgtggtgccaggcggcctcttccatggcctgctgatagagctgctccttggtgaggggcacagggcccagtggacagacacccagcgacagcggtatgttcacctctgacagctgcaggggcggctgggctgaggccggaggtgctgatgtactgctcaggatgatgtctcgctcggtcaggtgcagcgttggcacagggtcctcaatgccagagctgatggctgcccgttccgccatggacttcaaggagctcacatctgttatg

SEQ ID NO: 7085 - DNA, 482 bp, Homo Sapiens
aatttaatgggaaatggatcacacgatttctttaagggtattatatataatataagtattacggcttttacagcaacaatacgatatctaataggtaatatattatcattgtaaagtatcaagacaatacgagtaaatgaaaaggctgttaaagtagatgacatcatgtgttagcctgttcctaatcccctagaattgtaatgtgtgggatataaattagtttttattattctcttaaaaatcaaagatgatctctatcactttgccacctgtttgatgtgcagtggaaactggttaagccagttgttcatacttcctttacaaatataaagatagctgtttaggatattttgttacatttttgtaaatttttgaaatgctagtaatgtgttttcaccagcaagtatttgttgcaaacttaatgtcattttccttaagatggttacagctatgtaacctgtattattctggacggacttatt

SEQ ID NO: 7086 - DNA, 360 bp, Homo Sapiens
gctggtcctggtgggtttgctgaccatgactgtgcaagccgttcttttggctgccatcttccttcatcattaaaagtgtggaacataggcaaattgcttttgagattcttgggatagaagaggacaaccattctgcaccctgcccccttttttaaatcttttggggaaagatgagtaactttccccactactctgccttcctgttcagtaactcttacttttgcctgaagtaacagcatcttctacttctccatctagagatttttgtgtgtgtgccatcaaggttagcaaactttatacgtagcctaacacttaaaaaatgcactcattatcttaaacctaataaattccagagtttaa

SEQ ID NO: 7087 - DNA, 412 bp, Homo Sapiens
  misc_feature (107)..(143): n is a, c, g, or t
gaccaataattgttgttttgtgtcagctccagccatttttgtacatgttgtatagacaattgtgccttttaggagctttatgtttagaaactgtacagattgttgannnnnnnnnnnnnnnnnnnnnnnnnnnnnnnnnnnnngaaaaccaggtagttatttgtgtttagtaaggaaaacctgtcaaataaatcaaatgattaaattatatgttccactgttgaatataaattttatggctatggggcagagtttctgtgtataaattagtatgtaaactccatatttattgtattcatattagtctttgaaaatgggtctgtcctccttgtgtaagacagtaactttacacttcagacagattttctgtgttatgaaatgtttcagtaaaatattgtttactgactttaaa

SEQ ID NO: 7088 - DNA, 1119 bp, Homo Sapiens
actgggcaaccccctctgctcaccaaaaggctcctgtgcttggttaggacccaggatccccagtggttggtggacataatggaccctgtggactaggaagtttctgttgctatcacattttctagaagccattgggtccaggaagaggtgtagcctaccttttgcgcctgcctagaagacacagatctttcagtgactatttcctgagttactttctctgcatggcttcttgcaaagattgttggaactgggaagctactgccagaggagtaggtattctctgaattaaccatagtttgctcacagagtgaatgtgaagctgtgttcatacttgtttctgtggcaggtttttgtctctgctcaatttccttatttatatctattttttgacccaggcaaacttcagctagcgtcttgaatttaagtcccaatcatctaagaagcggtcatctagctctccttcaataaaactgcaacaaccaatagaagcattcagcgattcagtttcttcctgagaataaaccagaaggcaatctttggctgtgtgattttcatcttcctcagtgtaagaggccgctttatcagtgaaataatttcttaagaattcttcgttcagtgcaacagcagctgcctgagctccggccatgtctctggaagcccctgtggcccttgcggtcttcgtggtttcagtggtcatgaatagcgcctgtggcccctgtaaactgggtagctctaccagaaagcaggcttctgtgttcttcccaccttccatccatctcggacatctcatgttgccctttgacaatggaagcagagctacttcctttcatcgtggcttccttggccatacctcctactccatttcgtcctactagactgcccccttgatccactggcagaaatgatggcaccaccttgtcttcaggtggtgctccttcattattccaaggatgcagcatctctatggtgccaggtatgggggtaaagcctttggcgccctttccgcaatggcacatcagcagtaaaagtggtaccaatagcaggagcagaaaggccaaaatcatgagcgcaattgctgcgggtcccaggcccacataggagtcatgctgtgcttccctg

SEQ ID NO: 7089 - DNA, 382 bp, Homo Sapiens
taacattctagaaattttgccaccaccactctttctgttgcaaagatggcatctgtgactactggggtagacaagaacgtttgttcaaactaaagaaagccagaagccaaaatttaactgcacagtaacaatgcacttttcatcatgcagccttgtgtttcctatattattcaattttctaacatgcattagaatacataaacttgtattctaatgatttaagtttgattttacaatatggaaaaaatttgaggaagaacatgacctgggaaagagaaaaggaagaacttttaccacaatgaaaatagatacattcgtacccaactatataataagaatataatccatttaagtttccagaaatatacttctcaaaactccc

SEQ ID NO: 7090 - DNA, 704 bp, Homo Sapiens
gaccatgcacaatccaggtacctctctattatatactgtgaacatcctgtcagctgcccgaatgttgtagcacaggtgctacaagagcatagccaaacttgatagaaaggaggcaatttgaaaccaaagagaataagcgtctactagaaaaatctcagagggtagaagccatcattgcatctatgcaggctactggtgcagaggaagcacagttacaagaaatagaggagatgatcacagctcctgaacgtcagcagctagagaccctgaaacgtaatgtcaacaagttggatgccagtgagatccaggtggacgaaaccatcttcctgctggagtcttacattgagtgcaccatgaagagacagtgatccagaagaagcatcttcctcagaagatctggggggatggaaagcaaaataaaggaggtgcctggatgcattatttgcagtgggataagtcgcagagtcttcaactaaacccccctctctatcccctgcagcccaggatacacctgaaagaatttggcatatttagatccattgctgtagtctcccctcatcaaatcttggcagtgggaagaaccttaaatcaacaaggttaatcatctatcagatgcatctgttcccataaagaagttacccacacctatggttacctatatccctggcaataggaaacttcctaagaagttaattttattttca

SEQ ID NO: 7091 - DNA, 678 bp, Homo Sapiens
  misc_feature (415)..(427): n is a, c, g, or t
tttttttgtaatgacccacggtgtcaggcgggtgtgtacagtggttggatggggccacagggacagccacttcctcaaactgataaaaagggcttcccagctggacttgtggcaattatttttccgttatgaagcagagaggagagagaaagggagaacagggaaggacagggacagagtgaggagactggttctcaagtgctctgttgctattaagtgttgtcattaaggttcttaaaggcccatgtcagttaagggtttgggcagggaataaaaagctgcttgcatattgaaaaaaggaacatcccaaatgtgttttactgcagagaagctgtctcccgcgggcagcaagggcagttctgaagatccactgaggtacaggaggcttgtgaatggattgttaaaactctctctnnnnnnnnnnnnngctgcgcgtgcgcacacgttactgtttgcacagattcaggatccaaggatcagcaggtcgaagactggggcagcggcaaggcccgctcgttcttgcggcccccgttcatgtgggcgtaaggctgtctctcgtcgaagctggcgcggaggaccagcaccccagggccggggccgttctcggccttgtgtcctgagtgtctgtcgggcagtggcagggaggacgaggaggccgaggggtccagggggacgctc

SEQ ID NO: 7092 - DNA, 426 bp, Homo Sapiens
  misc_feature (20)..(20): n is a, c, g, or t
  misc_feature (260)..(260): n is a, c, g, or t
gcttgaaagatctgaagganctcttcgataagccccttgaatgttgtcacaagctgcttttcttagggattgggaaggaggcagaatctggttcagggatgatgtggaaaatcttccattagctttcttccttggaatgggaggagcctctgccacaggtcaccaagaagcctgtaacaaaagtcgtgcttctggaaaggtcttgcaagccaaaggaagatatccagaaaggcccaaagtgtggtgcaggtatcacaaanggtagagaacaatgtccttgaattccaggagaggcatgtcactgggggtcaatcggcccctctcctcaagcttctggggtgtggtattggccccgtccccttgcaaaccacagtgctggaggatattgctgaagacctgtaatcccagctacttgagacgctgtgg

SEQ ID NO: 7093 - DNA, 770 bp, Homo Sapiens
gggtatcgagcagggtccgagggctgtgtcagaaggctgggcagccatggcgtcctatttcgatgaacacgactgcgagccgtcggaccctgagcaggagacgcgaaccaacatgctgctggagctcgcaaggtcacttttcaataggatggactttgaagacttggggttggtagtagattgggaccaccacctgcctccaccagctgccaagactgtggttgagaacctccccaggacagtcatcagaggctctcaggctgagctcaagtgccccgtgtgtcttttggaatttgaggaggaggagactgccattgagatgccttgccatcaccttttccattccagctgcattctgccctggctaagcaagacaaattcctgtcccttgtgccgctatgagctgcccactgatgacgacacttatgaggagcacagacgagataaggctcgaaaacagcagcagcaacaccgactggagaacctccatggagccatgtacacgtgaggaggttggggctgagtgctggccctctgcgtcttccttattaaccttgaatcctcattaaaggtttctttacccccatgaccccctacctgtccgctttaaaaatctgttcggccgccttcggcccctcaagaaacttttttaaaaccattccgtttggccccgcgcgggccacccaggtcaacgggaaccatgggcctaagcctgttttccctaggaaaatccctgggccatggacttagggccttggtaatcccccccc

SEQ ID NO: 7094 - DNA, 1302 bp, Homo Sapiens
  misc_feature (796)..(890): n is a, c, g, or t
  misc_feature (957)..(1017): n is a, c, g, or t
  misc_feature (1176)..(1176): n is a, c, g, or t
tgccccactgaaggtgtctccaccggcacgttgtactcaacttcaagaatttgctgccatgctgatgcctcaccaaaaagcaactacagctgatggttccagcatcttggacagagctgttattgaacacaatttgttgtctgcaagcaaattatataataatattaccttcgaagaacttggagctcttttagagatccctgcagctaaggcggaaaagatagcatctcaaatgataaccgaaggacgtatgaatggatttattgaccagattgatggaatagttcattttgaaacacgagaagccctgccaacgtgggataagcagatccaatcactttgtttccaagtgaataaccttttggagaaaattagtcaaacagcaccagaatggacagcacaagccatggaagcccagatggctcagtgaatccttgcagaacttctgtgcacatgacatctttttccatgttgtgcagatcagtttcactatctccaaagcatttgcatcatgaccttatacatttcaatcccttttatgctggattccgtttaaagaagacattattagagcaggaagtacaagcatttaaaatatgtagttcccatatatttcagggtctctgtgtattaagctaactcagatgttttgaaagctttttctttaaacagaggtgaaatatctgtggctaaaaagtttgagatttgtgataactttgtagtcatgtaaaacttaagtgcttcatgcctctccaaatgtggttattctaataaatggagaaatgagccaaaaccnnnnnnnnnnnnnnnnnnnnnnnnnnnnnnnnnnnnnnnnnnnnnnnnnnnnnnnnnnnnnnnnnnnnnnnnnnnnnnnnnnnnnnnnnnnnnnnggtgggcccgccgccgcgggcgccgtcccgcggcgcgcccattttttttcgcgcccctgcgcgcgannnnnnnnnnnnnnnnnnnnnnnnnnnnnnnnnnnnnnnnnnnnnnnnnnnnnnnnnnnnngcggggccaaccgcaccaccccgccgtgctgcttccccgcccctcgacgtgtatgcgtgcctaccattttcccgcctgtttgtcttccgcccccccttattataatcgcgcccgccgggcgccccggcctagcttatacctctagggacccttactaantagttgcttcatccccgctgacccccttatcgacggccgcacaacggtggcgcgcgcccccaagcgccgcttctcctccctctttctcgcgcatccggccgcctccctaccgccccggacacactg

SEQ ID NO: 7095 - DNA, 685 bp, Homo Sapiens
ggtacttgtctaaaacttgatgatactgtctatctgagggacatagccttgtcactcccacagctgccgcgggagctgccatcgtcacatacaaatgcaaaggtggcagaggtgctgagcagccttctgggaggtgaaggacacttctcaaaggatgtgcacttgccacacaattatcatattgattttgaaatcagaatggacactaacaggaatcaagtgctaccactttctgatgtggatacaacttctgctacagatattcaaagagtagctgtgctatgtgtttccagatctgcttattgtttgggttcaagccaccccagaggattccttgctatgaaaatgcggcatttgaatgcaatgggttttcatgtgatcttggtcaataactgggagatggacaaactagagatggaagatgcagtcacatttttgaagactaaaatctattcagtagaagctcttcctgttgctgctgtaaatgtgcaaagcacacaataaagtgaaaatcaaccttttcatattaggagacatgcatttgtaaaaattaataaagatgacaagtcagttgtcaatggaattgagctatctgctaagacaaaaaatgttaccctcagttcactattaaaattaattttaggagtgccaaaaacaaccaccccaactttttatccccttggcc

SEQ ID NO: 7096 - DNA, 1057 bp, Homo Sapiens
  misc_feature (816)..(818): n is a, c, g, or t
  misc_feature (820)..(820): n is a, c, g, or t
  misc_feature (822)..(825): n is a, c, g, or t
  misc_feature (827)..(827): n is a, c, g, or t
  misc_feature (831)..(832): n is a, c, g, or t
  misc_feature (841)..(896): n is a, c, g, or t
  misc_feature (946)..(947): n is a, c, g, or t
  misc_feature (961)..(975): n is a, c, g, or t
ggggggttgcggcgtctaagtgtttccggtggattcccagggactgtcggaggtgtggactctgcctgcctacctggtctgggaagatgttctaccatatctccctagagcacgaaatcctgctgcacccgcgctacttcggccccaacttgctcaacacggtgaagcagaagctcttcaccgaggtggaggggacctgcacagggaagtatggctttgtaattgctgtcaccaccattgacaatattggtgctggtgtgatccagccaggccgaggctttgtcctttatccagttaagtacaaggccattgttttccggccatttaaaggggaggtcgtggatgctgttgtcactcaggtcaacaaggttggactcttcacagaaattgggcccatgtcttgcttcatctctcgacattccatcccttcagagatggagtttgatcctaactccaacccaccatgttacaagacaatggatgaggatattgtgattcagcaggacgatgagatccgcttaaagattgtggggacccgtgtggacaagaatgacatttttgctattggctccctgatggacgattacttggggcttgtaagctgagcctggtggcctcctacccttggtcctactctaggaagtgtgattgtcacacttatcatgttgtccagaggtccagtctggctgctgttgtggaggcaaggaaggcaactcatcccagaaggcatctggtgcttcttgtagcttaactactgcctcctcatttttcagtatgtgttctaagtataaaaagtccttggttctcatggaaaannnancnnnnanaatnncccccaaannnnnnnnnnnnnnnnnnnnnnnnnnnnnnnnnnnnnnnnnnnnnnnnnnnnnnnntatcttaccccccactatctttcggacaccccccattaaaaaaacaaatnnaaaaattgtggggnnnnnnnnnnnnnnntaaaaaaatttcttaaaaactttttttggggcgcggggcccccctttaggcaaggggacaaggggccaaaacctttttcctc

SEQ ID NO: 7097 - DNA, 1150 bp, Homo Sapiens
  misc_feature (452)..(488): n is a, c, g, or t
cgcatgtgaatataaccactgttaaaaaagcaggctgtacggtccggtattcccgggatatcgtcgaccacgcgtcgcagccatccaggcaagagcactctgggttccacagcacagcagacatggaacgctgaagtctctgaaagtgaagttgtaaaaagaaaaggaatgaaataaccgacccatcatcttctcacccaccctcattgcattccgctgtagtgaaaggacgagccatttctgggcacgtggcagcagtcgctgatctcccagctgaggggctgagcactggaatgctgtggctgcactggccccagtccatagaggggtcaactatgctggctggactggctgccttgttcctggcctaggacttagcttcataactatcacctgcaccgactaggctgaggtgctggtacttgccccaacccctacttttgtatttatannnnnnnnnnnnnnnnnnnnnnnnnnnnnnnnnnnnnatgtttggtctggaccagcttctgccagcccctggcctttactttcttccttgcctatgcagggcaaacaaaatgtgaaattctgccctcagctgagctgagtaagggctcctgggggttggctggagatgggtgtggcatctgtccaggcctggaaccgtctcaagacagtgctggcaaaagcttgcagtattgagatgctaaggagctgatgccacctctttgtcttcccctaaaggagaacatggggataacatgggtgtgtgcccacaacactctaggtgcagagcccctgtggcaaagtatcacagggtgtgggtggggattaccctgaatcggggattctaatgatggaagcagcagagcctggtgggtgattctctcaacagaaaattgcaatcatgcaggggctgggagggttaggatgaaaaaactggggccattggaggcccactctaggtgggagggagctgattttggggtgggggttgggtctagcgggcaatactgaaggggttaaacaggtttttgctcctcaagaatttgtttgcctgggcccaggattggagggcttcacaccaataccctgtgtatacaagaatcagatttataatacttccccttttttgttccgtatgaacactataaaccaaattattttg

SEQ ID NO: 7098 - DNA, 702 bp, Homo Sapiens
cctcagcctctcgaagtgctgagattacacacgtgagcaactgcgcaaggcctggtgtttcttgatacatgtaattctaccaaggtcttcttaatatgttcttttaaatgattgaattatatcttcagattattggagactaattctaatgtggaccttagaatacagttttgagtagagttgatcaaaatcaattaaaatagtccctttaaaaggaaagaaaacatctttaaggggaggaaccagagtgctgaaggaatggaagtccatctgcgtgtgtgcagggagactgggtaggaaagaggaagcaaatagaagagagaggttgaaaaacaaaatgggttacttgattggtgattaggtggtggtagagaagcaagtaaaaaggctaaatggaagggcgagtttccatcatctatagaaagctatataagacaagaactcccctttttttcccaaaggcattgtaaaaagaatgaagcctccttagaaaaaaaattatacctcaatgtccccaacaagattgcttaataaattgtgtttcctccaagctattcaattcttttaactgttgtagaagacaaaatgttcacaatatatttagttgtaaaccaagtgatcaaactacatattgtaaagcccatttttaaaatacattgtatatatgtgtatgcacagtaaaaatggaaactatattgacct

SEQ ID NO: 7099 - DNA, 536 bp, Homo Sapiens
agctggtggttcagccccttctccaacccctttcataagcttgggccactgcctgggacccagcagacactgcccaggactctttagtgcactcactcttgtctgccccctaccttccctcctggaaccacactacttgaatcaccattactttgcctcgctggcagagttgggtcaagtgccctctccttgaccttgagatgaaggtcaagagcacagggaccaggccttggttaggctgagctcccagcaggacaccgcctgcagaaaggacctgccctgataatgtcccttccccagattctcaagcagatgcccaagggaggtccccacagagccagagtgcctgaggcttcctgcttgagaacctgccccctggatcttggacacttacagattgagctgtatgaattcagcgggtctcactccagagggtcagaacgtttgctttagttttttcatctgttttgttccttgagtcagtgctgttgatgacgagttgtcttgaataaatcatgtgttctttgcaaaaaaaa

SEQ ID NO: 7100 - DNA, 339 bp, Homo Sapiens
gaaaagccagaccttgtgcccttgttttgaacaccgactgggaagatggggcttaggtaacagccaaacctggctgtcagctgtgtgggagccaccaccctctctgggaagagttcctgcttctgtatggcaagcataaatcaagctcagtctgggttatggagaagttgaaaattgttttgttcctcattagtttataattgtatgaaatacgattttaatgaaaacttttcagaattcacgtttgtgtagatatttcagagaaccatttttactttacatcctaaaactgccttttcctatggttttgtcaataaaacactatgatgttggtctgtt

SEQ ID NO: 7101 - DNA, 209 bp, Homo Sapiens
ctgcgatcccttgagaaatcagatctggcagccccgtggctgtgtgctccctcgaggcaagggctgcctggaactgcctgaagccagagccgccttcccttagcaagagtgtggcgcctccaggcccacctggctcacccactgcctctttgtcacctgcctggcctgctaggacaagagcctgcaacccctgcctttttctatctctt

SEQ ID NO: 7102 - DNA, 490 bp, Homo Sapiens
ccacttcctctgccggccagagactcctccagctggctgaggctgtcggggagcaggaggtgtggggacagggctggatcctcatcctctggtggggcggtgggggtcacagagggtgcttcggggacagcggcactggagatcactggggccgggctcgtcgaggtcccctcaggagagggcgctgggctctggggggcagggctggaaagaggtaatggcacatggggcacatgtgttggagaatgtcatccatgtgtggtgggaatacagtccaattcagtgggagtttgtcatggcaggagaaagtgccagggtgcccctgcagggccgcggtgacagcagcccaggaaaacctcgtctggtgctgaaagccagtgctttgagtcatgccttcatttgtttagtcgacggatatttactgagcaccaaccctgtcgcaggcacttttttaggaggtaggtatcagcatgatggaaacagacaatgc

SEQ ID NO: 7103 - DNA, 823 bp, Homo Sapiens
tcccatcagccaacgcagcacaacgacacatggcactaaaattacggctaggtagcgaggcctgggtgtgcgaattcggcacgaggagtggagttcgctgcgcgctgttgggggccacctgtcttttcgcttgtggtccctctttctagtgtcgcgctcgagtcccgacgggccgctccaagcctcgacatgtcgtacaactacgtggtaacggcccagaagcccaccgccgtgaacggctgcgtgaccggacactttacttcggccgaagacttaaacctgttgattgccaaaaacacgagattagagatctatgtggtcaccgccgaggggcttcggcccgtcaaagaggtgggcatgtatgggaagattgcggtcatggagcttttcaggcccaagggggagagcaaggacctgctgtttatcttgacagcgaagtacaatgcctgcatcctggagtataaacagagtggcgagagcattgacatcattacgcgagcccatggcaatgtccaggaccgcattggccgcccctcagagaccggcattattggcatcattgaccctgagtgccggatgattggcctgcgtctctatgatggccttttcaaggttattccactagatcgcgatgataaagaactcaagggccttcaacatccgcctggaggagctgcatgtcattgatgtccagttccctatatggttggccacgcacctactattgcttggtctaccacggaccctcaggggggggaggttaaacctatgtaggtgtctcccgcgaaacggttcaaaagggcctggaaacggaagtttctca

SEQ ID NO: 7104 - DNA, 567 bp, Homo Sapiens
actgaagtcgtccacgaaatcacgaatatgcagaatgtaggaccatgtgatgacatcgctcgaagcggcccagagtccctgcccgtgggacatcatgacatcatcactgagtgtcgccacattccagaccacacagggcttcatcgtaactgcttctagagatgggattgtgaaggtgtggaaataaaacctactgatttgtataaattttaatagttataaatataatactataactcgagaaaacgcatttctagagaacagattcatttgcttaattttcaaaattatgtctccatattactgtttcatgactgactgactaaatgacacccaaaatggttaagatgtacttgactagtttacttatgcatctctttgcaagaatcagccagccaacaatgtctgggatttttattgtatatgttatagaggtgagaaatgtaaaatatgaaaatgaatatgtttattttgtattgaaaaagatggttgaaaagatggttgtaagctattatagtataaacacatttttgctattaaaaatgctattcaaagcagttaacctgt

SEQ ID NO: 7105 - DNA, 705 bp, Homo Sapiens
gacgattcagaaccgctacgtggcagcactctataagcaagtgggctgcttcctctttggctgtgccatcagccagtctttcacagacattgccaaagtgtccatagggcgcctgcgccctcacttcttgagtgtctgcaaccctgatttcagccagatcaactgctctgaaggctacattcagaactacagatgcagaggtgatgacagcaaagtccaggaagccaggaagtccttcttctctggccatgcctccttctccatgtacactatgctgtatttggtgctatacctgcaggcccgcttcacttggcgaggagcccgcctgctccggcccctcctgcagttcaccttgatcatgatggccttctacacgggactgtctcgcgtatcagaccacaagcaccatcccagtgatgttctggcaggatttgctcaaggagccctggtggcctgctgcatagttttcttcgtgtctgacctcttcaagactaagacgacgctctccctgcctgcccctgctatccggaaggaaatcctttcacctgtggacattattgacaggaacaatcaccacaacatgatgtaggtgccacccacctcctgagctgtttttgtaaaatgactgctgacagcaagttcttgctgctctccaatctcatcagacagtagaatgtagggaaaaacttttgcccgactgatttt

SEQ ID NO: 7106 - DNA, 515 bp, Homo Sapiens
  misc_feature (420)..(428): n is a, c, g, or t
agcctcattgttttcggctgccatgaaaggggattcaaaaggctttgaaaaaataagtgaaacatgactgatcttgaacaaaaacgcaaaagcttaaatatttgatacaagtctacttagctacaacatactttacattgttgcctatagttatctcacaggcactgacattttatatttagaaaatacttttaatctttctaatctttttttgtaaatattagtgtccattctgtatgactcgctaacctactttgcaaggctttgggcaacattttagctcattaacttcaagatgatgtgtcatctgtataggtcaaagaatgggacttctgaactgaggaatttgctgttgacagccaaagtatagtgtacaagattgatgtaacttgatatgtatttttgttgaagttttttgtnnnnnnnnnttatttacaatgttatttgaatgatttttttaaatgctgtgaatctatatttgttgttttatatattaaaattcatttgccaaactc

SEQ ID NO: 7107 - DNA, 730 bp, Homo Sapiens
  misc_feature (139)..(199): n is a, c, g, or t
gttctgggaccaggtctgggccctaagttaaaggaacacgcaatgcaaagtcctaagttaggaatgagaaaataatactaagcatttaaccatgttcagataccatgtagagcgctctggcttacagtaatggataaannnnnnnnnnnnnnnnnnnnnnnnnnnnnnnnnnnnnnnnnnnnnnnnnnnnnnnnnnnnnatactagtaatgttaattacagttacacaaagggctacaaaggtaaacataggctgcagtaacagtatatgatagagtgagctaatctagacttcagtagtagatagaaacattagagaacactttcctgagagaggctttgaagttgagacctaaagggtgactaggaggtaaccaggcaaagatgcagagtgattagcacatgcagaaactcttaaggttggaaagaatttgacatgtttgagaaacctgccaaccagctaagccaaccaactaaacaaaacaccaaaaaagccattgtaactgaagaaacataagtgaaggagagagttaaaattcttgacaaggtagacaggtcagatcaaatagggcattatcctgaagccattgggaaggcagaagttcagcagagtagtaagtgcgtttggaccaatgtcagtggttgcaatgtagagaaagggtcagggagagggcaagaatagatttagggagattaattaggaggctattatattggttcagtaggagatg

SEQ ID NO: 7108 - DNA, 444 bp, Homo Sapiens
cttattaccacaaagtagattttgagtgtatcttggataaaagaaaaaaacctcttccgtatggaagccataatatagcattgggacaactaccagaaatgccctgggaatcaaatatcgaaatagttggatcaaggctgccaccaggggctgaaaggattgctttggaatttttggattcaaaagcactttgtagaaatatccctcacatgaaaggaaaatctgctatgaaaaaacgacatttggaaattctggggtatcgtgtaattcagatttcccagtttgaatggaactctatggcactgtcaacaaaggatgctcggatggactacctgagagaatgtatatttggagaagtcaagtcatgtttgtagtttttatttaaaatgaatgttatcgtgtgttacatttggacctattttaataaagtggcctgtctcaatt

SEQ ID NO: 7109 - DNA, 877 bp, Homo Sapiens
ctgggttaagctgactttattaggtccaaagacagctgtgaggggatgtggcaaaggtgtctgggagctgaccttgcttatgcatccgagggctggggcacagggcgggcttgtgctaagcaccttcttgcctagtgcccaacggcttggaggatttccagggccaagggagccaccgcactgtcggcaaatgaaccactcccaggggccagccgctccagagcccgcagaggctgcctgcattcttgaggctctccaagtgcttctcattggaggtgatcattcttctgagaatccttaacagaagcttctgctcctttgggtcctccttggatgtcagtaaatgagcaaaaatttccacattttcaggagagaggctgtccgggttttcccttccatacagctgaacccagtataggacaggcacttggatgaaaccatcaaaaatcttcaggaatcttcattaggaaagcaagtggaaatgagcaggcttaatcaggtctgtcaagaggtcttgttgagcagcagcaggtctttctgcagcctgaagggtcctctcctgagccagacttctgggcctgcaaagccagccgtacaataccggaggtataggtcagcatgctgtgcaaaatatcaagcagggaaaagagcagtggagctgccatctcattgttgtttttattgtccacatccaagcacagtgtggcagtttcagtgagcaggttacagatgtgactgacaagtccttgttcataaagtagttccatattcgaatctttgcaggcaactagattgctgagtaatgcaatcacactttgcatggtattacccagaatgctctcctgatgttccagagttacttcaaaaatgagtggga

SEQ ID NO: 7110 - DNA, 654 bp, Homo Sapiens
agagacctggatgggtgagcactctgatgacatcacagccagcctgtgagtgatgttattatgggagtaactaccaggtacaagtcactcccagcccctggtgtaagcatcaaggtggagtgctaaaatgaaaaccaatcgaggctgcatcctatctcaaagattaggtgatatttggcacccagaagctggagtactctggggtgaaccaaccagaattatctgccaaaggaaaggaaattcttgagtgatttgggagcctagagaatgccctctgtgggaagagagggagacaacgattgtggtactgttcaattggagaccttatcgccaccctccagcagcctggagaactagcagaaagtcatcctgctttgcacttgctctgagcatttgcaaaaagtgtgcatagtttgccagaagcctaactttcccgtcaacacctttttaaaacctacttaccaattttatggactacttatttgaccttgtatgtgatttacaatgtgcacaaaacccaactggtctactttatgaccaggaagacggtcctactgagctttggaattgctgtacctgtactttgagctataatatatagctcaggtattttggggatattgcatcccaatcttaaatgtgtagctgatagaa

SEQ ID NO: 7111 - DNA, 1059 bp, Homo Sapiens
ctcggccctgtccgcgccgaagcagcccgggactgcgcacgccccgcgtgccgacatgggaaagtctctttctcatttgcctttgcattcaagcaaagaagatgcttatgatggagtcacatctgaaaacatgaggaatggactggttaatagtgaagtccataatgaagatggaagaaatggagatgtctctcagtttccatatgtggaatttacaggaagagatagtgtcacctgccctacttgtcagggaacaggaagaattcctagggggcaagaaaaccaactggtggcattgattccatatagtgatcagagattaaggccaagaagaacaaagctgtatgtgatggcttctgtgtttgtctgtctactcctttctggattggctgtgtgttttccctttccctcgctctatcgacgtgaaatacattggtggaaaatcagcctatgtcagttatgatgttcagaagcgtacaatttatttaaatatcacaaacacactaaatataacaaacaataactattactctgtcgaagttgaaaacatcactgcccaagttcaattttcaaaaacagttattggaaaggcacgcttaaacaacataagcattattggtccacttgatatgaaacaaattgattacacagtacctaccgttatagcagaggaaatgagttatatgtatgatttctgtactctgatatccatcaaagtgcataacatagtactcatgatgcaagttactgtgaccacaacatactttggccactctgaacagatatcccagggagaggtatcagtatgtcgactgtggaagaaacacaacttatcccgttggggcagcctcgatatttaaatgtactttcgccacaacagcaaaaactgaaagagatggatttacagcaagaactatctaatggatatttcccaaaccttcccatgaagaggtattttcctaataaggggaccttaaaatttgaaaaaacttagaggttacccctttttaagagaaaacgcttaaaggattggggggaacctggccatttctttttaat

SEQ ID NO: 7112 - DNA, 594 bp, Homo Sapiens
  misc_feature (480)..(521): n is a, c, g, or t
gtaccctccctcccacttgctagcagagccagcgactattcttattctaccatcataaggaacaggaagtttgttttctcataaaattgaaccagagaggctctacacttcggtgtgccaggcccagcaaaggaagcaatgaagcatattactgaacacagagagactgaagaaaacctgctggtggcatggaagtcagatctctaaaccaacttggttccaaggacactggcagcagatacagacttacctctggagaagctgaaagctctagctaaaatacatacagataatgacatctggaggtttcctaatgaaatgatcaggtccccaaccaatcatcttgctatgaaatccctcagagaacaagccacatccacaaacacagagctttcagtcgactttttaatggactaattagtcaatttatgaatggacaaccaaaggtcagcaggcatttgaagaaaggctctaatacgnnnnnnnnnnnnnnnnnnnnnnnnnnnnnnnnnnnnnnnnnngactgccttttgactgatgacttatgtttagctctgatgtgctgacagggacaaaatgctggagaagataaaa

SEQ ID NO: 7113 - DNA, 825 bp, Homo Sapiens
  misc_feature (13)..(13): n is a, c, g, or t
  misc_feature (100)..(100): n is a, c, g, or t
ctgatgaggcacngtgacagctgtagggatgacttgccacagaattgcaactcacaaaaactgtgctaaaggcttggaactggatccaacttactcctgngaatatcaaattcagctcgtttatgccaaaaccttccaggcatctaataaatttctataattctcaatccagtactgaaccctttcatctttaagaacatctaaaggtgaaccctgtaacatacagtaacttgctgtttgaacatctccagttctatcaacataactctccattaagtccactccatctttagtaaggcctgtaagcaaaattccttccaaatttccagcctctttcatttcattggtcaacttttcgatgtatctatttaactgagtatcactaaggaatttacaagcaaatgccactctgtcacgtactgcaactttgttttcatacaaaactccatcgtaagatcctgtttcacttgtcagaaatgcaaacatgacacacaaatacgggttatttagctgtaatcgcagtgtgctacacatttctctccaaagggagttcttctcatccgtataacccgataaagccattgctaccacattgagattcagatctcctttttcagaagatgccccttcattcaggatttggattgctcggcgaatatccaagttgaacaatgccacagcagcagctctttcccattccccttcttgtacaagggagttcaaaaatggccccacgtctacatccgttcctttctttatccacccacaagctgtaaagctaagattctctcttcatttaaattttgaatatcactttgcttatcc

SEQ ID NO: 7114 - DNA, 697 bp, Homo Sapiens
  misc_feature (524)..(642): n is a, c, g, or t
cctccactacacacagacagtgtttcaagaaaagaagaaaacaccagaaccatcttatacatttatggcatctggatcctacaggcatttgcaattgcagtccttgaaacaaagagagagaagtccaacagtcagttgttaatggatactttataagctaagctataagaaacaagcaaagtaaaagcagcaaaacagggtaatcatcatattaatggcagaaaacaaaagtgaagatccacaaactgttgctgtgggtatataaatatcttaactaaactgggatacaacaggcctagtaaatttgtcttctcaggaattggaatcgagctattaaaagtaatcacagttcgcaaaggaaactgaagctgaaaggatacacagcaagccaacacaatgcagaggtgaggtcaagagggtcataagcaagcaaaacttatgaggaagatgaagccataagtaagcagaacctataaataggctaaaaatatgagatggagggctgggcgcaatggctcatgctnnnnnnnnnnnnnnnnnnnnnnnnnnnnnnnnnnnnnnnnnnnnnnnnnnnnnnnnnnnnnnnnnnnnnnnnnnnnnnnnnnnnnnnnnnnnnnnnnnnnnnnnnnnnnnnnnnnnnnncatggtggctggtgcctgtaatcccaggtattcgaggttcaggtagaagacattt

SEQ ID NO: 7115 - DNA, 744 bp, Homo Sapiens
  misc_feature (666)..(666): n is a, c, g, or t
ctctgaaaatctgagcaatacggagatccttttattagtaaaactgaatcattactcatactacaagggctttcacttttaaaatgtaatccatcattgcttgccatttttatgaaaaccaaagttgaaaagtcttctgaatcacaggctatgtatagccacacatgcatgacttcaggctagcataaagacatgtctgctcctgagcctcttcttttaaagggcaaccacttgtataccctctggtggccactcctccttcgccactccaaggcagccctggtactttcctaagtggcccctcctacagagcacttgccggcatttggcctgctgctggtgaagacgccccttactagcttcataaatgtttttctgcaagcagggatcccagacacatactttggtttctaagtggttcaggtactatggtggaatttgaaattctcaatccaaaattacccttaagtggaagtcctgaagtacatgccatgtactccccctttatttctaccttggatcaatggcctctgcggagtgtagtgaaagacatctttttattatgatctacactttaaaaaaccaaaggctgcctgtattacatttgctttggggagttgttaagactctgttttttctactggcttcacattaacaataattttngttgaatttgaattcttaaaaatctactgacaacatttaagtcagtgtgaggaaatgtgtgatgcatgttagaaggtg

SEQ ID NO: 7116 - DNA, 543 bp, Homo Sapiens
  misc_feature (54)..(54): n is a, c, g, or t
  misc_feature (295)..(295): n is a, c, g, or t
  misc_feature (326)..(326): n is a, c, g, or t
  misc_feature (458)..(458): n is a, c, g, or t
cctagaagactatctggaaatgattgagcagcttcctatggatctgcgggaccnttcacggaaatgcgcgagatggacctgcaggtgcagaatgcaatggatcaactagaacaaagagtcagtgaattctttatgaatgcaaagaaaaataaacctgagtggagggaagagcaaatggcatccatcaaaaaagactactataaagctttggaagatgcagatgagaaggttcagttggcaaaccagatatatgacttggtagatcgacacttgagaaagcctggatcaggaactnggctaagtttaaaatgggagctggaagctgnataatgctggaattacagaaatattaggagaggcgatctttggaattagacactccttcacaggccagtgaacaatcaccatgctcatttcacatactccagtggaaaaaaggaaatataatccaacttctnaccatacgacaacagatcatattcctgaaaagaaatttaaatctgaagctcttctatccacccttacggtcagatgcctctaagg

SEQ ID NO: 7117 - DNA, 1120 bp, Homo Sapiens
  misc_feature (468)..(468): n is a, c, g, or t
ggaccggtccggaattcccgggatgaactcagcagcggaggctggacagcttgcatggcgcttgagaaattccatcgtgcctggctcacataagcgcttcctggaagtgaagtcgtgctgtcctgaacgcgggccaggcagctgcggcctgggggttttggagtgatcacgaatgagcaaggcgtttgggctcctgaggcaaatctgtcagtccatcctggctgagtcctcgcagtccccggcagatcttgaagaaaagaaggaagaagacagcaacagtgaagagagagcagcccagagagcgtcccagggcctgggacttaccctcatggcctggttgggtttacacaacatttggacagaccttgcttgccttaactccttgattcaggtgttcgtaatgaatgtggacttcaccaggatattgaagaggatcacggtgcccaggggagctgacgagcagaggangaagcgtcccttttccagatgcttctgctgctggagaagatgcaggacagccggcagaaagcagtgcggcccctggagctggcctactgcctgcagaagtgcaacgtgcccttgtttgtccaacatgatgctgcccaactgtacctcaaactctggaacctgattaaggaccagatcactgatgtgcacttggtggagagactgcaggccctgtatacgatccgggtgaaagactcccttgatttgcgttgactgtgccctggagagtaacaaaaacaccagcatgctcacccttcccacttttccctttttgatggggacttcaagccccctgaagacacctggaggacccccctgcactgctttcttccaagccccaagggagttatccagccaaaagccaagtggctttctgtggaaaactgtggggaaaaaagacccgtggggaaaacagggctttgaaacctgcacccatttttgcccccaaaaccctgaacaattcccccttcatgcgaaattcccccatcccgggaattttcccggaaccaagaaaatatcttggccacctccccgtgggaacttcccccccaaaaactctgggaatttttccacccaaaagtccttttccaagggaaaccaggaaagttctttg

SEQ ID NO: 7118 - DNA, 410 bp, Homo Sapiens
tcttgctgataaccccagtctatcagtaaaaagccttctaattactatcttttccactggtatggaaaatcttaaaaatcaaaggacttgattttggtgatctttactcaagtggcactccatgaaaaaaactgttccaattaagcctcaattgtgattaccaaaatctttaacccaaaccaataacccaggtggatatttaaagattagtctgagtactggtaaataacttatttggatatcaacacatataaatatacacttctcaacacaatgtaaagacacatgctaaaattcataaaatagcgtctgtctcagatacaggatatcagatgtcatactgtttctttacaaatatctcaagtctaaattgagttttagaaatgcttaatgattaacaaaacagaaaa

SEQ ID NO: 7119 - DNA, 439 bp, Homo Sapiens
taaaggaacatgtcaagggttaatcctatgactcagtctgacaaaacgagtcagctggagacagggccaatttttaaacctgatttcagacaggctgcctgcacagtagttctgaactgtcatgcactttttatccagaattgtttccacccacaacgctacataatcacttatgtgttactctaagattatgtgatctgactcaatattcatgtcacctagttcaacaatataaaaaaatcaccaagttttacagcaagataggaatcattgtacacactagcaaaatgactagtgaaaatgccagaggaccctgacaaaataccgtaacttggagccatataccttttattagcaaactgatgattcctggtttaaagattattggcatttcaccaattttcaaaatatgggcttttcctcccaaatggttatcagg

SEQ ID NO: 7120 - DNA, 353 bp, Homo Sapiens
tgggaaggggctaagtgactaattggttcaggtactttttttctggggaggtagacttctgcttcttttttgtaaaaatgaacaaacgtagaagtggcaatgctgtaacctggtgcctgctgctgtgcagccacaatacacacaattgtagcctgatttttagaagtgtgggtaattttttaaagaatttcccccttgagtagcagctgaggtcattgacaactgaagtgatggtgtggacatagagagaggggaagggttggaaaggagtaagtgatacactgctggaatttgtttcctgcctatgaaataaaattatttttcagaattaaatttgaaaacttgcactacaa

SEQ ID NO: 7121 - DNA, 466 bp, Homo Sapiens
ggggtcatgcatagtgctgcttctccaacacaggcaccaatccttaatccctctatggttacaaatgaaggacttggtcttacaactacagcttctggaacagacatctcttctaatagtctaaaagattgtcttcctaaatcagcacaacttttgaaatctgtttttgtgaaaaatgttggttgggctacacagttaactagtggagctgtgtgggttcagtttaatgatgggtcccagttggttgtgcaggcaggagtgtcttctatcagttatacctcaccaaatggtcaaacaactaggtatggagaaaatgaaaaattaccagactacatcaaacagaaattacagtgtctgtcttccatccttttgatgttttctaatccgactcctaattttcattgattaaaactcctttcagacatataagtttaataaataacttttttgttgactttcaaaaaaa

SEQ ID NO: 7122 - DNA, 580 bp, Homo Sapiens
ggcgaactgtccctcagtgaagttcgggaatgtcttaaacttgaccaggatcataaaaggtgtcttgcacactataaacaagtaaagaaacttaataagctgattgagtcagctgaagagctcatcagagatggcagatacacagatgctaccagcaaatatgaatctgtcatgaaaacagagccaagcattgctgaatatacagttcgttcaaaggagaggatttgccactgcttttctaaggacgagaagcctgttgaagctattagggtttgttctgaagttttacagatggaacctgacaatgtgaatgccctgaaagatcgagcagaggcctatttgatagaggaaatgtatgatgaagctattcaggattatgaaactgctcaggaacacaatgaaaatgatcagcagattcgagaaggtctagagaaagcacaaagattattgaaacagtcgcagaaacgagattattataaaatcttgggagtaaaaagaaatgccaaaaagcaagaaattattaaagcataccgaaaattagcactgcagtggcacccagataacttccagaatgaagata

SEQ ID NO: 7123 - DNA, 874 bp, Homo Sapiens
ggggctttgaggcagtaccggaggagaaagatggcggctaccttactagctgctcggggagccgggccagcaccggcttgggggccggaggcgttcactccagactgggaaagccgagaagtttccactgggaccactatcatggccgtgcagtttgacgggggcgtggttctgggggcggactccagaacaaccactgggtcctacatcgccaatcgagtgactgacaagctgacacctattcacgaccgcattttctgctgtcgctcaggctcagctgctgatacccaggcagtagctgatgctgtcacctaccagctcggtttccacagcattgaactgaatgagcctccactggtccacacagcagccagcctctttaaggagatgtgttaccgataccgggaagacctgatggcgggaatcatcatcgcaggctgggaccctcaagaaggagggcaggtgtactcagtgcctatggggggtatgatggtaaggcagtcctttgccattggaggctccgggagctcctacatctatggctatgttgatgctacctaccgggaaggcatgaccaaggaagagtgtctgcaattcactgccaatgctctcgctttggccatggagcgggatggctccagtggaggagtgatccgcctggcagccattgcagagtcaggggtagagcggcaagtacttttgggagaccagatacccaaattcgccgttgccactttaccacccgcctgaatcctgggattctagtatgcaataagagatgccctgtactgatgcaaaatttaataaagtttgtcacagagaaaaaatattaaaaacaaaaggggggggcgcgcataaagttacccccgagagg

SEQ ID NO: 7124 - DNA, 619 bp, Homo Sapiens
gggacagctgcccggtactccagtgatcgccgcggctcgctcgcgccccggaaactgccccttctcgggggtcatgatgggcagcaagatggcgtctgctagtagggtcgttcaggtagtcaaaccacacactccattaataaggtttcctgacagaagagacaatcctaaacccaatgtatcagaagctttgagatcagcagggctaccatctcactcttctgtaatttcacaacattctaaaggaagtaaatcaccagatttgctgatgtatcagggtccaccagacactgcagaaataataaaaacattacctcagaaatacagaaggaaacttgtgtctcaagaagaaatggaatttatccaacgtggaggtcctgaataaccatggtggctgctgtttgtcatcagacaatagaattgtctttacaataaaggacttccaaaatgacagatgagaaactgtatattaaacacctttaataaatattatgaaaaaaatgaaatatagaaaatttagatggacacttgtatttcctaatttatgtatcttggtcagcttctccacaagcttacctaattgtttatatactttatacttattaaagtatacattttc

SEQ ID NO: 7125 - DNA, 881 bp, Homo Sapiens
  misc_feature (404)..(412): n is a, c, g, or t
tgctaggtactctagaggatctccagttaagcgtcagggatccctggtcatcctaataatgggatgagggaagtttccagcagatttcaggctgttcttaaagtttttgttggtcattttctcaatagtacatgaaatcaagatgcttatgagcatggaaatgtatttaaagtttttgcttgtgtcctcctcagtcagaatagaaaagtaactgaaatactcttacctttctgtccttgataaaatagtaaagaaaaccaaacaaacccaggcctgatgggaaaaatgattcctttattctagcaacttactttctgttggtatgggaaatgttatcaatttctattactaaagttcatatcacaaaatgatatttaataataaccttggggtaaatcatgaannnnnnnnnctacgtgtgagtataaaagacaaaagttgaacagcatggaatctcattgccaaattattagtgaatgtatagttcaggtattctttgagacacacagtatcattaatttccgaattgtatttcagtgttattttttgtttgtgaccactaagcttctgtcttaatacaaagctgttaccttctacagaatttaagtctgaagatgtaaagagagaacaggccttgtgtaacagaagatactcttttttatgctccttactgtgatcacagaaaaattaaaaatccaagtgctctctagatttgttgataaacattttatgcttgcatttaaacttgaaatgtatgagcagaatgagacaatcagttaaatcagaaatgagaagtattataatgtaaaggccttgttttgctgtagcaataaaatgaccaagtgcaatgacttgatttaataaaatcatattttaaaagt

SEQ ID NO: 7126 - DNA, 1651 bp, Homo Sapiens
ccacgcgtccgcggacgcgtgggagactcggagagatggcaggcggaagacaccggcgcgtcgtgggcaccctccacctgctgctgctggtggccgccctgccctgggcatccaggggggtcagtccgagtgcctcagcctggccagaggagaagaattaccaccagccagccattttgaattcatcggctcttcggcaaattgcagaaggcaccagtatctctgaaatgtggcaaaatgacttacagccattgctgatagagcgatacccgggatcccctggaagctatgctgctcgtcagcacatcatgcagcgaattcagaggcttcaggctgactgggtcttggaaatagacaccttcttgagtcagacaccctatgggtaccggtctttctcaaatatcatcagcaccctcaatcccactgctaaacgacatttggtcctcgcctgccactatgactccaagtatttttcccactggaacaacagagtgtttgtaggagccactgattcagccgtgccatgtgcaatgatgttggaacttgctcgtgccttagacaagaaactcctttccttaaagactgtttcagactccaagccagatttgtcactccagctgatcttctttgatggtgaagaggcttttcttcactggtctcctcaagattctctctatgggtctcgacacttagctgcaaagatggcatcgaccccgcacccacctggagcgagaggcaccagccaactgcatggcatggatttattggtcttattggatttgattggagctccaaaccaaacgtttcccaatttttttccaaactcagccaggtggttcgaaagacttcaagcaattgaacatgaacttcatgaattgggtttgctcaaggatcactctttggaggggcggaattttccagaattacagttatggaggtgtgattcaggatgaccatattccatttttaagaagaggtgttccagttctgcatctgataccgtctcctttccctgaagtctggcacaccatggatgacaatgaagaaaatttggatgaatcaaccattgacaatctaaacaaaatcctacaagtctttgtgttggaatatcttcatttgtaatactctgatttagtttaggataattggttctagaattgaattcaaaagtcaaggcatcatttaaaataatctgatttcagacaaatgctgtgtggaaacatctatcctatagatcatcctattcttatgtgtctttggttatcagatcaattacagaataattgtgttgtgatattgtgtcctaaattgctcattaatttttatttacagattgaaaaagagggaccgtgtaaagaaaatggaaaataaatatctttcaaagactcttttagataaacacgatgaggcaaaatcaggttcattcattcaacgatagtttctaaacagtacttaaatagcggttggaaaacgtagccttcattttatgattttttcatatgtggaaatctattacatgtaatacaaaacaaacatgtagtttgaaggcggtcagatttctttgagaaatctttgtagagttaattttatggaaattaaaatcagaattaaatgcgaaaaacatgtttttcattttaattttatttcttgt

SEQ ID NO: 7127 - DNA, 420 bp, Homo Sapiens
cttttaaatcataacttttaatgggattccattttagtctttgtgaagacataaggttgttggcaggcatctgtccctgggagcatccaagcagaaaagactaagactcccttgtagacagatcactggccgccactgaagtgtgtctgcatggcaccacagggctggaagacccttgaaggcaggaattcaaggaaatgtatgatgaattttggcattgccatcaaaagcagaacaggcatggaaaacttgggtgagtgggcgagacaacctcctcaccacagcagagttccatccatgcctggataatgagggagggatttgtgtccactgcagtggggaaccatgaaggacacatcaagggtgtggttggcctgtggtgctctttggaggaatgaataaaaatgaatagaaatccta

SEQ ID NO: 7128 - DNA, 536 bp, Homo Sapiens
aatgcctgttccatcctgtttcattgctaggaaggacactagataaagccatgagcttgagatggtgtacttgaaaggaccgtttcaagatcaggttttataacacactcattatttatttcttctgtggagaggagaaaccaaattggattcaagtatttttctgatagtaatctatgtttcttagaataaagcaagttcatatctgagccagagggcataattatgtcagaataaaatataattatgtcggaataaaatgccctgtactaaagaggtcaactaacaggctgggaaatcttaagttttgtttttaagacaaatccttgaactctctgtgcctcgtttctcatccctaaatctgtgcaactcacctcacagggagttgtggagggtaatatactgctaatttgttcagtgtttcacaacaataaattatgcctaagatctgataaaacatagcaaacctcatttatgtaagtagagacaagcatggataagacttacagataataaagaaaattcattaaaatttt

SEQ ID NO: 7129 - DNA, 609 bp, Homo Sapiens
cctgcctgtccccagaggagccccaccagggagcagctgccccctcatcagagacctgcagagtcaaccaagcacaggttagagtcccaggaccggaaaccaactgtgggctttctgtacttctcatagctttggagtctggctgtccatcaggaggtcccgagggctctctggggcctgaggctcccacacctgctctcccctggcctcaataaaaccaggtgcatgcctgttcttccatccacaccccagggctgcccaccagctgacaggcaccatcaactggcagcaacagagcaggcgcaggtacaaagaaggcagctcactcctgctcttaggagatccaatcagatctgccctgtacagccatgtaggctgtgcgctgcataactccagggacatgagtcacacagacacaatgtgagtgtgctcccccgtcatgcaacatctggacacaactaacagagcatggtgaatacatgctgaattgcattcagtatggctgtgaactaggcctggggacaagaatgaattttacatggaaagaatttcctgtagcaggaacagaggggataacaacagcaataaataataataagaagaagctaa

SEQ ID NO: 7130 - DNA, 1031 bp, Homo Sapiens
gaagggaattgtcaagctcaacatctacttcctgctcagggtgatattggtgctttggtcccgctcctgagcaggaagggaattgtcaagctcaacatctacttccaagaatttaactatcgcaccattgaagaatcagcagccaataacatcgtctggctgctctcgaatctgggtggccagtttggcttctggatggggggctctgtgctgtgcctcatcgagtttggggagatcatcatcgactttgtgtggatcaccatcatcaagctggtggccttggccaagagcctacggcagcggcgagcccaagccagctacgctggcccaccgcccaccgtggccgagctggtggaggcccacaccaactttggcttccagcctgacacggcgccccgcgggcccaacactgggccctaccccagtgagcaggccctgcccatcccaggcacccagccccccaagtattgactccatgcgtctgcagccgctggacgtcatcgagtctgacagtgagggtgatgccatctaaccatgcccctgcccaccctgggcggatgaaattcattgagcagccaagactgttgtccgaggcctcactgtatggtgccctctccaaagggtcgggagggtagctctccaggccagagcttgtgtccttcaacagagaggccagcggcaactggtccgttactggccaagggctctgtagaatcacggtgctggtacaggatgcaggaataaattgtatcttcacctggttcctaccctcgtccctacctgtcctgatcctggtcctgaagacccctcggaacaccctctcctggtggcaggccacttccctcccagtgccagtctccatccaccccagagaggaacaggcgggtgggccatgtggttttctccttcctggccttggctggcctctggggcaggggtggtggagagatggaagggcatcaggtgtagggaccctgccaagtggcacctgatttactctagaaaataaaagtagaaaatactgagaaaaa

SEQ ID NO: 7131 - DNA, 1143 bp, Homo Sapiens
  misc_feature (119)..(137): n is a, c, g, or t
gggccactaggggatgagcccgaactagggatgtgacagagcgcgagacccagcctaaagagagcccggagccagcgtgggaggccgctgccgtcgcgcgccttggtttttctgttccnnnnnnnnnnnnnnnnnnnaacttcctgcctatacacacgcagccatcagcccacaaagacatgactaccaacgcgggccccttgcacccatactggcctcagcacctaagactggacaactttgtacctaatgaccgccccacctggcatatactggctggcctcttctctgtcacaggggtcttagtcgtgaccacatggcctgttgtcaggtcgtgctgcggttgtcccattggggacttggcggcgactgtccctgtgctggtttgcagtgtgtgggttcattcacctggtgatcgagggctggttcgttctctactacgaagacctgcttggagaccaagccttcttatctcaactctggaaagagtatgccaaggggagacagccgatacatccctgggtgacaacttcacagtgttgcatggaaaccatcacagcttgcctgtggggaccactcagcctgtgggtggtgatcgcctttctccgccagcatcccctccgcttcattctacagcttgtggtctctgtgggccagatctatggggatgtgctctacttcctgacagagcaccgcgacggattccagcacggagagctgggccaccctctctacttctggttttactttgtcttcatgaatgccctgtggctggtgctgcctggagtccttgtgcttgatgctgtgaagcacctcactcatgcccagagcacgctggatgccaaggccacaaaagccaagagcaagaagaactgaggagtggtggaccaggctcgaacactggccgaggaggagctctctgcctgccagaagagtctagtcctgctcccacagtttggagggacaaagctaattgatctgtcacactcaggctcatgggcaggcacaagaaggggaataaaggggctgtgtgaaggcactgctgggagccattagaacacagatacaagagaagccaggaggtctatgatggtgacgatttttaaaatcaggaaataaaagatcttgactctaaaggaagat

SEQ ID NO: 7132 - DNA, 1897 bp, Homo Sapiens
attgtttgaagggcagtgctcattggatccagataacataccaaataattagaagaactctaaaacaagcatttgctgattgcacagtaattctctgtgaacacaggatagaagcaatgctggaatgccaacaatttttggtcatagaagagaacaaagtgcggcagtacgattccatccagaaactgctgaacgagaggagcctcttccggcaagccatcagcccctccgacagggtgaagctctttccccaccggaactcaagcaagtgcaagtctaagccccagattgctgctctgaaagaggagacagaagaagaggtgcaagatacaaggctttagagagcagcataaatgttgacatgggacatttgctcatggaattggagctcgtgggacagtcacctcatggaattggagctcgtggaacagttacctctgcctcagaaaacaaggatgaattaagtttttttttaaaaaagaaacatttggtaaggggaattgaggacactgatatgggtcttgataaatggcttcctggcaatagtcaaattgtgtgaaaggtacttcaaatccttgaagatttaccacttgtgttttgcaagccagattttcctgaaaacccttgccatgtgctagtaattggaaaggcagctctaaatgtcaatcagcctagttgatcagcttattgtctagtgaaactcgttaatttgtagtgttggagaagaactgaaatcatacttcttagggttatgattaagtaatgataactggaaacttcagcggtttatataagcttgtattcctttttctctcctctccccatgatgtttagaaacacaactatattgtttgctaagcattccaactatctcatttccaagcaagtattagaataccacaggaaccacaagactgcacatcaaaatatgccccattcaacatctagtgagcagtcaggaaagagaacttccagatcctggaaatcagggttagtattgtccaggtctaccaaaaatctcaatatttcagataatcacaatacatcccttacctgggaaagggctgttataatctttcacaggggacaggatggttcccttgatgaagaagttgatatgccttttcccaactccagaaagtgacaagctcacagacctttgaactagagtttagctggaaaagtatgttagtgcaaattgtcacaggacagcccttctttccacagaagctccaggtagagggtgtgtaagtagataggccatgggcactgtgggtagacacacatgaagtccaagcatttagatgtataggttgatggtggtatgttttcaggctagatgtatgtacttcatgctgtctacactaagagagaatgagagacacactgaagaagcaccaatcatgaattagttttatatgcttctgttttataattttgtgaagcaaaattttttctctaggaaatatttattttaataatgtttcaaacatatataacaatgctgtattttaaaagaatgattatgaattacatttgtataaaataatttttatatttgaaatattgactttttatggcactagtatttctatgaaatattatgttaaaactgggacaggggagaacctagggtgatattaaccaggggccatgaatcaccttttggtctggagggaagccttggggctgatgcagttgttgcccacagctgtatgattcccagccagcacagcctcttagatgcagttctgaagaagatggtaccaccagtctgactgtttccatcaagggtacactgccttctcaactccaaactgactcttaagaagactgcattatatttattactgtaagaaaatatcacttgtcaataaaatccatacatttgtgtgaa

SEQ ID NO: 7133 - DNA, 562 bp, Homo Sapiens
  misc_feature (254)..(269): n is a, c, g, or t
taacaaatggcttccagagacctgctcgagtttcatggggtgggcgtgcagggacacccagctaatttatggaatgtgtactgagtgccccttggaatagatgcagggcctgaccctgactatggaaagacacagggcttggatggagggtctggcgcccaggagggatggatggagcaggccccaggatgcgagactccagtcagactccaaaacacaaggggctccccaaagaagtagaaagcagggaaggnnnnnnnnnnnnnnnntgctaagggggtctgcaaggcccagttttctggccaactgggaagtaactacacccccaccctctctaggggagccccttccaccttgaccatgttcccagactattccggaagttctctagaattgctgacccagtctagtaggatctctgggctcactgggtactatgatgagcaggaagtccagggagatggatagggaacaggggcacacactttcccttcacaagcttggtttccttttgctggaaaactgtgtccctgtcacataattaaagcatgcccagcctgag

SEQ ID NO: 7134 - DNA, 1085 bp, Homo Sapiens
  misc_feature (74)..(74): n is a, c, g, or t
ccgcaagggcaccatctccttctttgagatagatggacgtaagaacaagagttattcccagaacctgtgtcttntggccaagtgtttccttgaacataagacactgtactatgacacagaccctttcctcttctacgtcatgacagagtatgactgtaagggcttccacatcgtgggctacttctccaaggagaaagaatcaacggaagactacaatgtggcctgcatcctaaccctgcctccctaccagcgccggggctacggcaagctgctgatcgagttcagctatgaactctccaaagtggaagggaaaacagggacccctgagaagcccctctcagaccttggcctcctatcctatcgaagctactggtcccagaccatcctggagatcctgatggggctgaagtcggagagcggggagaggccacagatcaccatcaatgagattagtgaaatcaccagcatcaagaaggaggatgtcatctccactctgcagtacctcaatctcatcaactactacaagggccagtacatcctcacactgtcagaggacatcgtggatggccatgagcgggccatgctcaagcggctcctgcggatcgactccaagtgtctgcacttcactcccaaggactggagcaagagggggaagtggtgaccagacactgcccactgcagtgccaagacggcagcaggactggggctgatagcccaccccgcccccactgcagctcccacaaagcactctaagggagatggggctgaggacagctcaaaaaggagaggacaggcctggcaggggcccactggtgcccagcaccaaggcgagctccgggctcagaccaactccaaggtcagctggccacaggcccaggcctcctctgaagcagggaccagagggagccaggcagctgtgtacagtgagaagggatccggatgggggagctctgtacagagggctggtgattgtaaaaatttcttttgtaaagtagaagttgggggtggggtgggtgctggctgcaaaaatttctggcttctcttacccctattgcccccggcaataaattgtttctatatgccaa

SEQ ID NO: 7135 - DNA, 1052 bp, Homo Sapiens
ttcataccaatggtagaatcaatttaatcatggctccaatacttcgaacctgtgacatcttgtgtcccataagggtttgaactcagtacactcataggagttgaattatgtgttttgccctgcattttcgagaaaacccatcgctagagcattctacatagtcataggaattctacaagtttgtaaggtcagccatcgcaaacatgtttatgggtaactgttaaagtcacaatctcattcagaatgcttaaagtaagccagatgttgacaaatctgaaaaggaagaatgctaagatgatttcagatatcgaaaagaaaaggcagcgtatgattgaagtccaggactgaactgcttcggttagagccacagctgaaacaactacaaacaaaatatgatgaacttaaagagagaaagtcttcccttaggaatgcagcatatttcttatctaatttaaaacagctttatcaagattattcagatgttcaagctcaagaaccaaacgtaaaggaaacgtatgattcatccagccttccagctctgttatttaaagcaagaacacttctgggagccgaaagccatctgcgaaatatcaaccatcagttagagaagctccttgaccagggatgagaagagcagtctactaaaatgtgcctataggaagactagtctcatgctgttaccttctgaaactgtacctttataaatcaattgttttgcaaagaagttatggcctacttagaatctaaaatttgttattcaaattaaatggctgtgaacaatgttaaatagcatcagtttgtccaatagttttaaaggccataatcatcttttctggttaatatcttgagtaattttaaaatgttgacaccttaatcggtcccaggtatgagctataataaacttgtaaaattaagttgatgtgaacataattttgattgaattaataaggcgatttctcctgaatttacaccaaagctaatttttaatgaaattggtttacagaagtaaaaaacaaaaattggaaagcaaagtaataaaacttagtttatat

SEQ ID NO: 7136 - DNA, 600 bp, Homo Sapiens
tttaagattctttaaaaatcttttattaccagcttttagccaagacaaagggccaatatttctggcttttgaatttttttactaaaggcaaccttctacatgaaatcagtaagtcttaactaagaggatggtaaccttggatgcatgaagtgtctccaaagagatggcaagcgatgggcaaagagacggcaagcaatttttatgagatgtagaatctccccaaaggtagttcaggaaaaagaaaatttcaagacacgaaatcagaagctgtccacaaagaggaaaggaagcaataaatggcaaaaagtcaaacacacataaaatcagaaaagactgattccctaagccaggaatttgaacccaggccaccagcatgaaaagacaaaaaccttaactactgagcacaaggtgactgaaattgcttttcctgaaaggaatcttgagcagttatttttgaagttgcaaaggattttaactattcaagagaattaaggtgagaattaacataataatgtcccttttttagacccaagaatcaaagctttgtaactcaactgcacagggctttaaaggcaatacagaaagttacttggatgaata

SEQ ID NO: 7137 - DNA, 1427 bp, Homo Sapiens
atttgtctcaaaaatcaatgtatttaatagttgacagttacaaatctcatcattattgttccttcagtaaaatttaaatattcccacagttctcaatcaaatatgctttttcagttttccaacagctgtgatttttcttcttttggtctattcagtagaaagtgaactatctgaagtagaacatcatcattaaaacctttcacatcattatcctcaattgtttcataaagaggcttactttgtgtaccccaacatatatttttacgagggttattttgatcagcttgtgtagtcagtgccaaagtatttagctggtagcagaaaaaggaaaagtattttccatctgtgatcacagcctgggagacaaaaggtcgagtaacatctgcttcactccagaatccttgatacatagcttgtgctccagtccaagcaaaaaggcttgcaatagcattagctctaaaaacaacttctatctgatcagcacagttttgtctcaaaagcctttcccttcttaatttgtcaggtaacagatgaaactgggtgtgaccgtaacagcaaggatctgcagtttttgagccaacaaatatgtggttttcatactgccgtttgaataatggaagtttgtctggtttacattttatagtggggatttctataggaacagaataatccaatggcacaaactctgcgagttgcttggatattcgaatctggttgtttggtttatcatctatctggtatcgcaagtcatcaattcgacctcttcgatgaccacgaggaataatttcttcaccacgcacccagtaaaaatgaactgggcatctataatcgagggcggcagcggccagggccgggttgtgtgggctgaggaggcccacgagggttgacaccagctgatccaggaagggcaaagatatgacctcgctctcctcgtaacggtgcacgcgccgcctgcgccgcaggtagaagtgctcctgcagcaggcagtcgcaggcgaccgcacgcagcgccgcgaggtccagcgcaggttcaggttcgggttcgggctcgggctcgggctccgctgggggcggcggcagacccgacaggaacacggtcttggtgaagtactggtaccagcggtcggcattcagcgcgaaggtctgcgggtaaaccatgtacttcataaactgcatcttggtgaggattcgcagcttctcgtctaccgactccgcagcgtgcaccgtcgcctgccagcgctcgatccgccgcagccgtgcagctttgctgtcggctgtcatggaggccacatcggcgggtaccgcgcgacgggggtcgccgcgacgtcttgggaggtcgtttctgtagccgtggcggcggcattagccgcggtgtgcaatgaaagcctcggaccgcgtagcaaaggcctccaacacctggccgccgcc

SEQ ID NO: 7138 - DNA, 492 bp, Homo Sapiens
  misc_feature (178)..(221): n is a, c, g, or t
ttcatccttcatccctcataccatggagtcatgagctgtctgggaagaatggacgtgctgggaccaactcaagaccttgttttgctgccttcatcatcctacctgtgcttggcccacagtctggctcatgatgtgggctcagtaatgtgcgagaaagtgaaaatgccactctctccannnnnnnnnnnnnnnnnnnnnnnnnnnnnnnnnnnnnnnnnnnnggagagtcaatgggcagagccagggctaggccctggtggtgtgtggagcacccaggcagacccagtcctggttgggatcacacccacgggtgctactgcacgtaacactcctccttaggcctggaggccaaggtgtgggtccccacgcctgatctttgaaaacactacacagggctgctgtcacttcccagggcccaggcctcagcccaggcctcgggaccaactctttgtataacctacctgaatgtattaaaaactaattttggagaag

SEQ ID NO: 7139 - DNA, 650 bp, Homo Sapiens
  misc_feature (343)..(599): n is a, c, g, or t
ctccgggggttatgaacttcgttccgaatttcggaaactcctaattttcagttgaagcttagtgacgggttcaggacaccctacacaaaattcagcacttcgacatattgaatattttaagctgaaggcatttgaggaaattgcagaagcaggaaggtgactctgaccttctgcctgctgttctccccagaagcagccataaaacctgggaaggattttctgaccttcccctgaagtagatcataagactgtcatgtaagaggtgctctcctggcacccagagaaaaggagcatccttacctccaaaagcacagggacacaaagaggaatctaaacaaacagnnnnnnnnnnnnnnnnnnnnnnnnnnnnnnnnnnnnnnnnnnnnnnnnnnnnnnnnnnnnnnnnnnnnnnnnnnnnnnnnnnnnnnnnnnnnnnnnnnnnnnnnnnnnnnnnnnnnnnnnnnnnnnnnnnnnnnnnnnnnnnnnnnnnnnnnnnnnnnnnnnnnnnnnnnnnnnnnnnnnnnnnnnnnnnnnnnnnnnnnnnnnnnnnnnnnnnnnnnnnnnnnnnnnnnnnnnnnnnnnnnnnnnnnnnnnnnnnnacatatgttctcccctacattagtaaaaataaaaatggaatttaataccca

SEQ ID NO: 7140 - DNA, 971 bp, Homo Sapiens
gggagacccagataccctgccgagaagagcgtgtagggaccagctccctgcgaagagcagcccagctgcagaggaagttcccgcatctggagtctcaggagtattcggggaaacgctcgaacacccggctttcgggaagctgggacgagcagtcaggagtttcagtgccatcatccatggcaacagtctggccatgcagcgcatggggctggcacaaccgggttggggcagatcctgcatcctgtaggaatgcatgtatgctgtgggccagggggccttgggcatggaagtgcgagccaaggaccaggacatcttggatctggtgggtgtgctgcacgatcccgagactctgcttcgctgcatcgctgaaagggccttcctgaggcacctggaaggaggctgcagtgtgccagtagccgtgcatacagctatgaaggatgggcaactgtacctgactggaggagtctggagtctagacggctcagatagcatacaagagaccatgcaggctaccatccatgtccctgcccagcatgaagatggccctgaggatgacccacagttggtaggcatcactgctcgtaacattccacgagggccccagttggctgcccagaacttgggcatcagcctggccaacttgttgctgagcaaaggagccaaaaacatcctggatgttgcacggcagcttaacgatgcccattaactggtttgtggggcacagatgcctgggttgctgctgtccagtgcctacatcccgggcctcagtgccccattctcactgctatctggggagtgattaccccgggagactgaactgcagggttcaagccttccagggatttgcctcaccttggggccttgatgactgccttgcctcctcagtatgtgggggcttcatctctttagagaagtccaagcaacagcctttgaatgtaaccaatcctactaataaaccagttctgaaggtg

SEQ ID NO: 7141 - DNA, 952 bp, Homo Sapiens
ccgggagccgctcgaggcccagaacggctggctctacggcaagctggagggctcgttcgcgagcggttggttccccgaggcgtacgtgaaggctctggaggaggggcccgtgaatcccatgacccccgtgacccccatgacctccatgacctccatgacctccatgacacccatgaaccccgggaacgagctgccttccaggtcctacccactccggggcagccacagcctcgatgacctcctggaccggccgggcaactccatagcaccctcggagtactgggatggccagtcccgctcccgcaccccaagccgggtgccaagccgtgcccccagccctgcacctccacccttgcccagcagccgccgcagcagcatgggcagcacagcagttgccactgacgtcaagaaactgatgtcctcagagcagtacccaccacaggagctcttcccgaggggcacaaatccttttgccactgtcaagcttcgtcccaccatcaccaatgaccgctcagcacccctcagtccgctgaggcggggtccgaggtcgtaccccacagtgcacctgcccaggggctgttcagagctggcaatggcagcgacagcagcaacagcagcagatccaagaagcgggtccctgagacggggggtggctgccctccccagaccaccccggcagcctgagcagctccaaagcactggcttggggtccgagaccttcaaagtaaagcaggcggaatggggggacaggacaatttctccccctccaggggctccaggactctccctggggggcccacctcttgccccctaacctctttcccccttttctgcccccgtggggaggagccccttgtacctgctccgtgcccaacacatgccctctctgtacatcttttgtaaatgatgagaaataaaggaagtggacgcaaagtggatgcggcagcagaaa

SEQ ID NO: 7142 - DNA, 707 bp, Homo Sapiens
tgtctctctacctgaacaaagttacagacaacaaatgcatagaccatgtcaagcagcaaaattgtcaccctagagatactgctaaacagactggaattgaaacaccaaataaaagtggcaaaacaactctttctgcatcagggacaggctttggagacaaatttaaaccagtgataggcacttgggattgtgatacctgtttagtgcaaaataaacctgaagcaataaaatgtgtagcctgtgaaacaccgaaacctggaacttgtgtgaagcgagcccttacattgacagtggtttcggaaagtgctgagactatgactgcttcatcttccagctgcactgtaaccactggtaccttaggatctggagataaattcaaaaggcccattggatcttgggagtgttcagtatgctgtgtttctaataatgcagaagacaataagtgtgtgtcctgtatgtctgagaaaccaggaagttcagtacctacttcaagtagcagcactgtacctgtctctctgccttctggaggctctctaggattggaaaagttcaagaaacccgagggaagctgggactgtgaattgtgcctagtgcagaataaggcagactctaccaaatgtttggcatgtgaacgtgcaaagccaggcacaaaatctgggtttaaaggtttgacacatcttctcatcttcgaactcagcaggctcttc

SEQ ID NO: 7143 - DNA, 411 bp, Homo Sapiens
aagagctacagttatcagtctttaataacttacaggcaaatgctaaaaaatagttaataacaataatacagaggacacacacagcttataaaaagggtcatggatctacaaatgtggggaggggttcttggcactttcacagacacaaaaataaaaactatgtgactggtattcctagaaaagcagcctggggagactccccagttggggaacagaggaaggggagatagttatttcatcccaaacacattctccaagtcacttccatccccccgcccccaaacacatccaattaaaaatttttagccagagaagaaaaataagaaacagggtcgaggtagagtcacagtttacatttacgtctccacagtcctgcagcgcccacttctccagagaggatgagagagatat

SEQ ID NO: 7144 - DNA, 1145 bp, Homo Sapiens
  misc_feature (910)..(998): n is a, c, g, or t
gggctcgctcgacacagccagagctggaggtgggtgcccggcacggaggggcctgcggaccaatggctctgccctgcaccttagggctcgggatgctgctggccctgccaggggccttgggctcgggtggcagcgcggaggacagcgtgggctccagctctgtcaccgttgtcctgctgctgctgctgctcctactgctggccactggcctagcactggcctggcgccgcctcagccgtgactcagggtggctactaccacccggcccgcctaggtgcctgcgctgtggggccgcacgcggcgcctgctctgggccagccccccaggtcgctggctgcaggcccgagctgagctggggtccacagacaatgaccttgagcgacaggaggatgagcaggacacagactatgaccacgtcgcggatggtggcctgcaggctgaccctggggaaggcgagcagcaatgtggagaggcgtccagcccagagcaggtccccgtgcgggctgaggaagccagagacagtgacacggagggcgacctggtcctcggctccccaggaccagcgagacgcagggggcagtgctgaggccctgctgagtgacctgcacgcctttgctggcagcgcagcctgggatgacagcgccagggcagctgggggccagggcctccatgtcaccgcactgtagaggccggtcttggtgtcccatccctgtcacagccgctcactccccgtgcctctgcttcccaagatgccatggctggactggacccccagcccacatgaccatgcctcagactgtcaccccctaccagttcccaagtccatgtgtaccccgctcacaacgggaacggccccccccaaccacaggcatcaggcaaccatttgaaataaaactccttcagcctgtgnnnnnnnnnnnnnnnnnnnnnnnnnnnnnnnnnnnnnnnnnnnnnnnnnnnnnnnnnnnnnnnnnnnnnnnnnnnnnnnnnnnnnnnnngaccacggggtcccattgaacccccaaaaaacccaaccctcattggtggggccccctgggccccccaaaaaattttttcaaaacctttcgtttgggggcggcggcccccctaaggtaaagggaaactgggcccaaaccttgtttccc

SEQ ID NO: 7145 - DNA, 706 bp, Homo Sapiens
  misc_feature (307)..(315): n is a, c, g, or t
cgagctcggcccatctgtatatacatgaaataactactactttggtcggttaaacgtagggccctagaaggcagagatgtgggaagtgaaattacggaaaggcattcagaacctcacaatggccaaagcttacttttagctcaaacaccattttgatgttatttaaaccttgtgccatccttggttcattgcaacaaacattattttgttacctggtatgttgctagcatgtgagacaagagattgcatctgctcgctccaagaagatccactttttgacaaacatccatcttcaatttgtcaaagnnnnnnnnngcaaggcgcacttgtgtttgtaccttcctgaacttctccatttgcttgtagaggtctggatcaagctcctgagacacgtccttcatccataatagtgctcctctatattccgtcctgcactgttccatgcggttcaccgtcagccaagtatctgagatggcccgatgccgaaaagtctccacttcttggtgaaatcgacacaaaggatttcgtaaggccaacccttgctgggaagaaaagcagagggcctttcctgtcgcttgcatcatctttcctgctctggttttatcttggaaaccttgggatcgaagaaattttcccagttcgttttcttcttgagacaagacttctgtcgcccaggctggagcacaacggctcattataggtcact

SEQ ID NO: 7146 - DNA, 467 bp, Homo Sapiens
tcattaactctaggggtccctttgggctcttgattctccctgaaggagggatgcatttctctcttgctcttcctgtacccacatttgggggaagctgaggagggaggaacagtcagccacagctctcttccagcactgtcctctccaccccaagctttgaggaagagcatccccttcctcctttccctggccactgctgctgcagccaatatcctctctgggcctgggaccctctccacagaggggatgtggtccctggtcatgacataacctagcagcagtaggaaaaactcccttctatgaaggggaagcagactgggccataaggaaacagcaggactggctcaagtgcccaaggtttgtttagggcctgggaattggccatgtgttaatttattgagtggagtaggtggctttttttccctccctcttcccccaacaagaataaagtttattaaattatctgg

SEQ ID NO: 7147 - DNA, 559 bp, Homo Sapiens
  misc_feature (289)..(289): n is a, c, g, or t
ggggttacctgtgggaggggcaaatggctgaagcccagaggcagctgttccggctttgggagaatgggtggatacctgagacaggcaggggcacgccaccgtccactctgtctttctcttttgccactgatacatacgttacacatactactttatacgaagtacttgctaaagtgtttcaataaattaaaaaactttggtctcttggctgaaaatgggatgaatgcagggtggtgagatctgagcagccagtcccttagggagacacccaagccgagagagaacatcnggcagaagagatggagagcaaggtgagattcaagatgctttggccagagtcaatggctgctgctagacagattaccggacaaaagagagggaagaatagaagatggtcacaggtttcaagcatgagaggccctgcaagatggggccacaaataaggaggaaggactggaagaagaacaggtttgagaagcagggcaagtttgacgtgactattagacatgcgtctggagaaatcaagcaggtgtctgaattacagatcctgagctcagag

SEQ ID NO: 7148 - DNA, 424 bp, Homo Sapiens
gtaagtgcatatcctaacttgcccatattctaaatcatctggttggttttcagcctagaatttgatacgctttttagaaatatgcccagaatagaaaagctatgttggggcacatgtcctgcaaatatggccctagaaacaagtgatatggaatttacttggtgaataagttataaattcccacagaagaaaaatgtgaaagactgggtgctagacaagaaggaagcaggtaaagggatagttgctttgtcatccgtttttaattattttaactgacccttgacaatcttgtcagcaatataggactgttgaacaatcccggtgtgtcaggacccccaaatgtcacttctgcataaagcatgtatgtcatctattttttcttcaataaagagatttaatagccatttcaagaaatcccataaaa

SEQ ID NO: 7149 - DNA, 622 bp, Homo Sapiens
  misc_feature (29)..(29): n is a, c, g, or t
tggaaaaatcttctccattttcgtcttcnggagccataaacttggttatgcacagcatctctccctgtggcaatgcactgaaatgtagcgttttgccctgcattcacctctacatcccctagacgggaggaaatgaggagatttatcacaaggataactcagtacttggatgtcatcaatggcaatataaccacttctccctcctgagacttcagcttcaaatattacctgatattcattgggccaaaaggtgctcactgctagctcagcccgaagccaatctctacccgtgaatccagtcacattccaaattggattggcaagaggtcctttattcaccctaactaatatgttcaaagtgccaggattcagtcctttctggctatataataggtaactgaaatcaatgcagtgagtgtcgttctccttcattgtaggcagctgaagtctggctttttctccagggtcgtgatctgaagagtccactatcatataggaaccttggggcatctcgggtggtagataatgaggctcttgagcactaacatgcacccattcaaagtcatcatacagatcctggtggtaatcacaggcccctggaccatcatcaaaagtacagcca

SEQ ID NO: 7150 - DNA, 1406 bp, Homo Sapiens
  misc_feature (638)..(638): n is a, c, g, or t
  misc_feature (801)..(816): n is a, c, g, or t
catccctcagctatgagatagatgacataaccatatgtcatgtagcctctggaaaagtcctctgtatcctcatgagataacgagagggggaaaaaaagctactactgcctttgtaacttccacttagcctactacagggctatgcacatcttagtttccaaaagtctgcttaatttcaaaagaaaaatgcctaattgaatgtaactcatcttggtgttattatacaaaataatttttaatctgcagacccacgaaaagggtctcagggactcctccaggggtcttcagaccatactttgagaacccatgggctagcgactaccttgagacagtcctttacctaggcctgtggattaaagggtttagctgaaaccctagattcttctctgtagtctaatagaactccaaacattgtaagaattgcttggtagcataagctcagggataaggtgggaattgagttcaaatatagtgttttatcttccacacaaatcatctctataggagttaaattaggaagtcacaacagcgcctgttgaacaaactcatcagtgtggtaatcctatgagggataattgcagaaaggttttagagacttgtgaggttccatatgataattctttacacctccccccccnaagagaaagtacacagggctattctgtaatattgttcagggaaatcagcatgatagatgctgtgcctccagagagttctctggagattactacccaaatgtgtattttggcaatttggtggtatttaggatgtaatatgttttcctccatttctgctaatttnnnnnnnnnnnnnnnnataacatactatacatgctaattgccaagaatttgaaactgaggtcacaaatttaagatagccttgctgactataattcttatttaaaatggactttctttttaacgtaattggcgggggccgggtgggggagcggggcaagtacatagtaaggtctcttttccccctccaaccttctcactgagaacgcacaactggacaaaaatccccccatgggccccctggcacacagtgggcaacacacacatttgggcctagcaacccaccccaagacgggggcaaaggccactctcacggaagccggggcgccaagaacgacaccccacgccgcataccgcgagaagaatgagagcaaaccaggggtagacaggccccaaccccacacggcgactcacctgacttatgaactagcgggccaactgtccaaactgggactcgcacaagggactcggggccaaaagggccacggcaagacaaacacagacgaggaggcagaagacaaaatacgggtcgcccgagccaaatacatgctgagtcggaggcaccaacacgcaagcggcagcggagaaacagcccggaactgagaaaat

SEQ ID NO: 7151 - DNA, 763 bp, Homo Sapiens
  misc_feature (384)..(497): n is a, c, g, or t
  misc_feature (566)..(617): n is a, c, g, or t
  misc_feature (643)..(670): n is a, c, g, or t
gcccacagaggcagctgccagcccttgatggcagcttgatggggccggagagtcccccagcacaggaagaggaagcccctgtatcaccccacaagaagccagccccccagaagcggaggagggccaagaaggcacggctgctgggccccactgtgatgcttggtggatgcgagttcagccgccagagactgcaggcctttgcttcaaccccaaacgggctgcacttccgccagctgggccggcagcggaggaaacaacaggggcccaagaacagcccctgagcaccagggagcaggcaggggcctcaggctcctctcctcaaatcaagccctggacaggtctcgcacccacaagtactatctgctgcagagatcctctcatctnnnnnnnnnnnnnnnnnnnnnnnnnnnnnnnnnnnnnnnnnnnnnnnnnnnnnnnnnnnnnnnnnnnnnnnnnnnnnnnnnnnnnnnnnnnnnnnnnnnnnnnnnnnnnnnnnnatgtggtgacacaagcctgtagtcccagctactcaggaggctggggaaggaagatcacttaaggccatnnnnnnnnnnnnnnnnnnnnnnnnnnnnnnnnnnnnnnnnnnnnnnnnnnnncaccaagccagaccctgttttcttgnnnnnnnnnnnnnnnnnnnnnnnnnnnncacgcgtagctgtgggtaaggaagtcgtcccattttatggatgtggaaactagctgaccttaaacttcccgtacttgggcgctcgtggatccg

SEQ ID NO: 7152 - DNA, 601 bp, Homo Sapiens
gaatatgaaactatgactattggggagtctgtgcatgatgatctgtatgataagaaagtagatgaagaagctgaggcaaaaatgttggagaaatataaacaagaaagactggaagagatgtttccagatgaagtggacacgccccgtgatgtggctgctcgaattcgatttcagaaatacagaggccttaagagcttccggacatctccatgggatcctaaggaaaaccttcctcaagattatgctcgaatatttcagtttctagaactgtactaacactaggaaaagcatctgtaaagaggttgaagaaaaagaggttgaaggagctgaggttggctggtatgtcacacttcatgtctctgaagtccccgtctcagtggtcgagtgcttaaggcaaggaacacccttgagtgcatgttctttactacctcaggaacagaagatgtcaggactgaatatgatgctgaggcgtgaccctggcaacactgaacctgtgaaagccaaggaagagctcatatttcactgtggattcaggcgcttccgagcctcacctttatctctcagcacactgcagcggacaacctaattgcagagattcctg

SEQ ID NO: 7153 - DNA, 591 bp, Homo Sapiens
ttgggtccttctgctcatgcattcagttcaagtgtcctttatcccaggttcagagatgctgcctttctgaagaagacatctgaccctagcaggttggccagtgttattgaacaacaaaaatgggataaattgctttcatgattagctcaccttcttctggttttagcccttctgttctctgtacacgtgaacttctgtcatctccttctggcttggttgcctctgaaaggagggaaagtctcttggtaaattatctcttttgtgctgtttgctgtttctctgctgccgtctttgcagttctcctctcactggttgcaggctttcatagtaacgtttggcgagaaatgttccaaacatcacattttggattctaggctgtcacccctcattctgtgaaacgtattagcatgtgttcgcccaagatgactattccttgtgagccagttaatgatgatattctacgcccttcccttctaagctgtagttcaggaatccagcccacatagacagactcttgctttccatggtgtaatcaatgccaagtgatgcatctaggcaggaaaatctactcttgcttttgggggcaatagt

SEQ ID NO: 7154 - DNA, 952 bp, Homo Sapiens
  misc_feature (37)..(37): n is a, c, g, or t
  misc_feature (47)..(47): n is a, c, g, or t
  misc_feature (248)..(248): n is a, c, g, or t
  misc_feature (332)..(332): n is a, c, g, or t
cttccaaagccttagagcagccatcttgagctctggntttcattccnccagaacaggtttcattttcctcctgtccctctttgccagaatcattgctccttgttcctcaaatttacttaggtcccatttttccagaacaaaacagacacccatgagaggctcctcacacatggggcccagagagggttgctagttggaagccacttcacaatgctattgcccaaatctcggtactacggcttcttttnaaagctttgtcagctggacctgtccatactgagttctgaaaatcttcacttttattgactagtatgttgggcccacattttctngggccaaatgaccagatttggtcaacaatgttcctccatcttctccctgttaggtgttgctccagttttcctttgaattcccaaattttctcttgggtcttctgatgaatcatgtgagtattttcgccctcattcaaagaggatgtcaactgctccatagaacgaatcaaatcactattttcttccagaatctgggtgacttcttctggaaggggcatggctcgaacactgagcgtggcaagtttattgggagttgttatggtgattagcccgtcagagtcaacttggattccttcagggattttgctttgatcttctttcatttggtgtatgactgcaactttttgctgtttgcctatttcttcattgaccatgtcaacttttgggggttttgtgattgtttctctgaatggaataataggttcagatacactgatatgaatctttgcaaacctttcttttaagtcatccaggcatcgctgaaggtggacttctcctgctgtgactaaaacgtgctctcccgtttcctgaattaaaatctggacacagggatcagcctggtttaacagtttcgttccttcctcgtgccgattacacacccggcctcgtacctagcctat

SEQ ID NO: 7155 - DNA, 1034 bp, Homo Sapiens
gtggaaatggcggctgtagccgagggggcggccggaaagcagcggcggcgtctggggcgctttcgcaacattcagacctcggttgcagccccggtgccgtgagctgaagaggtttcacatcttactccgccccacaccctgggcgttgcggcgctgggctcgttgctgcagccggaccctgctcgatgggcacgactgggctggagagtctgagtctgggggaccgcggagctgcccccaccgtcacctctagtgagcgcctagtcccagacccgccgaatgacctccgcaaagaagatgttgctatggaattggaaagagtgggagaagatgaggaacaaatgatgataaaacagaagcagtgaatgtaatcccttgctacaagaacccatcgcttctgctcagtttggtgctactgcaggaacagaatgccgtaagtctgtcccatgtggatgggaaagagttgtgaagcaaaggttatttggaagacagcaggaagattagatgtgtactttatcagcccacaaggactgaagttcagatccaaaagttcacttgctaataatcttcacaaaacatggagagacttctcttaagccagaaagattacgattatactgtacttactaaaaggggtatcaagtcaagatataaagactgacagcatggcagccctgacatcccatctacaaaacaaaagtaacaagtcaaactgaaacctcaggaaccccgaaggccaggtgcacacaacggaatgagcgaaagccggcaaagaagcagatgcacaaggtgcagggacagccaaagagactcgagcaataactccaaaacatcggcacaagacaagacaccaataggcgcgcacacgacacgacgacaaggcgcacagagcagaaaggccaaacaggacaaagcgacacaaaggagaaggaaggcccaaaaagacaacgaagacggcaggacgcaacagccgacaaacagaagtacaaggcaccgaaaagaacaagacgacaaaccacgacacgaaacagacg

SEQ ID NO: 7156 - DNA, 1403 bp, Homo Sapiens
ggggatacagttccggtgggagaacgcggctgcgaggttttcggctttggctcctgatatgcagcgacagaattttcggcccccaactcctccttaccctggtccgggtggaggaggttggggtagcggaagcagcttccggggaaccccgggcgggggcggaccacggccgccctcccctcgagacgggtacgggagtccgcaccacacgccgccgtacgggccccggtctagcccgtacgggagcagtcactctccgcgacacggcggcagcttcccggggggccggttcgggtctccgtcccctggcggctaccctggctcctactccaggtcccccgcggggtcccagcagcaattcggctactccccagggcagcagcagacccacccccagggttctccaaggacatctacaccatttggatcagggcgtgttagagaaaaaagaatgtctaatgagttggaaaattatttcaagccttcaatgcttgaagatccttgggctggcctagaaccagtatctgtagtggatataagccaacaatacagcaatactcaaacattcacaggcaaaaaaggaagatacttttgttaacatttctgaaattcaactggaagcttcatgtgtcaggaacatcttggacaaaactttaagttgtgttgatataaatttacccaaagatgatgactttgattggataattagtaaggtctttttgttatttttcatcgtatcaggtattgttgatattagagaaaaaagtaggataacttgcaacatttagctctggaagtacctaccacattttagagatttaccgtttccatatatttaacattcctggttacataatggacatttgtcttttaatgttttttcaatgttttaaaataaaacattttgtcttccaaaaaccggcccgcgccacctgtgattagccccttgccggcccggccccggccccctccaaaaaccttttcttagacaccttctgttgtgggggccgccgggtgccccccaagggttaacgtggaaaccccggggcccaataaccgcgccctttccctaaaggagaaatcccctgcgcccctggacattaggggcgcttgggacatttctttccaccaataacaaataaaccggccccgcgggggggcacccccgaaccccgctgtttttgaaacccatatttcacacaaagggcaagcttctggcgaggcgccctatacctggggactccgagtccacccggggaaatcgccagccgcgaggcttctgataataccaacattgacagcccccggggcgggtggcgcgagtccttttaccaggcacgcggggtgggaaacccctcttcacacacgcgttcctttgcgccccacgccggcgaagccccacc

SEQ ID NO: 7157 - DNA, 494 bp, Homo Sapiens
ggggaagttccggtccagggctctgacttcgggcttgttcgctggtggcgtcggagccgagccggactggtcaggatgatcacggacgtgcagctcgccatcttcgccaacatgctgggcgtgtcgctcttcttgcttgtcgttctctatcactacgtggccgtcaacaatcccaagaagcaggaatgaaagtggcgctttctccgccccagggttccaggacatagtctgaggcaagatggagggtatgaggggccttcacacttcacttcatcccttctacccatcacaacatacaaagcaactacacctggatttttccaaacaacttttatttcctcagagtcttccttaatcctatggaacaagaagctgccactgaatagggcccagtataggggcttgcttttctactccctccccccaatataaaaatatagacttttttttgtggtaagaaaacaaacaccatcaaccaaaaaatacacccatgt

SEQ ID NO: 7158 - DNA, 401 bp, Homo Sapiens
caaagcgtgctgtgttttagtcctggtaggaatatttatcagagttcacactatataaaacccaacagcttcaactattgccctttcaacagttttgccactgaccggatagaaacggtttcagtctctggatggatgtgtttgtggtttgtaaccattacggtttaaaccatggtttaagaatttgcccaaataacagaaattttgttcgggaagggataaactagatatagcatacagagcctgtttttgagttttagatactttatttgtaaataacttaaaatagctttctgaaaccgtgcattctgtagtttcttcctttcagtgaaattgctaaatgtcaatgtatttttggcactgcgattttaaccatttattaaataaaaattttgttaaag

SEQ ID NO: 7159 - DNA, 746 bp, Homo Sapiens
tctccctccgctcagggcttgaaggtcggtggcggagggggtggctctcacagggcccaactctaaagtggaagaaccttgttagaccgagagcttgccatccagccaagctgctcgaggccctgcagtggccttggcaatgtctgtgccacctcctgagccctcccagcatgtcctcacatgctcatgcccacccgctcctccacaagcctagtccatcctgcctgagctccagcccccagcccccactgtgcccagacatgtgtgctcagggtggctttctccactaggaccttctgtgtatatagatagttttataaccctgaatgcacccacccatcccctaagcacacaggggttaaagctgtgtgtccctcccagtggctgtggcagtgacagtgacacccacacccacagtaaagaggagactgaatgagactggcctggctgcatccctgggggaggggagccacacgtgcgcacgtacacacgcacactgcggtgccctgtgaccaccacatgacgcaccggggacgtccggcccagctcaggactgtgagtaaaacactgggcaaagccatctgttcagaacgccggatggcccagcacctggtgacagacctgttgtcccaccatactcagggcccagcagagtccggccaacccaacaactggagcagacagaaattctggtcactggcacatcataaggatttattgaaataaattgagaactgtggcggccg

SEQ ID NO: 7160 - DNA, 565 bp, Homo Sapiens
gcggccgcatcgcgtcgagaatggagcccctcagctcttggacaatgatgtgcaggtcatccacgtccacaaagtgcaggtgcttctcggcaggggctgaggcagcggctgacagctccaggaagttgcctcggccggtgctgacaatgaacacggtgacgcccaggtccttgagctcctgcatgggggggcccacagggtcgctggagccgccatctgtcacccacaccagcactttgggcacccctggccgggcacctgatgcttcagcaaacagctgttccttggcatagaccagcgccaggccagtgtgggtgtcacccatgcgctgggcagaagcacgcaccgcatcctgggcagcctcacccgagctgtgctggccgaaggggaactcggtgtatggccgactgcccacgtgcaccagactggcacgcagggccccggtgcccaggggcagtggagccaccagctgccccacaaactcccgaacccgggagaactcgtagtgagagacgctggctgagctgtccagcaggaacatcaggtcccctcgcgggctgatgct

SEQ ID NO: 7161 - DNA, 813 bp, Homo Sapiens
  misc_feature (198)..(458): n is a, c, g, or t
aaaaaggtcacggtaatggaagcaaaaaaatttgcgttattccaaaatattaggtagatgccccaaattataattatggtcctaaaaaattaaattcatatggatatagtggtatttcctaagtaacagtggtgccccccctaatccaaagttttccctttcggggtttttgggtacctggtagtcacccacattttnnnnnnnnnnnnnnnnnnnnnnnnnnnnnnnnnnnnnnnnnnnnnnnnnnnnnnnnnnnnnnnnnnnnnnnnnnnnnnnnnnnnnnnnnnnnnnnnnnnnnnnnnnnnnnnnnnnnnnnnnnnnnnnnnnnnnnnnnnnnnnnnnnnnnnnnnnnnnnnnnnnnnnnnnnnnnnnnnnnnnnnnnnnnnnnnnnnnnnnnnnnnnnnnnnnnnnnnnnnnnnnnnnnnnnnnnnnnnnnnnnnnnnnnnnnnnnnnnnnnntaagcaaaatcgaaagctatacaacaatcagaaatgggaagagagcaaatccaagtataagtgaagacattcctctgaattcccagcattcatcgagcatcaaaaacgaccaatcttttagtccttttcttgtacattattctgtatccacattctctgcatctgattggatccctagattttatttcattttctgtgtgacactctccacagatatatatcattggttgctgctttggaggttgaacgtccttctgggtgtccattgttagcccctacacagcacggaaaaactcactccgcgtttccaaatacaacccggctagtccaggtgtcgagaccaacttccggcccc

SEQ ID NO: 7162 - DNA, 814 bp, Homo Sapiens
  misc_feature (632)..(674): n is a, c, g, or t
  misc_feature (679)..(706): n is a, c, g, or t
  misc_feature (739)..(759): n is a, c, g, or t
ggggctcgcgtcaagtgactgaggcctgtggtggagaaggacgtgccgtgccgctgggttctgagccggagtggtcggtgggtgggatggaggcgaccttggagcagcacttggaagacacaatgaagaatccctccattgttggagtcctgtgcacagattcacaaggacttaatctgggttgccgcgggaccctgtcagatgagcatgctggagtgatatctgttctagcccagcaagcagctaagctaacctctgaccccactgatattcctgtggtgtgtctagaatcagataatgggaacattatgatccagaaacacgatggcatcacggtggcagtgcacaaaatggcctcttgatgctcatatctgttcttcagcagcctgtcataggaactggatcctacctatgttaattaccttatagaactactaaagttccagtagttaggccattcatttaatgtgcattaggcacttttctgtttatttaagagtcaattgctttctaatgctctatggaccgactatcaagatattagtaagaaaggatcatgttttgaagcagcaggtccaggtcactttgtatatagaattttgctgtattcaataaatctgtttggaggaaannnnnnnnnnnnnnnnnnnnnnnnnnnnnnnnnnnnnnnnnnncccgnnnnnnnnnnnnnnnnnnnnnnnnnnnncctttgttggggcccctttggcccttaaaaaannnnnnnnnnnnnnnnnnnnngggggcccgggccccctaggggaaaagggaaactgggccataacttgttccccaa

SEQ ID NO: 7163 - DNA, 535 bp, Homo Sapiens
  misc_feature (192)..(205): n is a, c, g, or t
  misc_feature (340)..(373): n is a, c, g, or t
atatgtctcatacacaggacaaaatcaattaatagaaactgttccagaggaagcccagacataaaacttattagaaaaagtctttaaatttagttcaaagggttaaagaaaaccatgtctaaataactaaaggaaaggattgaaaatggtgtttatctaacacagaatatcagtaaagagatagaaatgatnnnnnnnnnnnnnngaatcaaataggaatgctagagttaaaaagataactaaaaggaaaattttaagaggagctcaacagcagatttgatcaggtggaagatataatcagcaatcttgaacattgttcatttgagattttccagactgnnnnnnnnnnnnnnnnnnnnnnnnnnnnnnnnnngaacagaacctcagaaacctgtagatctctatgaaacatactaacatatacataatggggagtctcagaaggagcagaaaaagagaaaggtgataaaaatatgtgaagaattaatgtctgtaaacttaacaaattgtatgtaaaacattaaactgcacttcc

SEQ ID NO: 7164 - DNA, 502 bp, Homo Sapiens
  misc_feature (55)..(55): n is a, c, g, or t
ggacccccacactcctcacccctggcgtgcaaaagcaacatcacccagtgcctcntgggccaaccctggcccctgaatgaggcccaggtgcaggcctcagtggtgaaggtcctgactgagctgctggaacaggaaagaaagaaggtggtggacaccaccaaggagagcagcaggaagggctgggagagccgcaagcggaagctatcgggagaccagccagctgccaggacccccaggagcaagaagaagaagaagctgggggccggggaaggtggggaggcctctgtttccccagaaaagacctccacgacttccaaggggaaagtaaagagagacaaagcaagtggtgatgtcaaggagaagaaagggaaggggtctcttggctcccaaggggccaaggacgagccagaagaggagcttcagaaggggatggggacggttgaaggtggagatcaaagcaacccaaagagcaagaaggagaagaagaaatccgacaagagaa

SEQ ID NO: 7165 - DNA, 1072 bp, Homo Sapiens
agcggccgctggcgtcgatacggcgcttctcgcggatgaggtcttccaggctgtgaaacctggcggtgtggaccttgttctctcccaggtgcaccttgagatagtactgctgctgcgggggctgcgtgcctgccggcacctcccctcccgccttgaactcccgcttgccaaagcggcaccaggcggcgaagctctccgagttcgtccagcagatctcctcgctcttgaggcccaggtggccgcaggcgttctgcaccaccagctcggccaccagcgggcggtagcggtaccagctattcaccacccggcccacgttggccgcgcccgcctcatacaggctgtcctggcggatctcgccttggtgcaggtggatgatctgcccgccgcccacgtagacggcccagtgcggggcgggcgcgggcggctccggcgcgggctgcagccacagcagctccagcaggtcgccgggttcgcagagcgctggcagcgcggtgaccgcgtagacgcttaggtcggcgccctgagggccaccgctcactttggaaaagatgcattcctggccccgaaaggcggaaaactgagtctcgttgaggaccagctggtgcagcaggtggtgctggtggcggctggggctctccgggcagggggtgcaacccggggggaccttcacgccaaacttgtcgggctgcccgcgttcgtccaggtcttcctcatcatccgagaagaagtaggcaaccccgacccgcagttcgtccttttcaatccccgacgggtcccctgtgggcaactcgctgtagttgaggtgggtgatgcggtccagttggttgcccatcaatgaggtggcgaggcgagggccaggagcggggatccgtgatttccctgctcccgaaaccccaaactcctttaaagtctcctggtccccatgggtgctgaggaagcggcggtggcgagtgggtcctgggctgcgcgtggggctgcggctccgctctaccccgagccgaatcgtccggtgcggcgcccgtgcgcctccaggtctgcgctggccggggcgcctgctcccactggacagtcc

SEQ ID NO: 7166 - DNA, 676 bp, Homo Sapiens
ggagcgagagccgaggccgggggaagttcctgcggagtgctcaagggcagaagaggtgccgcgtcccgaagaggggaagcggagaagtttgctgctgcccgggtcgcctcgcgacgctgagagaatcgcccagccctccgcagccgcccagcgagaaccggagctgcggccccgcaccggcgtgagtccagctgagctgacacgccgagccggttgtgcctttccgagggaggaatgtgccgtggaatccaaactttggaaaacgtcccacccgaattcccagcgagcagcaaggagaccagagcgtcgatggagccaccgttagttgcgggagggctgtccccaagaggaattcatcactgtcgtccgctgggagggaccaaccttgaaatggggttggtggagagagggatagagaagagccggcgtgcttataaataacaaaacttagctatgaacccttccgattcccaagtggggaagatggggtaaaattctaagtgacttctcgctccgaagagggataccacaaaaagcggagcgcagggtacttggcgtataataagccatcaataatttatgggtgaaattgagagccaaatataagatgataaactgaagaataaaaacagctgacaaatactgtatagcaaagattgcgttggaatcataactt

SEQ ID NO: 7167 - DNA, 510 bp, Homo Sapiens
cagcttccaccgtggggacctcatcaagctgctgccggtggccaccctggagccaggctggcagtttggctctgccgggggccgttccggactctttcctgccgacatagtgcagccggctgccgctcccgacttttccttctccaaggagcagaggagtggctggcacaagggtcagctgtccaacggggaaccagggctggctcggtgggacagggcctcagaggtgaggaagatgggagagggacaagcagaggcaaggcctgcctgagactgaggaaggaaaggggtttgaccactcccgaggctgccatgcggtgggaccaccctgctgtccgtctcctgtggctgcccctctgcccgctcctgatggctcgccttgtctctccagcaagactgtgcactccttgcaggcaggggctgggctggatgctgctcttgtgtcccacgtggtacttagttcaaggctgccccagcagatgcttaataaacagctcttcactttcctgg

SEQ ID NO: 7168 - DNA, 1520 bp, Homo Sapiens
  misc_feature (414)..(530): n is a, c, g, or t
  misc_feature (553)..(580): n is a, c, g, or t
  misc_feature (592)..(604): n is a, c, g, or t
  misc_feature (693)..(701): n is a, c, g, or t
  misc_feature (744)..(755): n is a, c, g, or t
  misc_feature (758)..(820): n is a, c, g, or t
  misc_feature (896)..(896): n is a, c, g, or t
  misc_feature (940)..(940): n is a, c, g, or t
  misc_feature (1037)..(1037): n is a, c, g, or t
  misc_feature (1111)..(1111): n is a, c, g, or t
  misc_feature (1199)..(1207): n is a, c, g, or t
  misc_feature (1218)..(1218): n is a, c, g, or t
  misc_feature (1276)..(1276): n is a, c, g, or t
  misc_feature (1338)..(1338): n is a, c, g, or t
  misc_feature (1413)..(1425): n is a, c, g, or t
tcagaatgagattaagatcagatgttggaacgtgctatgctgtagcgtgtctggaaacaaagtacagaaacctggctacggtgatgagttagcttctgcttactacctgtgacaacccaagtgggtgacactagtgaaccttctccagtctgcaggctggcatagaaggctcttagattatattgggcagcttgcaatctgccgaagcagtgacttgcatttccacacttggcttgagcactcaacccagaaggcgaagatagcttttggttgtaggcggcttcctgtatgggatatccctcggtaagggtaaaggagcagaggcaaaggagaaaagcagaagttgcagctgatgcaggtatcctatgcccttgatggatgagactaaaataaaatttttgaagttaagatttnnnnnnnnnnnnnnnnnnnnnnnnnnnnnnnnnnnnnnnnnnnnnnnnnnnnnnnnnnnnnnnnnnnnnnnnnnnnnnnnnnnnnnnnnnnnnnnnnnnnnnnnnnnnnnnnnnnnngcaagaggaagagatcctctccnnnnnnnnnnnnnnnnnnnnnnnnnnnnttttgggcgggnnnnnnnnnnnnngaaaagaattttataagccactgttgtggtgggggcgggcgccccccactagggaaaggacaaacgggcccaacaacacttcgttcccnnnnnnnnnccccgccccccaaaacataaggggggggggcctcccccccacnnnnnnnnnnnnccnnnnnnnnnnnnnnnnnnnnnnnnnnnnnnnnnnnnnnnnnnnnnnnnnnnnnnnnnnnnnnnacgttgcgggcgaggagggctctctaggcagcgggactcaaccttcaacccgcggcgggcgggccgccgcccggtncggcgcaacctcccccttgcatcatcgctcgatttttccctctncccccgccacctctcactctcgccgcgcaccatattctttctatacctgacggataacggcagctcgcgggtgtgttattagaggaatctcactatntaggagggtggtcaactcattctgggtcccgcgcccacagtgcggagtgggaagacccctacgcttttccatanagcagggggtggatgtgattgtgttgatccacacaccccgctctaattcatctcgccctcctgggggcgggaactctgatactaacgnnnnnnnnntgtctctgttntcccgcacgcgcagaggggggggtgtacaatacttgttcccaccccgccgccgtgtcncgtggagggaaaaaacaagagccgggcgcgggggggagaaagaaaaaagagtagccgcgcgnccccagggttcggggcgcgcgcccgctttctgtcgataagcgcgaaaatatgtggttgtgtggaacacacacctnnnnnnnnnnnnnacagggattgtgtgcgcggcagatataacacccccgatataataaacaatgcttttttcttctcagacaatataaggcgccccctcgcggttaag

SEQ ID NO: 7169 - DNA, 1257 bp, Homo Sapiens
actgagctagtagaggcctggtgtaaatcggcacgaggatgcggcgcccgttgtcacggccccgggcagagctctgctgcgggcgggcgctggacggctgcttcggggaggcgtccaggagctactgcggccgcgacatgaagggaacgcccctgacctggcctgcaacttcagcctttctcaaaatcggggcacggtcatcgtggagcgctggtggaaggtaccgctggccggggagggccggaagccgcgcctgcaccggcgacatcgcgtctataagctggtggaggacacgaagcatcggcccaaagaaaacctggagctcatcctgacgcagtcggtggagaatgttggagtccggggtgacctggtctcagtgaagaaatctttaggccggaatcgactccttcctcagggactggctgtatatgcatcccctgaaaacaagaagctgtttgaagaggagaaattgctgagacaagaaggaaaattagagaagatccagaccaaggcaggtgaggcgacagtgaaatttctaaaaagctgtcgcctggaggtagggatgaagaacaatgtcaaatgggagctgaaccctgaaatagttgcccgccacttctttaagaatcttggtgtagtggttgccccacatacattaaagttaccagaagagcctatcacacggtggggcgagtatcgggtgttgaggtgacgggtaaatggggcttgataactggtgagagtgcctatgttctagtcgtgaactttgagaagcccaagaccaaaaagatataagtacctggttagcccagcaagctgccaaggctatggaccccaccagcccccagatctaaatctactctccctccaaggcagcaaagcagaatcgggagcagtggagcagaaatgtgcaagcaccctgatctcactcccagctctgaccaaatacagaattttagagaacatctgaagacatcagactgcactgcgtatacatgttgaattcttcatttttgccatctttaactgtcatcactggggcagggaagtcctgttccagaagtaccaggctgtagatttgataagctagatgcagtagaccgaaaccatccaaaacctgtttagcttcttcctccattggagtttattgggacaaacaggagagccagccattgtctccagtacttgcctcattctcatcatccaaactgaacatttgtatcccaagcagaaataaagagaatatgttctttttaaaaa

SEQ ID NO: 7170 - DNA, 187 bp, Homo Sapiens
gacgcagctggtagaagctgcccggggtctggggcagctgggtgaggctgtgaagagactggcagagatggcctggaccaccagcatgcctgcaccaaccaccactaccccagaggaagaagaaagacccctgaggggagacgtgtgaccctctccaggatttgaggggcttaagacacccccaacc

SEQ ID NO: 7171 - DNA, 433 bp, Homo Sapiens
gtgtgtttgcttgcgttgaggggagcaggaccataggccctagaggcccccagctgccttctgagactgggcgaaaccctcggcagcgcgcagggggcgctagggcgcgaggggcgggcactgacgggcaccaatcacggcgcagtcccaccctataaataggctgcgttggggcctttttttcgcatcctgcttcgtcaggtttataccactttatttggtgtgctgtgttagtcaccatgtctgaaacagtgcctcccgcccccgccgcttctgctgctcctgagaaacctttagctggcaagaaggcaaagaaacctgctaaggctgcagcagcctccaagaaaaaacccgctggcccttccgtgtcagagctgatcgtgcaggctgcttcctcctctaaggagcgtggtggtgtgtcgttggcagctct

SEQ ID NO: 7172 - DNA, 1181 bp, Homo Sapiens
  misc_feature (433)..(439): n is a, c, g, or t
  misc_feature (442)..(442): n is a, c, g, or t
  misc_feature (465)..(517): n is a, c, g, or t
  misc_feature (558)..(558): n is a, c, g, or t
  misc_feature (563)..(578): n is a, c, g, or t
  misc_feature (580)..(580): n is a, c, g, or t
  misc_feature (594)..(607): n is a, c, g, or t
  misc_feature (736)..(756): n is a, c, g, or t
  misc_feature (848)..(856): n is a, c, g, or t
  misc_feature (1046)..(1046): n is a, c, g, or t
  misc_feature (1075)..(1090): n is a, c, g, or t
acccgcatcactgatccccagtacttcctggacacccccatcagctgcagccatcttacagaatgttggaagacccaacctccaattacaaatgtacatattccactggcagatcatggatgtgaacctgacagtaaacatccgggagttcctcccattgttgggcatgtgcagtttgcacagttcccaggccgaggggagcccagcagccccgtagagctgaatttcccctatctgtttcaactgctggaagatgaaggctacaaaggcttcgtgggctgagacacagtagagggcttgagttggctacgttcatactgggataggcggggcacccagaggctggccagtgagggcccgcacaccacccacgtgcctccagacagcgagtgacatcccatctcctcctctgcattaaagatgacctgctgannnnnnnacnaaaaaccgcaaccaaacaacccnnnnnnnnnnnnnnnnnnnnnnnnnnnnnnnnnnnnnnnnnnnnnnnnnnnnnccaccccagacaccaacaaaaacacacaaaacactttcacnaaccnnnnnnnnnnnnnnnnanccccttggcgccgnnnnnnnnnnnnnnaaaaaaccttttctaacccttttttgtgggcgcggggggccccccaaggggaaaggcgccaacggggccaaattttgttttccccaagaaaaaacccgcggggcacgagaaaaagggggttggggcctnnnnnnnnnnnnnnnnnnnnnccgcccccgggggggggaaaaccggaggggtgtgtttgaagaacaaaaaacctacgaagagggggcgctcccgggggagggttccctctccnnnnnnnnncgttttacaacagcgggaggggggagctccctccagggcgggagcccctcccgagaataataacacaaataaactcaccgcccccccgccggcccggcgggcgcaaatatatctttgtgtaagagaagaagagagggggtgtgggtaaatattctctcttataaaactcctccctcctccgccgccccgnaggggggggaagacacccctccccacaannnnnnnnnnnnnnnncggaacaccccgtgactcgccccccccgcggggttattattacgcgccccctcggttgggccccgccttggagagagaaaaacaatctttg

SEQ ID NO: 7173 - DNA, 795 bp, Homo Sapiens
  misc_feature (16)..(16): n is a, c, g, or t
  misc_feature (59)..(59): n is a, c, g, or t
  misc_feature (104)..(104): n is a, c, g, or t
  misc_feature (165)..(165): n is a, c, g, or t
tgcccaccaaaaagangaagacaggtcagggcctgcgataagacccgtcacggggtgancctgcagggagtggaatgacctcttggaccgtgaccttgagggcncagctcatctaccggcacctgctggcagtggaggccatgctgtggaagaggcaccaggagnctgagcggaggcgcagaggcaggcacggtgcccacgagccctggcaaagtcccgaggactcattggcccggctgctccgggtgctgcaggacctccgcgaggcccatagctccagcccggccggctccccaccctcagagcccaactgcctcctggagctgcagacgtgaggcccgccctacgctccccttgctgagtcccctgccaagcgctcggagcccccccaggacactctgcaccccctcaccccggtcctcctcattagggtgcagggcctaggtctcttccaagtgggggaggggggagagtcaggaataaggggatccccagaagtgcagagctgagcaggcttgggcctgtcatggctggccggaagtgtccccagctccctacagacgctgtagccatcactgcctctccagggaccctcctctcctgcccaggacagacccagccagaaccactgctaggatgggccacacccaggggtctggcctccagggacctagagaatgggagggagaacggggccccaggagacccggccgccaccccacccgctacccttgggtgccacagggctgtgctgttgccaacagtaaacctgctcttactgtcaaagaataaaaa

SEQ ID NO: 7174 - DNA, 531 bp, Homo Sapiens
gaactttttttaataaaagcaaactaaaactggaggaagaaaaagaaaccattagaagcttgtgactgggtcaatgttgtttccaaattgggtttaattccattcaaagagaaagaaggggagggtgcagaaaaggccactcagatcgactctggaagagatcatcaagaccagggaagcatttggatggtacagctggtctcttcccagccagactgggaggacatgccacaacctcccaaggctgtgaacctaggaaataagtgctgaccaaataacatatttcaatgtttgtagaaaagctggcaggaaagggagatgatggattcagattcacaggtcatgcagattaagacgtaatcaaaaattaatgcttgagctgagtaagaaaacactaaaatttaaatggaactgtatcatagctttcacctttggaagacgaaaaacaacaaacataccaaaccaaatgacccagaatatttcagagtttccaaaatccaacctgctaattttggccaggtgagaagaagg

SEQ ID NO: 7175 - DNA, 525 bp, Homo Sapiens
  misc_feature (20)..(20): n is a, c, g, or t
  misc_feature (26)..(26): n is a, c, g, or t
  misc_feature (46)..(46): n is a, c, g, or t
  misc_feature (71)..(71): n is a, c, g, or t
  misc_feature (449)..(457): n is a, c, g, or t
ccgggacggtggaagccaanttaccnggggtctgaaggtaaatacncatggaacgcctctgctgccctggnatcatacgggtccataaaatcttctcttctcttgaaagctggtcaggaatgggagaagtgtcagacactagagagccccttctggtcctggctagggcaaattttagacaactattttctctgtaagtgaagattgtcgtattccaagtctaaaatacaccctggatctgtctagtcaatcaacatagcagagacagtcttaaacctaccattgacctgtgtgtaaatttaaatgtcaatttattgaagtgtaaatttcatcaaaggcattagctgacaggctggtaacagtccacacaagatggtataggcctgaacagtgtagtggcagtaataaagtgggaccattttttccaaatgcgacattgtttctgatgnnnnnnnnnatgatttgtgcatgtatttttatatgaaaaaaacttacaaagatatgcaaattaaacttctttcagtt

SEQ ID NO: 7176 - DNA, 573 bp, Homo Sapiens
  misc_feature (377)..(377): n is a, c, g, or t
  misc_feature (409)..(409): n is a, c, g, or t
  misc_feature (418)..(418): n is a, c, g, or t
  misc_feature (426)..(426): n is a, c, g, or t
  misc_feature (482)..(482): n is a, c, g, or t
  misc_feature (493)..(493): n is a, c, g, or t
  misc_feature (513)..(513): n is a, c, g, or t
  misc_feature (520)..(520): n is a, c, g, or t
ccatggcttacttttattttttattataaaaacacatacaagagttttaagaaataacgaatataagacaaatcaaaaccatggggagttattaaacccattttctatatacaaatactaaaattcccaaagtggaatatcatccaatgtgagacacatcatagcacgggccatatgtacacggcacacagagctctgcctgcgctcatctgtgaattgctcattacatgtcactgataaaaaaatctgcaagggaacttctactcttcagttctcctcttcctgatgcattgtcacatatttttaaggaactttagggatatgaagaaaatgcattaaagtgggttctgccaagggctctgcatgtttgccctgancaatacgcactacatctgagaaaaactttgcnactcattcngcaagatnggcgaaactctgggttttgccattatttttccagtcctcatgggacacagtccacnacaaaggctcnggaccaaacagttttaaatnggagtcntttaaaggcccccatttagagccctaagggaatttgcgcaaaaaggcaattca

SEQ ID NO: 7177 - DNA, 563 bp, Homo Sapiens
  misc_feature (23)..(23): n is a, c, g, or t
agcgctgaaggtagattcccccnatgctggtggagatcatcagcgaccagctgccccaggtgaagtcgggaacgccaagccgctctacttccaccggaagtgactgcccgctgcccagaagaactttgccttaagtttccctgtgttgttccacacccagaaggacccaagaaaacctgtttttaacatgtgatggttgattcacacttgttcaacagtttctcaagtttaaagtcatgtcagaggtttggagccgggaaagctgtttttccgtggatttggcgagaccagagcagtctgaaggattccccaccgccaatcccccagcgcttagaaacatgttcctgttcctcgggatgaaaagccatatctagtcaataactctgattttgatattttcacagatggaagaagttttaactatgccgtgtagtttctggtatcgttcgcttgttttaaaagggttcaaggactaacgaacgttttaaagcttacccttggtttgcacataaaacgtatagtcaatatggggcattaatattcttttgttattaaaaaaacac

SEQ ID NO: 7178 - DNA, 221 bp, Homo Sapiens
cacacctcatctcaattaactcactcaccaggagccaagtccctccatacctgatctcaattcactgactctcaagtccacgctctttccattgcactatctgcttttctttctccccaaagccacaatatgccacgatgcggcccaaggcctctcctccagtaccgtgctgagggctctgaacagatcagggctgaagccaagatgtcatccagtgcaat

SEQ ID NO: 7179 - DNA, 521 bp, Homo Sapiens
  misc_feature (353)..(353): n is a, c, g, or t
  misc_feature (484)..(484): n is a, c, g, or t
aacatctatccccctcctctcctcacctcacttctgctttccctggctcgtgtgaggccatctgattggctgtttcagtgctaaccacagggcatggagttcttccaataaatgttcctgactggcttagccaaggctgcggggcagggtcttcaatagccctgtcccagcaggcaatggagtcactctgaggccaacagctggggcagtaactccctgattcctggattgcaagctaaggtgacaccttcctgatgctgataccccaccttcccaatggtgtcctaaggcaagccgctctcctggcaggcccaggctaaagttggccatgctttttgaggcaccattcctangaggcccagcccagagtcccctcctcatgctagcccaaggacttcgtaagcacccgactccctgcacttgcattttgttttctgcttaaaaatagcctgagtggtctctgctgttaaggcacttgactganccctgactgatacagtgtagaaggacaattacaggcc

SEQ ID NO: 7180 - DNA, 355 bp, Homo Sapiens
aatatagattggcgcgtagtatatagaacaatattccatataaataagtttagcctttataaaaatgaagttgcaggctgacattacattctgtacttactaagtgtcaacagcccttacaaacattaaatgtaaatggtttcaaatggtcagcgttgtttaaatgtaatcatgttattttattcattgttaatgctttgatgaaaaggctttatatgcaagtagatctacgaaaatattgttcatactgatcagaattaaatttgtatagagcagagttttaaaatgaatgtaaatagcactaaacgttttctttctgcaacctgtacttacagattcttcctgtaaactaaat

SEQ ID NO: 7181 - DNA, 462 bp, Homo Sapiens
  misc_feature (58)..(58): n is a, c, g, or t
  misc_feature (89)..(89): n is a, c, g, or t
  misc_feature (108)..(108): n is a, c, g, or t
  misc_feature (122)..(122): n is a, c, g, or t
tggcctaagggccaatccacgtcattgagaaacggcctttagcctgattttcacgggncaagatgacattggaagtgctgctgaggaangacgctgagctccgaggtnaaaagggatgaggnaccctgaggctcaagtaagggttcaggctgggtgccaagggacactcctaggccatctccttgctgcttgagtaagggagaaatccccaggcctgctgtgtcccagaggaaggaaaaatacacacgggtactttccagggagccctgccttttgtcccagggactccaggctctttttcttgtctgagcctcacctggcacctggcccgagacactcctgagatgggattaagcaaggagcaggtggaggagcccaggcttctccctcaggaagcaagtgctcacatccaacagaagtacctacatgccggcctgagccagggctaggaggtaccagcca

SEQ ID NO: 7182 - DNA, 352 bp, Homo Sapiens
  misc_feature (183)..(183): n is a, c, g, or t
gaggaggaatgaagcgggtattacacccagcccagtgacagcttaagccttaacatgcggggcatcttacaatgaccataaacaagggaggggccaaggcagggctggcgatcattagctttgcgcacagaatgccatgttttcccctggccaacataagcaaagctgttttagtacctaaancggtggtatagccaaatgcacaaaaggaaagaagatagagatgacctcccgagttatttataccttgtgcctaaaatagattcatctacaagtatctaaatgacaaaactagaatgatttcaacccagtaatcctgtgttccaatgtgcatggataaagatttgatcta

SEQ ID NO: 7183 - DNA, 479 bp, Homo Sapiens
aaaaaagattacaaaactgaatttattgagattcacacaagatgcacttataaaattagtactgaatgccattaaaacagaagaaatgaacataatcccgaactcccaacagcatctgcaaaggaatggaaatcttctgaaaatgacagccgcagtaacagaataattcaagcggaactgaagatctatccaaaccatgttcctgctctgaaatcagggttgtgtttggcaaagctttccccaaactattccattcacggtggcattgttcccttttgttggtaaaggggagacgggaaaaaataactctaaaatggggctccattaaaacacacacaaagcaattaaaagctttttcatttttaacttaaaatacttcctggtttcacaaaggcatgtccatacaatttcctcaacattaatcttcagatttctttagttaatgcaaaacattaaaattcacttacttttttgtattt

SEQ ID NO: 7184 - DNA, 486 bp, Homo Sapiens
  misc_feature (156)..(192): n is a, c, g, or t
  misc_feature (194)..(212): n is a, c, g, or t
aggctgttaaaagacaggctgcctgaggagcctggagcaggtggaaacaggtggaagaaaccggccacagccctgctttaccgggctcacctctagggcattccagcaagaggctgatgcaggagaatggccagcaccaaaggacatttaaaagannnnnnnnnnnnnnnnnnnnnnnnnnnnnnnnnnnnngnnnnnnnnnnnnnnnnnnnggcacacttgagctgactcagtgcaggtttaatatcctggtgaccttgcagtcacattctaatgactttcaagggccagaatatggtgaaaatcacctaaaatatccgtcccttccatgccctagtttagcaggtaggctctatcttttgccaattctgtattttatgtggctgtgttcccctttcaactgggtatgaactgtgaaatggactgaatcctggccactttatgagtttgtttgttttataaggcactgtaggttggggatcctct

SEQ ID NO: 7185 - DNA, 826 bp, Homo Sapiens
  misc_feature (705)..(706): n is a, c, g, or t
  misc_feature (727)..(727): n is a, c, g, or t
  misc_feature (730)..(730): n is a, c, g, or t
gggggtgacgacttcgccgcgcgttggtcagccatggccaccgctctcgcgctacgtagcttgtaccgagcgcgaccctcgctgcgctgtccgcccgttgagcttccctgggccccgcggcgagggcatcggctctcgccggcggatgacgagctgtatcagcggacgcgcatctctctgctgcaacgcgaggccgctcaggcaatgtacatcgacagctacaacagccgcggcttcatgataaacggaaaccgcgtgctcggcccctgcgctctgctcccgcactcggtggtgcagtggaacgtgggatcccaccaggacatcaccgaagacagcttttccctcttctggttgctggagccccggatagagatcgtggtggtggggactggagaccggaccgagaggctgcagtcccaggtgcttcaagccatgaggcagcggggcattgctgtggaagtgcaggacacgcccaatgcctgtgccaccttcaacttcctgtgtcatgaaggccgagtaactggagctgctctcatccctccaccaggagggacttcacttacatctttgggccaagctgctcaatgaaccgccaggaactgacctgctgactgcactctgccaggcttcccaatgctttcactcttatctaccctttggcacttatcttgcttatcaacataataatttatacacttctccccnnggaggagaaaccaagagtggnaanaccttgtcgggccgcctcggcccttcaaaagctttcttaaaaccttcggttgggcgcggcgggcccccggtaggtaaagggaaacatgggtcatac

SEQ ID NO: 7186 - DNA, 440 bp, Homo Sapiens
  misc_feature (377)..(387): n is a, c, g, or t
agctctgtagagcatggttccagtgaggccaagattgaaatttgatactaaaaaggccacctagctttttgcagataacaaacaagaaagctattccaagactcagatgatgccagctgtctcccacgtgtgtattatggttcaccagggggaactggcaaaagtgtgtgtggggaggggaagggtgtgtgagtggttctgagcaaataactacagggtgcccattaccactcaagaagacacttcacgtattcttgtatcaaattcaataatcttaaacaatttgtgtagaagtccacagacatctttcaaccaccttttaggctgcatatggattgccaagtcagcatatgaggaattaaagacattgttttttnnnnnnnnnnnccctttagatgcaattttttgcgtgttctttaaataaatccaaaaaaaatgtg

SEQ ID NO: 7187 - DNA, 435 bp, Homo Sapiens
gcgccgcgggcgacgtcgccgtttaccttcacgtggccattctcctgtccgttcgctttggaaggcgacgaggccacagccgcctccccaggcctctccgcggcggcttctcccttcgctgcggtcttggagaactgggcacccatgctggcttcttcaacaaagaaactcaacagatccaagaggggaaacaaagagcctcgggttggtgtaacgacggggcgagcagcagcagcagcggcggccaacagcggcagcctacagcacaccggaggaaggggggtgggggtggtggagaggacagaacagaaccgattaaatacactccggataaaaaaattttagtcgaagagatcaaaaagcagcagcacaggagggagggaaaaagggtggaaaagtcgagcaccaaaaaaggagccccagttttgttcggaa

SEQ ID NO: 7188 - DNA, 1195 bp, Homo Sapiens
  misc_feature (551)..(551): n is a, c, g, or t
  misc_feature (785)..(785): n is a, c, g, or t
aaatgccgccaccccggaccggccgaggccttctctggctgggtctggttctgagctccgtctgcgtcgccctcggatccgaaacgcaggccaactcgaccacagatgctctgaacgttcttctcatcatcgtggatgacctgcgcccctccctgggctgttatggggataagctggtgaggtccccaaatattgaccaactggcatcccacagcctcctcttccagaatgcctttgcgcagcaagcagtgtgcgccccgagccgcgtttctttcctcactggcaggagacctgacaccacccgcctgtacgacttcaactcctactggagggtgcacgctggaaacttctccaccatcccccagtacttcaaggagaatggctatgtgaccatgtcggtgggaaaagtctttcaccctgggatatcttctaaccataccgatgattctccgtatagctggtcttttccaccttatcatccttcctctgagaagtatgaaaacactaagacatgtcgagggccagatggagaactccatgccaacctgctntgccctgtggatgtgctggatgttcccgagggcacccttgcctgacaaacagagcactgagcaagccatacagttgttggaaaagatgaaaacgtcagccagtcctttcttcctggccgttgggtatcataagccacacatccccttcagataccccaaggaatttcagaagttgtatcccttggagaacatcaccctggcccccgatcccgaggtccctgatggcctaccccntgtggcctacaacccctggatggacatcaggcaacgggaagacgtccaagccttaaacatcagtgtgccgtatggtccaattcctgtggactttcagcggaaaatccgccagagctactttgcctctgtgtcatatttggatacacaggtcggccgcctcttgagtgctttggacgatcttcagctggccaacagcaccatcattgcatttacctcggatcatggtttcctcatgaggacaaatacctgattttgaataaagcagcattcagttgaaataaccctttctgtggtaattccaagtgaatatttttcttctaggtgatgagtttctacttcctctggtttttacaacaggaaatgaaatggtatctaaaataaacaagctgtggtatgatgattattcaaaa

SEQ ID NO: 7189 - DNA, 429 bp, Homo Sapiens
tcttggatattgccaaaggaagccattcagcagctgctggggtttttcatccccctgacatgcatacatttgctctgggagaagtgtcttccctctgaccctggtccccagctccgtctgtgcttaattgctcttacctgttgcactaatgaatatgactaggttttaaagggggaatgtgaagcaataggcacatggggcttggatgaattggtcccacagatataccctgccttaagccgctgaggtgatgagtccactgctcatgtgaccctccacctttgtggatccctcttggtttgtgaccagtgtgtctgtttgttgaggttgtacacaacttgacaaaagttaatacttttgtttgtattttctgcactgttgcactctccaaatggccccttgagtatttttattgacttgttacacaca

SEQ ID NO: 7190 - DNA, 1266 bp, Homo Sapiens
actctgaggtcccctaacattcaaaatccacatagagagtcacactcgggaattctacattgaggacgtagtggtgccattcctcatcacagacctgattcaacttccagtggaactctgcaggtctgtatttcttctcctcagaaggatcctgacggaagaggaagatcagccggcacccgtggacatagagggagtagtggtgccgattcatatctgttttatcagaactgcaaagaattgtctccttcttcctgccgaatggcccatgtctcatccacaccgagatggtgaacggctctttggggctgaccgacacgacgccatccgggatcctcactgcctgggtgccgttgaactcaaacacctggtcgctgtcgtggccattgtcggtgggcaggcccatggtccagttgagggatccactcggggatggcagcagctcggcagtgcccgcggccgcaccacagagccggtggagggacttctctgagtaggtgtctcggtcgcagcctttccctatgtggctggtttctagctccactgtggcctgtactgaggcgactggctcgtcacatgtctccaggtggatatttggaaagacggccaacgcgccggtgcccggctcatactcaatcctgttgttccatccttgccacccaggggtgcaggtgggcttaatgctgatcttcaccaaaacatcttctgtggctcttttcttcccacagtcataggcagtgacggtcagcttatattgatgttctttcccgtagtttaatttctctgtgtgttttatataaccatctttgtcaacagtaaagggcacgtctggagtgatgatttcgtagctgcaaatctggctgaactgaggggagcagtcggcatccacggcctccaccctcaaaatgctgtcgtactgcttcccctcgatgaccgtggctttgtaggacttctccttgaacacgggcgcgtactcattcacgtcgttcacctgaatatgaacagttgctttatgagactttttcacgttggtgccatcaggtcccttcccacaatcataggcctggatggtgaatgaatagtctttctgcagctcacagtccagttcctctttggagcgaatgactccctcaccagtggatttatccactaccactgcatcaaaggggacattctgcccgtgaattttaaatccacaaatctcacccgcaaatcgcagaggcgctcattatccaacgcgatgaactgacgtctctaatcctcggt

SEQ ID NO: 7191 - DNA, 493 bp, Homo Sapiens
aacaaatgaatcctgacagacacctgcagtttagaataaatttgtgaacatccatgcgtataaagtgtcctcttgggacaagacatgttcacactgacttggggaatatgcccccaaggtgagagctgtcttttgaactgtgatctgactctgaaaagtagtgaatgccccaggtgatagactgtaactgtgagtggaattaatgctgcttgcatgccttttaatccaaaaccaaattcttttaaaaaatttttaaataaaatttcacctttgtattctttcattacagatatccatttggggatgaagtctactttgacagctagcaaggcgacatgcaactgttgttgaatgatgacagcaattcaggaaagacttaaatatgaaagcaaattgaacacatcgggtgtttgttatcagaaaagagatgagatgagataagacttgtttattgactagccaatatgtcattaaaattaaggtttatattgtg

SEQ ID NO: 7192 - DNA, 396 bp, Homo Sapiens
  misc_feature (232)..(271): n is a, c, g, or t
tgaatgtcactagacaattaaacttggattgaagcgtaaattgtggtacagaaatacatttcaactgatttaagtccaacaccagtgaaaggagaaattatggcaccaaaactttccctcttctatcatacgatgatttagattatgattcaaactacatttctcttttctaggctttgtcccataaaaatttgtgcagtttttcaacattagaattcttaattctattggnnnnnnnnnnnnnnnnnnnnnnnnnnnnnnnnnnnnnnnncagacctcaagtcaacaaatctattgggatattgtttacgaacaaagtccaccttaagcattggtcctcaaaacagagctcctcaaaatattaggtgctgtgctcattacagaatcaaactgatc

SEQ ID NO: 7193 - DNA, 401 bp, Homo Sapiens
  misc_feature (121)..(129): n is a, c, g, or t
acaattatttcttggtttccacttgcaatggttaattaagtccaaaaacagctgtcagaacctcgagagcagaacatgagaaactcagagctctggaccgaaagcagaaagtttgccaggnnnnnnnnngacaacattattaccatcgattcagtgcctggataaagaggaaagcttacttgtttaatggcagccacatgcacgaagatgctaagaagaaaaagaattccaaatcctcaacttttgaggtttcggctctccaatttaactctttggcaacaggaaacaggttttgcaagttcaaggttcactccctatatgtgattataggaattgtttgtggaaatggattaacatacccgtctatgcctaaaagataataaaactaaaatatgtcttca

SEQ ID NO: 7194 - DNA, 785 bp, Homo Sapiens
  misc_feature (328)..(352): n is a, c, g, or t
aaactctctgacctcgtgacactcacctcagcctcccaaaatcctggggttacagatgtgagctaccactcacggcccaaatcttcttgatcatatgtttaaatatattttttaatatttggagcatgagttgtcacttcttgtttgccttttttataaggaaatgttggagagttacatcattgctaatgtagaaatgttaagtggaaaaatatacagtttggtaaaataaactagattctacatttatttgtgggtttttttcccctcctttctttccacagcacttttgatatcaagcaagtggcttcctttttgagatattgannnnnnnnnnnnnnnnnnnnnnnnncagtaaatgaagcccaactacctaaccctttcttatttgtatttgttttagtattgtgaagttgtgttaaatagtactagctagaaatacaaatttctggttatcatttctcttccctgtggcacttgacattttaattgtcttaaagtttttgaagtacatcttctggccccttgagtactgccagaggcaaaagatgtttgtttcttattcattccacttttgtctcctgggatcccttctgtagcctaaagtatggctgggaaatggacttgagaagattggcttgaattagatcataatcatgtgtgatcccatcatgaattcattggaatttgtgttgcatgtaaggcaatctttcctgttgtaaatcttccttttttaatgtacatatattttgaaaaatatgaataaacatgaaattttaaaagct

SEQ ID NO: 7195 - DNA, 787 bp, Homo Sapiens
ggtgctgctgcttctggaagtagtcccccttcctcccgggatgacctcaggactctgtcggtttcccctctttacccttccccgtccccgtgttctgctgggctctgattctgcccaatgagtatccccataggttctcaaaaacatgaacaagtctgtaaagctcagacatttgtcagcctcaacagcaccacccattcaagcatcctgtggataaagaattcagggaaccatccacacacctgccaaccctgggaagcacccagttctcaaatcgtatttggctatggatttatactaacaagaacattccttgacttccctcctgctggtgttttaaagccacaagtagggaagatatctggcaggcagaaagaagtctgtgatgataaacaatgatgaggatgacctaggcaccctacgctagtgtgagaagcctgcgccccaggaaggatctgtgttagtccctgggatggctccaaggcctgctctaggaaggcagcatgctcagtgggaacacagcaagattcagaatttaaagtagttgcttcatggctctgtgcactcccttttcttcctcgcagcctccctaagatgactccagtgtgaccctgtgcttagtgagcaatagtgattgagctcatgttccctgcaagtgccatttcctctccaggatgggcctctaaagctgaggcctggctcagagcctgtttgccctctgtcttaaacaattgtaaatatcacttaaattataaccatttgcaataaacatccccaaagttaaaaa

SEQ ID NO: 7196 - DNA, 504 bp, Homo Sapiens
gcggccgctgttaccacctcaaacactggtctaagtccagggcagcctgggatccctactcctcttgaccccaaaggccagcaacgtgggctgacacccctccccggggcatctttggacgggtcctgcatccagcagggatgtggtcatctctgtcctctcagggcctgggagccagcgggtctggccgagtgttagggtggcttcctggtctccttccttagcagggagctggccacagccaaggcgcccccctgcacaaacctcacgaagttgtccccggccagcggccccatggcgtacaggccctcctggcgggtgctctggtaggtgaaggggtccacgtcaatggggttcctcttggcgctcagcggctggtcaggatccactgcaaagtcagcccctgccccaggcaggaaggagaggtcggggtgggagccgatgaggaccagcaccagggagaccccaaacaccttctcgacaccctcgaggtcctggaacacg

SEQ ID NO: 7197 - DNA, 547 bp, Homo Sapiens
cgtgatgtgaataccctctcccatcaatatttgtattatggtgctatatattggtaatgatcctttaatattgggaagggattttaaaaatactgtgattaaactgggtttcttcctttgattttcatattttaaataaagccacagtcatttatacaaaagaaaagcatctgtccctgggcaaatcttttgaggacagaggtcaaagtaaactgcataaggtttttacatcatttctgtatgtatttgatatatagatcaatatctgtacaaatttaatcttttattttcttggtaactcgtgatcattgagaaagtgtttgaaactttctcatgaagtgtatatataatggcgtgaaaaattcctttggaaaaatttatgttcctttcatttttaccaaattgcaaattttcagcatggatgtgaaaagcattaaaattataactttgtgtacaagatgaaaataattcactaaatttgcccttttttacacaaaataaaatgttaaagcaacaaaattccgcgccacccgcgttgccgccgtgt

SEQ ID NO: 7198 - DNA, 850 bp, Homo Sapiens
  misc_feature (280)..(280): n is a, c, g, or t
aagacttctcctccattgcggacatggacttctcagccctgctgagtcagatcagctcctaagggggtgacgcctgccctccccagagcactgggttgcaggggattgaagccctccaaaagcacttactggattctggtggggtgtgttccaactgcccccaactttgtggatgtcttccttggaggggggagccatattttattcttttattgtcagtatctgtatctctctctctttttggaggtgcttaagcagaagcattaacttctctggaaantgggggaagctggggaaactcaaacttttccccctgtcctgatggtcagctcccttctctgtagggaactctggggtcccccatccccatcctccagcttctggtactctcctagagacagaagcaggctggaggtaaggcctttgagcccacaaagccttatcaagtgtcttccatcatggattcattacagcttaatcaaaataacgccccagataccagcccctgtatggcactggcattgtccctgtgcctaacaccagcgtttgaggggctggccttcctgccctacagaggtctctgccggctctttccttgctcaaccatggctgaaggaaaccagtgcaacagcactggctctctccaggatccagaaggggtttggtctgggacttccttgctctccctcttctcaagtgccttaatagtagggtaagttgttaagagtgggggagagcaggctggcagctctccagtcaggaggcatagtttttactgaacaatcaaagcacttggactcttgctctttctactctgaactaataaatctgttgccaagctggaaaaaaa

SEQ ID NO: 7199 - DNA, 467 bp, Homo Sapiens
taaaagcatttatccttcataccaattgtaacatctgacaccatgtagaagctaaaagtttagagggagtgagcgttttctcaagaccttcctcaagcattttatctttagaagagaaactgatgggcacctgatactctgtctaaatacgtttgttatatgtgttttgccctgtgccattcatttggaactttattgcattctttattttaaaaagcttgtttttacgtaatcatagagcttgctatttgtacatctgttgagcaacactacataactgatttttagttgacttagctatagcagtacaatgattagtaatgtaaaaattaacacagaaattaacctaaggaatgaagggtgggtttgtcaaaatatcaagtaaatttttgtttctaaagtacatttaatgtagatgacctaaagaatgcgttatccatcctatataaaagaaagataaaacacaa

SEQ ID NO: 7200 - DNA, 853 bp, Homo Sapiens
tggggaactttgaccagtagtcctttctctcactcagtgtggctctagaaccacactgcagaattagaacaccagctttactttcgtatctcatgtgcctttgcaaagttatttactcttttctgtgttttaatgttttcatcagtaaaactgagctacttatacctacctcacaaggatacaagaattaaatgaacatacatttaaatatatattcaagacaactgtatgctagacactgtacagagcattcaataactgttagccattcttattacaagaatctttgaaaagtcaaactcttccatgcctttacctatcctgagggttgaaaattcaaattcctgtcaacaatctgagctccagattcccagctgcctactatcacctggctgctgctactatcacaggcacctgaaactatttccaaaagccaaatacaaacccaaatcctaaccctaaactgctgctcctctcatcatctttaatttttgaaaaactagtcaacaaatatgtctaccacattcttcatatccagtttcccgttaccactgtcactatttacaaccccacgatcacagatacacttgtaaaatgaaacttgttcataaattgggaattgttagtattccttagtgctgtcttgcctttctttaattagtttattaaccatattatccaaaacatattatcaggaggctcgctttgtattgttatttaggtaaatacctgtgtaggggacataagaccttcattaatatccaagaaaaagtgtatttatcaaagttcttgcgaactaaaatgttttaagtaattttcttttccttttgtattttcaaaggagctgcatggt

SEQ ID NO: 7201 - DNA, 478 bp, Homo Sapiens
  misc_feature (76)..(76): n is a, c, g, or t
  misc_feature (81)..(87): n is a, c, g, or t
  misc_feature (93)..(93): n is a, c, g, or t
tgatgacatgtcagtgtgaaaccatgacgtgtggtctttgatttccattctgcatgtgtgtgtctgtgttttggancagtnnnnnnncggttntgtaaaaacaaccttcactttatttttaactgtgtagtaagtttatattcaatgccttaaagtgcattgttaacaattgtcttgatatgttgtcctcattttagggaaagtcatagaagccaaaatgatcagcagttgagtaatttacgaaagcacaggtgcaatcccactttaaagcactgggggttgcacagagcacactggtttcaggctccataaatgtggatgactcactggagagcttcatctgtttaagtagaacaaatgtttttactctactgataaagtacaggaaaggaggtttgggatcaaaattatttttcacattccaaacctgtgacaccttacgtttatcgattgctatgcaataaaatacatctttaat

SEQ ID NO: 7202 - DNA, 901 bp, Homo Sapiens
ggcggcgggtcggggcgagaggctgaggggatctggcggtggagcgctaggatcagacgcccccgcgatgaccagctcccccgtctccagagtcgtgtacaacggcaagaggaccagcagcccccgctccccacccagcagcagcgagatcttcaccccagcccacgaggagaacgtccgcttcatttacgaagcctggcagggtgtggagcgagacctgcgaggccaggtgccgggtggcgagcggggcctggtggaggagtatgtaggagaaggtccctaaacccagactgaagaccgttcaagcccaatcgacctgagtgacctgaagcgccggagcacgcaggatgccaagaagtcctagagcgcccggtgcccctccccggcctccggaagatcagggatcaggaggggagaagaaggagcactctgctgcctcccaggctgctgggactgggctggttttgtccttgaagtggtcaggatacaggacaagggcagccccaccccatccagcctgggctccccgcagacccttgctgctcccgtggcctggacacgctggggagcttctcacacctacccctaccgtccagcctggcctcttccctgaatcagcttcaagatggcaccagctctttgggcctaggatactgccgggccccccaagggggtccccagcaaccaggcctggcctcctggtgtctgcggtcacagtggcccctgggcaggggcacccaggctgaccctgaggtgctgctgctgggtctgtcttggctctggggtgtgctgggagggtcaccaggtcccttttccttcctgtgccctctgaaagctaagtgtctgtgtggctgtggagctcgagggtctgtgaataaaggcggcggcactgggaaaaaaa

SEQ ID NO: 7203 - DNA, 532 bp, Homo Sapiens
cattgagagttgagttgtggacttagtcattgagtgaatgttgaactttcttccttgaatcagcgttagagtcaaatgtgggtttaatgtgaatgctaaatgaatatgcaacatagtttcaaatggaacatagaaatttcacttttgaaaataataaacccacaacctaattgcatggttttgggctgaccgtcctgtctcattcatgattttactccctgcccagcttgcagatacatgcatttgaattttagtagtctgtcatatttaaaatcccacatatgtgagttaaatatgcaataaagaatacgccttgctgattagccacacccaggcaatttaatatccatggtcttctataatgtttataccacattgtaaatattcagagaacttgttttaaagtttatgctttctgattctgtgattttcaaaagaggaatttttttggaaattaaggactatcgtttgataattatatatgtaattaagatttagccaagcattaaattaatttttaaatataaaaaaa

SEQ ID NO: 7204 - DNA, 1177 bp, Homo Sapiens
ggggctctggctgcgcgcggagcgggctccggagggaagtcccgagacaaagggaagcgccgccgccgccgccccgctcggtcctccacctgtccgctacgctcgccggggctgcggccgcccgagggactttgaacatgtcggggatcgccctcagcagactcgcccaggagaggaaagcatggaggaaagaccacccatttggtttcgtggctgtcccaacaaaaaatcccgatggcacgatgaacctcatgaactgggagtgcgccattccaggaaagaaagggactccgtgggaaggaggcttgtttaaactacggatgcttttcaaagatgattatccatcttcgccaccaaaatgtaaattcgaaccaccattatttcacccgaatgtgtacccttcggggacagtgtgcctgtccatcttagaggaggacaaggactggaggccagccatcacaatcaaacagatcctattaggaatacaggaacttctaaatgaaccaaatatccaagacccagctcaagcagaggcctacacgatttactgccaaaacagagtggagtacgagaaaagggtccgagcacaagccaagaagtttgcgccctcataagcagcgaccttgtggcatcgtcagaaggaagggattggtttggcaagaacttgtttacaacatttttgcaaatctaaagttgctccatacaatgactagtcacctgggggggttgggcgggcgccatcttccattgccgccgcgggtgtgcggtctcgattcgctgaattgcccgtttccatacagggtctcttccttcggtcttttgtatttttgattgttatgtaaaactcgcttttattttaatattgatgtcagtatttcaactgctgtaaaattataaacttttatacttgggtaagtcccccaggggcgagttcctcgctctgggatgcaggcatgcttctcaccgtgcagagctgcacttggcctcagctggctgtatggaaatgcaccctccctcctgccgctcctctctagaaccttctagaacctgggctgtgctgcttttgagcctcagaccccagggcagcatctcggttctgcgccacttcctttgtgtttatatggcgttttgtctgtgttgctgtttagagtaaataaactgtttatataaagaaaaa

SEQ ID NO: 7205 - DNA, 1241 bp, Homo Sapiens
gagtattcaatgaatggaatttaatgtaactatgacataaacacacacagggtggggaggacgggtgaccaagcgcagacgtgggtgacacgtggccccgctctctggaccctcagtgggaaaaagtctgaggctggcgtctctcaccaaaccccacctcccctggtgggtcaatactgatctggctgagtgacagcatctcgtgacccaggctggccctgggaaggcgccacaggcgaggcctgcgagtccagggagcaggcagacgctacagtggcccccgagcgcgccaggtgccagcctcgacgtgtaaatggcccgctgcgggcgctgctgggaaggaagacaagaagggtgagggctcgtcctcaccaagtgcttcctgagtgccgtaggacgtgggtgggacatggggacagtgagggtaacacgaaacagcaacgaatgcacaaagacaagttccaggaacacccataaacccataacgttcaacaaaatggcaacaaaacgacgcccctgctggcctggcgaggctggcgcttccttcgtggcagatgccacctgcagctggctggctggcaagcgttggccaagctttttggtacctgggagctcaacagcataaaaggctgtaacctctacacggaaaaatttcacatccttcccctgaaactgacttcaggggcaaagaaacgagacttcttgaagaccagcctcttctgggaaaggggcttctgagacgagtgtcgacggcagagcagatggcctggggaaggcaggggtccctgggcagaggctgggagggtggccagagaccagggagggcccctccatctggtgggtttggcaggtgtgtcccctggtgctgccaccaggagccccgaggccggggtgttggctgcgacagcccctcactgggtccggagctggtaatctccattctgcgtgatataacgcacccagggcagggcctggtacccactcttctcaatgatcttcaggtagcgcacctggatgccggaggtagtgaagtaagggatctcgaacttgacactgatcgggggcttgccctccttgtcttcggcctccacactaggcaggccgaagtgggcccgcatcaggtactccttgccgcccgggaaggaacttgatggaccacacgatctcgctgtcctcggggacccacttaacgctccccaccgtcgtcttgaacttgggtgagtcagcatcctttgtgcagc

SEQ ID NO: 7206 - DNA, 789 bp, Homo Sapiens
ctatttgcaacagtttataaaggcaaacaaacacctgcaattgaggtagcaaagccaaattcacaaactttggatcaagaaaaatacccttcctatgttttaacagcatcttctatacaatagtgaatgaattctaattgttccaaaatttttaattcacattactttacaaaattttatttaaaatactgaaaatgttttgttaaaaagacagttagtcctgacaatcatctcacattcaaaatactgtacaaaaaaatctgaagtcaccatatattacaaaaaactaagctatgtatttacatttccaatgtagttttagaagttgaggttaagccaactgctacaaatggtctcctttaagcagtgtctgctaataatgtcatcacttttcactttcagcatttaatataggcccttctttttgctttcaaattatataattagtaaaggatttaaagaaaaacaaatgaaaattctattctcttactgaataaaacataaatgtactttaaatggaacagtgttttcatttaagaaaagccaactggcaaaaaaacatcaaaatttgaaaagtaatcagaaaccataaacatcaatagcattcttcacagtacatttatattaagactgtcttctgttttcaggattaacgggttgaaaatttcccattaaaatgcaaattctcacatccttacttgtatttttcctatgttaactgtaagttaatacaagtaaacacggctatattaaaagatcaactactcggctccatagtcctgactcaaa

SEQ ID NO: 7207 - DNA, 477 bp, Homo Sapiens
cggcataaaatgtttacacagtgatgttatgaacgagattgccaacagagcctctaatgaggccaggttacctgcagacaaaatgaaaacccagctccctcccaacacggtccgctactgggcccagaccgcagcaaccgcaacgcccactgccacctttccaactgcgcagccgcacactctccgggctctccggccccctcccatctgccgcagttaggaaaggccgagaagtgcgggcggagccgcccgcgccctccgcaaagccagcccaatggcggcctcgcgggcgcgtcacagcgggtggaagccagaatctcgcgacgcctcgaccgcgcctgcgccaacagcagcgggcgggcgctctgcggccacaaaatggcggcggtggaatcaaaggcagcagagctgcgcgtgccaaattccctcttcccttctcctcccagcaacccccttctcgggggtcactgcggccgc

SEQ ID NO: 7208 - DNA, 742 bp, Homo Sapiens
  misc_feature (33)..(33): n is a, c, g, or t
gccagccgggctaagtcccgccccctgcccacnatgcaaaagctggtcatcccctccgccgccaccaagttcccccctgagatcaccgtcacgccacccaccccaaccctgctctccccaaaaggcagcatctcggaggagaccaagcagaagctgaagtcagccatcctttctgcccagtctgctgccaacgtgaggaaggagagcctatgccagccagccctggaggtcctggagacatccagccaggagtcctcgctggagagcgagacagacgaggacgacgactacatggacatttgaggggccactgcagccccaccgccacgccccaggggaccagccaggcctggaatgccccctgggcaggaccctgggcaggaccagaggcccacatggatgccactccccacacagcccccaggcctgcccagcccacctcctcatggcatcctccctgtacccaggtcaggctgtccacaccacatgggagcccagaggaggaggggcccgccttagccatgtgaaggtggattggtcgccatctgcacgccaggcggcatccttttctatgaagtgttgactttgtaaatctgcccacacccagctggccatatccacccctcgacgccgggatgagccggctctgcctgtgtcacagtggaggggtcctttagggccaggctcacccctcaccctttttttggttgcttttctaataaagatggaacagttaaaaaaa

SEQ ID NO: 7209 - DNA, 705 bp, Homo Sapiens
gcaagtgttatccatgactgccagatgccacccagcccaagacccaatttccacagcgccctagagaaccacgatggtcccctggcacctacacaaccctcccagtggtgtcgtatcttccgtaggccaggtttctgcagcaagccccaaagacaaagcttggcagaggctgtggcagccaactctctctggagcctcatccctttgtccttcccaacaggtagtcgtacatcttcactgacacagcgcctctatgggagccttggccagcccttaggaaataaagtgtgtctgtggggtaacctgatggaccctatggtctgctgggttggcagatgcttcgtaattgcagatggtcacctcgtgtcggcgaagctcagtccactctcctctcaggccaatataaaagacctttgtcgtatctgctccgaagttttttgaaatatgaattgagagatgatagacatttgaaaaacgagaaatttttgtagcatactctaattctcctgtaagatcccggttcagactaaaggtctgatctggctccctttctgtatcatcaaaggacatctgtggaatattcttgtacagtctcatctcagaggggtgtgagtcatcatcctctcccattataatgatgcctttgagcttgacattgcccgtaaatggaatattaaacagaagctcttcatctgcatcactttc

SEQ ID NO: 7210 - DNA, 408 bp, Homo Sapiens
ttgtattcaatcgaaatatatttgtctaatatctacaaagtgtgaacaactggtcttaagaaagcagacaaaaggcacaaaattagtattactacagagaagcattcatgctatttggatttgataaatattggagtggcacagtaaaaaataaattaagcattcagcaaaaacccagatatttcattttttcccttgctttgtaattttcgtcactcctttgacctcatgtgtaaaggctaaaaactgaaatttaactgaaaccatggaatatttatgcaggcgttatggatggtttagtcacagtgctttcttgcagagtttgggttaaccagagaggtgcacttgaggaaaaaataatccacaggaaattctcttctctttccccaaactaaatacaagattgag

SEQ ID NO: 7211 - DNA, 635 bp, Homo Sapiens
  misc_feature (79)..(79): n is a, c, g, or t
cagcgattgaagcaggagctcagctctgagttgagcacgctgctgtccagcctctcgcgctacttcgcccggggagccncagctcccctgccactggtgtcctcccctcgccacagggcaagtccacctctctctccaaagccagccctgagagtcaggagcctctgatccagttggtgcaggcgtttgtccggcatatgcaaagatagggcagtgctgttctgcccacctacccctctccaccagcctacactgcaccctggctggcaggggtgctgctggctgctagggcctatacaatggagggcacctcctgtcacccccctcccggagtagccacgactccagccaccacccactgacgttatttttatactagatgaagaggtcaacagcaggcatggggagccgagtcttctgtgctcaggtcctcacgctgcagacgccccctagaggaactttccttcctttccagcattccccacagcactgccggccaggggagaggcggcagcccagcagagggctctatgcacgggtttcaaacctgttttccacactctgtctttgcagttttggtaattctgtggtctatttatacagatattaaaatcttgtttatacgagaaaacaat

SEQ ID NO: 7212 - DNA, 927 bp, Homo Sapiens
  misc_feature (67)..(82): n is a, c, g, or t
  misc_feature (337)..(337): n is a, c, g, or t
cccggcgctagaaccaccccacagggggacctggtgggggcactttgttgtttcacacagagccggnnnnnnnnnnnnnnnnctgtctccccccctttattttacaccaattttttagggggaattttacaaagtatccgaaccccttcccagaagttttccacataaacgccccttgcctgtgtgaagtccccaaagaattgggttccccttcttgcttgcctcgggtggtggcccttgggcctccagcccttaacaaggagggtgacccccttgcaaaaggaattcaaggagacgctgaaggggctgctggggagcgccgccaagggcagcctcnaggtgccaccgcagtatggctgggtgttggatgctgaggtgatgctggacagtgacggcgagtttctgcccgtaagggactttgtggcacctcaccttgcccagccaactgggagcccagtcaccacctccagggtctaagaggctagcgttcttgcggtgggagttccccaacttcaacagccgaagcaaggacttgctgggtcgctttgttctggcccggcgacacatagtggctgcaggcttcctgatagtggacgtcccattctatgagtggctggaactcaagtctgaatggcagaaaggcgcctacctcaaggacaagatgccaaagcggtggctgaggagctggccaagtgacttgtgccagcagcatggactgcgtgcctctccgccggaggtctagctgtgggcggccaagaagggtcacccttgaggacaaacctctgtgcaggaccttggccagagtggggagggtggccagccactctgagggacagaacgtcctcttgtgtataataaacctttaattttggtgttggacccctggggccttcccaggcttggtcaccctctgcactgtcaaaaaaa

SEQ ID NO: 7213 - DNA, 209 bp, Homo Sapiens
ccgggtacgccgagcggttctggctgtctttgaaggaaattcacatcaatgagctgctgcacatccttgtttttggggagtacttgctcaatagacgccgtcactgtggtcctgtatctaactctttgaagaatttgccaactacgaacacgtgggcatcgtggacatcttcctcggcttcctgagcttcttcgtggtggccctgggcg

SEQ ID NO: 7214 - DNA, 1119 bp, Homo Sapiens
gggaaacggcgggaccagcagcgacggtagcagcagcatggccgcgatctatgggggtgtagagggctgatcgggacagacaagtgtgtggagaggatcaatgagatggtgaacagggccaaacggaaagcaggggtggatcctctggtaccgctgcgaagcttgggcctatctctgagcggtggggaccaggaggacgcggggaggatcctgatcgaggagctgagggaccgatttccctacctgagtgaaagctacttaatcaccaccgatgccgccggctccatcgccacagctacaccggatggtggagttgtgctcatatctggaacaggctccaactgcaggctcatcaaccctgatggctccgagagtggctgcggcggctggggccatatgatgggtgatgagggttcagcctactggatcgcacaccaagcagtgaaaatagtgtttgactccattgacaacctagaggcggctcctcatgatatcggctacgtcaaacaggccatgttccactatttccaggtgccagatcggctagggatactcactcacctgtatagggactttgataaatgcaggtctgctgggttttgcccgaaaattgcagaaggtgctcagcagggagaccccctttcccgctatatcttcaggaaggctggggagatgctgggcagacacatcgtagcagtgttgcccgagattgacccggtcttgttccagggcaagattggactccccatcctgtgcgtgggctctgtgtggaagagctgggagctgctgaaggaaggttttcttctggcgctgacccagggcagagagatccaggctcagaacttcttctccagcttcaccctgatgaagctgaggcactcctccgctctgggtggggccagcctaggggccaggcacatcgggcacctcctccccatggactatagcgccaatgccattgccttctattcctacaccttttcctagggggctggtcccggctccaccccctccaagctcagtggacactgggtctgaaaggaaggagtcttttgcttcctttctcctttttacaaaaacaaacatagaagaaaataaatgcactttatccactcccca

SEQ ID NO: 7215 - DNA, 783 bp, Homo Sapiens
tacggctaggtacgaggctgggtgtcgaattcggcacgaggctggagctgctcaaacataatgaagcctacacctggaccaaccccacctgctgcgtccacaaagtcatcatcgggaagctgtggatagatgcagtatgggacagtggagattttaaaccagcagaactggagcataagtgtgtgcttgcactttaagatccgtgtggattatttggaaaacaacttcacaaggttggaaggacacattcacagacaaaaacaacaatagaacctctttatgatctatggcaaatggacggaatgtcagtggggcatagatcctgtttcctcatgaatccttcaaaaaccaggagaggacaggtgaacacctgagaaaggccaagctggataacagactccgggaaggctgacatgcgacgtggctgacgacgtgcctgtggcccaggagaccgtgcaggtcattcctggcagcaagctgctctggaggatcaacacccggccccccaactctgcccagatgtataatttcaccagtttcactgtgagcctcaacgagctggagacaggcatggagaagaccctgccacccacggactgccgcctgcgccctgacatccgcggcatggagaatggcaacatggatctggccagccaggagaaagagcggctggaggagaagcagagagaagcacggagggagcgggccaaggaggaggcagagtggcagacgaggtggttctacccaggcaataacccctacactgggacccccgactggttg

SEQ ID NO: 7216 - DNA, 271 bp, Homo Sapiens
tgtctctgggcgttctgctgccttcctcataccggggactggcattccaggtcagcttggctgtggtcttagaggcagggagtgcctacccagtcctgcctcaggagcagggtgagtagctaaatacagacttaggctttttttccccccttttaagatgcttgctcctctcccttttctttttaccaccctacctttattgttagtggttacaaagtgaccacatattatgtactttgctgtaaataaagacagacaaaaaggcaaaaaa

SEQ ID NO: 7217 - DNA, 605 bp, Homo Sapiens
ggcggacgtgctcaacatcttccccgtggtcagcacgtcaaccccaaggcctcggatgccttccatttcttccagagcgggcaggccaaagtgcagcagggcttcctgaaggagggctgtgagctcatcaatgaggccctgaacctgtttaacaacgtctacggagccatgcacgtggagacctgcgcctgcctgcgcctcctcgcccgcctccactacatcatgggcgactacgcagaggccctgagtaaccagcagaaggcggtgctgatgagcgagcgggtgatggggcacccgagcaccccaacaccatccaggaatacatgcacctggccctgtactgcttcgccagcagccagctgtccaccgccctgagcctgctgtaccgcgcccgctacctcatgctgctggtgttcggggaagaccaccccgagatggcgctgctggacaacaacatcgggctggtgctgcacggggtgatggagtacgacctgtccctgcgcttcctggagaacgcgctggccgtctagcaccaagtaccacgggccacaaggcactcaaggtggcacctcagccaccaccttgtcgcccgagtctacgagagc

SEQ ID NO: 7218 - DNA, 431 bp, Homo Sapiens
  misc_feature (44)..(44): n is a, c, g, or t
tcttcccctacccctgtccttcctcagttcccagctgggattgntatgcactgggcagacccgtcactgtctcccctgaacccccacacagtggcttcccttagaaccagtctttgtactctccctaaacagcagcaggcttaggatttttgtcaggctggttcttgcgtgctctgtgcccccaccagtttgctcacctcttggggcattttgtaatgtgttttctctgtcttgtaaaaccttttgattgtaccgaaatggtatctgcagtcgcctttggaaataaatggtcattaatttgtgtacttagcattctgaattttagtcccaggtgttcctgttgttgaagatccttgaatgaaaaggaaccctcaccatggggcttactgttataatgtttcttcataaactgttattaaaagatttatgag

SEQ ID NO: 7219 - DNA, 582 bp, Homo Sapiens
ctctgaggaagccgagaaactttaattaggtgacggggttccgagcacttaagcagatggggtgcggtgaaggcccagggaggaggagggcagggaggtgcacgtcctctgtgccccacacactttcaaccactgcaacaaacaagcacccaagagaggctgtgcggcagagcctgcacccacaggcctttgacagcacagtgaggggcctccgcacgtggcctcgggacgctcactcgacgcacacccggtgcatcacactggcacctaaagacaggccgtgcagctaaaaggagcacgtgtggccaaggagagcaatcagctgtcccgcgtttctaaaggcagggaccgacgctgtggaggggcgagcagggcaggccggcggaggctacttgagcagcttggccacgttcaggctgggcaccacaatgtccttgaagaggggcacgtagctggggctggcctgtgctgggccctgctccagggtctccatgatggtctgcttcatgtcacggctggcgttcccacgcacagccagcagcgcaccgatgtggtcatccctgatgtctggatacttgctga

SEQ ID NO: 7220 - DNA, 532 bp, Homo Sapiens
gcggccgcgcacggccgggcctgggtgggaaggctgggctctgggaaggatgtcggggcacccggcagtgcccaaagccaccatctcaagcgtgatagtggggaaatggatgctgcacctgctctctcatcttgcggggaatcgtgatttggggaagtttcacctttgttgcagaactgcccacattagagccttcatttcttgggaaggggttggcgggagttgccagtgaaatgtgtgacacacacacgcgccacatactccccaaacccacagacgactccagtaacgctctagttacccttaaaaagtaaaacagaacaaatcagcaggccccctccctccatcctggcacttcattaatgtcggccaaggccacatttcccctgcccactgcagggagtctgtcaggagaacaacaggcgaacgtttgcctcacttgactcagctctcttggggcggtatcagcattttaaaattcacacctaaaggaaggagtcagcaaaggaaagcagagctgggccggggcgcc

SEQ ID NO: 7221 - DNA, 470 bp, Homo Sapiens
atatcgtttgtcctcactaaaattcatgttgagattcgagccccagtgtggcaggtgttgggatgtggggcctcataggagctgtgtggtcttggaggtggagtcctcatggatagattaatgcctgccttaaggggtgagtgagtgctcacccttgggaatttgggaatttggttttctctcccttgcttccttcagcaccatgtgatctctgtgcacacagctgcatccttctgccctcccccagaagcagcagcagcctcagggatgagggaggtcctcagtgagtgcacctgcccagtcttgaaccttccagccatcagaatctgagccaaatcaacctcttcctttataaagacccagcctcaggtcttctgtcagagcaacacaaaatggactcagcacggatcaaattgtgtctcccccacccccacaaaaaactttatattaaaatcctaacccccagcaaa

SEQ ID NO: 7222 - DNA, 567 bp, Homo Sapiens
acccagaggattcgacgtagccaaccatacctatctccttaggcagacttgcctctctcctagtcctgagtataaatcctgtgtatagattcctctagaaaggcatcaaaaggctcaacagactgaatggcctcttggtctgcgaaaattcagttgcaatgaggatgaagtcactatcctagaggctgcttggcccagaagagccaggcacagagctgcagttgggcacgccaaggattccaaaggtggaatgagagagtagggtcaaactgtcacagtatctgctccataggtttctgtttttaatttcaatgttaaatacaactacaatatgagcgagaactgcattttcttgggtgttgagaacttgtaccatggacttcagaccgccttgcagccgtatgctgcacaagcgtgtacaccccctgggcagcctcaaaaccccgcttacagcagcaacacaggagatcatctgtccattttagaaccattaatctctttatccattgctgaacgactgtgactatacagtaacgaagtaatagtaattaattagtaatggttggg

SEQ ID NO: 7223 - DNA, 526 bp, Homo Sapiens
ggtccccgagagtccaacatacatatgcaagaagtctactataagcgtcagttaaacacacaaagctctcattcttcctctaaatagaaggtagtcaagaggacacacagatggcatctatgaaataaggtggctgcatggctgctgtactagaattcacaaactgggaagaacttcatataaacagaacccaggatccctaacctactgtagataaataaactcattaaacaattagtccttatcaactatttaagctgggggaagctttgcatgggagaaggctcatgtggtcccttctctgggaacatgagccttcctaggttttgccactgagaactgtgtttaggggatttcaacattgtctctgcatccgacaagcactaggaaaatggctgaaatcagtcagggactttcaactctccatgctggaaaaataaccacccctatttctctatctctagatcagcattattttagtgtatgtagggactatatgttggactagtcgggaactctagtcacc

SEQ ID NO: 7224 - DNA, 204 bp, Homo Sapiens
catattagtctcctcagcaataaaggactgcaaaaatttaactattttttaggtcctttatgaactacctcttcaatttctgctttgagtagcttcagacattgactaatgtcttcaggggtagactgcatgttctttagaggtccctcaagtttcagattttgtcacaccaacccttgttccattgccaaaagctctggtttt

SEQ ID NO: 7225 - DNA, 385 bp, Homo Sapiens
gcttccccatttcgcaagaaggatagcaatagttcacagtagggtacgccttaactaaaaacaaatagaaaaattaattaattacaaaaatagcaagcagaacttttcagaagtgagctgagaatctgcagtgtaccctcagtgggcagttactcaatctccacacaggttacaagttgcaaatatggactaggcccagagagaaggtcactgttaggaacaggaaacaagcagagctttttataacccctattgggctggagaaacaaaaatggagcttgagggttaacaaatgcatgtacataacacaaatctgacatttcatggattctaaagctgaacacgatttgaacaaacactttgtgaaaacagagtgcgtttcttg

SEQ ID NO: 7226 - DNA, 1380 bp, Homo Sapiens
ctttgtggcggagagcgtttcggggaagcgtggtttcttcatcaagcctactgtctttggtggcgtgcaggatgacatgagaattgccaaagaggagatctttgggcctgtgcagcccctgttcaagttcaagaagattgaggaggtggttgagagggccaacaacaccaggtatggcctggctgcggctgtgttcacccgggatctggacaaggccatgtacttcacccaggcactccaggccgggaccgtgtgggtaaacacctacaacatcgtcacctgccacacgccatttggagggtttaaggaatctggaaacgggagggagctgggtgaggatgggcttaaggcctacacagaggtaaagacggtcaccatcaaggttcctcagaagaactcgtaagagcagctgtcagggaggcccagtcacagtccagcaattccacaaccaccttgaccaatgcttgccaagctgttttaaagccaagaacaccctttctttgttccaaattaactcttagaagaaaccccacaaataaagcaattcaatcaaggctgttctatttaaatcagagatggggaccaggctcagagttctacctatctaacccccaaccacagcccccttggtggcccatgagttgcttccatgaaatcttaggagtctctggaggacagattaaaaaccagtgatctgtaatttgtagctcttcctgctgatccaaggactttcccatgggtgcgcttgatggtttagtggatcgactcaactcagaacacaagcttggaaagtgttaggggttttgaactaggtggatactaaatctcggccccactcttcattggcttaacctaaaaaccagaggtgcttttccttgtctgtgtgccagttgctggctgttttagttgcttgcccttcattttgctactgattttccttaatttgtgggaaggagtaggcaaagaatatgcttacatgattacacctgtaaagtaagcccaaacatcccaaatgtccgtcaactgatgagtggattaataaaatgtttccatggaatattccttggattactcagccataaaaaggaatgaagtactgacacatgctgtgacatcagtgaaccctgaaaacatccttctcagtgaaacaagccagagagatgtacaaggctacagactgtatgattccatttatatgaaatatacatactaggcaaatccatggagatggaacatagattagtggttgccaggggatagaggagtaattgttagtgggcatgggatttgtttttgggaggttttgaaaatgttctggagttgaacaatagtaatggttgcatgatttggtaaaaatactaaaaactatggaattgttta

SEQ ID NO: 7227 - DNA, 574 bp, Homo Sapiens
gtcgtcagggaaagcttcgactgcaaaaatggtatgtcccactatcagacaaagagaagaaaaagatcacaagagaacttgttcagaccgttttagcacggaaacctaaaatgtgcagcttccttgagtggcgagatctgaagattgtttacaaaagatatgctagtctgtatttttgctgtgctattgaggatcaggacaatgaactaattaccctggaaataattcatcgttatgtggaattacttgacaagtatttcggcagtgtctgtgaactagatatcatctttaattttgagaaggcttattttattttggatgagtttcttttgggaggggaagttcaggaaacatccaagaaaaatgtccttaaagcaattgagcaggctgatctactgcaggaggaagctgaaaccccacgtagtggtcttgaagaaattggactgacataactctcctcccttgttgatgacttcttgtggcatttcacacactgtagatggtcactcccttcatgtccatgttagctcatggtgtaagatgatgtcttgtcagtattactgttttgctaagc

SEQ ID NO: 7228 - DNA, 429 bp, Homo Sapiens
gctgctccgtccacggccagcactggggcggccgggccccggtcccagaagggaagcgggaggacggccacgcacacacgtcccgccgccggtcatgctgctcagcctcgggccgcgcgcttaccaggccactcaaattcaactactagagacatccctccaaccactggcggtcctcgcgctcgcccggaggtgcttgaagggaaccagaccacaaagactgtgcgattagcggcttctggctggcgccgtccacacgtgggcctccacagccctgtcctaccactgccctggccaagcctgctctgtggacgtggcgacccctctcccgggaagggcccctgacctggcactcgagtgcccagtccgcccaggctgccgccgtggatgcggagcctgcctgggaaggtggtgtggcatgcagtcgct

SEQ ID NO: 7229 - DNA, 458 bp, Homo Sapiens
gaaagctgctccacagccaatggagagaaagacagcatcacccttatctccatgaagaacatcaacatgaataatggcaaacaaagtctctcagcagagaaggttctttaaaagcaactttgggtccccatgagtccaaggatgatgcagctgccctgtgactacaaggaggaagagatggaattagtagaggcaatgaaccacatgtaaattattttattgtttcatgtctgcttctagatctaaaggacactagcattgccccagatctgggagcaagctaccaacaggggagactctttcctgtatggacagctgctgtggaaatactgcctgcttctcccacctcctcagagccacaggaaagaggaggtgacagagagagagcaaggaaagtgatgaggtggattgatactttctactttgcattaaaattattttctagcctgcagtctaaa

SEQ ID NO: 7230 - DNA, 456 bp, Homo Sapiens
cgcgtgttgttacattatacaaaagacttgcatgccatatgcaagcagatgacgtttgtgaatcccttatgtgacagagcttattagatccatccaacaaaccttttggtagatggttccagtacctgatacaaaaataaaaggattgtacaaaaaagggcatggtttttgcttgttacaacacaggtaattacaaacgacaaatccttcaaaagggaagatgacaacttttattgttattacaaaagcaaatttaatttgtcatttgaataattgcaagagcagactaagggcttaatcctcacacaggcaccaagtcaggcacagtaggtagctacaaatcgtaagaaaaagctttctttcctacctagagcactcttccatgcttaggaattaggctaaaaaactcaacaaacctgatcagttccctttaatcctgtatatattatttaatat

SEQ ID NO: 7231 - DNA, 613 bp, Homo Sapiens
gctgctgcattccccacacggggaatttctgtgtctgcttggcgacctccctgcgtgcacggcctaggaggtgcacgggccaccatagtaacactggcactgaaaagaaagcgttgccctggtgattctttcccccccggttgttaatgttaactgatcaggaagtgcagtttgggtgggatgccgaatcgtcgtgctgacattgagtcacggatgaggaaggtacaagtcctttaagatcaaaactcaaacgggccgttctttctaaggtgtcggtatgtggggagtggtacaaaatggtctgatgctccttcaaaaacattcactttttacaacgtcaaggaattaagcataaaaaagattggttaaaagctttggtttctagtaaaggttagtgtgtgtggtttttttaagaagctgttttgctaaattatttttacttggaatgtttcaaacagatttcaggctgcaaacttgttttataatcgtttgcttctccaagtgaagctcagaaatacctaaaaatagctgtaacgttcgcgttaggaaagatggtgtttattccagtttgcatttttatggtgaaataaaatccttttccaatgaactaaaa

SEQ ID NO: 7232 - DNA, 169 bp, Homo Sapiens
taggctgacctagaggacccgcgcgtgttgttaacagagagaaatatgtgagtccttgcagaaagaagagactgttaactcatcgttaaagatggccgtagtctcttctaacagctactgatgatgtcccactttaaaaataaaacccccaaacatcactactttaagg

SEQ ID NO: 7233 - DNA, 458 bp, Homo Sapiens
acgtgtgtctttttggtggtcctgcttgcactgggcatcgtgtactgcacccgctgtggcccccatgcacccaacaagcgcatcactgactgctatcgctgggtcatccatgctgggagcaagagcccaacagaacccatgccccccaggggcagcctcacaggggtgcagacctgcagaaccagcgtgtgatggggtgcagacccccctcatggagtatggggcgctggacacatggccggggctgcaccagggacccatgggggctgcccagctggacagatggcttcctgctccccaggcccagccagggtcctctctcaaccactagacttggctctcaggaactctgcttcctggcccagcgctcgtgaccaaggatacaccaaagcccttaagacctcagggggcgggtgctggggtcttctccaataaatggggtgtcaaccttaaaaaaa

SEQ ID NO: 7234 - DNA, 1017 bp, Homo Sapiens
tcccgcgcgttgttgttactggtagtgttgcgggaggggcacagtgggttggggagtcatccaagcggtcttcagcagggatgggacttggggagaaaatccactctctgtatccattgacttttaattaatacagttagaaaatgtgtccaccttaatgttatatctcggtagcaaatggaatacagtggcaagaatgacaacggacattctccacatcttttcactgcctgagcagcttgaccatttacttcccacaataaaagaaaccagaaagtggactgtattgccaggtggttaaaaacatgacccaaaccaccttacatgtatctgtgtgtgtacaccacaaaactcacaccccataagaccaaataggatgactttgcttttgaaaaggctaatccagtatgtcaggtatccccaaagatgtggcctgggagattcttcttgggaatgacaagaaaccaactggatgaaaacaacatgactacttatcactcaaaagaccgaggctagagaagctatcaggactgcagctgctcctcttctggccagttgagctccatcctcttcccaaccccctttcccagaccatttaaaggaatcagtgccaacgccaatgtaaatcattttggctcctgttctaatttctgaaattcctaaaatatctgtgcagcccacaaatatgtcctctagactctgttgttattcggcagcttgctgccagtgaggtttttgtttttatgattctctagtatgtaggacagtttcacagcctagataaggtaagtacaatgctcaatattttcacagaacccaatacttcaaagcaaagcatttggctgggtaagcagtgtataagctctttcaactatgccatttatgaggaacaaaatccttaagttgcggatctacaaaggaacgttctttgcactattgtgtgcttgactgtttctttttcatttgttccactagaatcagttagcttcaatgtgtaacaacacgcgcgggaacctc

SEQ ID NO: 7235 - DNA, 640 bp, Homo Sapiens
gcctacgagcagattctgggtatcacctgtgtggaaagcagcctgcgtgtcaatggctgccgccagatcttacggagcctcccagagcaaaaatacgtcgtcctccgctacctcatgggcttcctgcatacggtgtcccgggagagcatcttcaacaaaatgaacagctctaacctggcctgtgtcttcgggctgaatttgatctggccatcccagggggtctcctccctgagtgcccttgtgcccctgaacatgttcactgaactgctgatcgagtactatgaaaagatcttcagcaccccggaggcacctggggagcacggcctggcaccatgggaacaggggagcagggcagcccctttgcaggaggctgtgccacggacacaagccacgggcctcaccaagcctaccctacctccgagtcccctgatggcagccagaagacgtctctagtgttgcgaacactctgtatatttcgagctacctcccacacctgtctgtgcacttgtatgttttgtaaacttggcatctgtaaaaataaccagccattagatgaattcagaaccttctaatgaaaactccatgcctctggtccttggactcttgtccatggttcctgagctgtggaccgggatagaat

SEQ ID NO: 7236 - DNA, 428 bp, Homo Sapiens
cttggcccctccggtgtggaagcacctgtgctgtgtcccactcaccctagaggacctggaggaggtggatctgctctacgtgcagactctcaacagcattcttcacattgaagacagtgggattaccgaggagagtttccatgagatgattcctcttgattcttttgtaggccagagtgctgatggcaaaatggttcctataatccctggtggaaatagtatcccactcacattttccaacaggaaggaatatgtggagagggccatagaatatcgactatcatgagatggacagacaggtggcatgcagtcctgagaagggatgtcctggattgttcctgtgccgatgctgtccactcctcacagcaaacaactggagcagatggtgtgtgggatgcacaacccggaagggatcctctagatcacct

SEQ ID NO: 7237 - DNA, 759 bp, Homo Sapiens
  misc_feature (282)..(377): n is a, c, g, or t
attaagagaaatgaaatgtcttgtaccagcatcggcacataggagccttctaatgaggagcctatccctgaaaaagtgaaagatatatcatttttctaatccttcgaataggataaactaagtttttgatctctctgagttattcaaaaaactcagggatttatttcccatcacaacactacaaggtactttagaaaatatacatacttgagcaacatggtggagtaggcacattgaaaaacaagcaggggctgggtctggtggttcacgcgtgtaatttgnnnnnnnnnnnnnnnnnnnnnnnnnnnnnnnnnnnnnnnnnnnnnnnnnnnnnnnnnnnnnnnnnnnnnnnnnnnnnnnnnnnnnnnnnnnnnnnntatatatattttttaaagcaggaacaggcatagccaattttatcagaactctgaaaaacagtaaaaagtttatagcaatgaagcaaatgctgagtcaagaacaggcaactttaaaatggcaagaaagctttgtgacatttctgcttgcccttcccccacaagctccctggtgttgcagcagtcttgaaatcagcaactgcattctgtcttggaccctgatccccatttctagaggaagctgagcagaacttacaaattcttgtttaagtctctggtagcctgtctggggctacttaaaggagtgacagagcactcatcgtaagcagtaggcaatgcttgaaaaaagtgtaagtaaacactacgccgggatcctactagagtc

SEQ ID NO: 7238 - DNA, 973 bp, Homo Sapiens
tctccagatatttaatgcaagatgcaatgtagccatattccatgaaatgtggttagcagtaggggagttgtagccctatcgaatcaaagtattacaatacagctgaaagctttatatagacgtatttcggttcttaattgcactaatgcagacagtttgatagataagcttctctcttgtgctttttctactttgggaggttatatactttagatgagagacaaagaaactctactggtttaagagttctcagttttacttttactatagaccttttttcccaccagtttagatgggaagacccagcctttggtataaataacttacttccacaaaaatatttaaagggtatctttagtgttcactgtcagttgtgtagtcttttggtaagggggtggctagagcctctttactctcagtaagtgctctgggctgatggataaacacactaaatttaacaccctggttgtttgcagctctgacaaaaccactattagcagtcattgtgatggcttttagggtgtctcccgtcccaaaaattgttaatgagcggctattaatttttgaactggccactagtctcaaggcacgctcagaaggctggtctggtaccacattaattcgcttaattaacacagtggccctctctctctccccaggtcctcctaaggtatctaaaatagactgaaagtccttgacagcagattcacaagcaaacaactccttgtccttcataaaggcctccagctgaggtagaacctgctctttcctctcttgctctgcttgttctgtgagcactttctctttgaaaataaagtggcagcctccatagctgagggcagatacatatgtgattaaagtagtaatgtccagatttactcttttgcacacatcgaccttaatttctgttggaaacgcaacacttgctagtatattttctcggtcaactctggtcacctgcaaaagttcaggc

SEQ ID NO: 7239 - DNA, 575 bp, Homo Sapiens
tgtggtggaaattactttaaaatagaaacaaagaaagaaagataagcagaaagtggacatcgaccagcacctgtgtacgtacagtacaccttgcagccgaatgcaaggttacttcatcctatggtaaaggtcgcccccagcccggtagccagagatgccactctttctgcccagctaacaccattgtgcgcctgtgtgcgagtggtgccagcataacctcaatcacaccaatattgctgccaccacctgtgacagggaaagcaagaagcatatggaaaacacacagcctaaaatagcaatgtcaacatctaattttgttcttcttatgatttgtaaagaactaaactgagtatcttgctttaaacttccaacatttataactatcattttaacatactccttgggtaaataaaatgcatttcaactagcctcccaccctccattaattcaaagtgtattgtaattatcacatgtatttggacttcaaccactttataaatacttgaagctactgagatcaatttaactataactaacagagctggtaacaacacgcctaatcctctagatcacct

SEQ ID NO: 7240 - DNA, 111 bp, Homo Sapiens
gctcggagaggtgctcggattctcgtagctgtgccggcccacaatgattctgagctaaaacacaaaataaaaaccaaattcattgccaccagcgcacacctcgcctgactt

SEQ ID NO: 7241 - DNA, 806 bp, Homo Sapiens
gatacttaagtagccctggccctcatcccaaaatttgagagtctaaatcttctgtgtccgtttttctgcctgaggaatacttctgtcccaagtgggctcctcaaggcggatttagattggtttgctttcctttgctgttggcacggcctcttccaccagtgtctacactctttgtccacagctggtaagcgggcccctcagtgctaccccagttccgtcaactctgccaggactgtgatgctgttcaaccttggcagcgcttactgcctgaggagcgaatatgacaaagcccgaaagtgtctccaccaggcggcttcaatgatccatcctaaagaggtgccccctgaggccatcttgctggcagtctaccttgaactgcagaatggtaatactcagctggccttacagatcatcaaaaggaatcagctgctccctgcagtgaaaacacactctgaagtgagaaagaagccagtgtttcagcctgtccacccgatccagcccatccaaatgccggctttcaccactgtgcagagaaagtgatacttcacttttggaaaactgttacctgagacccaggggagaatttactggccattttagttgtatcacagcagaatgaataaaagatggtgaaggctgttaattttgagtcaattctacccctgacttttggccaaaagcttacttaaaattaaggatttactaagtcatcatcagctgtttttcttaatttcagccagactattaattatgagccattatgtaatatatcgcataggcaattaaaacataattttatcagaaaa

SEQ ID NO: 7242 - DNA, 124 bp, Homo Sapiens
cccacgtgtgattgtagccgaaaggggaggtgttgtgcactgcggcaggcctgctggtggttgtagtctttgctgccgtgaggcagtggcgggtgaggtgctgggtgggtcattttctcctcat

SEQ ID NO: 7243 - DNA, 627 bp, Homo Sapiens
tctacagtacttcccaaagggcctgctagttcacttaattcttttatagagagaaggagtacactctaaaacactgatcaatagtatattatagtaaatacataaaccaggaacacatttattatcattatcacgtattgtgtattgtacagaatggtgtgtgctgtgctatccaggaacacatttattatcattatcaagtattgtgtactgtacagaatggtgtgcgctgtgcttttatgcaagtggcagcacagtagctttacacgagcatcactagacacatgagtagcattgcactcggcaacaggaattttttcaggcccattattataatcttatgggaccgcatcctatatgcagtttgtcattgaccaaaatgtccttatgacgatgcatgactatatttgcaaaggactagtatctagaatacagtttaaaagtcttaaaatagtaacaaaacaaagaatgcaattagaacatgagcaaaagatacaaagcaacatttcactggagaagatatacagattgcaaataagcacatgaaaagatgtttgataccattagggaaacgcttctttataccaggagatattaccacggtgtataacggggggcctctagagt

SEQ ID NO: 7244 - DNA, 705 bp, Homo Sapiens
  misc_feature (347)..(363): n is a, c, g, or t
  misc_feature (378)..(533): n is a, c, g, or t
gtatggtaaaaaatcatatcaaaaagctacaacttttgtatatgaagaaatgcttttatattactgaatgcgaccaacaagtaggctgggaatccttctcctgatacctcactagaggcaacactctattttcttgcttttgtttgaatgggctggtcaactgagtgtctgatgaagtgctgagctgggcttctgtgagaaatccgcatataacctgaatatcccaaactctctggccaagcttctaactctggtagccattcctgccaaatgataatagtaagttagcattttctaattcagtagcaataaagggtaagaaaagaaactgagtatagatactttcnnnnnnnnnnnnnnnnngagatggagtctggnnnnnnnnnnnnnnnnnnnnnnnnnnnnnnnnnnnnnnnnnnnnnnnnnnnnnnnnnnnnnnnnnnnnnnnnnnnnnnnnnnnnnnnnnnnnnnnnnnnnnnnnnnnnnnnnnnnnnnnnnnnnnnnnnnnnnnnnnnnnnnnnnnnnnnnnnnnntgaaacatcttttaaatccaataaactcaatagaatggttggcagagtatactaaaaatttaattaagataaagcaaactttatattcactctctaagatatttaggttttggaattattttctcagtttccctttatgtatgtcacccagatgttaagtcatgatggggga

SEQ ID NO: 7245 - DNA, 943 bp, Homo Sapiens
tcagaggatccgcgcgtgttgtttacatgacctgtgttttctaaggcttatatgatttcttaaatttaagatattggagtaaagcttgatatggtaccaggcatggcctctgttgcaattaagcagtttgggaataaagctaattgaaattgccaaacaatgtacccccctccagagcaagctggaaaattttcctattttgcagaagtatcttgtgacaaaaagtgaccatcacatcaatcagtctgttgaaactgctcaagagattcatggatttgccctaagaaaaggatctgagattttttttcatcagcatgtgttcgctttttgtagggaagagtgaggcattgagaggcattgaacccagtgctgtaataaaagtttgctttagtaagtaaggatatgaagctatccttacctgaagatttagatctcaaagaatccttgagaacatatccatttgctggagtggggagcttatagggtttggtgtttccctctgagctttcagtttgttctgagaccaaagctcatctgtggtgatgggaagtcaggacaccaggtggcacagcggaaccttgttctctgtgctgagtgaggcagttgtgagttgagccgaacctggcagctcaccaataaatcaaggaacagaccaaggatcaagagctgttaaacagtcactgcagcaatgatggctataaaaagaaaggccaagcagctcctcccctttgcctcatcagctcttcctgcagctttcaaggtgtaaactcatttcatgagctctgcacattcatacatgcatttgagagatacaggtgtttattgaactggtgaccagatactgttctagggatagaccgataaatagaataggtccctgaaatagagacaatcaataagtaactataacaatataataatagacaagtaacaacaacgcagt

SEQ ID NO: 7246 - DNA, 1075 bp, Homo Sapiens
ggaattctcgggatcttcagagggggaaactttcttcttttaggaggcggttagccctgttccacgaacccaggagaactgctggccagattaattagacattgctatgggagacgtgtaaacacactacttatcattgatgcatatataaaaccattttattttcgctattatttcagaggaagcgcctctgatttgtttcttttttccctttttgctctttctggctgtgtggtttggagaaagcacagttggagtagccggttgctaaataagtcccgagcgcgagcggagacgatgcagcggagactggttcagcagtggagcgtcgcggtgttcctgctgagctacgcggtgccctcctgcgggcgctcggtggagggtctcagccgccgcctcaaaagagctgtgtctgaacatcagctcctccatgacaaggggaagtccatccaagatttacggcgacgattcttccttcaccatctgatcgcagaaatccacacagctgaaatcagagctacctcggaggtgtcccctaactccaagccctctcccaacacaaagaaccaccccgtccgatttgggtctgatgatgagggcagatacctaactcaggaaactaacaaggtggagacgtacaaagagcagccgctcaagacacctgggaagaaaaagaaaggcaagcccgggaaacgcaaggagcaggaaaagaaaaaacggcgaactcgctctgcctggttagactctggagtgactgggagtgggctagaaggggaccacctgtctgacacctccacaacgtcgctggagctcgattcacggtaacaggcttctctggcccgtagcctcagcggggtgctctcagctgggttttggagcctcccttctgccttggcttggacaaacctagaattttctccctttatgaatctccatccaatgtgtaaccatttgacagagaatactccccaatattgtctgcctttaaacagtaacccccctaccaaaaaaaccccctggtctcccggaaccattgaaaagggctagaagcccattccctcttttttccaccggc

SEQ ID NO: 7247 - DNA, 433 bp, Homo Sapiens
cccccagcttgtggcggattctggggtgatcattgacacatccatgcgaggggggcgtcttggtgtattctgcttctcccaagaaaacataatttggtccaatctcccagaatcaatgcaatgacacagggcctgaggactttgagccattccggaggcagctgctccagggaagggtgtgaggaggaggccaccagattcagaattcagaattttagaccctttggccttggggtccatcctggagaccctgaggtctaagctacagcccctcagccaaccacagacccttctctggctcccaaaaggagttcagtcccaaaggggtggtcaccccacccttcaggggatgagaagttttcaaggggtattactcaggcactaaccccaggaaagatgacagcacattgccataaagttttggttgttttct

SEQ ID NO: 7248 - DNA, 192 bp, Homo Sapiens
gcagcagcagcagtgcccaccccagagggcccagcagcagcaagtgaagcagccttgtcagccaccccctgttaaatgtcaagagacatgtgcacccaaaaccaaggatccatgtgctccccaggtcaagaagcaatgcccaccgaaaggcaccatcattccagcccagcacaagtaccctcatccgcttat

SEQ ID NO: 7249 - DNA, 849 bp, Homo Sapiens
  misc_feature (469)..(469): n is a, c, g, or t
  misc_feature (510)..(510): n is a, c, g, or t
  misc_feature (518)..(518): n is a, c, g, or t
agcggccgcggagccgctgctcgccgcggagaaggcggaggagcccggggaccggccggcggaggagtggctgggccgcgcgggcttgcgctggacgtgggcgcggagccctgcggagtcggcagcggccggcctgacgtgcctcccgagcgtgacgcgcgggcagcggctggcggcgggcggcgggtgcctgctgctggctgcactgtgtttcggcctagccgcgctctacgcaccggtgttgctgctgcgcgcgcgcaagttcgcgctgctctggtcactgggctcggcgctggcgttggcgggaagcgcgctgctgcggggcggcgcggcgtgcggacgcctgctgcgctgcgaagaagcgccgtcccggcccgcgctgctctacatggcagcgctgggcgccacgctgttcgccgcgctgggccttcgcagcacgctgctcacggtgctgggcgcgggcgcgcangtggccgcgctgctggccgcgctggttgggctgctgccctngggcggcnggaccgcgctgcccctcgcactggggtcgctgggccgcggcgccggcctcgccaagtgctggccgtgtgaggacctcgcgccttgccgctggggagtacgcggagccagcgccgcggagaccgcgcaggcgactgagactgacgccgctggcggaagcagtgcgaagccatgcctacagctgcgagctaatcgggacggcgctgccacggagcgacagcgcgtaggagtctcgtagtcgctattggtggctagcccaccttgaaaacgaattagcaggactgtgacggaagagacgtgataaagtgctacacgacagtgcgtagtcgctgt

SEQ ID NO: 7250 - DNA, 452 bp, Homo Sapiens
aagtctatgaactagctaattataaaggaggtagtataaaaactcttcattagtaattaatttatcaataactcatatccattacttgctcagtgacattcagaactattgcgtctagtactgaaatggggaaagaaatctcttcactaaaggagttggctttaagttagtcttggtgataataaatgttgaaatacaagtatcagtataaaaactggattactggtatcactgtttaggcattgtaatactttaaatgttatctttttttctaaatcagagggaaaaaaatgttgtgaaataacagtccttcccaagggaaacactgtgtacttggagaaatgattgatttattattggcatgcttagttttaaacctgagtttgccaactgtatgttttttaattagaaataaaataaatcttctgatggtgggggaaaaagtaagctac

SEQ ID NO: 7251 - DNA, 491 bp, Homo Sapiens
ctccatttcctggccctgctctgcttcctgtctacctcatactagaatgatcgtgactaccgggcagacattttactgtgtttctcagaccaagtgtctactgatggcccaaacatggagttttgtgggcttccactgtccccactccgaactcctgtatgtgcctggctgagtcacctaattcatactgtcatactagcataattatgactattgcatatgcttgttttgtttgactcttggctgcctacgtctgtagggtcccctgaaaatcccacttcctgcccccagaaagggcctttatttccaactaggaggataatgcctagtccaggcaatctttctctgtttagcagtcacaggtgagggtggtattagcatcttttttatgtagaaaaaattgagttaatggggtggactgggttgggaagaaatacatttcctaatgtatttatagaaaataaaaatatttttatgtgccttttaaaaaa

SEQ ID NO: 7252 - DNA, 714 bp, Homo Sapiens
ggagctggcccacgccttcttccccccggcacggcggcatccacttcgacgacagcgagtactgggtcctgggccccacgcgctacagctggaagaaaggcgtgtggctcacggacctggtgcacgtggcggcccacgagatcggccacgcgcttgggcctgatgcactcacaacacggccgggcgctcatgcacctgaacgccacgcctgcgcggctggaaggcgttgtcccaggacgagctgtgggggctgcaccggctctacggatgcctcgacaggctgttcgtgtgcgcgtcctgggcgcggaggggcttctgcgacgctcgccggcggctcatgaagaggctctgccccagcagctgcgacttctgctacgaattccccttccccacggtggccaccaccccaccgccccccaggaccaaaaccaggctggtgcccgagggcaggaacgtgaccttccgctgcggccagaagatcctccacaagaaagggaaagtgtactggtacaaggaccaggagcccctggagttctcctaccccggctacctggccctgggcgaggcgcacctgagcatcatcgccaacgccgtcaatgagggcacctacacctgcgtggtgcgccgccagcagcgcgtgctgaccacctactcctggcgagtccgtgtgcggggctgagcccggctgataaagcactttctctctgaaaaaaa

SEQ ID NO: 7253 - DNA, 736 bp, Homo Sapiens
  misc_feature (70)..(112): n is a, c, g, or t
catgtgttgtttcgtatcggatgtttcttttcctgctgtcttctggttagtgtcatgctcaaaaaggacnnnnnnnnnnnnnnnnnnnnnnnnnnnnnnnnnnnnnnnnnnnaagcctttaatccatttcggatctatttcaggtatggaaccagaaaacgggcacaggaaccaaatttgaattttctctgaaactcacaacctttccctgtatatgtaataaaccatccttatctcactgatgtgaaatgctatttttgtcatatatttaattatcatatatacacagatttttttctagactccctgttgtacatattcccctggtctaattgcctattcctatacatgtaccatgctgtgtttcatggttgttgctttataatacatttgatagctagtattatatacataatattatatgcttatatttcaaatttttattttggctaattttatccttccagttaaactttattatcaagttgctaagttaaaaataaaaactgcaatgagatctgattagaaatgtttagttgtatatattaagttgggaaaggtggtccaagtttctgaaagacaaaactatccatggatgcccacacataccctggatgccatgaccagaattcagtgtgctcaggttcagtctaggaatgatccagccccacactcatgtcttacttcactcagcctgctctgtattcaactcctgttctctcttcccattgggttc

SEQ ID NO: 7254 - DNA, 597 bp, Homo Sapiens
gggaaggtggcagtgaagcctggccaagctgaagctgttccggcattactatgtcatggggatctgctacgtctacttcacccgcatcatcgccatcctgctgcaggtggctgtgccctttcagtggcagtggctgtaccagctcttggtggagggctccaccctggccttcttcgtgctcacgggctacaagttccagcccacagggaacaacccgtaactgcagctgccccaggaggacaaggaggatgttcagatggagcaagtaatgacggactctgggttccgggaaggcctctccaaagtcaacaaaacagccagcgggcgggaactgttatgatcacctccacatctcagaccaaagggtcgtcctcccccagcatttatcactcctgcccttcttccacagcgtatgtggggaggtggagggggtccatgtggaccaggagcccagctccccgggaccccggttcccggacaagcccatttggaagaagagtcccttcctccccccaaatattgggcagccctgtccttaccccgggaccacccctcccttccaactatgtgtacaataatgaccaatttgtttggcta

SEQ ID NO: 7255 - DNA, 615 bp, Homo Sapiens
  misc_feature (17)..(17): n is a, c, g, or t
cagaggattccgcgcgnttgttgtttaccaaacgatgcagaacactagggaaggaacaggctctggcgagcggcatcagagtgttgcctccagtgctttaagctagagatgcctgtcaaacatccaggtagaaaagtcacacaagtgattggtcgcacaagttcaggagaggggaaataaatattaaggcaccattggttattgatactgtgtagataaatctacgggagggaggatcctccagggcacagctttcacagtggcttgtgtctccgtgggtcatgaagtcaatacagtgggcaccagcaattttcaaaaaacgaaatagaattgaaaacaatatctcggtagtaagggctgttgtaaaatgtttcctttaatgccaactgataggggaattttgccctatgaaacattttttaaaaattaaatttatgtgaaaagagagctgtgtactagatcacagtatgaaacttcttttggtaaactgaagatcacagttaaaaaaccactgatgtagaaggagatgtagttccaaaagagatcagagactgagttgattccggggccatttcaacgtgcagaggcttgggatgggtctgggaccaggaaagg

SEQ ID NO: 7256 - DNA, 1875 bp, Homo Sapiens
  misc_feature (1355)..(1467): n is a, c, g, or t
  misc_feature (1487)..(1504): n is a, c, g, or t
  misc_feature (1527)..(1537): n is a, c, g, or t
  misc_feature (1562)..(1649): n is a, c, g, or t
  misc_feature (1710)..(1719): n is a, c, g, or t
  misc_feature (1809)..(1819): n is a, c, g, or t
cgctcgacccacgcgctcggcgctgcgtcagtaccagcagcggaagcagcagcagcaggaggggaactacctgcagcacgtccagctggaccagaggagcctggtgctgaacacggagcccgacgagtgccccgtgtgctactcggctgctggcgcccggcgaggccgcggctgctgcgtgagtgtctgcacaccttctgcagggagtgcctgcagggcaccatccgcaacagccaggaggcggaggtctcctgccccttcattgacaacacctactcgtgctcgggcaagctgctgaagagggagatcaaggcgctcctgacccctgaggattaccagcgatttctagacctgggcatctccattgctgaaaaccgcagtgccttcagctaccattgcaagaccccagattgcaagggatggtgcttctttgaggatgatgtcaatgagttcacctgccctgtgctgtttccacgtcaactgcctgctctgcaaggccatccatgagcagatgaactgcaaggagtatcaggaggacctggccctgcgggctcagaacgatgtggctgcccggcagacgacagagatgctgaaggtgatgctgcagcagggcgaggccatgcgctgcccccagtgccagatcgtggtacagaagaaggacggctgcgactggatccgctgcaccgtctgccacaccgagatctgctgggtcaccaagggcccacgctggggccctgggggcccaggagacaccagcgggggctgccgctgcagggtaaatgggattccttgccacccaagctgtcagaactgccactgagctaaagatggtggggccacatgctgacccagccccacatccacattctgttagaatgtagctcagggagcttcgtggacggccttgcttgctgtagcgttgtaggggccctgcctgcactgcggttgtccacggtcacatctgccccagtgcctttgtccttcccttggggcttgccggccagacttctctcccctgcggctcccacctctgcctgaccccagccttaaacatagcccctggccagaggccttgctgggtggagcctctgtgtgactccatactcctcccaccacaacactcatctgtcaaacaccaagcactctcagcctccccgccttcagctgtcagctttctggggctaacttctctgcctttgtggttggaggcctgaggcctcttggaactcttgctaacctgttcagagccaggaaggagactgcacagttttgaaagcacagcccgtcaggtccggctctgcgtctccctctctgcagcctgtgtaagctattataattaaaatggttttccgggnnnnnnnnnnnnnnnnnnnnnnnnnnnnnnnnnnnnnnnnnnnnnnnnnnnnnnnnnnnnnnnnnnnnnnnnnnnnnnnnnnnnnnnnnnnnnnnnnnnnnnnnnnnnnnnnnttgcggccccccccgccccnnnnnnnnnnnnnnnnnncatttttttgggggcggggcccnnnnnnnnnnnggaaccggggcccccccggtccccnnnnnnnnnnnnnnnnnnnnnnnnnnnnnnnnnnnnnnnnnnnnnnnnnnnnnnnnnnnnnnnnnnnnnnnnnnnnnnnnnnnnnnnnagtttgggggttttttcggaccataaaaaaaggaccccgggggaccctcattttaattaannnnnnnnnnggggctttcgtgggggtttggggggaattttataagggattctcgcggagatggaaataaattaaaggccgcctgggggaccctaaatcnnnnnnnnnnntaaaacactttaaccccttggcgaaaaatattttcccccccgggaaaagggggggg

SEQ ID NO: 7257 - DNA, 991 bp, Homo Sapiens
tgttacacagtattgttagttattgtacaccacaaaacttaagaacgtgagcataggttaatatttatcttcagggaaaagagtttcctttagaaggttttagaattaggaactgctgcacgcatattcactcaggaatgcttgtgtgtgcagtcataaaggtaggctgagagaaacgttgcggagctgagtgcagatggccccagggaatgatgccgagataacgcagccctgggcaggcaaaggcactttgtggaaggcactctgtcttttgtttcttaggacaaaacctggatctctgcatgccccaacccgaatgggatggggagcactttcaggtgtccactctacaccagcctgaagggaaagggcagcatctggcaggagccaaggcgaaatggttcccaggggatatagcagaccaggttgtcctgagagaatgcggacttcaccttgcgaggtgggatccgatagagcagggtgtggggggacaggctgcgcctgcagaaggtctccaagtcttgcatggatgcttagtccagtaacatgtggataatatccacatttagagggacagtttcaagtgtcacgtgtcaatgaatcagtcgtaaactgtagctattgcatttttgtgccataaatattaactgtaggaaaaatggaattctgcagtgccttggacccatgtgcatgtcttagccagcttttccatgtctgtgcaggcatgctgatgtgctctttcctccatctggggacttaatgaccggagcactggctgtggtgacatctagtggctttgctttcctgttgaccttggagatttctctctcagtttttcttgaaggtcagtcccaaaaggcaaattttctagaaattgtatttctcttccctctcttgtcactgataacttgccacccctctgggcgtaatgcctcctccctgggcagggcagccaccatgtaacaacaacgcgcggatcctcagggtagcc

SEQ ID NO: 7258 - DNA, 497 bp, Homo Sapiens
tttccagatgccccagctcctattaataagttagcaaggaaagtgtatgtcacgtgcaggaacagtgaggcagggacaggggttctgctccttctcacttcaccaccggcacacagcttgcccctgtctttgcccccaaaggtattttgtgtctagtgtcacattggagctattcttcactggtccttaaccttgggttttaaaaagaaggcttctctgtttgggtagcgtaagagctgagtatagtaagtcctcttccaaagagatggcaatatgctgggcatctactttaaaacaaagttgtctgatttttgcaagagaggttaggattttattgttcttatttccctttacagttctgcagttccatcacagtatttttttaaataactcaggtgtatgagaagaaattagaaaagaaaattaacttatgtggactgtaaatgttttatttgtaagattctataaataaagctatattctgtaattgttgagaa

SEQ ID NO: 7259 - DNA, 698 bp, Homo Sapiens
taaggctacctagagttccggcgtgtgtttaccgactgttttcctcctgtccccgagtagtataaaaatgagtctaagctgaatctagagtaaatctgcatgatgtggaccaccaggctagggagaagggagatcctggtgggttcctgacttcagctttgcaggctgggaccatcttttccttcaccattttcataggctcctaaccaggacttcaccacagcaccatagtttctggagtagctgttcagaagctcaatgtttgtcccttccaagacacactgatgactgccacctattggctgtgacttggagatgtccccaatgttcctgcagctctctgagctgaacttttcttctctcaaaatgggtgaaaagaagataaacctcatagggttcttgtagggactaatgttttgagacatggaaagcaggtcaaccatgcctggctccataaaaaggcttctgggcatgctgtggctgttcatatttattatttttttctgaattttactgaaactctctgtaacatgccccaatgactcatgtcccttattgttgggaaaagcatatcaaaaacaagtccatttttgcatttgtaaatgcggcttgacatttcttttgcctggtctttgttcttgacatagacaaacagggtcacctgctggtaacaacacgccgggaaatctaggcaccta

SEQ ID NO: 7260 - DNA, 672 bp, Homo Sapiens
ctctgtcctactgctctccagagggcatttccccttgcgccttctcccacagggcccagccctctcccctgccccagtccccagggggtactctggagtgagcagtgcccctgtggggcagcctgtaaatgcgggctcagtggaccactggtgactgggctcatgcctccaagtcagagtttccctggtgccccagagacaggagcacaagtgggatctgacctggtgagattatttctgatgacctcatcaaaaaataaacaattcccaatgttccaggtgagggctttgaaaggccttccaaacagctccgtcgcccctagcaactccaccattgggcactgccatgcagagacgtggctggcccagaatggcctgttgccatagcaactggaggcgatggggcagtgaacagaataacaacagcaacaatgcctttgcaggcagcctgctcccctgagcgctgggctggtgatggccgttggactctgtgagatggagagccaatctcacattcaagtgttcaccaaccactgatgtgtttttatttccttctatatgattttaagatgtgttttctgcattctgtaaagaaacatatcaaactaaataaaagcagtgtctttattacttcgcagaagaccaaatccaggaataaaaatcctaccatgt

SEQ ID NO: 7261 - DNA, 460 bp, Homo Sapiens
atcgagctcggcccgctgtagatgacagtcggcggagccggttggcagcaaagctgtcctggtcacaggctgtgactctggatttgggttctcattggccaagcatctgcattcaaaaggcttccttgtgtttgctggctgcttgatgaaggacaaaggccatgatggggtcaaggagctggacagcctaaacagtgaccgattgagaaccgtccagctcaatgtctgcagcagcgaagaggtggagaaagtggtggagattgtccgctcgagcctgaaggaccctgagaaaggcatgtggggcctcgttaacaatgccggcatctcaacgttcggggaggtggagttcaccagcctggagacctacaagcaggtggcagaagtgaacctttggggcacagtgcggatgacgaaatcctttctccccctcatccgaagggccaaaggccgactgtcatct

SEQ ID NO: 7262 - DNA, 440 bp, Homo Sapiens
ctaacttacttcccagtgctactgagactggcacattctcatctgtgacaccttctgaactggtctccaactcctctcctctggtttgcctctagttataccgccttaatcttctgagaatatatgttcttgtttcaaacatcaacagaggaccctcttgccctgctggttcctcctcaaactgactccagactatgcctccactctctgattccagcacctcaacctttgctgaatgtcacttctcactcttcccatacaagtctgtagccctgagcaccctaccacttggcttaagctccaggactaatgtctgctgggctcaggagtgcaatctcaagcatcacccacgaagtgagccggggcatcactctcttgcctgtaatctcctatcctgattctacctggagtctataggctcttaccatttaatcttttcc

SEQ ID NO: 7263 - DNA, 183 bp, Homo Sapiens
tctgtctcagaaaaataaataagttatagcctgtaatttcaggggaaaaaagcccatggatattacaagtgttgcatctaatttcagggaattcatagatctcatgatgccagtccatggatgctaggttaaaaacccatgcttgtggctgtaatctcagtaacaacacgcgcgggatactct

SEQ ID NO: 7264 - DNA, 326 bp, Homo Sapiens
attggtaaggtagactgaaatctcggtttagggctgaccccaagaaacagtctggttcgtgctttggtatggtggactccagtgtgcatagcagctgctgtcttgctacaagttactcagcttaagttcagattgtgattggtggctcatttcaaaagttttgagattgtactgattgatcttggcattttcaagtttggatttcatgtccagtggcttttcaaaaaagttgactaatgactgttcagtcagaagtgaagctaaaatatgttcaagggagacagtccagtccccttctgccgcctctggaaatgcctgggagtcct

SEQ ID NO: 7265 - DNA, 413 bp, Homo Sapiens
tctcacggtagtctatacattttgttgttctgctatggcatcttgtatcctttctctatttcccttcttctgaaaacaaacgtctataaaggaggtttgctattgtaaattgtagtttagaagttaaccctccccctgtggtttagtctcttctaataagctataagcaacatgggccagaacctatgtgtaaattcatcttgagtgaatgaataaataacactattatggctaagtaacctatacttgcacatatacatgaaaaatatatggttggctatattatggaataatataggaatctataaaagaacaaaaaatttattacctttatacccagttttaaaaatactgtgttcccttttagaaggttgtgtgcttgaacgacaacaaaaggtaaacaacaacgcatg

SEQ ID NO: 7266 - DNA, 183 bp, Homo Sapiens
tgtcatcaggtggctccaggccagactctgcgctgagtgctgaggctgagggaccctgggccaccccaaatggtgagacaacgggtgagcgagcagccagaggagacagagagggtgagaagctgggggacatggcagctgaggacagggagccttcatggctgatgggggagcggcacatgc

SEQ ID NO: 7267 - DNA, 594 bp, Homo Sapiens
  misc_feature (91)..(91): n is a, c, g, or t
  misc_feature (177)..(177): n is a, c, g, or t
aagatccggcgtgtgtaatgtcagctgtggcatcgagagctctggtgggctgtgtgtctgacatgctcatcttttgagcattctcacttgnactacagatgcttagtctcatctgtatactgctgcccagtctgtaacagtctttctctaaggagcccccagtaactatcttccaangtgtttacttggattcatcttacgccagacatgatgcctagcctgtggcattcataagcagctgcaaaaagaaggtcaaatgccctgcccaaggtcatgcaggtgatagtccatcaggctcaggattagggtgtgttgctggcaaagccttgtccccgaagcataccatcttctttctgtgtgagcgctctgtgtcaacagacacttgcctagtattgcaacatgtgcaagagacaaggtcacccgtggtgtgctgggcacgatgagttcaggatggtgctttctgcatctaccgctattaccagacagttggcatccagccctcctttctcactggtaatgagtggctccattatgttttatgtggcattaataacccacacagtaatgtaggaaagtaaacacaacgcgcgggtc

SEQ ID NO: 7268 - DNA, 276 bp, Homo Sapiens
ggctcacccatgtgccgcagggccatgacggggagctgctctgccaccggatagagcaggagtaccaagccggccccctggagctgaaccgtgaggctgtcctgaggaccagcaccaacctaaacagccagcaggtcatctactcagacaacaacggctaccagatgcagcggaggccctacgtttcctatgtgaacaacagcatcgcccggaattactaccccatggttcagtcggccttcatggaggatggcaaaagcaggcttgtgttgctgt

SEQ ID NO: 7269 - DNA, 466 bp, Homo Sapiens
ctcaaaaaaacaaacttactaaaaacgtagctgaagcatcatctcctctgagaattcttcccaggcttccccagactgagttaggtgtccctctctattagtatcctgataggaaacaagtaacactcttaattaggtcaaagagtgtaatgaagcaggtatttacaatggtatgggaagggttacgggaatccagcaaggaatagtgcagcacctagggactagcaatgataggaagttgcaccatatttggcccagcaagggcaaagggagagagtagttgtgggagtccagagagaccctggttgttgcttctcatttattgaacccgatttaaagccagagaacaaagagcccagtttatgtagtacatgacgcagcctcctaggcacagggtaaaggatggagaatagatctggaggattaaatagtaacaacaacgcgcgagatcctctaagtcacctca

SEQ ID NO: 7270 - DNA, 716 bp, Homo Sapiens
aaaacccttggcccccagcaacgtccgttcgatggccaaactgccacgctgccgctgtccgatcagatcaagatcctgatgaagaatgtgaaaggtcaagccttttgccaacttgatgagcctcctgggcccctccatcgattccgtggctgttctgcggggcatccagaaggtggcgatagttggtccaagggaactgggtggtgaagagtgacatcctataccccaaggactcgtccagccctcacagcggcgtgcctgctgaggtgctctgcaggggccgagacttcgttatgtggaagttcacgcagagccgctgggtggttaggaaagaggtggcaaccgtgaccaaactctgcgccgaggatgtgaaggacttcctggagcacatggccgtggtgaggatcaacaaaggctgggagttcattctgccttatgatggggagttcatcaagaagcacccggatgtggtccagcggcagcacatgctgtggacgggtatccaggccaaactggaaaaagtctataatcttgtaaaggaaaccatgccaaagaagccggatacacaatcagggcctgccgggctggtctgtggggaccagcggatccaagtagccaaaaccaaggcccagcagaaccacgcgttggtggagcgggagctgcagcggcggaaggagcagctgcgggtgcctgaggtcccgcccggtgtgcggatc

SEQ ID NO: 7271 - DNA, 275 bp, Homo Sapiens
atccacaaacatatgtgctacctccacaaacagtatatagccagtggaatgtgcctgtagaggaggagctgggtggaatgtccctgtagaggaggagctggatggaatgtccctgtagaggaggagctggatgaaatgtccctgtagaggaggagctggatggaatgtgtctgtagaggaggagctggatgaaatctgtccgtagaggaggagctggatgaaatgtgtcctgtagaggaggagctgtatcaaatgtgtctgcaaggaacccacgg

SEQ ID NO: 7272 - DNA, 366 bp, Homo Sapiens
agcccttctacgagctcctcctggctggttaacccctctcccaggccagacgtgctgcctccctcagtcctgccttacctcttcctgctgtgtggccttgtgctctgagtctcggtttcctcatctgtgaaatggagccatcattcccacttcctagggagcccggggcaaaaagaaaagctcagagcactcagcaaaacacctgcacatttgcctgaggaatccccacttagtgaggtctactgtgagcaaggtacatgggtggtgggacaggccccctatcctgaaagagctcccagccttggccgggggagggggcgctgatctgctagccactgattagagcaagttacttttcactctctg

SEQ ID NO: 7273 - DNA, 243 bp, Homo Sapiens
tgatatttaactttctggtgaaaacagataggataggcatcgtaaatgtttctatgacagcattcctgataaaattcactattttcattcatttaccccaaaatatttattataaaccttctatagctgtatactttgccatagtagttgagaatttaaagtcaattcccaactactatggcattttgtccatttactgtacactacttaattttatgttattttccagaaggagtctcgctc

SEQ ID NO: 7274 - DNA, 765 bp, Homo Sapiens
gcggccgcagggcagcccaccccgcccacgtcgccggagccgccgcgcagcagccccaggcagacccccgcgcccggccccgcccgggagaagagcgccggcaagaggggcccggaccgcggcagccccgagtaccggcagcggcgcgagcgcaacaacatcgccgtgcgcaagagccgcgacaaggccaagcggcgcaaccaggagatgcagcagaagttggtggagctgtcggctgagaacgagaagctgcaccagcgcgtggagcagctcacgcgggacctggccggcctccggcagttcttcaagcagctgcccagcccgcccttcctgccggccgccgggacagcagactgccggtaacgcgcggccggggcgggagagactcagcaacgacccatacctcagacccgacggcccggagcggagcgcgccctgccctggcgcagccagagccgccgggtgcccgctgcagtttcttgggacataggagcgcaaagaagctacagcctggacttaccaccactaaactgcgagagaagctaaacgtgtttattttcccttaaattatttttgtaatggtagctttttctacatcttactcctgttgatgcagctaaggtacatttgtcaaaagaacaaaaaccagacttttcagacaaaccctttgtattgtagataagaggaaaagactgagcatgctcacttttttatattaatttttacagtatttgtaagaataaagcagcatttgaaatcgcaaaa

SEQ ID NO: 7275 - DNA, 437 bp, Homo Sapiens
gacatttcaataaaaatttattgaaatttcagtgatgttttaaagagagggggaaaaatacagaaaaccaaagaacccatcaacaactataacacaaaatataccttcatgaatttgtctttaaaccatctctcagcacctgacttttgaactgtgaatatatctctataggcaggcaccaattcaaaacaccgatactgacaacagtagtaaattccacttcgttttgaggaaatcagagactagcaaatacaaataacaaaagaaaaattaaaaagtcaaaccgcagcctctgccctcccccctccccacagcaatctcagttatattttaaggaatttgaagtggagctggaaagtggcactccttccccaattttggtgaaaataggaaatagcactttcccccacttttggacattaaaaaagataacaaaa

SEQ ID NO: 7276 - DNA, 366 bp, Homo Sapiens
agggctgtgaattaaggaatgggtagcgtttacatttaagtacaccaatgtctgcccaatttcctaatgtatacatttgttttattttaaattattttttgttcttaaaaatactagaagaaaacatagatgtttctagtgcctttgaacttatactgtagtctgactaatttaatgaataacttcagtagcattactataatactgtatgctggccaaaattacaaattacagtttgttgcatcagtttcaaaagccatgctttcattgtattttatgtataaattgtatttgttcaagttgtatatattggtattgtatgtatacatgcagcatggttaaataagaataaaaatcttttaccta

SEQ ID NO: 7277 - DNA, 492 bp, Homo Sapiens
tatttgaggagtcttattaacttatcctattagaaatatttctttttattaatatatgtaatctcgaagttttcttaacctttatagccagcatttggagactgaggagaaatcactatttgaagttctaagaaccgatggaactcctgtattttgagagtttatttagaacatgttaacctaagtaatgcgtgtacttgttttagttattcctttatatttttaaaatgattttcttagtatcaaattaatatgtttctaaaaaaattagaaataactagtaagccagaaataatttcaacatccatggtacacactgtaaataccttggtgtatctttccaggtggttttatgtatgcttatttgtgtatatatacacttattttttacaaaaatgggatcatactgtaccttcagttttgtagcctgcttaaagaaataaccaaatcagaaacatctttttttaatcaataaatattttctgttgtatt

SEQ ID NO: 7278 - DNA, 1206 bp, Homo Sapiens
  misc_feature (555)..(688): n is a, c, g, or t
  misc_feature (1174)..(1174): n is a, c, g, or t
gtcttcaggccacaccacatcttccatgggacttccccccaacaactgagtctgaacgagtgacacgtggacaaatgcgggctcatcagcccccccagagagggtcaggccgaaccccatttctcctcctcttaggtcattttcagcaaacttgaatatctagacctctcttccaatgaaaccctccagtctattatagtcacatagataatggtgccacgtgttttctgatttggtgagctcagacttggtgcttccctatccacagcccccaccccttgtttttcaagatactattattatattttcacagacttttgaagcacaaatttattggcatttaatattggacatctgggcccttggaagtacaaatctaaggaaaaaccaacccactgtgtaagtgactcatcttcctgttgttccaattctgtgggtttttgattcaacggtgctataaccagggtcctgggtgacagggcgctcactgagcaccatgtgtcatcacagacacttacacatacttgaaacttggaataaaagaaagatttatgnnnnnnnnnnnnnnnnnnnnnnnnnnnnnnnnnnnnnnnnnnnnnnnnnnnnnnnnnnnnnnnnnnnnnnnnnnnnnnnnnnnnnnnnnnnnnnnnnnnnnnnnnnnnnnnnnnnnnnnnnnnnnnnnnnnnnntgaatatgcctgctgaaagtggacatcgaaaataaaaaacagccatagaaaactcgatcgtgtctgaccatcctccacaaggaagtagtgatttcattactgctgtgtaccggcgggcagaccgaacagagatgaaatactatgtttttttcccgtcctgaaaaacagtcccgagactgattgtaattcattaaccctaacaaagaacatccccgccggtcacccaaggggtttataaaactatattcggtgggggcctgggccccttggttaactttactaggagatctgccgctgcgtaaaaaatcgtgccacccccccgcccctattttccaaggtgtaattgaaactggtgaaactccccccgggggggagcagaccccaagggggtggtggaaatcaaacccgccacggaaaaaaagccccccttttcgcccaaaaaataaaatttcccccccgagaaatagcggtcgaacaaaaaaaggnatcatttattggccaatcatttctaaaagaag

SEQ ID NO: 7279 - DNA, 567 bp, Homo Sapiens
gatgaatgaagactgtctgctgctgtttcactgtgcggtagccactccgagtcaaccgtgccgtgtggtaaaagtaaccagcagtgatggccttgcgtacacggatatagtccccctggcaggaactgagaccaacttccacacgttccaagagcccttccagctgttcccgcacatcccgggctcggcgcatcgatctgaactgtacaaagttctcatagcaccactgggaagagtaaccactctcagcccactgtgtgtaaacatttagcagaaccaggtggtcaccgccagggagaaagaagttgacacgggcattgtcagcatggacgaccttgtcctttggtcggtagaagatggagttgttgacagagagcatggcagccactgtcaggatctcctctgaacagctgtacttctcagaggctaagatcattttggacagcatggggtccaccggcagctctgccatctttcgaccagacgtggtgagctccccaaggtggttgagggctcccagagcatacagctgctccaaagccagcagcaggatgttggagcggccgc

SEQ ID NO: 7280 - DNA, 386 bp, Homo Sapiens
ttccccctccccccttgggggtcgggggggacattggaaaggagggacccccgccaccccagcagctgaggaggggattctggaactgaatggcgcttcgggattctgagtagcaggggcagcatgcccagtgggcctggggtcccgggagggattccggaattgaggggcacgcaggattctgagcaccaggggcagaggcggccagacaacctcagggaggagtgtcctggcgtccccatcctccaaagggcctgggcccgccccgagggggcagcgagaggagcttccccatccccggtcagtccaccctgccccgtccactttcccatctcctcggtataaatcatgtttataagttatggaagaaccgggacattttacag

SEQ ID NO: 7281 - DNA, 496 bp, Homo Sapiens
aagctgtaggaaaagggagaatctttccccagtggtgttttcctgtaaagatcagtttggggtatgatataagcaggtattaataaaaataacacaccaaagagttacgtaaaacatgttttattaattttggtccccacgtacagacattttatttctattttgaaatgagttatctattttcataaaagtaaaacgctattaaagtgctgttttatgtgaaataacttgaatgttgttcctataaaaaatagatcataactcatgatatgtttgtaatcatggtaatttagatttttatgaggaatgagtatctggaaatattgtagcaatacttggtttaaaattttggacctgagacactgtggctgtctaatgtaatcctttaaaaattctctgcattgtcagtaaatgtagtatattattgtacagctactcataattttttaaagtttatgaagttatatttatcaaataaaaactttcctatataatt

SEQ ID NO: 7282 - DNA, 455 bp, Homo Sapiens
taaagaaaaagctttacaagataagactgaaattcagaataccacatctgtacagcgttgacaactctaactaaaaggattacagcccttaaaattttagcttaaggacattttaaaattgcatgagattagcaaaattattaatttaaaaccccaaagtaaattgcaaattttaaaatttatttttgactcttttatcacatgctccaatgtatgtacataagtgtctgtggcttaaataatatgttgttatttgatacatttttgtggtgcaagtaattaatgttattatttgattgttataccatatgtgcccattaaaattctttttaattaaaaatatttcaaatatgcagaaaaataataatataaatgcccttgtacccttcacatactattttgccatatttgcttctgatttttaaataaataaaatgttactcttttgtacttct

SEQ ID NO: 7283 - DNA, 530 bp, Homo Sapiens
cttacaccgtgctgacctgggtatcatccatgtgctctgaagcatccaactttactttgcaggtgcatcaatgtagtcctgtccctgaactgagtaaccgtgttcctgaaaagtacactagggaaattcacctgcgctgccttgtctttgtattggcatggcacttgtgattgcaccatggagcatgctcagagctattaaattggtctcccatctcccaccaggatatgaaaggtccatatgggaggccacgtaatcacttattacagtggttacataatacactggctcactgcagactctcttgttttttgatacagtttcgtgctggcttcatttgccaattgtgttgtttagttcggaagtaagagggtcttgagattgaggggtagggagggctacactgactgatccgtggcttaagacaggagattatctctgtactccagtggcatctccttagccaagatgtgaaattaaaatcatagttcgcctcatttaaaaattctaataaagcactcaaactttga

SEQ ID NO: 7284 - DNA, 668 bp, Homo Sapiens
aacaccaatttcttcaccactgctcatgtgaggtgaagcagctaaccctagaaaaaaaggactcagcccagggcactgaggacgcacctgataacagcagcctggagctcctagcagataccagcgggcaagcagaaaacaagaggctcaagaggggcagcccccgcatagaggagatgcgagctctgcgctctgccagggccccgagcccgtcagaggccgccccgcgccgcccggaagccaccgcggcccccctcactcctagaggaagggagcaccgcgaggctcacggcagggccctggcgccgggcagggcgagcctcggaagccgcctggaggacgtgctgtggctgcaggaggtctccaacctgtcagagtggctgagtcccagccctgggccctgagccgggtccccttccgcaagcgcccaccgatccggaggctgcgggcagccgttatcccgtggtttaataaagctgccgcgcgctcaccaagtcctcttccgcgtctgcttccgcgtcgggcccgggcggggcggggcggggcgtggagccgcgccgcggcctgacgtcacccacacctccctgggactgcgtcactggtgcgcgccgcgggtcagggcgcaatggcggcgctgggcggggatgggctgcgactgctgtcggtgt

SEQ ID NO: 7285 - DNA, 494 bp, Homo Sapiens
tgccttggtatgttgatagaatatgaaattgttgtaatgctgaaatacgaatcacctatttattaataagttatattctagaaatatttacgaagctttttagagcaaggaaaactaaaggtagcttccagaaacctaggtgagagaggattgtggggaggtctcaggcattgccattagctactaattgatacttggggccagtagcaaggtaactccagcttaaatgatgaagtttacattctaggattggaggaaattgcttgtttcccaatgtaaaatttgctaattttaggttgtcttccttgatatgatattgagataaaagctgtgctacttgtggcttattaaagtgaattgtaccatatagtggctatatagttagggttaggttgcaggttgtgttttatttcaatgaatgataaaataataatttgccatgtcttctaataagagtgaaaaagtgaaaatgaatctgtaaacactacgcgctc

SEQ ID NO: 7286 - DNA, 1229 bp, Homo Sapiens
  misc_feature (630)..(743): n is a, c, g, or t
  misc_feature (753)..(765): n is a, c, g, or t
  misc_feature (804)..(959): n is a, c, g, or t
  misc_feature (1111)..(1157): n is a, c, g, or t
gcacgaggcggcgccccctgcaagctgggcagccaggctggagaggcggctaaggtgtttggaggcttccaggtggtaccggctcccgatggccagtttgctttcctcattcccaacgggaccttcgcgcacagcggcccggtcatccccgtctacaccagcaacagcggcacctccgtgggccccaacgcagtgtcaccttccagcggcccctcgcttacggcggactccatgtggaggccgtggcggaactgagggggctcaggccacccctcctcctaaactccccaacccacctctcttccctccggactctaaacaggaacttgaatactgggagagaagaggacttttttgattaagtggttactttgtgtttttttaatttctaagaagttactttttgtagagagagctgtattaagtgactgaccatgcactatatttgtatatattttatatgttcatattggattgcgcctttgtattataaaagctcagatgacatttcgttttttacacgagatttcttttttatgtgatgccaaagatgtttgaaaatgctcttaaaatatcttcctttggggaagtttatttgagaaaatataataaaagaaaaaagtaaaggcnnnnnnnnnnnnnnnnnnnnnnnnnnnnnnnnnnnnnnnnnnnnnnnnnnnnnnnnnnnnnnnnnnnnnnnnnnnnnnnnnnnnnnnnnnnnnnnnnnnnnnnnnnnnnnnnnnttggggggcnnnnnnnnnnnnnaaaaaatttttaaaacctttttttggggcccggggcccnnnnnnnnnnnnnnnnnnnnnnnnnnnnnnnnnnnnnnnnnnnnnnnnnnnnnnnnnnnnnnnnnnnnnnnnnnnnnnnnnnnnnnnnnnnnnnnnnnnnnnnnnnnnnnnnnnnnnnnnnnnnnnnnnnnnnnnnnnnnnnnnnnnnnnnnnnnncccagcggagtccaatattaaattacgccccccccgggcatttttgggaggaatggtggaattttttaaccctttccccccaggggaaccccctccaaccggtttgggaaaaccttaaatcccccgggggatattacccccttgggcccctnnnnnnnnnnnnnnnnnnnnnnnnnnnnnnnnnnnnnnnnnnnnnnnttttccccactttggcgcccccctttaaaacaaaaaggggggggaaacctccccccgggggtttggggtgtg

SEQ ID NO: 7287 - DNA, 738 bp, Homo Sapiens
gaaatgatagcaatctgcaatgtaaacagtagagcagagtattccagactatattttgatgtacagttaaacctgtaggattatgtaccgtctttgtgtatggattaaaaccagggcacttccaacacatagctcaagcttccatacgattaagagcaaacttaaaggcattctttttccccagtccgtaacattcagctgacagaagagagctgctacctcacgtcagcaatggaaaatgttgctgtaaatcccattggaccagccagtttctcacgaccctttaaaactgaaaacgggtcagtatagttttacattctttttcttttccttaaaactgtgccctttcagaaggcaactttcaaaacatacgagggtgcctctgctgtgtgttcatacgtgtaacacgtcgtctaaggcagagctcctgaagcaccttctctggtcagccgttggcaagcgaacagatgcctgggctcggctcgcaaagcacaaatgtggacacataacccactgtccttggcgcaggagttataaaagtaacagcaaatcatgaggtgacatcaggcacactgaagagatggaggatttggtgtcttacatttcctggtccctccaaaatgtctaatatagacagttttgtgacaaagtctttgaaaaaaattataattggccacacagcatgacttctttttgtttctgtttatacatgatctcgaaaatagtgtgatttagatt

SEQ ID NO: 7288 - DNA, 666 bp, Homo Sapiens
accccatcctgtagaagtccattccccttttccctcctgtgctctgtcccccaaggagtcatggaactcagggtactgggcctcaacgggaacctgagacagctgcagcttcgcagcccttcccggagctacagggggatcctctagcatggggggtgtgacttggttcctttgaccaggtcctgtgaggaagcctggagcaagggtctcccccagcaggatgggtggggcctgctctggagctgagcccgtggccgctcacaggtgtccttagtggtgttgcagctgtctactggctgcatgtgctgtgaatatcccaaggaactggctgtggaatgcgtgtttgggtcagtctgtgccctctcagtagacactggagctgctctgtccctgaagaggccccgtgccccaggcatggcaagcgcctgcctctccccttccggtgctcacacgcccacgccgtgccacccgatgcaggactcacctctgtgccttgctgctcctgaggcccaagggcagccatggtgctctgtactgctcgggccgcccaggtcacagagcctgagcttcgtagccaaagcagcctgatgacccacccaccaaggaagaaagcagaataaacatttttgcactgcctgaaaaaccccggtggtcaggcgtgagcct

SEQ ID NO: 7289 - DNA, 140 bp, Homo Sapiens
cgagagtatatcagttaaagggtaagaaatgtagaccccatattttaattcagtagcaccagttcaaatccagttattcagaattaacaaagcaactgttgctcaaaaaaatgccaataaactcccgagccaactgagat

SEQ ID NO: 7290 - DNA, 555 bp, Homo Sapiens
  misc_feature (12)..(12): n is a, c, g, or t
  misc_feature (35)..(35): n is a, c, g, or t
  misc_feature (59)..(59): n is a, c, g, or t
  misc_feature (63)..(63): n is a, c, g, or t
tatgacaccatnttccagatattcaacaaccgcantgcctcagtctgaaggacaaaccnaggntcatcattgtccgggcctgcagaggtgcaaaccgtggggaactgtgggtcagagactctccagcatccttggaagtggcctcttcacagtcatctgagaacctggaggaagatgctgtttacaagacccacgtggagaaggacttcattgctttctgctcttcaacgccacacaacgtgtcctggagagacagcacaatgggctctatcttcatcacacaactcatcacatgcttccagaaatattcttggtgctgccacctagaggaagtatttcggaaggtacagcaatcatttgaaactccaagggccaaagctcaaatgcccaccatagaacgactgtccatgacaagatatttctacctctttcctggcaattgaaaatggaagccacaagcagcccagccctccttaatcaacttcaaggagcaccttcattagtacagcttgcatatttaacattttgtatttcaataaaagtgaagacaaacga

SEQ ID NO: 7291 - DNA, 495 bp, Homo Sapiens
aatgcactgttgctcaaaaaggtgatctggttctttcttcagagatttctacggggatagaaaatcgggagtctgccctcattaatctgtgactccacctcttgcatcaaatcaatatctatttgttgagcacttattgattaagaccttgcatatgtctgtccattttgatttgagatacaactttttgtgtgggttgaatgacaaatcactccaaacaaaactgggcacagagaatcagctaggagaccagttattcagggtccatttctcttggatgtaaaggagtcctgggtaaaatgtggctgtaacctaaaccaactagtccttgtgatttgtttctgccctctgtgtttcctgttgtcaaatgctaagtgtgtgttttgcagtcatgaactaaagcacaaaaagatgcataaaacactgtagtcatatgtctggtgtgacaacatggagcaaaaaccttgcactggtaaataaaaaatttccaacagg

SEQ ID NO: 7292 - DNA, 396 bp, Homo Sapiens
cagggcagggcttcttgtcctggggccccccttgagctgtgaactgggcagcaaggccatcagaagctgagtacagcaagggggcagtgagcttggccctcagtccaccccctccgcctcctggcctccaccctgcctgtgtctggggcctgggggcttctcccctcgctgctgcaccctggcttccagcgtctgtgtccctgccctcacgtgccccttcccaggctcctggggccccttggacctgacacctagcaggaagggcttatgcaaaattgtcccagtttgggaggactcactttgtgctccccgaccctgcctcctccacgatgtgaccccgctcagagcccttgtgtctgtgaactttcaatgaaatacccatgcagctaccaaaaa

SEQ ID NO: 7293 - DNA, 314 bp, Homo Sapiens
ggcattagtaaagatgccgctcattagtaaagatgccgatcattagtaaagatgccgatcattagtaaagatgccggccattagtaaagatgccgcgcattagtaaagatgccgctcattagtaaagatgccgctcattagtaaagatgccgctcattagtaaagatgccgttcattagtaaagatgccgctcttagtaaagatgccggtcattagtaaagatgccgctcattagtaaagatgccgctcattagtaaagatgccggcatctttactaaaggacggcatcttccctaatgccggcatctatactg

SEQ ID NO: 7294 - DNA, 836 bp, Homo Sapiens
tagacgatccccaggcaccactgcaaggcaggggaggtacttggcaggcaggggcggaagacgcaggggggtggcccccaccctccgtcactctgcaggtgggtgggccagattggccagaaccttggcctggtccacagcgtcgagcaggttcttggcgtccacagccagggtgtgtgaagccgtcagcatctgcctcttgcactcctcactcagggaggtcacggcgttctgctgcgccagccgcatcttgttgatgagctctgccaggtctttgttgagcagtttctgggtgccctcgatctctgtccgtgaagatgacggcaaggaaggcaggagatcatccacgctcccgatgagcttccgcagggtcagccccacattcttcaccaccaccacgtagccctcggggggcagctgacagagctcattcttgagctccagcacggcccgcaccagctccatgacattgaggtacaccaggtcatcggtccggtccaagttaactgtgggctggatggactgtgcgcccagcctcgggggcttctgtgggggccctgtgaactccactgcaataaaaagaacagcaagtggggggcagttctcagcactccaacccttcccttcgtacctgctgacataaaatgagccccctcccctctaccaccaggagacttcagggaaattaactctgaatccaggaagcgggcaggggaaggaacctcctggtctccctggttttgcagtagtcagggacagcactgttgtcccccttataggaagaaaaaggcaaagtaacagcaagatggggggattgcagtggtgcggggatcgct

SEQ ID NO: 7295 - DNA, 440 bp, Homo Sapiens
tccttgactcaccccagagaggctgtggtgggcatgggctcatgcacggacaggagcacgggtcgcttccaagaacagtgcatttgtactcagcacaaagacgagtgaggatcgtcctggggaagcagagaagaaaatgtcattagctgtgacggtcaaaacacacatatctgggctggagagatgactcaagtcattatgagcagtggatgctcttacaaagaaagtgggttcaaatcccagcacccagatgggagctcacaagtgcctataactccagttccaggggatctgacattcccatcttgtctccaagacaccagacacacacagttcatagatagacacattaaaaaataagtaattgagaaaaaaaccccatcctccatgagtatgaaagatggggtcttgggccttctctagaactagtggatcccccg

SEQ ID NO: 7296 - DNA, 498 bp, Homo Sapiens
ctgcactttaagtgaagagagctttcctgctttctgcaggtcaccacctccagaatttggtgcattctgtattgcacatttactgaagtcaatttgtaaagaatggtcaactgtaagatctgtcggacaagcaggatggactttctcaggatcacctccaagagttttcactgcctccctcatagcagcaaaatccaccattgctggtattccagtaaaatcttgaagaagaacacgggcagggaaaaagggcacttcaacattgctttgtttggttttccagtctaaaatgttcataacatcttccttcttcattaaaaagccatcacaatttcgtacagcagcttccaacaagacccgtattgagtaaggcagaacatcatacttggtgccaagtttagatacatcgaagaacttcttatgtgaactgtcatttaatgtttcaataaggtactcaaaggcgtatcctgcttttggggcgtccatcgccggagacca

SEQ ID NO: 7297 - DNA, 195 bp, Homo Sapiens
acctgtatcccacccaatatcgcaacatcaaataaaaatacataggaaattcaagtttacatatcatgccaagaaaaataaattgtcatgactgaacattaaacagctatgcaaattcggatcaacacaaaatcaagctagatcataattagaactcgatctgttctttctttaaaatactacaaactactattt

SEQ ID NO: 7298 - DNA, 365 bp, Homo Sapiens
caaatattgcatttatgtaaatttatagagtttgaggaataattaaaactagtatttctgtagttctctacactattattttatgctttcaaaaatgattgtacacattttcaggggccaaaaccaggctatagttcatgacataagctgtgcttgagacttgtagctggtggtgtgctggagatggctcatcccggctcctgtgtgcatctctttccaactccacattcatctcttcccaataccatgttggtatcttgacatgggcataaaactggccatggtggaggtatttacacaatgtaaatgggcaaatgccacacattagagacatttcttttcttctgggcgggccggatatatgg

SEQ ID NO: 7299 - DNA, 579 bp, Homo Sapiens
acttgtgtcacagaattcgccatctaacgagacattaaaaatatgcacccgcaacacgcgtgattcaactgtgacaagtgctctgaaggaaaagcacaaagtgccatgagatcagacctaggcaggatgtcaggaaaacgtctctgaggaatcagtacttagccagaaactgaaggataagaggtaaggtgaactgaatggtaagggtgtcccaggcagaaggaaatgcatctgacacagaaaggacttgattccctgacaaaggccaggccagtcaactgggtacaagagatgggacctgaggagtaggtgggaccacactgcccagggcatcatggggcagctgaagaggagaagccactagagtgtctcaaaccagagggtcctcaagtgatggcatgatcaaactttcattttacagagagtaactccagctgaagagtagagaaggcatcagaaaaaggcaacagtggacaggggaggcagtgtatggtgcaaattttaaagcaattttacacatgctgggtctaactctgtttcgaagcctcacctactaatcaacataatattaacttctta

SEQ ID NO: 7300 - DNA, 186 bp, Homo Sapiens
atgaatatcgacgatgtcacttgatcactgaaacaaagtaagagtcagattgatacaaccagtttggagggcaatatagcaggatgtttaagttaaaaatgttcacactcttctatccagctactttctgggcacatgtacacaagacgtgccctagagtgagttcaccgctacaccggacatccc

SEQ ID NO: 7301 - DNA, 1658 bp, Homo Sapiens
  misc_feature (1393)..(1475): n is a, c, g, or t
gcccgcattcgtcatcgctctgtcgggaagtatctcatcctggccatgatgaaccccagcctccccgggtggaaggttgagtgcgtcggggatgacattgcctggatgaagtttgacgcacaaggtcatttaagggccatcaacccagaaaatggctttttcggtgtcgctcctgggacttcagtgaagaccaaccccaatgccatcaagaccatccagaagaacacaatctttaccaatgtggccgagaccagcgacgggggcgtttactgggaaggcattgatgagccgctagcttcaggcgtcaccatcacgtcctggaagaataaggagtggagctcagaggatggggaaccttgtgcccaccccaacttcgaggttctgcaaccctgccagccagtgccccatcattgatgctgcctgggagtctccggaaggtgttcccattgaaggcattatctttggaggccgtagacctgctggtgtccctctagtctatgaagctctcagctggcaacatggagtctttgtgggggcggccatgagatcagaggccacagcggctgcagaacataaaggcaaaatcatcatgcatgacccctttgccatgcggcccttctttggctacaacttcggcaaatacctggcccactggcttagcatggcccagcacccagcagccaaactgcccaagatcttccatgtcaactggttccggaaggacaaggaaggcaaattcctctggccaggctttggagagaactccagggtgctggagtggatgttcaaccggatcgatggaaaagccagcaccaagctcacgcccataggctacatccccaaggaggatgccctgaacctgaaaggcctggggcacatcaacatgatggagcttttcagcatctccaaggaattctgggagaaggaggtggaagacatcgagaagtatctggaggatcaagtcaatgccgacctcccctgtgaaatcgagagagagatccttgccttgaagcaaagaataagccagatgtaatcagggcctgagtgctttacctttaaaatcattccctttcccatccataaggtgcagtaggagcaagagagggcaagtgttcccaaattgacgccaccataataatcatcaccacaccgtgagcagatctgaaaggcacactttgatttttttaaggataagaaccacagaacactgggtagtagctaatgaaattgagaagggaaatcttagcatgcctccaaaaattcacatccaatgcatagtttgttcaaatttaaggttactcaggcattgatcttttcagtgttttttcactttagctatgtggattagctagaatgcacaccaaaaaaatacttgagctgtatatatatatannnnnnnnnnnnnnnnnnnnnnnnnnnnnnnnnnnnnnnnnnnnnnnnnnnnnnnnnnnnnnnnnnnnnnnnnnnnnnnnnnntatttgtatgtactgttattgaaaatatatttaatacctttggaaaaatcttgggcaagatgacctactagttttccttgaaaaaaagttgctttgttattaatattgtgcttaaattatttttatacaccattgttccttacctttacataattgcaatatttcccccttactacttcttgg

SEQ ID NO: 7302 - DNA, 424 bp, Homo Sapiens
gtgaacagattactggaaaggggctcaggctcctaggccctggtgtgttatgcctgtgctccactggagacgcctgccgggctcaaactaaatacacatctctgctcatattacatcttatccaagtaagattttccattaccacaacataggagacatgaagggcatggtgattgctaaaatcatacaagactggttgtctgcgcttggcactgccagggtcagaaagtcatcagtgtatgattgcatataacttgcattccgttttcatctttctgttctctccactttcttcagtgaggtctgattacatgcaagtcatggcctcccctgtcctcctcctcatctactcgataatcaaatcccgttgctatggctgtagtcatttctacttgaaagcatgccttcatctttgttcgtgttg

SEQ ID NO: 7303 - DNA, 658 bp, Homo Sapiens
tgctctagaggatcggggatgggtacggggatccttctggctctattaccaatttgggaaatagaatttagtagagaagaagagaacagtgttgcagcaaggggatcttgaatggtttttcatgaagtttaagggatatagatggagtgtggcttgtattcagtctttggaagtaagtaccagttacctaaaaagaaatccactaagcaccaaaatgtttagtgtatttggtgtagagtttctacccacattaaaatgcttcagtttaaaatcgaagggaaggcaaaattatcaagcaaaaaatgaaaagtatcatttcagcataagcactactctaggtttaaacttggtcagcccagatcccagacagagatgatactccaaacatgaaaagtcacctccaagtctcaattcactactgagaacccaagttcaaaatatcccctaaaattccataaaaatcaggaaagaccctagctattgccccagggaagggcagaccatgagacaggtctcttttagctccaaactgaaagttgttcagcagctaaaatcctgaagaaaaaaatattgcaatcaattaacttgaaagctaaagatatgcctgtccaaatcttttgttaccaagacacaattttaagatcaaacaattgtcaag

SEQ ID NO: 7304 - DNA, 141 bp, Homo Sapiens
atcgtaaccccaaagggaaggttgctggataggcgatccagatctgggaaaggaaggggactaccaaagaaaggtggtgcaggaggcaaaggtgtctggggtacacctggacaggtgtatgatgtgggagggccggatata

SEQ ID NO: 7305 - DNA, 342 bp, Homo Sapiens
ctccccgtctgcattcttaggcctcttagctattaggaactgtcagatacatactagtagctaattttcctagcctgaaattatatactgcatctgcactatgtacctactagggatctgacctcaagtgttttctgagcccaggcttcctggtgtggtgtcttttaccacataaaattattacaaattgcaaatgttggtattgtgatttgattatctgtacaaagaaagaagctctatgcagtgagtttgtggtttaatggtcacaaaaatgttagcactgctaccactcagcacgtgtaaaattttttaaatttataaatattaaaattttaaacttac

SEQ ID NO: 7306 - DNA, 1713 bp, Homo Sapiens
cagccggcgtcgaggcggggcgcgggaacgacggcggccatggcggcctcggggcccgggtgtcgcagctggtgcttgtgtcccgaggtgccatccgccaccttcttcactgcgctgctctcgctgttggtttccgggcctcgcctgttcctgctgcagcagcccctggcgccctcgggcctcacgctgaagtccgaggcccttcgcaactggcaagtttacaggctggtaacctacatctttgtctacgagaatcccatctccctgctctgcggcgctatcatcatctggcgctttgctggcaatttcgagagaaccgtgggcaccgtccgccactgcttcttcaccgtgatcttcgccatcttctccgctatcatcttcctgtcattcgaggctgtgtcatcactgtcaaagctgggggaagtggaggatgccagaggtttcaccccagtggcctttgccatgctgggagtcaccaccgtccgttctcggatgaggcgggccctggtgtttggcatggttgtgccctcagtcctggttccgtggctcctgctgggtgcctcgtggctcattccccagacctctttcctcagtaatgtctgcgggctgtccatcgggctggcctatggcctcacctactgctattccatcgacctctcagagcgagtggcgctgaagctcgatcagaccttccccttcagcctgatgaggaggatatccgtgttcaagtacgtctcagggtcttcagccgagaggagggcagcccagagccggaaactgaacccggtgcctggctcctaccccacacagagctgccaccctcacctgtccccaagccaccctgtgtcccagacgcagcacgccagtggtcagaagctggcctcctggccctcctgcacccccgggcacatgcccaccttgcctccgtaccagcctgcctccggcctgtgctatgtgcagaaccactttggtccaaaccccacctcctccagtgtctacccagcttctgcgggcacctccctgggcatccagccccccacgcctgtgaacagccctggcacggtgtattctggggccttgggcacaccaggggctgcaggctccaaggagtcctccagggtccccatgccctgagagaatttctagggaagtcatctcacttggccttctgaaggtcctccctaagagtctcctgacaaaagttacttattgaacacctctatgtgccaggctctgtgttgggtactttgatcaatgcccctgtttcagtctcatctgtactcacggcagccctgtggagtacggtgtactggcccagcttacagatgcagaaagcgagacgttctgccatcagataaagtcacgtggctctttagtaacacggacaaggctcctcgccaaggaactcgtggcagaagagggcagcagttggcagtagctgccgatgtctgtccccagctccaccattcctccctgtggctgtgccgtgctcgtggtttcagtgtccgtgtgtccatgtgtctgcccttcaggagctcgcagctggtgtgcttggcggtcccaggcctgtgtagtgtctctcccctgctgcgggcgcccccaccccgattcctctccccagaagcggtgggatgggcccccatgaactgcagcagcatgctgaggtgtccatgttgtctgcctttgtataaagaaacagcctctgacctgcca

SEQ ID NO: 7307 - DNA, 794 bp, Homo Sapiens
tgctcttcttctggaactggaagtgggctatcaccatgggcaagcccttgggtgcaggctccccacctgcctgggaactctggcagctctcctcagctccttgggcttgagcagctgcaactgccccagatttgctgtggaagcaggggctagccctggcctcaccagggcctcccggggccctgcattgatgctcaggagttcctgggctgctcttgatcctttctgggcatccagcttccagttaagctctgtttgccaaacaaactattctcagctgccctttggcatgcgcctgatgtgttcctgttgcagtcccgcctgcctgagacaggagcaggcaggagagccttcatgcccagattcccacaggacaattggggagctgctggcattgtctttctgggaagattctgctttcttggaccaaatggcagcctgattaccagtgtcgggcctgcatgctgcccccgacacacgcacgcacgcgcacacacgtgtgcacatgggccatagccacaagccagctctcctccagggtcctttcaacctcgctgtccagggaccctgtccttcttgcccgtggggcttccatctggcagagaacgttcagggcttgttgaacttgaaagctcattagacttaagctgtcacctgtgcttggtgccccaggaacagccagagaggacagtgcccactcacttcttgttggcagcctcctgtgcaggaagtgccagccgggcctcgacgcaccagctggctgtgggtcctgaggaggggcgggaggcggtcgc

SEQ ID NO: 7308 - DNA, 514 bp, Homo Sapiens
accccagctggggtggggtcttccccacctgtctcttatgccttatgggaaggcccagccataactcgggggccatgctggagctggggaccagcttaggcctcctccataggaacccagtgactggggggtgacgcctacacccccagctatttgcactctggtgtgtggtttgactctgcttttcttccggattggccctgtggtcacagcctcagggggccaggctgggggaacctcacctggcccgtactcctgggggtttccctttgccattgggccccctgagggactgtgggggctcaagggtaatgccagaggcccatggccccagcgaggggctgtggggcacctagagttctcggtgtgtctccttcattcattggcctctgctggggcctcctatgggtgtcttacgtctgtccatccatctgtccgtggtcagaagtggggtcagtgtgtgagtgagagcaggagtatttatgaaaataaaacgtcgtttttcctggaaaaa

SEQ ID NO: 7309 - DNA, 717 bp, Homo Sapiens
agaaagcagcccatcctttgcacccagctctcagatggaaaagtgaagcccagaaggaagggacctgacacggaggcttccttggtagcatttcagtctcaagggaagaactgtgggcctcccctggagcactggtgaactgggtcacctccagaatacggaggagagagctggaggtggaggaactaaggaccttctttgccaggtggggacttaaagtttcagttacccattgttggggctcagaaaccaataccccgaaatatagtggtgtgacattctgaactgaagaagccttaaggtctctccgaccagactcccacaggccccccaaccctttgtctcttccaaagcatacagtgaagttgttctctgaagttcctcatctgccttaagtctggacccaccaaagaagaaaacaatgaccactggtcccttcccggagttttctctgactgaactgctgtcacaggaagaaagactgaagcctgctcacatacctggacagattttgcaaaccgttgtctgctctgtgagcccaacagactttgtcccaggccactgtatgttcttcaagcccactgaattcccctgaaaatcatttactagccccctgaaattacccacacttccccattgctcatctgtaccccatttcgtggtggggcagtcactctgatttccccttgcatgctaatgaatgtgtattccatttct

SEQ ID NO: 7310 - DNA, 703 bp, Homo Sapiens
  misc_feature (22)..(22): n is a, c, g, or t
  misc_feature (104)..(104): n is a, c, g, or t
  misc_feature (267)..(267): n is a, c, g, or t
atagccctttatgcccccactncgggcccctaaaatggtgatcaggagcatatctagtggtctaacccccttgaagcaatatgtatataaactccaaagaacanaaagtcatgtgatgaagaaacattaacatatctgctcctttcgagtgtttgagaaatgtaggctatttttcagtgtatatccactcagatttggtatttttgatgtacactgtgttcttaaattctgaatctttggaaaaaaatgtaaagcatttatgatctncaaggttaacttaattaagggggatgtacatatattctctgaaactaggatgcatgcaattgtgttggaagtgtccttggtgccttgtgtgatgtagacaatgttacaaggtctgcatgtaaatgggttgccttattatggagaaaaaaatcactccctgagtttagtatggctgtatatttctgcctattaatatttggaattttttttagaaagtatatttttgtatgctttgttttgtgacttaaaagtgttacctttgtagtcaaatttcagataagaatgtacataatgttaccggagctgatttgtttggtcattagctcttaatagttgtgaaaaaataaatctattctaacgcaaaaccactaactgaagttcagataatggatggtttgtgactatagtgtaaataaatacttttcaacaataaaaa

SEQ ID NO: 7311 - DNA, 456 bp, Homo Sapiens
cttgtccacagtagagtttaataaaaatattcactgaaagacccccccgcacccccatcggcccaaagctgaataagttagttagctgtgtccctggtcctttgcgatggtgtgaggctacatcctcccccagatggctacgatgttggagtccgtcagggcggtgaggtaggtgaaggaggcattggccaccactgtgttcaccatggtcttggtcaccacctggccaagggcccagggctggggccacttcaggatctgtgtgggggcctgcagggctgccggcagcaggggtggctgcttcaggatgttgctgacgtcgtagagccacacgttgccctcctcatccccacagagcacaatccccttatcagggcaggcgctgagcgagaagtaggccaactcggtggacgaccattgcagccgcgccaggaccaccactgccaccgtggactg

SEQ ID NO: 7312 - DNA, 658 bp, Homo Sapiens
acatttcagcagatcagcaattgcaaaatgctggtgctatttactgacgtagcactggatccaaggactccgtggatataaatatttccagattcctctgcattttaacaataacaagaatggtcagacggagacacatggttacagcatataatatcgatccaatggtccagtgttagttacaaatcagtttatacagttttgctccattttctatgaattttgtctttcaaataatctgttatagaatgtatattcaaaaacatgtttgaacagcaaatgtttagaggagccaagtctggtgaacggtctttccttcggttattttggcaagcggagaggtcaccgtggattctgagtgggccaggcaagtgttccacgggtcatcttctcccacgagctcagggacagggcacagagtcagaaacggtctttttttaagcacgttggcagcagggcgtaacccttcagctctttagggcgagtaccttcccgacatttttcgcataaccacaacgatgattccaccaatgaagccgatggtgagtaagaccccaactatgattccaaccagggtcactgttgacaaaccatctttctcaactgttgtctgtgtgtctccattcacattctccgtggagtgactggtggcacgttt

SEQ ID NO: 7313 - DNA, 587 bp, Homo Sapiens
  misc_feature (170)..(171): n is a, c, g, or t
ccattccagctggtccttcctgcaaaagtgaaaaccgggaagtagttctgtaaagtatcctcaagcaacgggtcattggtcatctgcatgcccaggtaggagaagtaatcacaggtggcagcgagcattcaaatctatgaaaactacctcgggcaggagcagagaacaanncaaatacaagaagcaagcacatggagaaactagaagtagaccctagcaagcactcattccctgatgtgactaacatagttcagagagaaaaaacacacacccagaagacgacctgaacccaaaattataccaagtgaggaagacccaacctttgaagacaaccctgaagtgcctccgctgatttgaaacatctggctgcgttgccattggctgagacccaccaggtccagttttggttggtgtagagaccatatgcatattattcctgggataaacacagagttatttgtcaatatcgctgctccagtgttttaactcttactttgcatagtaatatccttaagatagcttaaaattaaaatgtatgtcttaaatgctataactcatcatttacctataataaagggttggtattg

SEQ ID NO: 7314 - DNA, 580 bp, Homo Sapiens
gacactaccactggatcgtgtcagaaggtgctgctgaggatagactgactttggccattggattgagcaaaggcagaaatgggggctagtgtaacagcatgcaggttgaattgccaaggatgctcgccatgccagcctttctgttttcctcaccttgctgctcccctgccctaagtccccaaccctcaacttgaaaccccattcccttaagccaggactcagaggatccctttgccctctggtttacctgggactccatccccaaacccactaatcacatcccactgactgaccctctgtgatcaaagaccctctctctggctgaggttggctcttagctcattgctggggatgggaaggagaagcagtggcttttgtgggcattgctctaacctacttctcaagcttccctccaaagaaactgattggccctggaacctccatcccactcttgttatgactccacagtgtccagactaatttgtgcatgaactgaaataaaaccatcctacggtatccagggaacagaaagcaggatgcaggatgggaggacaggaaggcagcctgggacatttaaaaa

SEQ ID NO: 7315 - DNA, 535 bp, Homo Sapiens
ctgactattactgtggtacatggcacagcaactctaagactcacacagtgctccagacccatgaggaagtaagacaaaaccctcccctctactctcctggcctagtgaaatcacccctgctggtggctctgaccaaatctagctcagggggtgacatctgttgtctcatcgacagcactggagctcccacggagaagtaggtctaacaaagtcctaccttgctcgcatttcacaggcagacatcccttgctcaggggtaaaatctctcagtgttgacattgaagaaggcaagagggctgggttggggttcatctcagctcagagtctagaagtgactcagagatgctgctggtctgagagttttaatatgagccttgggatacaatacagggatgcagatgggaattgtattctctatgtcagtaacgaaccatcagtaattgaaaagtcaatacattgagaatagcataaagcatgatatactttaggataagtatgacaaaaattgttgttttaaacactagaagtcctaaaa

SEQ ID NO: 7316 - DNA, 394 bp, Homo Sapiens
  misc_feature (251)..(265): n is a, c, g, or t
gtgtgtcccagctgccccatcttccccagcgcatacctgttcctcttctcattctctccccgccgcctgtttcctcaccttctctcccctttccatgccgtccatgatccccaccccatgtgttttaaaaaggcagtagcctttgcagggacctgtctgtcccaactgtttgaacagtgtgctcctcagattctgtgttcagaaggatttgctgcattgagacttgaaacctttggataggggaaaaaatnnnnnnnnnnnnnnnttttttgttctgtttgcatttcttaatttgtgcttggaatgtgttgatgtgcacagctaatgattcaatgcgagacaagattggcgtctgtgttgtggaggtttcaaataaagagcactcttcataaaa

SEQ ID NO: 7317 - DNA, 239 bp, Homo Sapiens
gacccttgtttgaatgttgacgggatgaacataataagcaatgacggcagcaataaactcaacaggagcaggaaagcgagggtatcctacaaagtccagcgtaccataaacgcaagcctcaacgcagcgacgagcacgagagcggtcagtagcaatccaaactttgttactcgtcagaaaatcgaaatcatcttcggttaaatccaaaacggcagaagcctgaatgagcttaatagagg

SEQ ID NO: 7318 - DNA, 437 bp, Homo Sapiens
  misc_feature (74)..(82): n is a, c, g, or t
ggagcttctgttgagataatcttcattaggtatatatcttagggatacagccttttctttatcttatagcaggnnnnnnnnncttttgagggaaatagaagggctgcgttacacaaaataaacaatggcattgtcataggccttccttttactagtagggcataatgctagggaatatgtgaagatgtttttatgaagtctctttctgatcacgaacaatagcttgcgctctactctgtagttatgtggattgccgagcaatgacccttttcaatttcttatttctgtgttactgaggaccctaatcacttagggatgtaattttatagtataaactttctgtacagtttttcttatagtctaataagtaaaaagtgtccttcaaattatgataattgcctatgtacatggataaattaaaacactgcacacggagt

SEQ ID NO: 7319 - DNA, 367 bp, Homo Sapiens
  misc_feature (245)..(309): n is a, c, g, or t
ccagtccatggacccccctgcagacagcaaaggcacaggagatgatgtggaaggttccagggaagaccaacactaagagctgatgaatggggaagagggtggaagacaacagtcaagtgagatggccaacaggagtctttataatgttccagaccagcccgggtaacagtgagacccatctctaaactaaataaattaatttagtatttgttaaagaagagagaggccaggggtggtggctcatnnnnnnnnnnnnnnnnnnnnnnnnnnnnnnnnnnnnnnnnnnnnnnnnnnnnnnnnnnnnnnnnntgcagtgagctagaatggcaccactgcattatggcctggatgacagagaccctgtctc

SEQ ID NO: 7320 - DNA, 508 bp, Homo Sapiens
  misc_feature (250)..(293): n is a, c, g, or t
ccacctgacagccccatcctcaaagactgtcttaattactcatggcaggttctagagacttaaggggaaaagctgctttcaaggccaccacatgtctgtgctccccaaccagctctatctgccttgtgttcattttgttattttgtgacgtgagactgcaaagaccaataaaaacatattttataagaacaaaaggcctgggtgcctacccgtgtgggggcactgtgggaagcctttgctagggtgtctnnnnnnnnnnnnnnnnnnnnnnnnnnnnnnnnnnnnnnnnnnnnttacccagtcttcccttactcttggatgcttcttaaccctcaggcaaacctgtgttccccctgtattcaggctctgctttaaagcaagccatgaggctgttggagtttctgtttagggcattaaaaattcccgcaaactataaagagcaatgttttcagtcttttaggattagaagaattacataaaaattaataaacattttcaatgatggaaa

SEQ ID NO: 7321 - DNA, 456 bp, Homo Sapiens
ggcggtaccagaatgtgtaacaacgacccagcatagaaaacaggaagcatcagttaaaatgggaaattgctgtgggctggattactgtaattcctcgtcttacttagaagttggcatagagcagggtcctttatccacagcgtgatgtctcttgcttttctatgccttgataattttgccctttctttagggtggtgcattgctaagctgacaggcttttaggctggaattgctaccttttactatgcttagaaattgtgtttttaaagagctgtttgttttttctctgtctctgggttaaaagcagtctagctccactgctggttctggttccctcctcctgccccctctttaggtctaagtaggcgagattgagcacacagagggactcacagctcagcttaataataaccccgcagtaagtgacatagtcgttgtacacattctggccgctat

SEQ ID NO: 7322 - DNA, 511 bp, Homo Sapiens
ttgtactatgaatagcttcttgctttatgactttaggattaacttgtaaaaaacatatcctgaactgagatatgcaaaatactcattttcaagttatggaaatgtgtttgtggcatataggactgtggggtctgtgtgtgtagtgagagtgtgtagccactattataactggaatttaatttacattcataaactactatatttcccatcttgcaaatcattttatgtctcatctgtttttcctttcggttatatctttggttttgaataccaacatttaaaatgatggtattttatcttttaaacttaaaaattatttaatacagctatatggaccttataaaattgatttcttatttattattagacattactactaaaaggtacatctaactattcagggacatttttccatttccaaaaaataaaatttattatgctttataacctcttctggattttctaattttttcattgtctttgataaataaaacagttttgttttgctaaa

SEQ ID NO: 7323 - DNA, 265 bp, Homo Sapiens
cccttgatcccctccatttcctaagctgtgggaaatgtctccgttagtaacccacatcagttcctgttgcagtcatttactgacctgagtcctctgggatgcagcagagacacatcatttgccctgcatgtactgtggctaacactgttgtgtcagtgctcacttagtgttggctgaatgactgcatgcaacaatagctgttttaatttgtgacattaggactaaaattttatccattttaaggacggccggatataattgggat

SEQ ID NO: 7324 - DNA, 301 bp, Homo Sapiens
agagttccagttccttctctaaattcaatgtgatgtagagttaatccgtagtaatgttcattgaccataggggataaatttttacatgcccacattacttatgtaaaccctgaagacctttagcgaagtatgattctgccctggaatatgtatttactctttaggatatttgcttatattatctagggaaacatagttgaaattatttcttcctcggagctcttgttaacagcgctataaataagtgttctatggagttatttttgctctttgaaacaaacaggtaaaacctaaataaagc

SEQ ID NO: 7325 - DNA, 347 bp, Homo Sapiens
aatttgtatggtagccttaaaaatcattgcaaggactgcttgctgagacagagttttgtacaaaaatcatttaaactgatcaccctgattgttcctgacagcttcatcatgagtttagatttttatggcgtgtctttattcagagaaaactgcaaacctattaaatacattgaaccagcaccagctataaggtaaccttcctattaacagctttgggagagcagcactcttaaccaatagcttttggctctgcatgcttataatatttttgatacaattaaacgctggctacactgaaattctgtacatatgcaaatgttgacaacgatgggccggccgaatatatt

SEQ ID NO: 7326 - DNA, 236 bp, Homo Sapiens
tgctgaggtgactctacaggatcctcagttccttctctaaatttcataaatattcacaacaaccctgagaagcagttgttatgccatttttataaatgaagaaaatgaggcttagaaaagtgaagtgagtaaatgaagttcaaaaagcaaagtcagggctggatacaatggtgtggacctgtagacccagccaatcaagaggatgaggcggggagtgattgcttgagcccggggag

SEQ ID NO: 7327 - DNA, 504 bp, Homo Sapiens
  misc_feature (23)..(23): n is a, c, g, or t
ctcggtacccaatatatccggcnccgccacttggctcacagtgagaagagggtatgtgttgggaaaggaatagttgctgaggctggaggggtaagttgagggcaagtcactaaaggcgctgagtgtcaggttgaagagttgggcctttatcctgtaagtaaagaaaggcaaatctcatttctagaactcttatgaacagttcatagtggctacttaaagtacatgtattgaaaaggataccctagatgttatctgggcccagtggagaagactgttgtgcttgattaatggtgtgtgccaggggctcagtgggtgtgttagcaaccatgccacattatctatggataaaatatatataggagtagagaccgtataacccaggaattaacatggtctgtggagctgggctgcttaaatcctggataagaagtgactgctgtggtctggctgcatggtcctgaggacctgaaccagggtcaggggcatgggagggaagagcctaca

SEQ ID NO: 7328 - DNA, 603 bp, Homo Sapiens
gagctcggtaccctcccttctctaaatttccaggaagcatattcacaggagagagagaacaggtttcctgcttggggatcccaagcagagttgaagttgggagcactgtactgaacaaagccagcttaagaaaatgcatgcatattgaatgcccacctctctctaccccactatctcgcttgacccagatccaaaatagtaatagcagactttgactcttctgacaggagattggaagaatcttacctgatcagtccaggaggaaaacctaaatgcagtaacatcagggttccctaactaagctgtccagaacttaccatcttcacccaaaccaagaaattaaaccaataaagtggaagatcagggcaacacacccagggacatacacccaggttgggagacacatgtaggagagtaagacagtgagcccagaatgatggtgagggaaagtcccaagatgacagctttatgtcttatgcatcaggtataaagacaaataggccatcagaagaatgaagcatattttgtcaggaagatgaaagcaatgcatcttagtagattaagagaaatttagagaaggaactgggatcctctaggtcacct

SEQ ID NO: 7329 - DNA, 809 bp, Homo Sapiens
gctgtttagatgatgcttttactatgcaggagagagtttttgttaaggatatatttgaagattggcttttccatattgtccttcattctttgaccgtggcaaagtgtacagtagattttcatgatcattgcatatttcttgtcattgaaatgtatcttttatgtttttaaatgcattcattttacacttgtgagtttatcattgactttaagaggtagaaatgaaaaatgaaaattaaagctaaagcctttttatctattaatgcagatatattagaataagaatattttgggtttgtgtttattttttaatgaatttatgtttacttgatatggaaaattacgctttataggtggaaaagtagcaaataaagattaagtaaaagtaagtgaaaatgatggggaatatagtattggaattttatagctagttaaaacaataagtatcatctaattgggtgtttattttgcagatgagaaaacagacctagaaccgtggcatgttttgcctgaaacatacagtgagttagagacagggcctaagatagcttctagcatcagatcaatcccaagaatccatcagcaacctcagaccaacccaagaagataatttaaatctatactgcttattggtcaatatatttggttctagtattaataaagaaaaatgttattaaaatagcatacatagtagtaaaataaaatacaaaaagtgtgttgatttatagctgtttgagatgataaaagtgaagcaaagcctgttaaatcattggaagacttggaaaattattttaaataaacaattacatg

SEQ ID NO: 7330 - DNA, 171 bp, Homo Sapiens
attctcttgtgatttctaattgtggcaaaacatcacgtttaatgtatggaacataatttatttaactaatgcttggaatattttttgagtgctcacaactcatgtgtttcataaatgtgtgtgctctaatatctctttaaaaagactcgagacacggatagggtatcctct

SEQ ID NO: 7331 - DNA, 390 bp, Homo Sapiens
gcaagaaccacagtgttactaggctaatgcagatatggttgcagtgaccacttagatcacaacacccaagtcccttcaaatacctggaaagcctttccaagaaaggtgggctaatacaagcacagactctgaacactacaacgaatacctaactcttcaatgctcagacaccaatgaacatccacaagcatcaagagaatccaggaaaacatgacttcactaaaccaaatgaggcaccagggaccaagcctggaaggactgagatatgtgacctttcagatagagaatttaaaatagccgttttaaggaaactcaaagaaattcaagataacacacagaaggaattcagaatcctaacagagaaagttagagaaggaactgggaacctct

SEQ ID NO: 7332 - DNA, 170 bp, Homo Sapiens
gttactgtaatttttctagtgataggattctaacctctgtgcccatacttttcagtttaattcaaggtattttccctcgggcatttctaaggattcttaaagaagttgagatatgattaaatattttgttcccatgctgaaaaacaaaatatggggatgctctagagtcc

SEQ ID NO: 7333 - DNA, 988 bp, Homo Sapiens
gtggctcttcgtattgagaggatctgtccaagaagaatccaattgggaagatatattctgatcttgcagaagaaagaggactcaaaattacttacaaatacactggaaaagggattacagagccaccttttggaatatttgtccttaacaaagatactggagaactgaatgttaccagcattcttgatcgagaagaaacaccattttttctgctaacaggttacgctttggatgcaagaggaaacaatgtagagaaacccttagagctacgcattaaggttcttgatatcaatgacaacgaaccagtgttcacacaggatgtctttgttggctctgttgaagagttgagtgcagcacatactcttgtgatgaaaatcaatgcaacagatgcagatgagcccaataccctgaattcgaaaatttcctatagaatcgtatctctggagcctgcttatcctccagtgttctacctaaataaagatacaggagagatttatacaaccagtgttaccttggacagagaggaacacagcagctacactttgacagtagaagcaagagatggcaatggagaagttacagacaaacctgtaaaacaagctcaagttcagattcgtattttggatgtcaatgacaatatacctgtagtagaaaataaagtgcttgaagggatggttgaagaaaatcaagtcaatgtagaagttacgcgcataaaagtgttcgatgcagatgaaataggttctgataatgggctggcaaattttacatttgcatcaggaaatgaaggaggttatttccacatagaaacagatgctcaaactaacgaaggaattgtgacccttattaaggaagtagattatgaagaaatgaagaatcttgacttcagtgttatagtcgctaataaagcagcttttcacaagtcgattaggagtaataccagctacacccattccatcatgtcaagtgaacatgtgacgaggctcattta

SEQ ID NO: 7334 - DNA, 793 bp, Homo Sapiens
  misc_feature (26)..(26): n is a, c, g, or t
  misc_feature (458)..(649): n is a, c, g, or t
  misc_feature (658)..(672): n is a, c, g, or t
  misc_feature (703)..(711): n is a, c, g, or t
aggctacccactcccctagggtctcncaggctcagaaggggatgcacgccccctgtggtcaagcctctggtgggcgtcttgcccagttcctgatggttcaaggggaggggggatgttggccaggccccagggcacagccctgacacaggtgtggctactggaggggccttcatacctgcggccccaaagcccctgggcttggctgtttgaggcagaggtgatggactccgggggcctgacacttgggatttgggaggcttcctagagcgctcagcaggtgaaggcagcaggggccatggccgggagccaggcctagctttgaactgagtttcaagggctgccaaagaggggcagtgggttggggttgtttttactacaaaataagttacttagttttataaagacaaaccgattgtagccaaatgacaccatatttaataaaatttagtctgaagtgnnnnnnnnnnnnnnnnnnnnnnnnnnnnnnnnnnnnnnnnnnnnnnnnnnnnnnnnnnnnnnnnnnnnnnnnnnnnnnnnnnnnnnnnnnnnnnnnnnnnnnnnnnnnnnnnnnnnnnnnnnnnnnnnnnnnnnnnnnnnnnnnnnnnnnnnnnnnnnnnnnnnnnnnnnnnnnnnnnnnnnnnnnnnnnnnggggggcgnnnnnnnnnnnnnnnaaaaattttttctcacactttttgttggggnnnnnnnnnacccagaaaagagaaagacggatataatttttttcccccaaagaaaccccgggaaaaaagaatagggggtgtttttctcccc

SEQ ID NO: 7335 - DNA, 876 bp, Homo Sapiens
tgcactcctctctcctggtcactcctcctcagccacctcccagagctggccctcccaaggacatctccagtgatgccttcactgccttagacccacttggggataaagagatcaaggatgtgaaagaaatgtttaaggatttccaactgcggcagccacctgctgtgcccgcgcggaagggagagcagacttcttctgggactttgagtgcctttgccagttatttcaacagcaaggttggcattcctcaggagaatgcagaccatgatgactttgatgctaatcaactattgaacaagatcaatgaaccaccaaagccagctcccagacaagtttccctgccagttaccaaatctactgacaatgcatttgagaaccctttctttaaagattcttttggttcatcacaagcctctgtggcttcttctcaacctgtatcttctgagatgtatagggatccatttggaaatccttttgcctaaattctgaacttggtctgcagaccatccagaggaataaaaaggttggccttagtagtcaaaaacaaagctgatagccagacacgttctgatttctgcccttgttccagctttgacgtattatctgttgccttatttctcattgcctcttctacttgtaaaatgcttttcactttctgtctaggttaaagctaaactgaatctatggctttaaataaattaagatcctaaactctctagcttaagtgtaaatgaagtacagtagtttccctactgaaccctgcctcttgtgtccctggaaccttctagaacacctgccttctaccctctggttgggagatgcagccaccacatcccttcatatcatactgttttgaataaattttcaaatcctaaa

SEQ ID NO: 7336 - DNA, 891 bp, Homo Sapiens
  misc_feature (149)..(189): n is a, c, g, or t
  misc_feature (508)..(563): n is a, c, g, or t
  misc_feature (625)..(625): n is a, c, g, or t
  misc_feature (729)..(729): n is a, c, g, or t
  misc_feature (829)..(829): n is a, c, g, or t
gcggccgccactagcgctggggcgcggggagagccgtcgccggcgctggtgctgggacgcagcgtgccccaggcggctgtccccgtgaggcccctggcgctgcacctggcgcacaaggcgcgtgggcccgggggccctttcggcggggnnnnnnnnnnnnnnnnnnnnnnnnnnnnnnnnnnnnnnnnnttgctgcgggatccgccggccgaggacgcccgggaagaggtggcagctggccctgcggaaaagcggcagccgccgctgctgccgcctaagggaaatccctggaccaaaaagcctccccagcacctgtccccagacacgacaggtccgccaccgcccccgctggaaaccctggaggcagaattcggttccctcaaaattataaaagcaggaaagctcaagacaaagaaatccaacaaggctagtgatttcagtgatatggagaattggccaacaccaagtgaattagtgaacactggatttcagagcgtcctcagccaannnnnnnnnnnnnnnnnnnnnnnnnnnnnnnnnnnnnnnnnnnnnnnnnnnnnnnntaacagtgacagcaaagaaaaccgggaaacaaaattaaatggtcctggtgaaaacgtcagtnaggatgaggctcagtcaagtaatcaacgtaagagagctaataagcacaagtgggtaccactccacttagatgttgtaagatcagagagtcaagaaagacctggntcccggaacagctcaagatgtcaacctgaagcaaataaaccaacacataacaataggagaaatgatacacggagttgggaagcgagattgagaaaaaagngatgtcaagatgacgtttccagtgtgagaagtgagggtggtaatatcccgaggttcctttag

SEQ ID NO: 7337 - DNA, 329 bp, Homo Sapiens
  misc_feature (163)..(163): n is a, c, g, or t
  misc_feature (166)..(166): n is a, c, g, or t
  misc_feature (172)..(190): n is a, c, g, or t
gggaggaggacagaaggcccagctcacatgtgagtcctggcagaacccatggcccatgtctgcacatccagggaggaggacagaaggcccagatcacatgtgagtcctagcagaagccatggcccatgtctgcacatacaagaaaaaggacagaaggcccagntcnagtggnnnnnnnnnnnnnnnnnnnacgcccgaacagcaggggcagagcagccctccttcgaagtgtgtccaagtccgcatttgagccttgttctggggcccagcccaacacctggcttgggctcactgtcctgagttgcagtaaagctataaccttgaatcac

SEQ ID NO: 7338 - DNA, 364 bp, Homo Sapiens
ctggagcgaggactctgaagctgactgccatgcgttgtagctgatggtctccgtgtaagccaaaggcccacagaggagcatatactgaaaagaaggcagtatcacagaatttatactataaaaagggcagggtaggccacttggcctatttactttcaaaacaatttgcatttagagtgtttcgcatcagaataacatgagtaagatgaactggaacacaaaattttcagctctttggtcaaaaggaatataagtaatcatattttgtatgtattcgatttaagcatggcttaaattaaatttaaacaactaatgctctttgaagaatcataatcagaataaagataaattcttgatcagctat

SEQ ID NO: 7339 - DNA, 473 bp, Homo Sapiens
agagtttaagcaaaattttacatggggtatgtaatatgtcggtatttatgatataccagggaagacaagttgaaaatacatgacttagtaagaacgattttccccttaagtactttctaactttttttcttatttcccacttagttacaaaaagtaaataaataatcctatatttttcatttcattgatgcatgaagactcaatgtatgaagataatagtcatcagtttataattacactataggacaaagttttaaaaagttctagtgtgtgtatggctaaatgcctcaaatattttacatttactgataaataacagcattccaaaatcatggacaattatgattaaaagttgtaaaccatatcacagaatatgttaatcagcacatcttcatcagtttacataaagttatagtagtcttattagaagttgtaaaatttggtaacagaaaatttttttcaatacacagaat

SEQ ID NO: 7340 - DNA, 603 bp, Homo Sapiens
cgtcaccagtccggggtggcctgtccagtgcctcctgccactggtgtccggacaactccccgccccctgtctctcggacagctgggtgcctcacatgtgggccctgcaggccacctcttttccaagcatgccttgccctcagctcttgggtggggagggaagacatgctttctgcctgcaacgactccaacctgtcacggagcccccctgcagcaccacaaggccctgccctttcccaagcagagggatgggacagccgtgcagatctcgggtcccgcccctagggaagggcctcgctgcagaagccaggctgctcaccttggagtgcggggaaccagcgcccctttcagcacccggtggtgtctctctgtgggaagggagcggttttatccaagcaggacactgttttctgtagttttaccttctttcaagaaatgtcgtatatgagacctccgttgagtgtggcagctgttcattgatattccattggatgcactagtgtgtcctagtccccacgatcaatgtgtaaatcgtaacatccaatcatagcgagtttcacacacataggaataaataaatggagagtgctgtaccgggaaaaaa

SEQ ID NO: 7341 - DNA, 409 bp, Homo Sapiens
  misc_feature (17)..(17): n is a, c, g, or t
tctcctgcctgctttcntgagatgtcctggtcttccttggtgccagaagagggcactaccacaggaccctctcaagcttctcaggcaacagcttgaggtccctgaggggagtggcaagccctaatgcaactcaccctcatcctggtgcttaggtggcagagggtgggcagcaggggacagggatgggatggcaaaaccaccaactgcccttggtggcaggtgggtggagatgggatgcgtgccaacctcagatgccaactcaggtcatcaaggccaaggaccagtggcgaaagtgagtcttggggtaccttaggccttggctagtctgcgttcctctccctgcatgctgtgtatcctaactccctacaacagcccctcaaataaatcacatctagtgactggtaccaac

SEQ ID NO: 7342 - DNA, 168 bp, Homo Sapiens
cctcctcctccccccctgcccccacctcttcctcctcgccttcgggaggaggcagaagagcaggagagcacctgccccatctgtctgggggagatccagaatgccaagacattggagaagtgccggcattcattctgcgagggctgcatcacccgggctgctgcaggt

SEQ ID NO: 7343 - DNA, 508 bp, Homo Sapiens
  misc_feature (48)..(164): n is a, c, g, or t
cttcctgcaacattatttatctggaatctacctgcccttttgtttttnnnnnnnnnnnnnnnnnnnnnnnnnnnnnnnnnnnnnnnnnnnnnnnnnnnnnnnnnnnnnnnnnnnnnnnnnnnnnnnnnnnnnnnnnnnnnnnnnnnnnnnnnnnnnnnnnnnnnactttgctgcctttcttacatgatccaggcccagaacccaaactcaggcactgtatagatgaccactttcgtaaactactgacctagcttgttgccaattgttgattgaacttcccataactccacttcgtgtctgttcctctgtatacagccaccttctgttcccgtcatgagcctttaggtctccatttgcatattgcaaatactatgttccatgtaggtagctcattcagggccttgctcttcacttcaaaaaaggttcccttgaggactggctgtcaatttgtgttgctgtgttggttgttgatgaaaataataaaatgattgattacatagtcctgttt

SEQ ID NO: 7344 - DNA, 1220 bp, Homo Sapiens
taagcccaccggttttgggaaactgcccaccaagggatagggtaaagcaccttttcccattgggtccatcagcagtttttcttcctgcatttattgttgaaaactattgtttcatttcttcttttataggccttattactgcttaatccaaatgtgtaccattggtgagacacatacaatgctctgaatacactacgaatttgtattaaacacatcagaatatttccaaatacaacatagtatagtcctgaatatgtacttttaacacaagagagactattcaataaaaactcactgggtctttcatgtctttaagctaagtaagtgttcagaaggttcttttttatattgtcctccacctccatcattttcaataaaagatagggcttttgctcccttgttcttggagggaccattattacatctctgaactacctttgtatccaacatgttttaaatccttaaatgaattgctttctcccaaaaaaagcacaatataaagaaacacaagatttaattatttttctacttggggggaaaaaaagtcctcatgtagaagcacccacttttgcaatgttgttctaagctatctatctatctctcagcccatgataaagttccttaagctggtgattcctaatcaaggacaagccaccctagtgtctcatgtttgtatttggtcccagttgggtacattttaaaatcctgattttggagacttaaaaccaggttaatggctaagaatgggtaacatgactcttgttggattgttattttttgtttgcaatggggaatttataagaagcatcaagtctctttcttaccaaagtcttgttaggtggtttatagttcttttggctaacaaatcattttggaaataaagattttttactacaaaaatgaaatttgtttggacttccacttgagacagtaaagagagtattagacacccagtaaaaactgccatataaagaagttgtaattgtttgttgtgtatgtatttttttcaatgccaaaccagctgtgatccaatttacatccacattttaggtccaacagcaagaagttcagagagagatttcccaaccagacattgggtcactcactggtcaccttgccagtgcattttattagaagggaatctgttgtagcaaatgggaataaacctgggtttctatagacccagaactgaaaaaataaacatcgtgctgtttttaatt

SEQ ID NO: 7345 - DNA, 688 bp, Homo Sapiens
gcgacacgacaggctccgaggtccccggccctctgtctcccgggcgtcctccagcagcgggccttcggggccggtagccggctggagtacggggccttcgggagccgcgcgccttctccggcgtccgggtcgagcgcagatccctgtttattgggaaggatatgttcgattcttaaatacgccatctgacaaatcagaagatggaaggctaatttatactggcaatatggcccgagcagtgtttggtgtgaaatgtttctcttattctacgagtctgattggccttacatttctgccatacatttttacacaaaataatgctatttctgaaagtgtgcctctgcctattcaaatcatattctatggcatcatgggaagctttacggtgatcaccccagtgctgcttcactttattacaaaaggctatgtcattcgattgtaccatgaggccacaacagacacttataaagccattacctacaatgctatgctagcagaaacgagtacagtgtttcacagaatgatgtgaagattcagatgctaacatgtattaccacatgttatgctaaacaaaatactggtagttaaccagtgctcttccaagcgtgaagatagttcatctaatggggtatgccatgaggattatttggttatggagagcagtgaggaacgcataagatggaatgat

SEQ ID NO: 7346 - DNA, 480 bp, Homo Sapiens
aggtactggggtgtgaactcggagagctacctgatgtcgcgcccctcggggacagaggcgcggccccaaaccctccacgcttctacaagaaccccctactcaaaatgaaggctcagggccggtgtaaagcgggcctccctctgacggcacgcgggccagtcggggctgcggcaggacggctggcggaggtcccggcgcggaacagcaagggccgtgtctgtgcgggtgagtggccccgcaactgcaggctgacgtcaccgcaggccgcgcgggccttcgtggggctccccgggcgcggctggatcaggacaagcctacttcaaggaatgtttggtgtgggtgcccacttcccggccccgccccgccctccccaggagaataatcgggtatttaatctctcccggtcttaattcttggcagcgtggaaggtggtttgcaacgggaaataaaacttgacaggagcattttctctaaaaggga

SEQ ID NO: 7347 - DNA, 504 bp, Homo Sapiens
agctcggtacccaagcttctcaacgcaggagagagcctggccctgaagaaatggagaacacttgttcagaaagggtagaaacacagaactctgagccaagttgcacttcattcttccatgatttgccagtcaaataagattaaaagataagttatacttaatctctttaaagaagtacagaggagccaggagtgtgtttagagaaagtttttccttgtgtaaaccaggagtggggaagaggcattcctctctacaaagggggtcagaaaaggtttcatggaggttatgccttgagctgagcattaaaaatgggtaggtttctatatagacgttgagaagcttagcttctcaacgacacgactctgctgggatggaagatggttctggcttcatttaccatccaacctttttcaaatagctagtcaagtaaacatttccctgttctaaagatgaggccaggcacggtgagtcatgcccgtactcccagccctttgagcgcgtcag

SEQ ID NO: 7348 - DNA, 758 bp, Homo Sapiens
gcattgatgactaagtatttattgagacaaataatacaaattggtggcatacaaattattaaaaatagaatgctgaattttatttataggtgggccatcagatactgtttacaggttaagccttactataatgaactgcaaagaagtatgtatactgtttgaaatgaggaactttatccaggcaaacatgggatgtcaagagtggcctgtgatactggagacaaggaatatcaagtaattgacatgttacttgtctgtcagattttaagaatactgtgatttaggcatattcaaagaaacaactgcctgttttaatagggataagtatataacgaaaacatttaatatccatacccccctcaaaaagccctttattcccaagtagcaactagtgtaaattaattttcaattcctttctacccttcctttgctagaaatacttatgcataactaaaacactcaagtcactgaagggaacaagatccttttactgtcacttgaatctaaaaacactcattttgtaatttgggcgaagtagctctcaaatataatgcatttttttctatcctatatatatacttgggtaaaatcggaaggtgagcgcttaggcagaaataagtaactattaaaccagtgggagcaaagttcagttgggcaatactctttatgatactgacaagcgaaggcttattagttccaaaagtgctggctttatttctgtagtcacagagtagtctaaaggtaaggcttacccagct

SEQ ID NO: 7349 - DNA, 428 bp, Homo Sapiens
ccgactcggcccaagtttctcaacgtcttgtagcaaggttagcaatcaccatgtgtaggggaagagccatagtgttcctagggtgggtagagatgccacaagagggcgttctgagttttcatcttctctaccttgaaaaattttccatttgttctctggctgcattccaaatcgaacgaagacttaaggtttttagtttacctaactgattgaatacacttttaaaatgaattcatgtgtgtttactagtttatcagtcatgtggatgcaataccgcagcccctgtcgcaaggcgcgttgagaagcttaagcttctcaacggtatatatgtttccttgtcagcacttgtgatacgacgcccagtgatctgggcggcagatccaccatgcatatgatggccaacagcaaaaccgcgatggttgggtgcc

SEQ ID NO: 7350 - DNA, 506 bp, Homo Sapiens
tgcaagagaggccttctgtggatggagaactaggccttctcaaagctcaaggacaaaatccagctaacccagtccctcggcccaggcctcctttcgtgctttgtgcttggtgggggggatttcgagggactttgcactggactctgggaacctttcatcattaaaaaaagggggaccattggggcctgagccaaggaactttccttctactgccttatagtgcttaaacattctccgcctccagggtgcagattcagagctggccagagtttcagtgatagccgtatgttaaacagaatctcacctcagtctcctggagggagatgtttaagaggggttaacacatcagatgggagggtcagcccggtgacctctaaggtatcttctaacctagaaactcaccataattatggtgcaaggtcagtgtgtctctgagatctatgtctgttggtggcaatgtgagggtgatactctctcactctaataaacttggcacttctccgagt

SEQ ID NO: 7351 - DNA, 529 bp, Homo Sapiens
acccaagcttctcaacgaacaactgaaaaacaatagctataaactttcaaggccaaaagataagatttaagggcaatacctgttgaagaaggaaaaggagtataaagttcctagagaggtatttataatgcaaatctaatgccagctttttagtaataaaaaagagaagtgctttactatacactgactagcacataatacttaatttggaaagaaaaattaatgacgttccttgggccagcagcagatatggtgtgtccattgccggcaacagacacaacaccggaacagaaaaacccaaatcccagggctaaagtattcacagaagtaatggttgaaggtttcaggatttaacaggctaggtttaatcacaagtgctacactctgtacaatgttatggctctgcctgaaattttacagctataacagaaactaaataagacaaagttcatattttagtgtcaattacatgttaggtatttagttagttacaaacccttttttcttgcgtagagaagcttgggtaccg

SEQ ID NO: 7352 - DNA, 366 bp, Homo Sapiens
tttttaaaggtgaatatcaagatttactgattctaaatataactttcagaacaataaattttgaatctcaaagcatgaagtcaatacgtgtcacagattctgaatgctttcaggagtagcacaggaaaacttcagaattttgcatatgtaacatttaagcaggaagctaacactcagaaaacacatttgcaagtaatgtttgatttcaactaggatagcagttttctggtaactttgctcagctaatcagattttttaaaaaaattcttaaaactacaacacagtttactttcgtaaaaatttcggcaaacaaaaattttaagtcttttgtttccctttctttaatttccagtttctccagttatg

SEQ ID NO: 7353 - DNA, 243 bp, Homo Sapiens
accgtactttctcgcagcatggatactcatcgatcatggtattcaaaatgtcgtatgcactgtacaagtctatggaaaaaagatcatatgctgaaaagtctcaaagcaaactgagtattaaatacaaaagttcgttttatgaaaatacgctgagacccatcaaagtgtcttagcagttaagaggctgacatccaattaaataagctcttattaagtgggattactagtgctgtcgtcttgggg

SEQ ID NO: 7354 - DNA, 451 bp, Homo Sapiens
tgtctcgggctgacccttttctgatcgtctcggcccctctgattgttcccgatggtctctctccctctgtcttttctcctccgcctgtgtccatctgaccgttttcacttgtctcctttctgactgtccctgccaatgctccagctgtcgtctgactctgggttcgttggggacatgagattttattttttgtgagtgagactgagggatcgtagatttttacaatctgtatctttgacaattctgggtgcgagtgtgagagtgtgagcagggcttgctcctgccaaccacaattcaatgaatccccgacccccctaccccatgctgtacttgtggttctctttttgtattttgcatctgaccccggggggctgggacagattggcaatgggccgtcccctctccccttggttctgcactgttgccaataaaaagctcttaaaaacgcaaa

SEQ ID NO: 7355 - DNA, 254 bp, Homo Sapiens
gcacggtacccagcttctcaacgcacctcactgagaaagcaaaggctcctgagggaaggactcctaagctgaactcacattaagttagcatgagctaaggcaagaagtggggacacagagtagcgtgttccggcacccagcaagcacggtattgctgctggacatgaaatacaaggtggagatgaggcccagttaaactggtttagtagcagagtgctgacaaggaaacatatataccgtgagaagcttaggat

SEQ ID NO: 7356 - DNA, 343 bp, Homo Sapiens
aagcttctcaacgtgtggccaggtactatgtaaaacactggtgatacaaagatatatgatatatacatagttcttatcctcaaggagctctaggttttgtgggagaagcagacatggagacaaattggcaggcaattataattctggtattaaatagtttatgagaaacagacaaacttgtaaaatagtcttcaatcataaatgaaagcatattttaaataattaaaaatataataagacttacttaggtctttcctctgttcttgaccagggtggagatcttcattatcaagtttcctgtaactaaaagggaacagatcgttgagaagcttgggaactcaga

SEQ ID NO: 7357 - DNA, 182 bp, Homo Sapiens
cttctcaacgaagtaaataagaaaaatcctcagccaatattaaaacctactttaaagaaaatactgctggcattttaaagggaggatacaaccaaatccaggaccaagcctgtagatggaagacaaatggtaaactaaaaaacattagccaagaaaataaaatgtcaggcgttgagaagctt

SEQ ID NO: 7358 - DNA, 378 bp, Homo Sapiens
atagactactcaggaggcagaggtgggaggatgacttggcgttgagaagcttaagcttctcaacgtacagggattacaggcatgagccactgtacctagccatgacttataacacatcaaacttcagttcagctttggtcaagaaacatttcttgaacacctactttaggctaagtgccatgctatgcaccacagatacaaaagtgattaagatgtatgtatttcatggcttggaggagctgatggtgttagcggggtctcaggacatgtaaacatggtaggttagaaacacgcccaggatgccacaggggacagacaaagggcaggtcacccaacttgggtgttccagagatggattcgttgagaagctaatgggac

SEQ ID NO: 7359 - DNA, 167 bp, Homo Sapiens
aacgaggcagccaggccatctggtcagggaatgggaggatgcagtcggaaataaaagaatatgggcatttcattatagaactcatatttcttcatatccagccacaggcaaaaagtattactatgtttggatgatgggaggtaggaagtttagaccctcgtaagctt

SEQ ID NO: 7360 - DNA, 163 bp, Homo Sapiens
aacgaggggtgaatcaaagagaaagatgataccacaaagacaaaagtgcagtaaataatgtaatatgattaagatttttgaaaactaaaagagtgtatcttgtttttccttttcactggaagcatgtagaaagaggacaggaaatagatataggtgcctcgtt

SEQ ID NO: 7361 - DNA, 425 bp, Homo Sapiens
ccgcatgatgagactcagaccttccgctgcactagaaaatctgcaacagtgtccctgagtcacttctccttagtgggcagactcgtgttagatttgtggaacccagctctctgatttactccttttggaaaacccatggaatttcatgtataaggctttcatttgtattttaaggtttttctgtttgttttgagtatatacatggtgctcaatagcaacatcttagcagatgaagcagtttatgattccactccctcctgtatgacaggtagccactatactgaatcaaggtgctgaactcaaatcacaaaattctggcttaccgatacaacaaccaatacatctttgttctgtaataaaaaatttgactccttacttttataacttattaaagttaaaatgtctgtgtttttgcaaatcaaaaa

SEQ ID NO: 7362 - DNA, 385 bp, Homo Sapiens
gtacggcacactggggccaccagccagctcaactcatcctcctgtgtcacgcacccccgagggcgcaggaggcctgaggagtggctactggagccgtgtgttaggcagaggcttctgaccatgtctgagctctttacccccaatctcgcagccggcggattcccatgcccggtgcagcctgttgccagccagcctttgagacccagagctccagggcttgtcagaggcagcatggggctccagtggtcccgagtctcatttccctgcctgctctttaggcctttggcacccatggtcacttcactggttttccatttggcttctcaactgggaaatacaaaaatagcccctcctgaagataaaatcgttcagaaacagagcaata

SEQ ID NO: 7363 - DNA, 706 bp, Homo Sapiens
ttccattccgaggcctcacccagaagtgggaccctccccttcctcaccagagccaccgtgactgtttctgatgacctggagagtcaacaacaaccagaaaggtttctgcccagagcaggcttcttaaggcctttacgaagttttgtgccttccaagtgctgaagaagacctggtcagcctaaatcttcccagtcccgctgtggagctgtcagtcaccggagtaatgagctcctggttcctcgggagtccttcgtgctgtgtggcagggttcctctctagacaagtacacaggccctgccaccctgacatcaaactgttgtactatgatcacagtccctgtgccatccttttccaagactggggctcacaccatgtttttgaatgagaatccctgctggttgagacttttgcttccacttgtttccttggagatgtttttccaagagcataatgtacattaaagtcttcgagttgagcctattaaaataaccgggaccgagaggctctaaatcttgtcgggcgcgcctacggcccctcgaaggaaccttttcctaaacccatttcgttttgggccgccgccgggtccctctgtaaggataaagttggcaacactgggcgcccataaggtttgcctctcccctaggagacaacacccgtgggccccatgaaacccaaacggggtctgagacattccctcccgcccaat

SEQ ID NO: 7364 - DNA, 440 bp, Homo Sapiens
gagttcagagacaggaagtgattggtctaagctaacacagcaagtttggtggcagacctggttctagaggcaaaaccttcttccagatgtgaatgaaacctgcaggcttcattttcctttctgagcagtgcttcttagctctttggagacacgaagcccttggaaaatctgatgaaggttacggaccttccctaggaaaacagataactgacgtagactcaaaaaccccaagcaatttcaggagccactggactccctgaatgaaacccatccctggactccaggctaagaacctcagccctggggacttcacctgctgccctttccttacctgtcacacattgagccccgagtcaaggccactgtacaagtagtgcccctccctccccctggccaagcctccttcccttgttcaggaataaagaattccgaagagccaa

SEQ ID NO: 7365 - DNA, 471 bp, Homo Sapiens
gagcccaaataatatctggggaagttaaagtccatataatgactgataagagtacaatacaggtgccatgggaacacgtgacatcactgaagactgcctggaaggggccgcgcgtgtgttcatgcctatacgataaacatgatacataatgaaaatgcttatctttaggagaaaggagagcctagagtagcaggatcaaggatgaaagctggacttcaaatatgccttgttagtgtaaatgtgactgtggaactgtatgagtattttaagattatggagtaaagtaagttttaaaaagcagtccctaatcatcaaaagtaaaaaactcttgatgtagtcatataaccacactaagaactcttccaggtgacttcaaaacataggacagtacatctctagtagaatatgccctgagaatgaaaagaatgtaacagtgttagtattttgaataaacatgttattactaaaaaa

SEQ ID NO: 7366 - DNA, 628 bp, Homo Sapiens
ggtacatgttaagaaataatgatgatcacctctactattagggaaggagatttctgttacctcagacccatttaaacctctgcgctgtataagggattattaaacctggatgtaacccaaagtatatgtttggctcatttgagcattctggaatatttgagaatgtatgatacatgtaacattaaaaacactattagaactgtaccataattatgttgaaggtagaagtgatcttcaaagagatggccattaacttagcagtgggacctcacttttacaagcactgctctagatatacttgaagaatttaatatgtacagaagtttattctggataataaataaataaggatcacactgtattaggggttatggcaacattattgaattttttatgtacataaagccatatgtttagggtggtttctatctgtcttgtttttcacttatataacactgtgaacttctaaagaaagaggataaaagaagcatgaatgaaaagaatgacatttcaaaaaaatggttcaatgaaaaactatagctaaaatatgtaaacctttctaggtaaaccgcttgccttcatcttgagtcggaatatatttaaataaattgtgttatctcttgccaaa

SEQ ID NO: 7367 - DNA, 696 bp, Homo Sapiens
accatagtccatatgcaaaccactgaagaatgatctggatttctatagcaaggcccttggagagggcactctcccatgcccttagcctcgctggccacattggccaatgagccagggctggagtctgagacctttagttgttctttaaggcacctcctgccactttatccctcagaggcacaaacactttgtgttccacgtcagtttgaggggacggtggggggatgatatgaatgtcacaggaggagacaccttctgtctttgtttcaaagaaagtgatgtgccatttgttaatatacaagagaaatattgaaaatatattgaaaagagcaattttaaattatttttggcttatgttgcaatatttattttcttgtattagaaaagattcctttgtagagaaaaaatgtatttttcattaacgcaaagacctatttctcctttttgtacattgtccatgtgcgcaacccttaacgagcaatagaatgtatggtcacctgggtgtggccagtgcccgctgtgccctgcatgattctgtgttgccgctgctgcatagttcccagccccatcctgtcctgctcactcatgggggcttccagaccccggccccaccagggcttgtgtcatagggagccctttgcactcctcgtgtgttggcaaacgcagttaataaagcaatgttttctgtgaaaaaaa

SEQ ID NO: 7368 - DNA, 852 bp, Homo Sapiens
  misc_feature (458)..(585): n is a, c, g, or t
  misc_feature (589)..(646): n is a, c, g, or t
  misc_feature (726)..(726): n is a, c, g, or t
  misc_feature (762)..(762): n is a, c, g, or t
gatgacagcagattctgggttctgggagtgttctgtgcctcttacatgccctggaggcctcatggtctcagtgctgaggcggcacacctgtagcacacctgcgtaatgtgcggtctgggccagtcacaaggaattgtgttgtctaagccaaagggggaagctgactgtgatttaccaaaaaaaaattctgtaattcaaaccaaaatgtctgcggaatcaccagtttgatactctctgtaatcagaacagtgggcagtgcctgggtgaacgtgtctagcagccactgtgcgggatcgctgtaacaggagtggaatgtacatatttatttacttttctaactgctccaacagccaaatgccttttttatgaccattgtattcagttcattaccaaagaaatgtttgcactttgtaatgatgcctttcagttcaaataaatgggtcacattttcaaatggnnnnnnnnnnnnnnnnnnnnnnnnnnnnnnnnnnnnnnnnnnnnnnnnnnnnnnnnnnnnnnnnnnnnnnnnnnnnnnnnnnnnnnnnnnnnnnnnnnnnnnnnnnnnnnnnnnnnnnnnnnnnnnnnggannnnnnnnnnnnnnnnnnnnnnnnnnnnnnnnnnnnnnnnnnnnnnnnnnnnnnnnnnacgggcgaagggcgaaacgggggaaaaacacggcaccccagggaaacaccccggggcccggaacaaaagcgttagtgaanatccaaacccaacaaaagaacgcccccggcggggcnacccgagggggggttctctcaaacacaacccccccagtggcggttttcaggggcccttttatttgggtcgctgtcccaagggcgggcccc

SEQ ID NO: 7369 - DNA, 691 bp, Homo Sapiens
ctagatcccaacgattttccccagcccccaatgacgattgttttggttcagcagttccaacaaccagtcctccctccagtgactcccttggcaaccttcatctgcacactatttgccatattgccttctattttctgtctttggtttaacccccaagggccccagaggctttctccgatgtctaactctttgtgccttgagctcctttatgtttgggtggcatgttcatgaaaaagccatacttctagcaattctcccaatgagccttttgtctgtgggaaaagcaggagacgcttcgatttttctgattctgaccacaacaggacattattccctctttcctctgctcttcactgcaccagaacttcccattaaaatcttactcatgttactattcaccatatatagtatttcgtcactgaagactttattcagaaaagaaaaacctctttttaattggatggaaactttctacctgcttggcctggggcctctggaagtctgctgtgaatttgtattccctttcacctcctggaaggtgaagtaccccttcatccctttgttactaacctcagtgtattgtgcagtaggcatcacatatgcttggttcaaactgtatgtttcagtattgattgactctgctattggcaagacaaagaaacaatgaataaaggaactgcttagatgtgaa

SEQ ID NO: 7370 - DNA, 161 bp, Homo Sapiens
aagcttctcaacgaatgattaatactcacaaattctaaactaacagacaggtggttgtattgccattgaaagtgcctccaaagagagtaatgggcatttgtttgaatatagacacttaatagtaatatactagcgaggtccacgttgagcacgtgagagct

SEQ ID NO: 7371 - DNA, 450 bp, Homo Sapiens
cagtacataagcttggatctctagagcggcgccgcggcgcgggcgctggcgcagccgcccgtgccgttcgacttcgacgtcgagttccgcaacgtcgcggatctcgaccgcacgattgaacgctcccgctgcgggttggatccttttgccgttgctgcaattcctacaatgaattatagttctgaagccttccattcaaaagatgatgcccagtgctccatatgtttaggtgaatacaatgataaagagatactgcgtataatgcctacatgccgacataacttccatctggaatgtatagacgtatggtaacagaaacaaactacttgcacaatatgtcttatctcattgaaggaccaacctggtgcaaaatctacagcatcccctctccgtaccctccctcaaatattgggacatgccgagagctctgtcaatagatcgcctcattgg

SEQ ID NO: 7372 - DNA, 190 bp, Homo Sapiens
ctgaggatccgagcttacgaggtgggttaaatagaaagacacatcattattacctgttgggtttatggaagattaagagataatccacataaagttcctagtatgtgactgccatgtaatggagtgtatcaaccaagttagctaatattaattacataaaacagataactacttgaagatatccctcgtt

SEQ ID NO: 7373 - DNA, 434 bp, Homo Sapiens
gggaggctgcagtgggtttgggagctgggtttaggcccctggtgtctgagggcccagccttgccagcctctgctgctcctgctcctgggtttgaagatgcaggccgatcgccagctccgtggcagcggtcactaaggacagcctgactgtgccatcttggagcctcaggcggggctccggagatagaagacaggtcgccggaggctccccctcctctcctctcccctctgcagatgctccctgggcgctaccctgcagggtgccaggcaggagtggtctcagaacgtgcgcttctgattattttactggggtccattgtccagatttttctttgattgtaaaatatatttttactttttagtcttctaatttaataaatgatccatataaaaatagagaaataaagtcctttaagggaaggtttacaaaaaaaa

SEQ ID NO: 7374 - DNA, 196 bp, Homo Sapiens
ttatatttcaacagaaaaaattgtttcttagtgctgaaacattgcttatatgttcagaaaattcagggaggttttagtcacctgcagaaatgataatgctttgaaaatggtctacatgctatgcatttgcttttacttagagacttttggagcccccctttagggaaggttaacctttttgttgtcatgccactat

SEQ ID NO: 7375 - DNA, 469 bp, Homo Sapiens
  misc_feature (395)..(415): n is a, c, g, or t
cttcactctttcagcttcagtttccttatctttaaaaggaaatgatcataatagcacttatgctgctgtgagatttaaatgagataatgtgtccacagtactcagtacagtgccggacacacagtaagcactcaaacaatggtaatgattattataatgtattttaaaatatgacactatattcaaacataccatcataatatgtcaaatgggaatgtggacagaatatatgagacaacctgttcacaactgtttaatgaggaggttttccaacattaggaatgatttgatccttcagtaaaaaatggatgtctgaaggttcctaggcataaaagaaagttcagaaggatatgtaggaaatactgttgtctctctggggattgggattacagggnnnnnnnnnnnnnnnnnnnnngttaagtttgtgtttcctaaagtttctgcaataaacatacgatgcttgtataat

SEQ ID NO: 7376 - DNA, 217 bp, Homo Sapiens
atgtgcacgtcttgctcacgagcagttctattatacatttagctaacaagtaaacagcatatattacatcatcaacttggtgatataataagaaatactacagaattaaaaaacataatgtggatcaaatcatccttgcttaaatacatcaagaacttcccaactacttaaattcaaaacttccttataaaggctaaagaccttctttcccatttct

SEQ ID NO: 7377 - DNA, 181 bp, Homo Sapiens
cgcatcagtggttacagcttacctccttcacagtcagcaatgctttccaggggatgttcatttttttattcctgtgtgttttatctagaaagattcaagaagaatattacagattgttcaaaaatgtcccctgttgttttggatgtttaacgtaaacatagagaatggtggataatacaac

SEQ ID NO: 7378 - DNA, 264 bp, Homo Sapiens
  misc_feature (225)..(225): n is a, c, g, or t
gagtctcggtaccaacgcttaatcgaggagtggccctaatccaataatactagtgtccctgtaagaagagaacatttggacacagacagaaaaataggaaagaccatgtgaagacacagggagaggaaagccatttattaagccaagaagaaagctaaccctgctggtaattttgtctcaaccttccagcctccagatctataaaaaaatacatttctgttgttnaagccctcgttaagcttgggatcactctaggtcactaga

SEQ ID NO: 7379 - DNA, 379 bp, Homo Sapiens
ctagccggcccaagttttaccgcacagacatcctttttgaaaatttcaccatgacttttgcttgtgttttcaatgctctgtactgttgaaggactgttgctgacgacagaaggtatataaagctcctgttcagatttagaagttaaagctacgatgtgagatgtttcaggcatgtttgtagaattacctttataatctacttcaggagttatagggtttgtgttaatgttttcattttggtttctgcctgtcttgttttgaataactgaatcccaggaagaagtactgttagcccacagacgggtatagtttgcttttgttccaggagacaaagaaaaaactgttgtcatcaggcggtaaaagcttggtaccgagctcc

SEQ ID NO: 7380 - DNA, 1421 bp, Homo Sapiens
  misc_feature (466)..(487): n is a, c, g, or t
  misc_feature (774)..(779): n is a, c, g, or t
  misc_feature (781)..(821): n is a, c, g, or t
  misc_feature (1024)..(1033): n is a, c, g, or t
  misc_feature (1081)..(1132): n is a, c, g, or t
agcccagtcacagagtatcccacacacactggtgcccagagccggcttctcatgacatgaaattgcatggtcgagggagtctgtggggaagaaagcccaggtcctggctgcaacctgcacggatgctggaatccccctcaccccacctctgcatggccaccccctcccagccctgtggggaaactgttccctggaaccactccactccctgcatccccacacttcacagcatcttccatccccctcccaccttctaggcgaatagtccccagagctgtgttcctccaaggggtccgaggaatcactcactcctggaggctggcaaggagacagtctgaggccagggacacatgaagggatgtccccaccccagcactatcagggcctccccaggcttccagagttgaaagccaggagaaaatcggcaaagaccacccttccctaaacccaagcacccaatgatgcnnnnnnnnnnnnnnnnnnnnnnccaccaaatccccaaattcattccagatctatttttctaccagagagaggagcaaagtcctcctcccctgcgcccttacattctgcacttcatagttggattctgagcttaggatcatctggagaccccatggagggacttggaaaggggaactgggatttggggaggggctggaggacttccgcacgcttccacctccttcgacctccactgcgccccacctccctgcctgtgtgtgttatttcaaaggaaaagaacaaaaggaataaattttctaagctctttannnnnnannnnnnnnnnnnnnnnnnnnnnnnnnnnnnnnnnnnnnnnnaagggcgggccgctctaaagtatccctcgagggggccccaagctttacgcgtaccccagctttctttggacaaagggggccccctaatagtgaggcgtattaataacctagggcactgggccggccgtttttaccaacgtcctggacttgggaaaaactggctaaccttggggaactttggggaagggaaaccttactttctnnnnnnnnnnacataaattggacaaaactaccttaccgaaaaatttaaaggctctaannnnnnnnnnnnnnnnnnnnnnnnnnnnnnnnnnnnnnnnnnnnnnnnnnnnacctggcaataagggcttggcctggcctggaaaaaatttttgggcttccccggagggaggtgtttttttggaaaaatatttatttcccccgggggacgcaagggggatctcccaaatgggtgtggggggggaattttaaaaaatttccacgggccccaaggggctttatttttttgggggcgccctacaagccccttcaaaagagcgggggtctctgggagccaataaaacccgcccccctaacccacctattttttgttaaaaaaaggttttcaaacggggcctttat

SEQ ID NO: 7381 - DNA, 439 bp, Homo Sapiens
atcaagtgtgttttggtagcagcaagatctggttttggattcccagcttcagtcttttactgtcagctcatctcactctatgaaacccagttcttcaattgtaagcaacagaaacatcggtcaaactggttttagcccaaaaatgaattgattggttcttaagtcatcaaggattttgtttattttgcttcaggtctggctggatccaggggctcaaaggatagccttagggctctttccccttttccactgtgctcctctccggcgtcactctgtcctgttatccacagtcttcctcctgatgggtgaggcagggagggcaggatgccaatcactccagacttacatgatccacttgggtatgccggggggctggggtaggggaagatgtcccttcccacttcagtttattcaatatagagaaatttcaggaaacatt

SEQ ID NO: 7382 - DNA, 464 bp, Homo Sapiens
aaaactaaaaaaataaatgaaacccccagcaggttctttggggaaaaattaataaaattaataaacctctaattagatttatgcagaaaaaaagagcgaagacacaaattcccgcatcaggaatgaaagtgacacatcactacagatcctacagactttaagaggataataagaaaatattatgaacaactttattttgactactttgataacttaaataattctttgttacagtgttacttcgtattagagagaatgtttttattctcaggcgatagatgcaaaaatatttaaagtgcagctcactttcaaacggttcagccaaatgtcgatgatttttgaatctaagtggtgagtatacaaatgttcctcgtattcatcttttatcttttttgtatatttgaaaatttttggaatacaaagttggaaaaaataaatcatgcccaaaagattgccagtagagc

SEQ ID NO: 7383 - DNA, 464 bp, Homo Sapiens
cttaaatgagtactggtttgtaaagaattatcaacattatccattccatttatgaagaagaggagaacagctaataaactgtattgtaaaatccatatgttaagtgtgtcttgaattttgaaagaaaaaaatatattttgcaagctaacattttcttgaaacaatttgaggcatcatgtaacttataaccgaatccaagagccgttaggcagcagagtgtgttaccacattgaaatacacagtgctgctgttagactaaatgtcgtaggttgttaaccacatagaaacacactagtatgaagaaaactgttgtaaaatctcaagagcttcagaaactgccttacaagaccgcagcataagctattttgaagtatttaccaaatagtcacatgttgtaaaatatcaagtggttataaaaggatgccatttatatattaaaatttacataacattgttttctggaa

SEQ ID NO: 7384 - DNA, 543 bp, Homo Sapiens
  misc_feature (21)..(21): n is a, c, g, or t
  misc_feature (64)..(64): n is a, c, g, or t
ccagtgccccagcagggtgtntctctaaccaaaagagggccgcagatctgtgctgacccataangagtgggtccagaatccatcagcgacctgaagcttgaatgcctgaggggcctggaagctgcgagggcccagtgaacttggtgggcccaggagggaacaggagcctgagccagggcaatggccctgccaccctggaggccacctcttctaagagtcccatctgctatgcccagccacattaactaactttaatcttagtttatgcatcatatttcattttgaaattgatttctattgttgagctgcattatgaaattagtattttctctgacatctcatgacattgtctttatcatcctttcccctttcccttcaactcttcgtacattcaatgcatggatcaatcagtgtgattagctttctcagcagacattgtgccatatgtatcaaatgacaaatctttattgaatggttttgctcagcaccaccttttaatatattggcagtacttattatataaaaggtaaaccagcaaaaaaa

SEQ ID NO: 7385 - DNA, 404 bp, Homo Sapiens
gtggtcgggagcctggtcaaggaggaggagctgctgagaggcattgttcgcccttgctcatagcttagctccatgtccgtgtcagacaggagatgattgagaacagccttgcctgtcactgtcctagaacaccctggagtttagtgttctgtgtcagagtcttgggagcctccttcagacccagatgacgggcctccctctgtccaaggagcagctgtaaaggagaagagggatttcatttgtttggtggctgttaccttgtctgtaagtcaaacttggagttgagcagtgctttttaaacgattcccttttgcagctaaaatttcacagggctatttctaatacgtaagcaaatgttaccattgactttattaataaaatatagttttgctttgcaaaaaaaa

SEQ ID NO: 7386 - DNA, 514 bp, Homo Sapiens
gaccaggcggaaatatatgagaacaaccctccaaaggggttctcccggggggatgtcaaacaagtcaaggtcactgtgaactatcctcccactatcacagaatccaagagcaatgaagccaccacaggacgacaagcttcactcaaatgtgaggcctcggcagtgcctgcacctgactttgagtggtaccgggatgacactaggataaatagtgccaatggccttgagattaagagcacggagggccagtcttccctgacggtgaccaacgtcactgaggagcactacggcaactacacctgtgtggctgccaacaagctgggggtcaccaatgccagcctagtccttttcaaacgtgttttacccacaatcccccaccccattcaaggacctgggtcggtgagaggaataaatggatccatcagtctggccgtaccactgtggctgctggcagcatctctgctctgccttctcagcaaatgttaatagaataaaaatttaaaaataatttaaa

SEQ ID NO: 7387 - DNA, 456 bp, Homo Sapiens
cggtacccaagcttttaccgcctgggccaggggcgtgcaccagaccagaatcctgcggatttagtattgtgagggtagaagaccagcaagcagcatgacctcgtggttactgatcttatgaagaacacttgtctttcatatttgggactgtgttaaggttttctggaatatttttggttgtagtaacgattctgctttaggagctttcttctctagtgttgcacagacctgagtgatttgaccagcagtgctgcggtaaaagcttagcttttaccgcagggaacaaaagaaaaacaaaataatacctctaatatactcagagcaataagagaagatgtgtatctgtaaaacaagtatgggatactgtaaaaaggaagaattgaagacccagaaagggctctcagaaattaaaaagtgtgatttgctagaaataagaatttaaagcggtaaaagctt

SEQ ID NO: 7388 - DNA, 572 bp, Homo Sapiens
aagctttacgcaactcaatctgttctaaacatagagaaatggtattggtgagaagccataaaaatatgaaaaatgtggaaaagccttcaaatgcattgtcacatctctactgaatataattcttactgcagaaaacccctaggaatattaaaagtgtgacaaaacctttaaccaatgctcatatctctttgcaccatcatagcatttcatacttcagcaaaaattgtaccaaatatagaaaatgtagaaatagccattaatgcctcactccatgtgttcactaaatatcagcagcagtttgtacttaatcaaaggattataaatgtagtcatttgttgaaagcactattagaaaatacaggtcttaaacagtgaagaagagtattctgacagatagacaatagaaatagtaagagggtagtagtacctgtacttgcatacatgggtctcattgtgcatatttcatactagaagaaaaccctaaaggcagtagcccaaactttctaagacattcgagaatatatacattggacagaaatttaacaaatataatacatttggaacagcatattg

SEQ ID NO: 7389 - DNA, 363 bp, Homo Sapiens
agctcggtacccaagcttttaccgctggtggtgaatacagataaataaccaaaacaattaccagaaactgtgccaaatgccatgacagcacagagaagaggttccctaaacagggaaaggaaacgaatgtgttacagaaagcttgctggagtctctaagctgagatctgagggctagttagaagttagctaggtgcagttggagtgggagaggaagtttcagttgtaggcaaagggaacagcatttacaaaagcctaaatacaagaaataacatggtccattcaaataattaaaagctcattatgatttaattattaagggactggggtaggagtaggggtgcgtaaaaattggagcgagctc

SEQ ID NO: 7390 - DNA, 321 bp, Homo Sapiens
tcaagcttttaccgctatgtggggaaactaaaaacacatcgattatggattgatgagggcaaaatacttttaatagtaaggtttaggattcttcaatggtttattacaccatttccaggtgaagcctgcctttgtaattataagggtggtaagtttggatgaagatgagtcaactaaaaaagtgcagtacaaaattcatctttctgggaacatacgttaaatgagaacaggctgaatttaatgggaaaagtcaataacagtagtttaaaaatatgttcaattggcagggtgcggtaaaagcattggtagcgagctcgattc

SEQ ID NO: 7391 - DNA, 466 bp, Homo Sapiens
aagcttttaccgcatctgctttctcccactggataaaactagccgtatatgatgataaaggaatcatggatcagtctgaaagatttgcattttttcctagggattgtttcaaccccacccatagaattcctgttttgttgcttttacccagttcagtgatctctcatgtgggaattagagaagaatgtgtgtttttgaatttcatggactgattatctggtacctggcggtaaaagcttaagcttttaccgctagggcaatcttattaataaaggccgaaagaagttctgtgctaatctatgaaatctgagtatctgtcatctctctgcccttgactgtcacatctgctttttctcttctacttgcatttacctattccatgactcccaaagaaatgcatttgtttacctttaaaaatatgagaggatcatgatttgacactgcggtaaaagattgggtaccgagc

SEQ ID NO: 7392 - DNA, 491 bp, Homo Sapiens
gtacccaagcttttaccgcggggaatggaaatattataagccacttatatatcataaccacaataggcacctcatacaaggtcttcaagctggtacaagtgcttactggataaggagtattctttgtaagttcctttttatgtttgatctcctgatgatacattctacagtatctaatattcactttgaccagagcacagttactgtggaagtcatggtttatgtgctcattgacagcacatagctttccagacaagaaatcacacaggtttccctgttattaacaatctaacctccctgggagaatgacagagtaagtgactggtgtgaataacagaattttttaaagttcttttctaaggtatgacaactaatcaagttagattttgatgccagatgtaaggttgtttactttactggaccttggatattgagaaatggataaagctggataagtttacatctaggtagcttctgagcggtaaaagctt

SEQ ID NO: 7393 - DNA, 216 bp, Homo Sapiens
cccaagtctttacgcatagtaggtgctcaacaaacaccctcctctcttctttccttccttgctttcttttacaagtagtcctgagcccttttctagggcacggggcagtcagatacagcagggatggagggagaagattccagatctcacagagatctggcagtgcccaagtaaacaaatgatgcacaagataatttcaggtggcggtaaaagctt

SEQ ID NO: 7394 - DNA, 208 bp, Homo Sapiens
gctcgctaccatgcttttaccgcctccaaatttaacccgcccacaaaatgcccattaacctttctcatgcttttagactgattacggaatataaatagcaaagtcaattttaatgaaattagatcttcgacttcacttcgggttaaggaggcctctttttttcctgctattcgatgaacctgcggtaaaaacttgggcgagctcgatt

SEQ ID NO: 7395 - DNA, 517 bp, Homo Sapiens
tgtctagaggatcccagctttaccgcatgaagcttgatgtttaatatgacgaatctaccatatctgaacagcaaacaaacacagatgataaatactgtaaactgttggaagtcaaacactgtaaagtttcctgagtctgtggtaagttatttttcttaaatagctaccatgtagctattgatgtgtttcactgagcaactacagtgaattttaatagatactatttaccacttgtcatttcatgaaaaataccaggagctttgctttcactgtttctcttcaaatgcttcccagttcataatatactagtacttaagaaattacatagctgaattatgttccatggtagatcatatctagctctatctcaaaattctagcagactacgtttggtccaaagtaacacaagtgcctaactctatgacaaaatcatatctttcacataaaaacaaatctaattctttagctacttaaaaattccaggctgggcgcggtaaaagcttgggtaccgagctcc

SEQ ID NO: 7396 - DNA, 461 bp, Homo Sapiens
gaggtgcattcagggtagatttgcctctcattcaaagttctggggctttgggcggaaaacagcagcctttggcgctgttggggagactcctcagacccaggaaccccagaaggagacagagcctgccacatctcccacgcccaggccctgggccagggtgattggactgagaatttggccacaaccaaattgatgctggctggaaccagaggccagaaagcctggccttgtccccatgtgggagccctgtcctcagccctcttgtccccttgagctcagtgaattcccaccaggtgcccacagctcctggacttcaaattctatatattgagagagttggagagtatatcagagatatttttggaaaggagttggtctatgcaatgtcagtttggaatcttcttgaaagtttaatgtttttattaggagatttaaagaaaataaaggtctacaatatcttt

SEQ ID NO: 7397 - DNA, 439 bp, Homo Sapiens
taccagctcgtctacacctgcaaggtctgcggactaggtcctccaagcgcatctccaagactgacctatcaccaaggcgtggtcattgtgacctgccccagctgccagaaccaccatatcatcgctgacaacctgggctggttctcggacctgaatgggaagagaaatatcgaagagaccctgacggccagaggcgagcaggtgcaccgtgtggcgggcgagggggccctggaactggttctggaggctgcaggggcccccacatccactgcagctccggaagcgggtgaggatgaggtcaccccagccctggcaagacggagccgagctgactcctgcgctccccggcactgtgggacttcggccttccagaaggaggttttgccctgggcctctctggacgtggcctgttttctatcaataaacagacattacttcc

SEQ ID NO: 7398 - DNA, 438 bp, Homo Sapiens
ttcgctggggaagggggctccatgctgttgtggcaaaggctgagagctctctcttctctgttacaaaacgagataagcaagtgttagaattgccttaaggccacactggcatctccctgaccttctccagggacagaagcaggagtaagtttctcatcccatgggcgaccagggccatctcctcccaccagtggcccccactcacagggagctggcaatgccctacctgcctgttctccagatggagaaacaggctctgagatttcacaggtcttgcccaaagtcattgattttgatgattaaaaagaataaacacagtgtttcctgagtagcagtgattgttatgccttgctattttaataaagattctattttcgtataacattgtcaagtggaaacatgctgaaatctattaaaccatctttgtttgtggaaaaa

SEQ ID NO: 7399 - DNA, 500 bp, Homo Sapiens
  misc_feature (29)..(29): n is a, c, g, or t
gactatggcgacggtttcggggacacaanaagccaatattccaccggccatgtgggctctgagaagtgcaagcactcagccgaagcaattgccctggagcaagagccgtttggcccgcctggacccacaccctgaagctgctgcccgagctcggctccctgccccctgtcaacacatgagaacggacccaccctctctccccagcatggatggccacagctcagccgcctcctctgccaccagctgctcgcagcccatgcctgggggtgctgccatcttctctccccaccaccctttcacacattcctgaccagagatcccagccaggccctggaggtctgacagcccctccctcccagagctggttcctccctgggagggcaacttcagggctggccaccccccgtgttccccatcctcagttgaagtttgatgaattgaagtcgggcctctatgccaactggttccttttgttctcaataaatgttgggtttggtaat

SEQ ID NO: 7400 - DNA, 320 bp, Homo Sapiens
gcggccgctccaacatgtggtaccagcggccatgtgccctcaaggggagggaggaagagcacaggagggtgggaggaggacaaacagccccttttatagggtcatgggggggctccactcagagtctggcaggaatctgccaggaaaacctcgttctagatagggagaagcagaactgtgtgtggggcaggccgccgtggtcctgagagacagggcccgggccttccactgctcgtttgcacacctcttcggcctatcccaaggaccttcctagcatataaaaacaggggctctcctgatttgtaaacagaacaacaaat

SEQ ID NO: 7401 - DNA, 1284 bp, Homo Sapiens
gcgtcttcaagctagtcggccccgcggagagcgagagaccctgcgcaccgcagccctctccgctgcgcccattcctgccgccggcgatgtaactcggggaggcagcggtgcccgctggcccggggttgagacaggcggcaggtgcctgtgaggcgggcgggtgccgggggccagcaggatggaggaaagcatggaagaggaggaggggggcagctacgaggcgatgatggacgaccagaaccacaacaactgggaggctgcggtggacggcttccggcagcccctgccacctccgccgcccccctcgtcgatcccggcccctgcccgagagcctccgggggggcagctgctggcggtgcccgcggtctccgtggacaggaaaggccccaaggaggggctcccgatggggccgcagccaccgccggaggctaatggggtgatcatgatgttgaagagctgcgacgcggccgccgccgtggccaaggcggcccccgcccccaccgccagctccaccatcaacatcaacacctccacctccaagttcttaatgaatgttataactattgaagattataagagcacatactggccaaaattggatggtgccatagatcaacttttaactcagagtcctggtgactatatccccatatcctatgaacagatatacagttgtgtgtataaatgtgtatgccagcagcactcggaacagatgtatagtgatctgattaaaaagataactaatcacttagagagagtctcaaaggagctgcaggccagccctccagatctctatattgaaagatttaatatagctcttggacaatatatgggagcattgcagagcattgtgcctcttttcatatatatggataagttttacatcgaaaccaagcttaacagagacttaaaagatgaccttataaagctgtttacggaacatgttgcagaaaagcacatttacagcctaatgcctttacttttagaagcccagtcaacaccatttcaggtcacaccttcaactatggcaaatattgtgaaaggcctgtataccctcagaccaggtaaacatttctcatttctgttgggattggaactgtttgttacagccttttccaagagggcagtggttctgtatgtgttttgtgaggcttaatggtacttggatttgctggagcaaaaaaattgagtagatactcatcattgtgaaatgtaaactcagagctcagttggaatgttctctgctagtggaaaccaactagcgtggtttttgcataaactgtg

SEQ ID NO: 7402 - DNA, 489 bp, Homo Sapiens
gaagtgagaacactttaatggatctgaggtctgtccatctcttctctctcctcttcctcatttctggaacgcagtgtccagcactcagggctgacacagggatgggctggggatgaccctaggccacatgcgcaggataaaaggggccgtgcaaaatcctgttctggccaccagatcactcctaagaaagttgggtgggggctgtggaagatgcttccttctgaagaggtaagggcaagcccccactgtggcccaggtcccaggtcccttccttgggagccagcactcagagagaagctaagtgctggtacccccatttctaacttgggtgcaggcagggaggctcggccttcagacaggcctccctcaccccactggacaccaataaatcctggatgagatctgcagagggcccaaggccctggggcagtggagggctcagaggccatgaggcagggcctgcagccagcccagacctaggccatggtg

SEQ ID NO: 7403 - DNA, 776 bp, Homo Sapiens
  misc_feature (45)..(75): n is a, c, g, or t
  misc_feature (318)..(366): n is a, c, g, or t
atctgctttatagagagaagttgtgtggtgggacagattttttannnnnnnnnnnnnnnnnnnnnnnnnnnnnnnccagtatatatggggcgatgcacaggtaggagctggcagtgcagggaagaggagacactggtctgcagcaacagcttctactaccagcccttggggcactcacccctgtgatcaagcaatcattgtcaatgacaaagtgactattgaagttataattgtattaaattaatgctaataatttggatattttattttatttttggctgctcgggtaactttagcccttaaccaagcatatgtggnnnnnnnnnnnnnnnnnnnnnnnnnnnnnnnnnnnnnnnnnnnnnnnnnggggtacagctgtaaaatatttggatataggaaatgttgtgttattcttgcagccttgatattcagggtggattgtaaaatataaatttttgtgagatttcaaagattaagattattttgataacattatttacagatttaaaagatgtggttatcacaagtctcgagggggaaactactgcataaaataactaacttggaataaatattttgcatcagtttggattgtcttgtgtaagaagtatattttctttaaaattagatgagtggattcttttttaggggaaatatttttagaagttggggggaaatgtgaattcagacacaactttctctattttagcagatacctttttgatgcagaaaaacctgtccaataaattaccagtaataaagtcagtaccaaaaaa

SEQ ID NO: 7404 - DNA, 290 bp, Homo Sapiens
gcttataccgcggaatattattagttgatacaaaaccactggaatgaaaagattatgatcttgatattggcataagtaaatgtattactggcatagagtctagaatcagatacaggtatacataggaatttatagtttaataaacatggaatttgaaatcagtaaatcaaggacagtttatcaatatgtggtactacaataattggccgtgatttctggaggaaagagatattgtatccactatcccacaccacatactgaaacacattccatggcggtaaagcttgggt

SEQ ID NO: 7405 - DNA, 421 bp, Homo Sapiens
caagcgtttacggcagaaatctaaactcttgataacataagaacaagaggccgtctgattttctaaaagactttttttagacattaaagacattttcaaaagtcgtaaatattcgctccggaggcgcaaggctttcacctgccattaattcatcagataaggcacagctcacaatgaggcgccactcccaccgggaccactttgaggaacacacagcataacgctctgtttgttttaagaacaatcactttctaaaccttcctgcgggactctcaaaggcagcccttcctttgccgccagaaccgcatcccatcgcccagcacttgccgcaggccggacaagtgaggcccaaaagggcacccaggcccatgcaccagatttagaaaacaccgcgcgatacaagcttgggtaccgaagctcg

SEQ ID NO: 7406 - DNA, 593 bp, Homo Sapiens
tacccaagcttttaccgctgttcaaaagtttgcaaatttaatattctgatttttctcctaataaaataaaattaagaaagacattagtgtattttatcaacactagttcaagagagagtcagttttctttccttatggagaagtttctgatgtactcttcctgatggaaactatagaaaaatatcatgtccttctattttaacatgttttatcaaaatcaaaatagttaccaaaatctcaaagcattttgtttcttagtatcaaaatccatggaaaaggggagaaatcaacattaagggataatttgaacctatatataatgtttccttaacaattaaatgttattaccatgcaatagtgcaatcaattctaggaaaacacctccaggaaatatattaacctctgaactaatgttaaagaagctcccatgagagtatgttttcacaaatgagctttctgttgacctttttgtaaaacttcatataacgtatttcagttaaacctatgatgcctttagtgttatctctttcctagaaatgagatgtttggttattttatgtctgtgtgtgtgtgcggtaaaagcttgggtaccg

SEQ ID NO: 7407 - DNA, 314 bp, Homo Sapiens
  misc_feature (138)..(150): n is a, c, g, or t
  misc_feature (167)..(271): n is a, c, g, or t
aagctttaccgcctcagagcacccgctgccaatcttcacacagacaattcgatcagtccttcaggtcttaagtcacttctcaagaatgccgtacttgcctaggctagattagatcctactgttacatgctccctttannnnnnnnnnnnngagacagggtctcactnnnnnnnnnnnnnnnnnnnnnnnnnnnnnnnnnnnnnnnnnnnnnnnnnnnnnnnnnnnnnnnnnnnnnnnnnnnnnnnnnnnnnnnnnnnnnnnnnnnnnnnnngtgcacatcaacacacccagctaatttttgattttgttttttg

SEQ ID NO: 7408 - DNA, 507 bp, Homo Sapiens
aagcttttaccgccagagtgagccaggcagtattatctgagccacttggtcaggacaggttatggaacagttagaacagatgagtcatgtcatgtgtaccataccacagtctactttttcttggcctctctccccatgcctactcttctggtgtctgtctggcagatagtacaattcagcagataggcattagatcagttctaagcatataggaagaatgataattggattaccagcaaggcagagtggcagatcagaggccatagggaactgggaccaaataaggagactctccaaaagatgcaaatgtagctctagcagcaaggaaaggcaaactggttgcaaagttacatgtgtaaagtcgattgagaacaaaaataaagcagcagtcctggctccttaagtgatagtttcttttatgagacctcaaaacagtttactgataggagtattccatctgactctaggtttgatagcggtaaagcttgggatcctcaggagcagcat

SEQ ID NO: 7409 - DNA, 439 bp, Homo Sapiens
  misc_feature (65)..(99): n is a, c, g, or t
agctggcaccaagttttttacgcattgtccagggctgcccttgaaactctgactcaggtgatctnnnnnnnnnnnnnnnnnnnnnnnnnnnnnnnnnnngcatgagccactgctcccggcccctggtgcagttctgatacaccttacaactaatacagccttgctgcactgtttatctcactgttagggacaggatcctattatttagcctctgactcatttgtgtttaactaagaagatgatttagatttcttgaacaggggactagctgtcaggtcgatcctgagacagttgtgagcagcacagcccttcactgagttgggccaatctctgtcccatatggacattcctgagttagcggaaaacaaagggcctttcactcctcatatttcattatccaaagtcctctccgtaagtcttacaccgcggtaaaagctta

SEQ ID NO: 7410 - DNA, 378 bp, Homo Sapiens
cgagctcggtaaccccgcggataggcaaatcagtgagacaccgcgctcacggcctagcttttaccgcattgtttacatttgtaaggtttttctccagtgtgagttctaacatgaatttgaaataaactgggataatcgataggttttccacagtatttacattcatagcgtttttctccagtatgcatttttccatgttttcgaaagaaactggaaactgtgaaggctctcactatttccctacatttataggacctctttccagtgtgagttctttgatggatttgaaataaattgggagaattaaaggctttcccgcacaccttgcattcataaggtctctttcgagttggtgttactgtgcggtaaaagattggg

SEQ ID NO: 7411 - DNA, 586 bp, Homo Sapiens
caggtccagcatagttaggagttaggctttagcataaatttctagctgcatctgagtctcctgggatgggtgctctttggctggttttggctgcggatggtgagatcagagcagctcttcctgctgctggcccctgcaatcagttgttgggatgccagtgcagatcactaagtagtaagattttaatcaaacacgaccaggtccgaaatgcaggtcatgagtgtgaaattctcaaatttacataaaaagtagaagtatagacagtttaacatttggtattaaaggagaggaaattgtagcagcttttcacgtttcccagtccccattagagggcttgagaccttgtacctgaacaacccattttgcactcagtgctttctgatgccttaggagaattgttttgtttcacaaaagctgggaaggaagaagtccattctgcagctgttagatctgcctctcaggaaaaagtactaacttgttctttttgttcctggctttcatcagtttgtgagatttctctattttttttaaatataattttatttctttcaacaaatataaaataaaaaacaactttggaacaatg

SEQ ID NO: 7412 - DNA, 469 bp, Homo Sapiens
  misc_feature (91)..(91): n is a, c, g, or t
gtggggattatgtctctgtttaatatgcagccccctgcactgtggggtttggggcatgttcagtaataagaatgaatacaatagacaaagngggtgtgatgagtgttaacttggttgttccaaaggtaaaccaggtctcagggaagagcctggagctgctattgcttaggaagttgtacgtgccttgaaatgtccactacctgaggacgcagcatctggtgggcccggggctgctggggccaaggagggaccttgaccttttggtgcctgcccctccccggcctatgtgccatccgcgtgacgctaggtcagcgctgccggttctttaccaaatgtgcttgcttttcctaagttatttataaagagaaatcactaatggactctactggtttgagtgcttttgagctggatgaccgaccgcctgtatgtttgtgtaattaattgccataataaactttgatgagtcaaa

SEQ ID NO: 7413 - DNA, 805 bp, Homo Sapiens
caggagcggcagaagacagataaggagatgcagaggaagcgggagtacattgaggagctggagccacccactgacagcagcacagcccggcggatcgaggagctgcagcataacttgcagaagaaggacgcggacttgcgggccatggaggagcgataccgccgctacgtggacaaggcccgcatggtcatgcagaccatggaacccaagcagcggccagctgcgggggcacctccagaactccattccctgaggacacagctccgagaacgggatgtccgcatccgacacctggagatggactttgagaaaagccgaagtcagcgggagcaggaagaaaagctgctcatcagtgcctggtataatatggccatggccttgcagcagcgagctggggaggagcgggcgcctgcccatgcccagtcattcctggcacagcagcggctggcaaccaattctcgccgtggacccttgggacgcctggcatctctgaaccttcgccccactgacaagcactgacagacctcacaatcaagccagcctgggctccacccaccctggcttcctccagctcacatggcgcccagcactgggcttcagccaggtgctcgagagctttgaggccatgatctctgctcttccctctcccagattggtggggagggagggcgggaggtagatataggcctgttctttttagcaatgtgattcttgttgttgattctctctctggagttcatgtgctgcctcaggagactctgattttatatttgagaaaaataaaggcgttcaatctgcaaaaaaa

SEQ ID NO: 7414 - DNA, 421 bp, Homo Sapiens
ctgggattttcttcaaaggttgagggaagaggtaggagtagaagtacaacaagatggccattaactgttaattgttgaagctgggtgataagtacacaagggtttattattctactttctctacctgtataaagtttaaaaaatacataagaaatgcccaagcatatacttagattcaggaaaacaatttaagaaaaatatattcacaattgttaagtatttttctctgttctatatattcaatgttttctctcataatcacaatacactacatcaaaataacatcatctgaagggttttggaaattgtatcttagtcgctattagaatatgactaaatttgtaaatatataattttctctcaaagcactgtggaatgtttcctttgctttgaatatgaataaaataatttgttcacaaaa

SEQ ID NO: 7415 - DNA, 392 bp, Homo Sapiens
ttgtgtgattaacttaactttaattcagacctgaatataacgagaaaatgagtgattatcttgaagttgacacagaatataccacatcccacgaattacttaaatttactttccaatgaaaaaaatcagccattggcgatataactacaacaactatggcagaaatgctttcaggctgaatattgctgcttcataaataagacaattttagcaactaaatccagacacaattagttggagatgacttccaaaatagatgaaactttagagatggaaaagtgatttggctgagggatgatactccctatgccatctgcatattggcaccctgctttggggtttgctgcagaaatggtgcaatcagatggatgtgaggaagcagttatggactg

SEQ ID NO: 7416 - DNA, 681 bp, Homo Sapiens
atctccccctatcacgtgccgggcccgccggaagccctctttgctcaccaggtccctggcagcctctagctcttccagttgtacctcccggaggctttccttgcccagcgcccgggccacttcttcacattggcgccgccgcacagggtactcgctggaggccagggagtggcggacattagagttggtgatgagcacggccagcttggggtccgagagtggcaccaggctggtctccaaggacctgcagtcaatgagcagcgcgtggcctttctgtcccataagtgagatgaactggtccatgatgccacagggcatccctgcgaagctgtgctcggcctgctgacacacctgggcgcgggcagctattgtgcccgagtctggacagagctgctggaggaaggtgtacgtggccacttccaaggatgctgagctggacaggccacccccccaggggcactgagctgaccaccactgcactgaagccagggaggggggcagctgggtagtactgaatcactcccttgacatagttggcccaccgaggagtcccaggctccagcgagcgctgggctgtgggcagtggaaactgcagccgctggggctcatcggcaccctcagaagtggggaggagagacacagctcatccttgcgggggcttgctaacagcggcgtaataag

SEQ ID NO: 7417 - DNA, 1454 bp, Homo Sapiens
gggcctcctttccctgttagacatgggcactccacagaaggatgttattatcaagtcagatgcaccggacactttgttattggagaaacatgcagattatatcaaaacctatggctcaaagaaagatgattatgaatactgtatgtctgagtatttgagaatgagtggcatctattggggtctgacagtaatggatctcatgggacaacttcatcgcatgaatagagaagagattctggcatttattaagtcttgccaacatgaatgtggtggaataagtgctagtatcggacatgatcctcatcttttatacactcttagtgctgtccagattcttacgctgtatgacagtattaatgttattgacgtaaataaagttgtggaatatgttaaaggtctacagaaagaagatggttctttttgctggagatatttggggagaaattgacacaagattctctttttgtgcggtggcaactttggctttgttggggaagcttgatgctattaatgtggaaaaggcaatcgaatttgttttatcctgtatgaactttgacggtggatttggttgcagaccaggttctgaatcccatgctgggcagatctattgttgcacaggatttctggctattacaagtcagttgcatcaagtaaattctgatttacttggctggtggctttgtgaacgacaattaccctcaggcgggctcaatggaaggccggagaagttaccagatgtatgctactcatggtgggtcctggcttccctaaagataattggaagacttcattggattgatagagagaaactgcgtaatttcattttagcatgtcaagatgaagaaacggggggatttgcagacaggccaggagatatggtggatccttttcataccttatttggaattgctggattgtcacttttgggagaagaacagattaaacctgttaatcctgtcttttgcatgcctgaagaagtgcttcagagagtgaatgttcagcctgagctagtgagctagattcattgaattgaaagttgcatagtatagttttgccattttaacatttctgtatttgaagtgcttatcgaatctaaaagtgactactgttaatattttgtatattgtgttaaattaattttaataaattatataattatacatattgtaaaataaagaccggtattttattttctgctttttattctgaagtcctgttattctgactacagttctttgtgtatacttctgtgtctgttatgttcaataactgagctaacataaaataactctaggtttctacttgatttttcccccatgtatacctttcatctgttctatagcaagttgatgtaaattggtttgtcaacaagaatgttaactgatgaaagtggatagaacccatacatgaattaaatgatgcacaaaataaatggctgttgaaatttggaaatg

SEQ ID NO: 7418 - DNA, 371 bp, Homo Sapiens
agacactgactagttcacatttctttactaaaaatactgtggagtgtttgccataggaagaaaagaatgaataagttgaagaaaagggttttatttccttaaattctcagtgagattagaaaatgcttcttactgctaaccttaaaatccgatgtgcaaggcttgcccattgctagctacatacgaaggaagtaaactgccagattgtaaacacagcttgagtcgcctcctttctgatggtttgaactaaacttagccccccttgggatctgaatttattttgacaaaatgcagctatctgtttcaaggaaggataacaagaaatcaccttatacgcgtccttctagaactaattgtcctgcgtaaaagct

SEQ ID NO: 7419 - DNA, 389 bp, Homo Sapiens
actcctgttcctggaacaggagtaggtcaggcaattcctctctacagttatcaagtgcaaaatgtgatacgtttactaaaaataatcattccaggacactggaaaatgaccaatggcaggcaacaacttaagcagtacttgctcagtggggaagtgctagggcactgggtgagaactgtgtgttcatggccttcctgcctggaggcgttcccatcgtaggcagtgacaccccagggcctggaggtgtgaacgtggtagagggcaagtggcaggcacagctgctagaaattgaagggggacagctgaaagcaagagggctacagaggtcaagagatgttacaatctccccacatctctggcggtaaagcatggtaccgagctcgattgtt

SEQ ID NO: 7420 - DNA, 438 bp, Homo Sapiens
  misc_feature (51)..(200): n is a, c, g, or t
aagcttttaccgcctttagagaaaggtctactcaatcgctttttcaatttnnnnnnnnnnnnnnnnnnnnnnnnnnnnnnnnnnnnnnnnnnnnnnnnnnnnnnnnnnnnnnnnnnnnnnnnnnnnnnnnnnnnnnnnnnnnnnnnnnnnnnnnnnnnnnnnnnnnnnnnnnnnnnnnnnnnnnnnnnnnnnnnnnnnnnttttctgatatctatgaagtccaattgtctgttttatctataaagctatggtaatcaaaaccgtatggtagtagcataaagagagacatatagaccagcgaagtagaatagagagcccagaaataaaaccttgcatgcatggtcagatgatttttgacaaaggtgccaaaaccattcagcggtaaaagcttgaggatcctgtatgagtcgacctcagcaacaagctgcactgccgtct

SEQ ID NO: 7421 - DNA, 539 bp, Homo Sapiens
gcgccagagaactagaaactgaaaggcgagtgaaaagaaaggccccggctccaccagtcctctcaccaaaaacaggagtattaaatgaaaacacagtttctgcaggaaaagatctctctacttctcctaagccaagccctataccaagtcctgttttggggcgaaagccaaatgctagtcagtctttgcttgtatggtgtaaagaagttacaaagaactaccgaggagtaaaaatcaccaattttactacatcgtggagaaatggtttatctttttgtgcaatattacaccactttagaccagatttaattgactacaagtctctgaatcctcaagatattaaagagaacaacaaaaaggcatacgatggatttgccagcataggaatttcccgattattggaaccttctgatatggtattattagcaattcctgataaactgactgttatgacttatctctatcaaataagggcacatttcagtggccaagaactaaatgtcgttcagatagaggaaaacagcggtaaaagcttgggt

SEQ ID NO: 7422 - DNA, 209 bp, Homo Sapiens
tatatttaaaagaatggaaaaagatactgtataaacagtatcactaaatataaaaaagctaagtataaacactaagtataaaaaagctagagtgatttttattagacaaaggagacctcagaacaagaaaaatattgctaggagtaatgaagcatgattcatcacgaaagaaggatcaattttttgagaagacacagcggtaaagcttt

SEQ ID NO: 7423 - DNA, 733 bp, Homo Sapiens
ggccaggatcgaaagtgtatcagactcctaattcattagtagttcgagggtttctctaaaagagacagactagggacaaagttggaaatcaacctgcattttcatacagccgcttaagacatttaagtttgactccatctacttagaacaattcaaaatgtgaatcttgcaactccagtggtcgttatgatcatttagtattgcccacaggggaagcagaattacaacccaggatggaacaaccttttggtcatttctgttcccattagtattgttagtttagttatgctgagcacactacaagttgcatctcttgtataagtacaacacaatttattaaatattgtatacatagaaccaagaatcgataggatgcagggctgcttgattgtaccagaaacaaaacatgatgagaatacattgaaacactggatttacttaagaaaaacctaagtttttcaaatctaatttatttaagaaaacgtattttcttaataagtgtaacacagttcttacaaggtatggtaataagcagaaagtagaatttggaatattaatgtcaaagtatgttttctgccattttgatggagttgatactttttcttgtaagttcttcctgtagtgaaagagagaaagtgaggtgtcattgccgaaaggacacactaataacctcttggtagtttattgcaggtaaaatcattttttaattaagctgacaacgcggtaaaagctt

SEQ ID NO: 7424 - DNA, 446 bp, Homo Sapiens
agagttatcccaagctttacgcttccatggatagaacaagttgctatgtagaatgaagacttcttttgggaaattcttggcaaagaacctagctgagtggtgacggttaataaatagcatgtattgtgtataatcgtgcctcagaactgcttgcatttgaattgggtggaagcagatttgatcattgatcagagcgttttcaagtccgacctggagagtgagatggtgaaatgtctgaagcgtcgccttgtgcatgggaacctttgcaggttcactgagggggtcggtcacgggcaccaggtggggcctcctggggctctgttcgtttggacaaatgagaagaattcctgctatgcctggtggaactgatcacataggaagctctgtgagtgcagtgacctcggggaagtgcagggagtgcggtaaaagcttgggtaccgagctcg

SEQ ID NO: 7425 - DNA, 202 bp, Homo Sapiens
aagtttcacagaagagtgttattatgaaaccctaatacttgctgtgtgcttttttgctatttattgtaattatatttttaaaattaggaatttcgtgaggatatgccctccattcttgctgatgtattctgcatataaggtaggtattaagcctttattgtcacactgtaatgggctgtgcggtaaagcttggaacctctag

SEQ ID NO: 7426 - DNA, 442 bp, Homo Sapiens
agaaaggcaacgttttgcagcttccaaatttctgaagaaactaatctcagattggcagttaaagtcaaaatgttgccaaatatttattccttttgcctaagtttggctacccggttcaattgctttttatttttaatgtcttgactcttcagagttcgtacctcaaaagaacaatgagaacatttgctttgctttctgctgaatccctaatctcaacaatctatacctggactgtccagttctcctcctgtgctatcttctcttctatccaagtagaatgtatgccaggagctccttccctctagcaatttctactaaaatgtccaagtagaatgtttccttttacaatcaaattactgtatttattaatttgctagaatccagtaaatcattttggtagctctggctgtgctatcaataaaaagatgaaagcaacaagttg

SEQ ID NO: 7427 - DNA, 473 bp, Homo Sapiens
ctaagaaacagaatggcttttccctgcagtggattggagcagaactctgaagcttggacaccatggggcagaagcagggtcaaggtaactccagggggtccctacctgtgctggggtccagcagacttgacagctcttcttctagcagttgcttcacagagaggtcctcttcaggatccaaaggcccttcctcctgttctgggtctgtctggcctccagcccttgcacttgggccatctgtgtctgggattgcactcctgcaaaagaaaccaaccagtccatgggtagggacattcccatatagattcattcattcatgcccattcatgtttgcattcatttacccatatagggaactggatacacagcctggcctctagagtcagaccaacctggatcatgtgattcccgccctcctcttactctgtttcctcatttgtaaaatgagagtaataaataacacccacctcaaa

SEQ ID NO: 7428 - DNA, 541 bp, Homo Sapiens
  misc_feature (240)..(309): n is a, c, g, or t
ttttaaggttggaaaaattactttatgaagccttaagcactaagaataattaattaaactgtaatccaggattagatacaatttaataatagttcaattccaaaataaaagttattgtaggtaagaccatgaaatttcctaacacttgattttaatacattgcgctaattttctaaaacaactcagaggaacccatatttacagtaggcagaatatttatgaaaaaaatctggcatcagnnnnnnnnnnnnnnnnnnnnnnnnnnnnnnnnnnnnnnnnnnnnnnnnnnnnnnnnnnnnnnnnnnnnnncccgagattatatgaactaagaaacaagttgtgtatcttaacagcagtactagagcgcagagtttcagacttggatttataaatgctttcaacgtgtggtgtttggaaaaggagaagacatcatctgattttcaaaacctgaagtttttctcaggactgaagtcaaaatcgtaactgccacagagggaaaagggaagcttttccccttaattgttcatctgcgtcagaaagt

SEQ ID NO: 7429 - DNA, 490 bp, Homo Sapiens
gacactcgcttgccggcctgggcctcctgggaaggagggagctgctcagaatgccgcatgacaactgaaggcaacctggaaggttcaggggccgctcttcccccatgtgcctgtcacgctctggtgcagtcaaaggaacgccttcccctcagttgtttctaagagcagagtctcccgctgcaatctgggtggtaactgccagccttggaggatcgtggccaacgtggacctgcctacggagggtgggctctgacccaagtggggcctccttgtccaggtctcactgctttgcaccgtggtcagagggactgtcagctgagcttgacctcccctggagccagcagggctgtgatgggcgagtcccggagccccacccagacctgaatgcttctgagagcaaagggaaggactgacgagagatgtatatttaattttttaactgctgcaaacattgtacatccaaattaaaggaaaaaaatggaaaccaaaa

SEQ ID NO: 7430 - DNA, 714 bp, Homo Sapiens
ctgcggcccacgtgttttcatagactcatcccatggctgcaacagccctgcaaggggcttggctctgccacagggcaggagaggaagttgtagcgcctagcgagagttccagccccagacgcccacctgtgcctcagggcaccgcctgccgagcagagaaggcacagcagccgtcagagtccatgagaggtgaaaccacacagcagggatgtccaatatcagaactattaatatcaataaaagtataaccttcccaggtctatgcccaagagaattgaaaacatccatccacacaatacctgtgctcccgcgttcatagcagcattactcaaaagtcaaacggtagcaacaacccaaatgtccatccacagatgaattaagacatgaagtgtgttctgtccatacaatggaatattatttggccataaaaaggaaggaaattctgacgcatgccacagcctgagtgaatcctacaaatattacgctaagtgaaagaagccaatcacgagtttatgtgaaatgtccagaataggcaaatctgtgtatcagagacaaagcacattggtggttgccaggtactggaggaagagagaagaggcatgacagctaacagggacgggctttctttggaagatgatgaaattgtggaatgatggttgcacaactttgtgaatatactagaaaccaatgaattaaaaactttggaagatgaaa

SEQ ID NO: 7431 - DNA, 104 bp, Homo Sapiens
aaaataaacagctgggaccatcccaaaagacaagccatgcatacaactttggtcatgtatctctgcaaagcatcaaattaaatgcacgcttttgtcaaaaaaaa

SEQ ID NO: 7432 - DNA, 422 bp, Homo Sapiens
gcggccgcggcccttcccagctggctcgtggcggaaggctggccgtgctccgacgcgtgcacggatgaggtgcggcgtgggtgtggccagtcctgctgtggccgcctggtatagggctgagccgaggggaggtttcagcttgcgaggctggacctccctaaaggggaagggccttgtccagggcaccaagccttgctcacagagcagctggtgtaagtgaagctgcgacttcacccccggggcctgctctgcaaagcccagacattctgccaggagggggactcttcatcccagggaggcatgggctgggggccagggagcccatcttcccatgcccatccagaggcctctcacaggggcccctcagcaaggaggcaggatgcagtgcaggacaccaggacagtgtgcacttgtttgtggca

SEQ ID NO: 7433 - DNA, 2375 bp, Homo Sapiens
gggccctacttcctgtgctcttgcggagacgcgcgcgtcggggtttaacgcgtttctgggccgccgtaagcccggcctaggggcagctttgactcgagagccggctataggcgcatggaaggttccctggaacgggaggcgccagcgggggcgctggccgccgtgctaaagcacagctcgacgttgccgcccgaaagcacccaggtccggggctacgacttcaaccgcggtgtgaattaccgcgcactgctggaggccttcggcaccaccggcttccaagcaaccaacttcgggcgcgctgtacagcaagtcaatgccatgatcgagaagaagctggaaccactgtcacaggatgaagaccagcacgcggacctgacccagagccgccgcccacttaccagctgcaccattttcctgggatatacatccaacctcatcagttcaggcatccgtgagaccattcgctaccttgtgcagcacaacatggtggacgtattggtgaccacagctggcggcgtggaggaagacctcatcaagtgcctggcgcccacatacttgggcgagtttagcctcagggggaaggagctccgggagaacgggatcaataggatcggaaacctgctggtgcccaatgagaattactgcaagtttgaggactggctgatgcccattctggaccagatgggtgatggagcagaacaccagagggtgtaaagtggacgccttctaagatgatcgcccggctgggcaaggagatcaacaacccagagtccgtgtattactgggcccagaagaaccacatccctgtgtttagtcccgcacttacagacggctcgctgggcgacatgatcttcttccattcctacaagaacccgggcctggtcctggacatcgttgaggacctgaggctcatcaacacacaggccatctttgccaagtgcactgggatgatcattctgggcgggggcgtggtcaagcaccacattgccaatgccaacctcatgcggaacggggccgactacgctgtttacatcaacacagcccaggagtttgatggctctgactcaggtgcccgaccagacgaggctgtctcctggggcaagatccgggtggatgcacagcccgtcaaggtctatgctgacgcctccctggtcttccccctgcttgtggctgaaacctttgcccagaagatggatgccttcatgcatgagaagaacgaggactgagcggctgcggtcccaggaaggtcttaccccctcttctatttattaatttgcagacccagcccctcccctactttttggtcagctacgtctctagaataagatggtatctgaagtccttccatgtctgtgtctcggtccttggtcctgttggtgggtcccctggcttcagcctgctccatcctctgcctcataggcctcctctcgccagcactggacgctgcctcccatgcggtcagcaggcaggctctgttgggtgtaggccaacgactgcaccacaccgaacccacaggcagggcagagccagcgcacccttccaccaggtccccagaagaaacaccttcccgtcctcagaacagcggaccacatgtgtgtcacgctcgctcaggcagcagtccagcttgtattcctggttcttatggcccttgtactcgcccagcagctccccctgtgtctttgtccaggagccgcaatgtggagtccaggctggacaccagggtgcactgcccatccccggctgaagcaggtgcaggtgatggggctgcccacgtagtctgagaagagctgccccatccttaggtcatagcgtctcacgcggccatccacggagcctgccaggatctcgtggtctgacaccttcacactggacacgccatctctggcctcatccagcgtctgcactggctcaggcctccgtgagcggcaatcccaacagcggatactggaatcaatagagccggacaggataactgtggcctcttcattaaactgcaccgtgttcaccttccctgcgtggccccggaatttgcgcacgacctgccctgatgccacatcccacagaaccaccgccttgtccccgccgccggagcagagactactgttgtcaaaggagccggccgcatccagcacctcgtagccgtggccgctgtacgtccgcagcagcgtcccccgaagcgggttccacagcttcagcgtcttgtcactgccgcacgtcaggcagtaattgccatccacattaaatcgtacggctcgcactgccccctgcccgcagtccagcgtcttcaaccgtttctgcggcagctctggaggccgcggctttggctcagggaaagccatgctcccaggactccttccttgcagccttaaatcccc

SEQ ID NO: 7434 - DNA, 184 bp, Homo Sapiens
gtgtttttgtttccttttctgaagctgttcctccttttaaatatttttaatcacattgataaaatctatccttcaccacctctggttctactatagttgatttttattttaaatgtttaattgtatttgattaaacacttaactggattttggaataataaaactctcgtccaatttggctttt

SEQ ID NO: 7435 - DNA, 132 bp, Homo Sapiens
acatttcatcttagaaaaagttgcttatattcagcaggttggtttgtcaaattcagtgtttgagtttgtttctggtcagttcagtagctgctactttagcaagatgtggcctttcacaaaagcgtaaagctt

SEQ ID NO: 7436 - DNA, 454 bp, Homo Sapiens
ctgtgaattgacacatatagcttcctctactgtaaaggttgatgtggcgtaatgagaaatattaccacatcttctcctttatgtcaaggagataggctcgtggaagtcagacgtctctaagcccaagctgttttatgtagcctgttgttagtatgtggaagctgaaattcttacagagttactctagaattgaaaaatctatctggaagttttggggagtactcatagtgcactaattattacaaattttcattatcttacttggataaaaaattattagagagccatttgtcatactgcttagattacaaacaattatagagttctagagtgcattactaagctcataggaaatggaactttgtatttagtggcaaacctttattctttaggtagatatttgaggtggctcagcagatttatatgttgcggtaaaagcttgggtaccgagctc

SEQ ID NO: 7437 - DNA, 332 bp, Homo Sapiens
  misc_feature (38)..(38): n is a, c, g, or t
tcggtaccaagcttttaccgcacatgccactgcttggntttcaaccatcctctagcacattctgaggatcattaggagcatattagaacatgaccattttatcttcactttaccttaaaaatatttccataaggacagtcatttatttgcatgagttggttttaacataaaccctaggggcagtcagctgacctgttaagtccacttgggatgaataccctctccagaggtgggttacacagcagtctgaactgcaaatcaaaagcccactctccaactacctttatctgtaccagccaagttaaagaattcagataagaggatgaataata

SEQ ID NO: 7438 - DNA, 241 bp, Homo Sapiens
gccgcacagtttttacgcctttaagaaatgtctactcaatcgctttttcaattttttgattgggctatttggtttgttgttgagttttagcagttctcaatatattctggatattattctcttaaccggcatataagcaaatcttttctcctattctgtggattgcatttttactttgtttatgctgtcttttgacgtacaaaattttctgatatctatgaagtccaattgtctgttttat

SEQ ID NO: 7439 - DNA, 472 bp, Homo Sapiens
aagcttttaccgctacatctagttgaccttttactgtaactgtgacaggaataacttcatttccaaatttcccagcttcccatgctgctttacttctggtataagaattaatagcataagcgtcctgttcatttcgtgcaatattcagcttctttgctgtattctcagcacagctgcccatatgaattttattgtagacatcagttagcccgtcttttacaatcaaatcttcaagctttaccccaccatatggtgttgatcctctgttcattacatatggaacattggacatgctctccatcccacctgccaccatcacatcctgatgtccacacataagactttgagaggccatcatgatggctttcattcctgaagcacaaactttgtttatggtggtacatggagtagaaataggtaagcctgcacccaatactgcctgccttgtaggagcttgtccttcacctccttg

SEQ ID NO: 7440 - DNA, 640 bp, Homo Sapiens
  misc_feature (324)..(324): n is a, c, g, or t
  misc_feature (328)..(328): n is a, c, g, or t
  misc_feature (344)..(356): n is a, c, g, or t
  misc_feature (373)..(373): n is a, c, g, or t
cgactgttacggtgcagtcataataagagtgggttatgtgatttatgcaaaatagttattggtgtgttctaatgatttttttccaggaattcaagtaagtgaagtacaaatacttagcaccatagattgtaaaaatagaaagaggaaatgagaaaacttaatgtcgttcttgtacagttgagttttgcttctttataaactgtctgttaaaatcaggggttgctgttagactgtcaagcagaagtgatggatgttcaaggaggcaggttgccccaaagtgttttctaactttcaagtagagaacttttatgctctaataagaanaatncccacttcatttttannnnnnnnnnnnnaaacagagaaaacacantacatttatgcattttaaagataaaaagtagtttctcaaaaaaatctgaagttctctgaaaaccagcttattaaaagtgctgttttgtggtgaaaattgaaaccaaatccactcacatttcctatcgggtcttgaaattcttggtggtgtgtcaccattccactagatggcagtgttgcttactgagtgtcaatggcttttttccccgtaaatggaatcatgtttttctcccccaaagtacaataaagctgccttgtctgcaccaaa

SEQ ID NO: 7441 - DNA, 426 bp, Homo Sapiens
tacatttataattggagatcctgaacaccaaagtaagcctaaaaggaatctttgaggaaaaaagccttctagcaaggaaattcaagattcttgaagttgaaggaatatactgaaatgtttataaacataacttttactacagtagcatctaaggttttaaatgtgttttactattttcagattagatttttagatataaagatgaaaaactcagataactcaaatgagatatctatatccctacaacctaattgtatattgagcagaaactgaattaatatgcttccttgcaaatgggaaatcacatagcagttaccccatggcattgtgactaatggcatcagggcaaaaatatgttactttacgatttacctgttagcaggttcttgtttcataaaggtagaaaataaatacagacaacatcta

SEQ ID NO: 7442 - DNA, 304 bp, Homo Sapiens
tacaggacctagctgattgcatgggaggagaagccatacgctactataactgtgtatgttaaatgtctgttttaaaagaaagtagtgttaagatgtatcagtaactgaaatgatatgctttctgctgtgcattaaacttagtgaaaattctgcataattatgacttactagtatttttaaacaatgcttaacatactaaccttacatacactgtagaccaaaataataaatcatcataatttacaccttgatctcttaaaaattaagcatgtctttggtgaatggtttataggcaatcagcttg

SEQ ID NO: 7443 - DNA, 543 bp, Homo Sapiens
agtaagtctgagtggttccttcaagctgggtgtctttccagcctttgccagtctagccccagcagggcaccgtgtatgaatgcagtttggtgctgttttagagtatgcctgctccccagccccctgcctgaaaccctctgagcaactgcctctgacctataatgtcttaggtgcaacacgggaccccaccagagctcttggatacccccctagatccatgtggctttatgtgaggggactgaatgcagacacaccatagcccccttctactactttccctctcgccctgccacctagttccacatggaaccaacaagttgagtgcatccctgttgggtgttttgtgttgagactggctgaaatgaggagactttgaccatgtgacgtgtcaacagactcaaggagacaaccacctcaactgggtcatgtggcatgcctgtgtatgtgtgtaacagaattctgattgttagactgtaatgctattcctctatgggagaaaaaaattaatataaagaaaaacaaataccaatatatttaaagcac

SEQ ID NO: 7444 - DNA, 671 bp, Homo Sapiens
agcggccgcaggactccctgcactgccccacagcaagctgcccatgggcccggggtcaagccaccacccacatgtcccaggagtccggccagcccaccacatccgctccctagctccggcgaggccaccccttctccaagcggcatgcggtccctgctgaggcagtcaggcagctggcttcggcaggccgtcaggacccaggaggtgggcgcaggggtcatccaggatttgaggccctggccccacctgagtgacaatgatgtatttgaccccaccgggggtcggctccatggccagcgcagcctgaagctcagctgagagaggggccggcctcacctgcagccccttcagaaacgtgtctccattcgagcctgggggaaagccgtgccacacagcagccacaaactcagccacagtgtcgtccagggtgaagatcacggcattggggcccgcgtcaaaggtgtacgccaccttggggtccccgtggtgggcgttgaagcggtgcaccaggtggatgatgcgccaggagatggcattgaggtaagagatgggccgggaaggtgtcgagggcaggtggcgtggaactggttgctgtcttcatgtcagctggcgagctgtgggagctcgctccggatgcagcggccatctccgcatgcgcgccgcaccacgac

SEQ ID NO: 7445 - DNA, 463 bp, Homo Sapiens
ggttcttagaaatctctcctgccagacttcccagacctggcaaaggtttagaaactgttgctaagaaaagtggtccatcctgaataaacatgtaatactccagcagggatatgaagcctctgaattgtagaacctgcatttatttgtgactttgaactaaagacatcccccatgtcccaaaggtggaatacaaccagaggtctcatctctgaactttcttgcgtactgattacatgagtctttggagtcggggatggaggaggttctgcccctgtgaggtgttatacatgaccatcaaagtcctacgtcaagctagctttgcacagtggcagtaccgtagccaatgagatttatccgagacgcgattattgctaattggaaattttcccaataccccaccgtgatgacttgaaatataatcagcgctggcaatttttgacagtctctacggagactgaataag

SEQ ID NO: 7446 - DNA, 498 bp, Homo Sapiens
  misc_feature (93)..(93): n is a, c, g, or t
aggtgggctccctgtacatcgtcctcggggagctccagcatcagcaggacagaggctccgtggtgaaggcgcgcgtgctgacctgtgtggagnggatgaacctgcccttgttggaacaagccatccgggagcagagactgtacaagccaggagcgggccggcagccagtaggaaacagcagcctagcaacaccctcacctgcttcagagcccgaaccctctggagctgcaggagcccgggagagcacagacgcctccccagcgacggccttgtctggagctcgaaagccgaggggcgggtgatgaatccagccccttcccctactttgggattggctcagcaatgagaacccagaaagcatgccataaatccgacagccccaccccaggagactgcaggtggccgagcttgggcgccggggccgtgcttggtgtggggccatggagggttccagaaggtcctggtgaataaaggcccagggggcgtgctcttgaaaaa

SEQ ID NO: 7447 - DNA, 446 bp, Homo Sapiens
ctggggtcgaaaggtgccccccatcagcgcatctacttcgatctggacccgaccgggcagttcctagtgagtggcagcacgagcggggctgtctctgtgtgggacacggacgggcctggcaatgatgggaagccggagcccgtgttgagttttctgccccagaaggactgcaccaatggcgtgagcctgcaccctagcctgcctctcctggccactgcctccggtcagcgtgtgtttcctgagcccacagagagtggggacgaaggagaggagctgggccttcccttgctctccacgcgccacgtccaccttgaatgtcggcttcagctctggtggtgtgggggggcgccagactccagcatccctgatgatcaccagggcgagaaagggcagggaggaacggagggaggtgtgggtgagctgatataaaaaggtttttatgaaaa

SEQ ID NO: 7448 - DNA, 526 bp, Homo Sapiens
  misc_feature (44)..(44): n is a, c, g, or t
  misc_feature (420)..(475): n is a, c, g, or t
ctcacccctgctgggggttggactgaaaaccctcctccccaatntggggggtgttgccccatcactgcccagctcctctgactgccccccctgaatttagggtgggggtactagtcactgccaatgtgtgtatgggacttgctggaaaacggggatgcttgcccctctccaggactattgagcccagagagagctgtcctctcattgggtgaactgattgaggaagggtctattgtctttttaaatggcacaattttaagggtttgagggtacagtcccttaacctgccacgggagggggcccccaaactttcttccccccacacttctggttttctgtgtggagggggagcagggatatctaagctgtggtgtgaaagggtaggagagatgctggaggtgggggtgctgtgttctagannnnnnnnnnnnnnnnnnnnnnnnnnnnnnnnnnnnnnnnnnnnnnnnnnnnnnnnattttgtggcgcatccagattgtgaaaatgtacaataaatgtgtaatgagt

SEQ ID NO: 7449 - DNA, 893 bp, Homo Sapiens
  misc_feature (42)..(42): n is a, c, g, or t
  misc_feature (677)..(677): n is a, c, g, or t
gtaaagccagatgttgtccagtacaaaggacagagagaaatncttcagagaattgcaacaaggggtgtggtgcaattatttaatgctgttcagaaacatcaaaagaatgttgatgaaaaggttagtgaagctggaagttctatgagaaagcgtgctaagttgatatcaactgtttccaagaaagatttcatcagtgttttgagagggatggatggaagtacaaatgagactgcttcaagcaggaagaaaccaaaaagccaaacagactgaagtgaaatcagaagaaggcccaggttggacgattcctacgtgatgatttcatgatgggagcatctatgaaagactgggacaaggaaagtgatgggccagatgacagcagaccagaatctgcaagtgactctgatacataaagcatcataggaaatacaattgcagtcgttttattttttctagaaaaatatgtcatcctctgatagttggggaattataaggataccatttgtaagaaagccaaaagacttttgccagatttcatatttccccttttcatgtacactttatatatacttcattaaaattatattttaaacccttgtataattttaagcattgttcctcagaacatttgtaaaaggatatatttctgcttgaccagcgagatgtgcattttgccaggntcatattggtcatgtctattggtgtattatttcagtatcaccaatgttttcagaaatacagtactaattcatcattaaactctttgaagttaatatttttctgccttctaacttatagactcaactatgtatctgtagtttttgggaatggttggtgttttttgctttgtgttgggaagttattgagaaaacctatataataaaatttaaaattat

SEQ ID NO: 7450 - DNA, 464 bp, Homo Sapiens
  misc_feature (327)..(340): n is a, c, g, or t
tttatctaacacatttaattttggaacaaaggagcaactcctttaaagtttgagagtcgcataaatatttcatatacagcttaaacctaagctttgtaacgattatttttgagcagcagaaaaggaaggctagagaaatgctagagatgtccttactagtgacacattcttgctgaagaacaagttctctggaagtgaaactcaaataggagagaacaagagatacaggtaggtatcagttctgctagggtcttcagagagaccgagggccccaaaacagtgctactcaaagatgatctgcagacttgtgctggtcagtgaacaccnnnnnnnnnnnnnncaccagtctgtgacatggtgaattagaaattgagagtgtttaaaaactttttagcatttccaatgttgctgtgatatcccagtacatgatcaatggacttaacctacagaacaggctggccagg

SEQ ID NO: 7451 - DNA, 1458 bp, Homo Sapiens
ccagaaggtgttcctgccgtcctacgaggaagccctgtctttgccatcgaagtacccagaggggggcccagcaccacccccatactcagaggtgtgaccctcgccaggccccagccccagtgctgggagggggggagctgcctcataatctgcttttttgctttggtggcccctgtggcctgggtgggccctcccgcccctccctggcaggacaatctgcttgtgtctccctcgctggcctgctcctcctgcagggcctgtgagctgctcacaactgggtcaacgctttaggctgagtcactcctcgggtctctccataattcagcccaacaatgcttggtttatttcaatcagctctgacacttgtttagacgattggccattctaaagttggtgagtttgtcaagcaactatcgacttgatcagttcagccaagcaactgacaaatcaaaaacccacttgtcagttcagtaaaataatttggtcaaacaacagtctattgcattgatttataaatagttgtcagttcacatagcaatttaatcaagtaatcattaattagttaccccctatatataaatatatgtaatcaatttcttcaaatagcttgcttacatgataatcaattagccaaccatgagtcatttagaatagtgataaatagaatacacagaatagtgatgaaattcaatttaaaaaatcacgttagcctccaaaccatttaattcaaatgaacccatcaactggatgccaactctggcgaatgtaggacctctgagtggctgtataattgttaattcaaatgaaattcatttaaacagttgacaaactgtcattcaacaattagctccaggaaataacagttatttcatcataaaacagtcccttcaaacacacaattgttctgctgaagagttgtcatcaacaatccaatgctcacctattcagttgctctgtggtcagtgtggctgcataacagtggattccatgaaaggagtcattttagtgatgagctgccagtccattcccaggccaggctgtcgctggccatccattcagtcgattcagtcataggcgaatctgttctgcccgaggcttgtggtcaagcaaaaattcagccctgaaatcaggcacatctgttcgttggactaaacccacaggttagttcagtcaaagcaggcaacccccttgtgggcactgaccctgccactggggtcatggcggttgtggcagctggggaggtttggccccaacagccctcctgtgcctgcttccctgtgtgtcggggtcctccagggagctgacccagaggtggaggccacggaggcagggtctctggggactgtcggggggtacagagggagaaggctctgcaagagctccctggcaatacccccttgtgtaattgctttgtgtgcgacagggaggaagtttcaataaagcagcaacaagcttcaa

SEQ ID NO: 7452 - DNA, 1112 bp, Homo Sapiens
  misc_feature (750)..(760): n is a, c, g, or t
ggaagtagtcggggagggccgcgcagtcggaccggctgctgagacgaacgcttcactggggcagtctctgcatatcatggggagatagacgctgctgcctttaattggccttggtcctcacagctccaaaaagaaacaggatctcgataagctctatgagctgaagtccaaagctcggcagattatgaaccagtttggcccctcagccctaatcaacctctccaatttctcatccataaaaccggaaccagccagcacccctccacaaggctccatggccaatagtactgcagtggtaaagataccaggcactcctggggcaggaggtcgtcttagccctgaaaacaatcaggtattgaccaagaagaaattacaggacttagtaagagaagtggatcctaatgagcagttggatgaagatgtggaggagatgctgctgcagattgctgatgattttatcgagagtgtggtgacagcagcctgtcagcttgcgcggcatcgcaagtctagcaccctgaaggtgaaagatgtccagctgcatttagagcgccagtggaacatgtggatcccaggatttggctctgaagaaatccgaccctacaaaaaagcttgcaccacaggaagctcacaaacagagaatggcattgatccggaaaacaaccaagaaataacacacggaaaggtcagggaatggacagcaatgtatttgaagatacttgagctgagaactcagccatctcatccttggannnnnnnnnnnaatgctttacagagaagcatatattttttattaacagtgcagcaatatctataatgactgagaggatctgccaaaagaataaagcctcctaccccaacttccggtcccttttccctgccatctcaaagaggagcaatgtatcttccagagaagattttatttgtggtttattatataagtgactgaatatgggacaaagcattatggtctttttgggtaagacagtattagcaggatttgtaaagggttttgtttccttctcccttccccttttccctgtactttgtaatgtcagtgtttatatgaatatgactttcatttgcttttccagaataaagaagttattaatcga

SEQ ID NO: 7453 - DNA, 1021 bp, Homo Sapiens
caccactttgggattgctctaccacaactggtacccatcacgggtgtttgtgggagataccttctgttactttgctggcatgacctttgccgtggtgggcatcttgggacacttcagcaagaccatgctactattcttcatgccccaggtgttcaacttcctctactcactgcctcagctcctgcatatcatcccctgccctcgccaccgcatacccagactcaatatcaagacaggcaaactggagatgagctattccaagttcaagaccaagagcctctctttcttgggcacctttattttaaaggtggcagagagcctccagctggtgacagtacaccagagtgagactgaagatggtgaattcactgaatgtaacaacatgaccctcatcaacttgctacttaaagtccttgggcccatacatgagagaaacctcacattgctcctgctgctgctgcagatcctgggcagtgccatcaccttctccattcgatatcagctcgttcgactcttctatgatgtctgagtcccttgatcattgtcctttacctcacagtctctaggattcctgactcaggctgacctctctctctggtcccagactgcctccttgcccaggcctctctcactcttcatactcctccagattttgttctcagcattttcctttctctgtgatcattggcatcctgggcgtttcttgccctctgctgactactgattggattttacctatggctttctgcaacttgctactctctccctctccatcccatctttgcagcctcatagggtgggatacagcagctttttttgcagttatccacactcacatttcagagtcctgactctcaaggaaccactggtttttgggatagaacttgggccagggctaggaacacaggctccacggtgacatgtcatttgattgtaaattaagtgttctgattagtaagaactaagcagggggccacatgctctcaatggagacaataaagtgttgtctttttcttaaaaa

SEQ ID NO: 7454 - DNA, 589 bp, Homo Sapiens
ttgcctcttccttgggagcatgctttctattcctatgtgaaacagcctgacataagtgaaaggatttgggctcaagcaaacatgagatgtgggttcatatcttggcaccactcctgatagctgtgtgatcatggcaaacctcgttttcatcgtctgtcaggtggagatgaagagaaatggtgcatgtaaagtgctcagcatctgtgcttagcaggccatagtctccctgcctcctttttcttgagtaagcctttagaactttctgactcctctagagaaggcagagaaacgaatatattttgggtgccatttggagtctgggtcttttgttaaaattgtcctgtattatgttgaaaagtgtcggttacccccaggctctgggggcatctgtgatcatagaatactgccatgcttattttgcctttctatgttgagattaattcactgacgcctcattttccacgtgcatctgtcatagtctgggtaccagattgtatttagagaatggctcttgccactgttatgtacacacagatcgtgtgtgtaaacaagcaaattaaagtaaactgagataatgaaatcccaaaaa

SEQ ID NO: 7455 - DNA, 578 bp, Homo Sapiens
  misc_feature (51)..(69): n is a, c, g, or t
gaagcagttctctttataaagtgttattttgatagtttgtggattctaaannnnnnnnnnnnnnnnnnnaacaccatataagtcaaatatgtatttaacaaagcaatatgtattcattcactttcaagatttgttttggtgtcaaaataacatgaaaaggtagatggagttgcttctgttgaattagctctgccaccaatatgtatcttcatacacgtttggaaatgtttcctgcagcattaggtatgacttgttctgagtactgcttccggtgctaaaatgaacaaagaatttgtacttaatggcatggactctggagaatctatgcgaatcaacctttctaccttaatatctccccaaaaatgtatagtgccttgtttttatgtacagtttatatacagaaaagtttgctctgcatttttgatgatggtttggaacattatctacaattttactctcaaatagtcaaaataaaaacatctcaatttctaataccggttgtaaacagtacacatgtcattttgtgatataggactcccaaataaaagtatcagaataaacacaacaattaactggtt

SEQ ID NO: 7456 - DNA, 1003 bp, Homo Sapiens
aggagtctcagcacttactcctgccaggtacctgaagatgaatggcttccccaatgtatactggggctagggtggtgaggatgacgacattgctaccagggtgcgcctagctgggatgaagatctctcggcccgccacatctgtagaacactataagatggtgaagcaccggaggagatcaagggcaatgaggaaaatccccacagatttgacctcctggtccgtacccagaattcctggacgcaagatgggagtgaactcactgacataccagttggctggactcgagagactggggcctctctagtaccaacatcacagcatgacagttgggacctggaccctcggggtcctcgggctcctgtctgggccacgttacccacctaattcctccgcaagccttccgtcaagagatgctgcaaaaaaaggcccccagacaggcctgggcctctatctactgccaaccacacagccctctcgaggttcacactgactcctccttcctgtctaccttaatcatgaaaccgaattcatggggttgtattctccccaccctcagctcctcactgttctcagagggatgtgagggaactgaactctggtgccgtgctagggggtaggggcctctccctcactgctggactggagctgggctcctgtagacctgaggggtccctctctctagggtctcctgtagggcttatgactgtgaatccttgatgtcatgattttatgtgacgattcctaggagtccctgcccctagagtaggagcagggctggaccccaagcccctccctcttccatggagagaagagtgatctggcttctcctcggacctctgtgaatatttattctatttatggttcccgggaagttgtttggtgaaggaagcccctccctgggcattttctgcctatgctggaatagctccctcttctggtcctggctcagggggctgggattttgatatattttctaataaaggactttgtctcgcaaaaa

SEQ ID NO: 7457 - DNA, 424 bp, Homo Sapiens
  misc_feature (178)..(186): n is a, c, g, or t
tattaagggagaggcttgtgtcttttttcccaagcaaagccaaatagcattcaatgagagttcactttggtgatgtttaatgaaaatctaactcagatagaggcctcactggaatactccatgaacagaaatgtaatctgggcaaaaccctgcaggctttatcctgggaaatgtaatnnnnnnnnntcagaatattgtctctattgctgaatcagtagcctggaagtcactgcagaagttttacctgtgggaggctatgggaaccctcttgtgtcatgtgctctcaaatgtgaatgagcgggccaagaactaagaatattcaaaagattttaaatgtccaaataggcagttctggaaatacctcaacattgtttggatattacatttgacatgaaataaaaaggcatatgaaatactttgacca

SEQ ID NO: 7458 - DNA, 451 bp, Homo Sapiens
ttcggggctagcgtcggcgaggcttgagcttactagcgcgcggcttccctgctttctcgcggccaccccggctccggcggcctcggcgcgcgaggggctggaggtgcgggagccgctctccgccggtcggtccccgcgcggctgagcccaggccgccagcgccgcggccccgtgcggtgtccctgagctcctgctccccgccgggctgctccgagcaacggtgcttcggagctccaaactcgtctgccggggcaagtgtcttcatgaacccagaggatgtccgggaagcactacaagggtcctgaagtcagttgttgcatcaaatacttcatatttggcttcaatgtcatattttggtttttgggaataacatttcttggaattggactgtgggcatggaatgaaaaattttctgtgttcctgggaattattttcttcctggagctcactg

SEQ ID NO: 7459 - DNA, 429 bp, Homo Sapiens
gcttcatccacgaaccatccagcgcacagaagcaagtgcaaaaatgacacaagcacaactctccagacgtggctccttctcctttctcagtgcagactctcactgaaagctgctattttcatcctccttgtggttgcttttcttgtttctcttccattgtacatgtgggttatataccatatgttaaatatgcaataaagtgtttacaggatgcccttctgaagggtagtcctttgtaaagctgtacagactttgcagtttaagcacaatgtgcacatgttagttttatatacagcaaaacttgattttttgcagatggaaaggtattttgtttctatacaaagtaaatggattgtttgtgcttaatgtaaagccgctttataaaactgtaaaataaagtttttttcttaaaaagaatatacctggaaa

SEQ ID NO: 7460 - DNA, 383 bp, Homo Sapiens
gcaacttgctttgctgagtggtgcaacagactttgagaaaagttgcacagggtaatgtcagagaggaaggaggaagagatttgtggctgttgctatttgttagaaactgacttctgattgtctgcagtagaccctgcaaagctctgagctgggtaggaataggggccacaggagcagcatgaagcacaagctgtagcacctaccagccctgggttggggacgacatgggatgatgctcatatgaacaaactgtgaagtcatctctctctgggtggggtggaattccatagaaggagacagtacagagagcatatccccagtctaacttggggatgtggattcccaatgagccgagcagtcatttgctcattaaattaaaatga

SEQ ID NO: 7461 - DNA, 560 bp, Homo Sapiens
tggcttcatgcgctgaagaagctgggtcctggggcaacaagtgctgtgttgccaggacaaatagatgctaaacatggcacttaaatatttatttaaaaacttaaattattattggcaagcaaatccttagtatctttcttcccagtaatatggcctggctgagggtcagaccacaggacaggagcgactccggccttgactgtctgggaagcttgatggattataaaacttcctcctgcctggccaagcagcagcatcatttccaggacccaacaaaggcaacatcaaaatctgttttgctttgtcagtctgggcttccagaatgttgaatttgcctcaaggcctcttcagtataaggaaatacctggaaaactgtgaaacttttaccacgacgtaatctttccagtctcatactattttcacaaacagttttcaaacgttacttcatctgccaaagcattaaaaaaattaaacataagtcaagataaatgttcttaccaccagaataacccttaaagatgtatcttaattaatcagaataaaaggctaccttaaataag

SEQ ID NO: 7462 - DNA, 533 bp, Homo Sapiens
  misc_feature (193)..(193): n is a, c, g, or t
gaagaccaggaaaacaacaaagctcatgtatttcaccagctggaaaattcatctagtaaacaggctgtttgaggaaatctcttgacattggaagcatgatgcacacacgaccttaaaaccctaccaatagctctgatggaggaaagaagggaaccctgagctagcacggttggtattcacggagggctcttcntgtcctgaattggtcctctcatctcctgggaaagagaaaagtgtccctaaaaaccacaatagggatgagatgtgccttcctagattcaagtagattcagtctgagacagcaattttgtttttatgtaccaacagaaaacctaaacaagcaggaaataaaagctacttccctcactaaagatatattaagggccaaatatttgttctaaattgattgctaagtctattagatattttgaaaagaaaaataaaaccccagactatttaaaaactgaaatctacaactgtatggagttcataaatctcattcttaagagtcaccttcaggctgggtgcggtgg

SEQ ID NO: 7463 - DNA, 871 bp, Homo Sapiens
  misc_feature (611)..(619): n is a, c, g, or t
  misc_feature (852)..(852): n is a, c, g, or t
gcaacccctaccccagtgaaagaagccaaaagaggagctggccaagaaatgcagcatcacagtgtcacaggtatccaattgggtttggcaacaaacgaatcaggtacaagaagaacattggcaagtttcaggaagaagccaacctctatgctgcaaagacggccgtgacagctgcacacgcagtagcagcagctgcagaacaaccagaccaattcgcccaccacaccaaattccgtggataccctccgtcatgttatcaatcagacgggaggctacagtgatggccttggaggaaattcactgtacagtccacataatttaaatgctaatggaggctggcaggacgcaacaactccatcttctgtgacttctcctacagaaggcccaggaagtgtgcactcggatacctctaactaatctctggccacacttttccctgagctacatgccttgataagtgcattcagagcaataggaggaaaaggaaagcgtttttgtagcccaccatctacagctttactgtaaaaccttgtcttattcgagaacttggtaaatctgttttttaaggaatcataatcatttgtatttatacttaaaaacacacaatgttnnnnnnnnntaaagcactttatccaattaggccaagatttgaacacttgttgacagtccgtgtagctgttttatcataatttattatcaatattttacattaatggtttcacagttgccaattacttggccttaagggtaaaaagtacaatagtacactaaacctcaaccgttaaagcagatgcaaaaattcacctcacctaaattgacttcttgcatatttccatactgaccgtgtggggntctagttgctatttcgtgt

SEQ ID NO: 7464 - DNA, 503 bp, Homo Sapiens
aagctaatcagctatcattagtgttagtgtactttatgcgtggcctgagacaattcttattcttccagtatggcccagggaagccaaaagattggacatccctgatttatgcagtctccagaggaaaaattcctgactcacctaaatcacactgaagaatatatcaatacaatggtcttattaccttaaaattaacctgttaaattttctttccatgttctctaacctttcctagtcaaactggaaaatatccaataaaattagtgtagagaaaccatactcaattctataacgaataatctctcatcttctcacgaatttcctggaagtaatgagtgtggactgaaggaagcagacatatagcacacagactgggtcccaagttacaagcacactgacgttatctagcttcaaaagcatactgcctttcagagtctaaaacagagcgatgtgcatcataagagatagcctatcagatccctaggccccaaattgtaccaaaa

SEQ ID NO: 7465 - DNA, 968 bp, Homo Sapiens
  misc_feature (428)..(428): n is a, c, g, or t
  misc_feature (912)..(912): n is a, c, g, or t
tggaccggtccggaattcccgggatgctgtctatcccggctgaggacccgcggccagtgcgggtggctggctttgccattagcgggggcctttcctgaggacggcgtacggagtgtggggaatgaaggatggcagcatgccgtgcattaaaagctgttttggtagatctcagtggcacacttcacattgaagatgcagctgtgccaggcgcacaggaagctcttaaaaggttacgtggtgcttctgtaatcattaggtttgtgaccaatacaaccaaagagagcaagcaagacctgttagaaaggttgagaaaattggaatttgatatctctgaagatgaaatattcacatctctgactgcagccagaagtttactagagcggaaacaagtcagacccatgctgctagttgatgatcgggcactaccntgatttcaaaggaatacaaacaagtgatcctaatgctgtggtcatgggattggcaccagaacattttcattatcaaattctgaatcaagcattccggttactcctggatggagcacctctgatagcaatccacaaagccaggtattacaagaggaaagatgggcttagccctggggccttggaccattttgtgactgctttagaagtatgccacagataccaaagccacagtcgtggggaaaccagagaagacgttctttttggaagcattgcggggcactggctgtgaacctgaggaggctgtcatgataggagatgattgcagggatgatgttggtggggctcaagatgtcggcatgctgggcatcttagtaaagactgggaaatatcgagcatcagatgaagaaaaattaatccaccctcttacttacctttgtgagagtttccctcatgctgtgggaccacattctgcagcacctattgnggaagcaatgtgttgcatcttgaagcaacttgaaatgcagctttcttaatggcctg

SEQ ID NO: 7466 - DNA, 1204 bp, Homo Sapiens
  misc_feature (1027)..(1038): n is a, c, g, or t
ctggcggagaggggactgggcgccggcggggaaggaggagcgctaggtcggtggtacgaccgagattagggtgcgctgccagctccgggaggccgaggtgaggggccgggcccaagctgccgacccgagccgatcgtcagggtcgccagcgcctcagctctgtggaggagcagcaggtagtcggagggtgcaggatattagaaatggctactccccagtcaagttttcatctttgcaagtctgcattttacagtgataacagaattaattctggcctcaaaaagctactatgatatcttaggtgtgccaaaatcggcatcagagcgccaagatcaagaaggccttgcacaagttggccagtgaagtaccaccctgacaaaaataagagcccggatgctgaagcaaaagttcagagagatgcagaagcagtatgaaacactctcagatgctaatagacgaagaagagtatgatacacttggacacagtgctttgactagtggtaaaggacaaagaggtagtggaagttcttttgagcaatcatttaacttcaattttgatgacttatgtaaagacttggcttttgaggtcaaaaccaaaaccactggatccaagaagcgtgttgaaaatccatgtccagacacgccaggatggtggttccagtagacaaaggcatcatttccaagaattttctttgggaggtggattatttgatgacatgtttgaagatatggagaaaatgttgtcttatagtgggtttgactctaacaatcaggcatacagtacagactgaaaatagatttcatggatctagcaagcactgcaggactgtcactcaacgaagaggaaatatggttactacatacactgactgttcaggacagtagttcttattctattctcactaaatccaactggttgactcttcctcattatctttgatgctaaacaattttctgtgaactattttgacaagtgcatgatttcactttaaacaatttgatatagctattaaatatatttaagggnnnnnnnnnnnngacaaattcaacattcaacgagtagacaaaatgctaattatttccctgattaggaaagtttctttaaaaaacacgtaattttgcctagtgctttttctctacctgcccttgggctcactaatatcaccagtattattaccaagaaaatattgagtttacctgatta

SEQ ID NO: 7467 - DNA, 1117 bp, Homo Sapiens
  misc_feature (99)..(117): n is a, c, g, or t
ttaagacttaaaattgaattagtatttgtacagaaaggtgcaggtggaatgactcactccggcctacgatcaaaattatatggagaaatcatggtggannnnnnnnnnnnnnnnnnnagtggtggcccgagtcgttaagtgcgattggttagagtggattccagtcgggtcattcaggcggaggaggcgggggcagcgggcaggcaaggggggctcagttgctgcagcactggctccggctggctgggttgttctcctggaggtccacacctcggtttcggcctggagcaccagttgcattctggggctcgttcttgggaagcttcttagctattgccatgaagatttcgttcacgttcattgcagtctttgctgatgtctccatgaacagcaaactgttgtcgtctgcataggcttgtgcttcctggaattccacggctctcttgctggccaggtctgccttgttacccgcgagtgcaatgacgatgttggggctggcctgcctctgtagctccttcacccagttcttggcccgtgcaaatgtatctgtgttggtgatgtcatagaccacgatggcagcctgggccccccgatagtacatgggggccaggctgtgataccgctcctgtccagctgtgtcccagatctcaaacttgactgttgtgtcatccaggcagacagtctgtgtgaggaaggccgctccaattgtgctctcctggtactcgtgaaactgtcccttgacaaagcggaggacgaggctggatttgcctaccgcagactcccccagcagaaccagcttaaattgacagatcttgttcccagcagctggtccattgggtcgtgctgcgcctccccgacccgccattgcccgtccagctgtagtggtccagagagcgtgcgggtggggactggtgctatgcaaagaggcacttagtggggagggggacctccaaggcggctccggggcggcggcgttacttggggccggggctcggacgggatccgcttctctccccgccggcggtgtcccaggctccggcctccacttccgccatcccgggaattccggaccggtaccagcgcggtttatcggcagggggaaaggaagtgggatggt

SEQ ID NO: 7468 - DNA, 565 bp, Homo Sapiens
  misc_feature (416)..(469): n is a, c, g, or t
ccactgagtgctcattgcatgaatgttactcagttagccatctgcgcctcctgtacttctaaagccagaaatattccagcagcatgcggagtggttgagtatgccgaaaagaatgaagaggatccggaagcactagaggaaaatgcagcagattgagagctggagagaagcagagagtcgcggccaagtcccaaacgtctgtccccgccacccgtgccgtcagccccgtctcctgaccctgctctgactgatccgtgatcgaataatcctgccgagcgagtgtggcctcgagacagtcctgaccgacgctgctacctagcgcgtgtgcacgaccgcatgccgagcacggtggagcgccagcgtctgggggtgcaccgcgtgcctcaagtccggtctagtgattgcctttggtcgannnnnnnnnnnnnnnnnnnnnnnnnnnnnnnnnnnnnnnnnnnnnnnnnnnnnntttcaatcctgctgcggacgcgagggggtcccagggcccgggtgcccgaggtcggtcctgctcgccctcctcctcagagagacatgtgaggcgcgt

SEQ ID NO: 7469 - DNA, 472 bp, Homo Sapiens
  misc_feature (431)..(431): n is a, c, g, or t
atgagcactaagtccggcccttctttttaattcttttttctcctctaacttgtttattttttaagagctgaaaccttgaacctccaagattcccatcaagcttgagctatatgcaatctaagggttttatcataacaaactgggccgaaaaaactctgatctcaacccagatgctaattaaaaccctacctgagtcatgttgctatggttactgggatttctccaagccccgagattcttaaaggagtaaattttagttacttctccaaggctcagagtggcgttcctgggattgagccatgctagttcccatagggtgtgggtgtcattgcacaatcagcagcctgggtggcttctgcctacatcatcactaacctctgcattggattccattgtttgtctcattagaggtttacaatacagggtgtatncaaagtactattatcatctcattttagagaagagactccag

SEQ ID NO: 7470 - DNA, 116 bp, Homo Sapiens
aaagatgaaataaagacccagggggagaatgggtgttgtatggggaggcaagtgtggggggtccttctccacacccactttgtccatttgcaaatatattttggaaaacaaaaaaa

SEQ ID NO: 7471 - DNA, 553 bp, Homo Sapiens
  misc_feature (344)..(371): n is a, c, g, or t
ctttggaccacccattaaattcgctgttggccaggacaaccatccctcctggcggctggaaagaaagctcaagtgcagcacaggcccagcatatgatgctgagtcaaattcagatggcttcctacaaggtgacatagagcttctccaggctaggacacaggtccacctggctacctaacacattattcaacaccaaggaacaactgatcaataaggttaagtgcctatacttgactgcaaggcatgttacacagtgcataaagcaaacatgattcttaccctaatgaaatttatacgatagttcagaaacatgacttacataaaagacaatatgaaaacgctgnnnnnnnnnnnnnnnnnnnnnnnnnnnnttgtgggaaacagactatagttgccactggagttcaaggaaggaagccctcagagtgaacctaccagtgagggaaggcactaaaggaactggaaggacagagcccatggttatgtagcgtcacagtgctggattctggatctaacaggctgattgaatgatgccggacacacctgtaagtta

SEQ ID NO: 7472 - DNA, 597 bp, Homo Sapiens
aatgaggaagaagttggatccgagtggtaccctgaaaacagccctgctggacgtacatcaaacgctgccgtcctggagacagtgaaaagcacaatatgattgccctgtgcttcagcatgtgccgggagattggcgagaaccacgaggcagctgcccgcatccaaatgaaatagatagagtctcagccctgggaggacagcctcaaggatagggcaccagctagaaaacaactgctgctgaaggccctgactctagatgttggatgcagcagagagttatgccaaggactcctgtgtgcgacaggcccagcactgtcagcggctcaccaagttgataactctgcagattcactttctgaacactggccagaacacaatgctcatcaacttgggccgccacaagctgatggactgtattctggacctcactcggttctaccaagcttctatagtggctgagggctacgattttgttcccgatagggctgaaattttataccagcaagtgattcttaaaggagactttaattacttggaagaatttaagcagcaaaggttattaaagtccagtatatttgaagagatttccacaaaatat

SEQ ID NO: 7473 - DNA, 472 bp, Homo Sapiens
caagtgaacatacagttttctttataagtatgtaaataaatttcatagcactacaaaaatacaagtcatctgagaagtttacagtggtcccagtactgtaggagagaattaaataaaataaaatagctgtagataattaaaagctaattagataaatcaagttacagtatcatccttcagattaaagtgctctgatataaccaatgccacagcaaacgaaatcctggaaagagattgcactgccaatgattttgtctcttaacctcaatgtaacaaggacacacataaaagagattcctgatttaataactgctatcatcttcacccccaaccacgctattagcctgtgatattcttcccctaggagagatgtcaagattagatgagattctatcatagccagggaaaaaaatgagaaataccagaaacattctaattccagtcttaagtgagtaacaacaaaattacctga

SEQ ID NO: 7474 - DNA, 420 bp, Homo Sapiens
  misc_feature (20)..(20): n is a, c, g, or t
  misc_feature (28)..(28): n is a, c, g, or t
  misc_feature (40)..(40): n is a, c, g, or t
  misc_feature (80)..(80): n is a, c, g, or t
  misc_feature (166)..(166): n is a, c, g, or t
ccggcatttcaaagctttcncgaaggtnacagaaattacntgatgatcaacttccaaggtcttctccatggcccaagagntaccgactccattaaggccaactgtccagggggcaagtttctaataggcgcggtttatgtacagataaaacccaaatcctttactnttcaagttgtcgatctaggtactgactgtaacggatccataagtctgggacaaggcagttctcgaccaggcgcgctcaaagatcaactgaatgcgagcaggatcgccaattttcatctcaaaatcgatatatgcttgatattctgccagccttggtgcctctgcctgcaacagtgcttcttcatagggtttatatttctccagctgctgtagtgctttgttatagttctgaattactgactctggtattgggtc

SEQ ID NO: 7475 - DNA, 1034 bp, Homo Sapiens
ggggagggaagggaagaattctagaggacagcccctgtggcctcctagcccaggataggggagctaagggtgggcagcacctataccagtcattttagaggtgccagggagggaggtggaagttttggggcaaccagctataccaatggcagggggaaaaggtagtcttctttcctcccaagtgtcttgtacataattggggctcttgaccctccagggcccagcccttctcatcttgttcactgtgaactccttgaaaggaggcctctgcccgactcagcaccatcctggtgcccggcccagcacaggcgtcccgctcttgctgagtgcatagaggccacagcagcatcgttagcttatcctcgcctgccttctgccaacagagtcactctccatctctgctggctgggtctgatcctgcttcaaaggacgccgttcacctatcccttcactggcgaagcagcctcatccttagccttggggaaaaacttctgtgctaaatgggtcatgcgcctgttctgaggcagctgatacccctctggagaaagcagactccgggccccgtctacctggtcagggtcgggcttccagcagcagctagggtgcagccagtggtagtacacaagccgcagagccaggcccagaaagaagcagccgcatcccacaggcagccacagctgcagtggaatcccgctgggcagccaggagctatgagtcacccaggtggccaccaggagaatgctgtcactcaggaggaaggcgaagtggatgatggcccggcctcgggtgcggccctcagccacgttgaaccaggagaaatagaggatggtggccaccgtcacccggtacagccactcggagctggggtccggcatgaagtctgtgccctgaagccagacccagagcagcagtaccagccacaggcccaggaagtgcagggccacatagctggggaagagggctgagaacagggccacagccaggactcggggccacagcagcagcaggttccaggaagtagatcacggaggagc

SEQ ID NO: 7476 - DNA, 323 bp, Homo Sapiens
tttttaaacaacaatatcataactgtcataaaacagatggtccaaccccaggagcagataataacttgggcagctctgtggggaacaagacggggaaaacaactgttctaactgcccactagaacagtggtttcaactactacaattctcagtgtttgagaggtacaagggaagaaaggactatgtggatcccttgtggctatgcagatacctacctcacagagttgttgtagaagactggtggtttggttcaaaccttgtgattaaagagtttgtcaagcattttattcttttgaataaaagcaacatatctaaaacatttt

SEQ ID NO: 7477 - DNA, 370 bp, Homo Sapiens
aagcctccactgggtcaaaaatatgtgctcttaatacttgagtttttgctttgtgtgtgggttttctttctttttcatttagatatcgtgggataaagtggagaggacatctccattttcccatacaaactgagggtgagaagagaaagagaagcaagctgttgcccccactttggcctggcttcccagccatcttcccagctctggttctttcataggaactagttattgcttccacaatgccgttatacggaatgttccacaaaggctgtgaacctagtcacagtctacccacaacaagaactctgctctgaaaaaccagcccaagagctcttacccagaagaacaatctttagccctcaaggtcact

SEQ ID NO: 7478 - DNA, 1034 bp, Homo Sapiens
  misc_feature (506)..(640): n is a, c, g, or t
  misc_feature (648)..(662): n is a, c, g, or t
  misc_feature (733)..(792): n is a, c, g, or t
  misc_feature (819)..(857): n is a, c, g, or t
  misc_feature (908)..(922): n is a, c, g, or t
ctatttataatttcagactttcataaagtgtaccaagaatttcataaatttgttttcagtgaactgctttttgctatggtaggtcattaaacacagcacttactcttaaaaatgaaaatttctgatcatctaggatattgacacatttcaatttgcagtgtctttttgactggatatattaacgttcctctgaatggcattgatagatggttcagaagagaaactcaatgaaataaagagaatatttattcatggcgattaattaaattatttgcctaacttaagaaaactactgtgcgtaactctcagtttgtgcttaactccatttgacatgaggtgacagaagagagtctgagtctacctgtggaatatgttggtttattttcagtgcttgaagatacattcacaaatacttggtttgggaagacaccgtttaattttaagttaacttgcatgttgtaaatgcgttttatgtttaaataaagaggaaaattttttgaaatgtnnnnnnnnnnnnnnnnnnnnnnnnnnnnnnnnnnnnnnnnnnnnnnnnnnnnnnnnnnnnnnnnnnnnnnnnnnnnnnnnnnnnnnnnnnnnnnnnnnnnnnnnnnnnnnnnnnnnnnnnnnnnnnnnnnnnnnntttggggnnnnnnnnnnnnnnnaaaaattttttaaaacctttttttggggcgggggccccaaaaggaaagggaaacgggccatagttttttcnnnnnnnnnnnnnnnnnnnnnnnnnnnnnnnnnnnnnnnnnnnnnnnnnnnnnnnnnnnnacacggggtttttaaaaaactcccaannnnnnnnnnnnnnnnnnnnnnnnnnnnnnnnnnnnnnncccccgggggtcctaatttataattttgccccccccccgtggccttttttnnnnnnnnnnnnnnnaaaattataaaacattttccgccccactggggaaaccccttccaaagggcggtgtgtagacccctttatctcccccccgggacttcaaccccccctgggccccgcttggggg

SEQ ID NO: 7479 - DNA, 671 bp, Homo Sapiens
cttggtctacaagacgccacatcccctattatagaagagctaataaatttccatgatcacacactaataattgttttcctaattagctccttagtcctctatatcatctcgctaatattaacaacaaaactaacacatacaagcacaatagatgcacaagaagttgaaaccatttgaactattctaccagctgtaatccttatcataattgctctcccctctctacgcattctatatataatagacgaaatcaacaaccccgtattaacccgttaaaaccatagggcaccaatgatactgaagctacgaatatactgactatgaagacctatgctttgattcatatataatcccaacaaacgacctaaaacctggtgaactacgactgctagaagttgataaccgagtcgttctgccaatagaacttccaatccgtatattaatttcatctgaagacgtcctccactcatgagcagtcccctccctaggacttaaaactgatgccatcccaggccgactaaatcaagcaacagtaacatcaaaccgaccagggttattctatggccaatgctctgaaatttgtggatctaaccatagctttatgcccattgtcctagaaatggttccactaaaatatttcgaaaactgatctgcttcaataatttaattta

SEQ ID NO: 7480 - DNA, 633 bp, Homo Sapiens
  misc_feature (181)..(181): n is a, c, g, or t
cccgtggcctacctctgactggtgtgcacatcgcgggtagggcctactgcctggtagaccttgctgtggagcattgggcaggggtcttcttcaatacctgtgagatctgtgctcctagacgccatcacctgcacctgcagccccggctctccccacccagtcatgtctccttagggcgaantcctggcctctgttgtacagaaagccctggcctgtcctgcatgtgggtgagagaagccaagcctggggatcccagaggaatcgacaggcttattcttctcccatacctccaacaggctctccactgtatgtttgttgaaattgccccatcctcagtccgacttaagaaataaaagagcatccatgttcatggattgagattcccacagattcgttgcaaatgtaatgtcatcatttgcttgatcccctgatagtactgataattacacaagggcatttccagacagtggctactgtttccattgtggaggggttttcaaaatcttccggtacataagaacaattgtaaagcagtttctgaaatagaaatctattgcaaataacttcttttagctggactttaacccttgggcatttcattcttttatttaaacagatgatgctggagggtct

SEQ ID NO: 7481 - DNA, 1181 bp, Homo Sapiens
  misc_feature (53)..(53): n is a, c, g, or t
  misc_feature (141)..(141): n is a, c, g, or t
aaatctaaggataggccattccacttatggagctggagccggtaattacaggnttccggacacaaacttaaaaagctcacttgcccacttccttccacaaggaactccaatttcactaattccaatacttattattattgnaacaattagcctatttattcaaccaatggcattagcagtccgggttacagctaacattactgcaggacacttattaatacacctaatcggaggagctactctagtattaataaatattagcccaccaacagctaccattacatttattattttacttctactcacaattctagaatttgcagtagcattaattcaagcctacgtattcaccctcctagtaagcctatatctacatgataatacataatgacccaccaaactcatgcatatcacatagttaatccaagtccatgaccattaactggagccttttcagccctccttctaacatcaggtctagtaatatgatttcactataattcaattacactattaacccttggcctactcaccaatatcctcacaatatatcaatgatgacgagacgtaattcgtgaaggaacctaccaaggccaccacactcctattgtacaaaaaggactacgatatggtataattctattcatcgtctcggaagtatttttctttgcaggattcttctgagcgttctatcattctagcctcgtaccaacacatgatctaggaggctggctgacctccaacaaggaatttcaccacttaaccctctaagaagtcccactacttaatacttcagtacttctagcatcaggtgtttcaattacatgagctcatcatagccttatagaaggtaaacggaaaccacataaatcaagccctactaattaccattatactaggactttacttcaccatcctccaagcttcagaatactttgaaacatcattctccatttcagatggtatctatggttctacattcttcatggctactggattccatggactccatgtaattattggatcaacattccttattgtttgcctactacgacaactaaaatttcacttcacatcaaaacatcacttcggatttgaagccgcagcatgatactgacattttgtagacgtagtctgacttttcctatacgtctccgatttattgatgaggatcttaaaaa

SEQ ID NO: 7482 - DNA, 570 bp, Homo Sapiens
aagcatgatgcttttcaaggtcctggtgatcactgtcttctgtggtctgactgtggctttccccctgtcagaattagtttcaatcaataaagaactacagaattcaatcattgacctactaaactcagtctttgaccaactgggatcatacagagggacaaaagctcctctagaggattatacagatgatgatttaagcactgactctgagcagatcatggacttcacgccagccgcaaacaaacagaattctgagttctctactgatgttgagacagtctcctccggctttctggaagaattcactgagaacacagacatcacagtgaaaattccattagctgggaatccagtctcccctacttcctgagaagactccaactttgaaataaacctgcgactgccattcaggatattgtctttgtagaaaatgatataaatctaagatgctcccagcaaagaagaaagaacgaggaagtgatcctggatgagaaatgctgtgccaggcatctctaagctctgcccttactctgtgtgggtttaagaaataaacgttcatttgaattgcaa

SEQ ID NO: 7483 - DNA, 322 bp, Homo Sapiens
  misc_feature (21)..(21): n is a, c, g, or t
  misc_feature (37)..(37): n is a, c, g, or t
ttaggaggacccagcatttcnacttacctgaacctcntgagatatctccaaaccactggaccacccaacccagcagccttgcatcagcttgattatgaggccccccactacatatatagtagaggactggtgggtctggactcagtcagagaagatgcacctaactgaccctcaagagacttgaggccccagggagtggggaggtctgatgggtcaggggcttgtgactggggacatcctaatggagatgggaggttagggaaaggtatgggatatggaacagtcagaaggtggtccaggaggggaatgaaatctgagctat

SEQ ID NO: 7484 - DNA, 428 bp, Homo Sapiens
  misc_feature (248)..(261): n is a, c, g, or t
  misc_feature (268)..(351): n is a, c, g, or t
  misc_feature (363)..(363): n is a, c, g, or t
  misc_feature (369)..(369): n is a, c, g, or t
  misc_feature (382)..(382): n is a, c, g, or t
  misc_feature (394)..(394): n is a, c, g, or t
  misc_feature (401)..(401): n is a, c, g, or t
  misc_feature (412)..(412): n is a, c, g, or t
ttagaacaaattagctggaggccaccttatcccacctccagccccctctgcaacacccttcatagctaattacctgcttttcattccaaattttctatgacaaggtgttcctacctcaacaggtgatcaccatggcaacgaggtagtctgttctatttttggagtatgaaagtagtgccttcttaaatctaataataaatgagagttccagaaaaccagtgcttcaaacaaatttgatttacttgaannnnnnnnnnnnnnaaatcannnnnnnnnnnnnnnnnnnnnnnnnnnnnnnnnnnnnnnnnnnnnnnnnnnnnnnnnnnnnnnnnnnnnnnnnnnnnnnnnnnntataccaagganatattnaaaatttagcccnggcatggtgggnaaacgcntttgggcccangctggcttcaaaaggg

SEQ ID NO: 7485 - DNA, 287 bp, Homo Sapiens
tcggcacggaggcctgatctacaagtaccagcatcgttcttttgccagccagtgattttcttttaaatgaaaatgatgggatgagatgtaattttagatcgggaagagagtgtgtgtctaattcttttgagtatgcctgtgccatcagagaagagatcccaccccagtaggaaggtatggggcagtccagtttataactttgcaaccaaacccaagcctgctctttttgaagcagctgattggagagtaaagattttcattcaataaaagctaaacctcagggctcc

SEQ ID NO: 7486 - DNA, 275 bp, Homo Sapiens
  misc_feature (14)..(14): n is a, c, g, or t
  misc_feature (22)..(22): n is a, c, g, or t
  misc_feature (31)..(31): n is a, c, g, or t
ttaggggaaccccnaggcaagncggcccttnccaaaagccccccaaagacaactggcctcctgctccagcttccctgtcctggctccacctgtcctgttgctgccagcagggcccttgtttgggattatgaacaaacctcacagactttgaggacctggatggtcctgcattcacggcatcaacactacccgcgctgctgttagacactccgccattcctggttctctccgaaccgttctttgtacagtaaatgtaattcagctgtggtccccac

SEQ ID NO: 7487 - DNA, 1059 bp, Homo Sapiens
  misc_feature (46)..(46): n is a, c, g, or t
  misc_feature (834)..(834): n is a, c, g, or t
  misc_feature (857)..(857): n is a, c, g, or t
  misc_feature (861)..(861): n is a, c, g, or t
  misc_feature (966)..(975): n is a, c, g, or t
ggtccggaattctcgggatgatgtctctaaagactaccgattcttntggagttgtcacatcagataagacatatctctaattccatccataaatccagttctactatggctgagttctggtcaaagaaagaaagtttagaagctgagacacaaagggttgggagctgatgaaactcacaaatgatggtaggaagaagctctcgacaatacccgttggcaaggagtctgcctccatgctgcagtgttcgagtggattgtaggtgcaagatggaaaggattgtaggtgcaagctgtccagagaaaagagtccttgttccagccctattctgccactcctgacagggtgaccttgggtatttgcaatattcctttgggcctctgcttctctcacctaaaaaaagagaattagattatattggtggttctcagcaagagaaggagtatgtgtccaatgctgccttcccatgaatctgtctcccagttatgaatcagtgggcaggataaactgaaaactcccatttaagtgtctgaatcgagtgagacaaaattttagtccaaataacaagtaccaaagttttatcaagtttgggtctgtgctgctgttactgttaaccatttaagtggggcaaaaccttgctaattttctcaaaagcatttatcattcttgttgccacagctggagctctcaaactaaaagacatttgttattttggaaagaagaaagactctattctcaaagtttcctaatcagaaatttttatcagtttccagtctcaaaaatacaaaataaaaacaaacgtttttaatactatttaaaacagaaaaacccacggnccgcaaacgccaccggcccccgnacgngggcgacacccccgcccgcgaacaaacactcaaacaacaccccgatggggggggccgccccttaaaaaatccccctgggggggcaccaatttaacccgccccccnnnnnnnnnngaaaaaaggggcccccttaggggggcccttaaataaaataggcgcccggggccctcttttttttaaccccttgtgggggaaaaa

SEQ ID NO: 7488 - DNA, 158 bp, Homo Sapiens
caaaaagttaatgtcttctcaaaatatgaaatattgataaatggaagagcatacggtgacaagtctcctttccaaccccaggttccctacaccctgctctcagcaggcagtgagtgtcacacacctgttaatccatcttgagcaggacagtactatac

SEQ ID NO: 7489 - DNA, 470 bp, Homo Sapiens
  misc_feature (250)..(250): n is a, c, g, or t
gcccggctccgcgcccagcgacagggagccgtccagactgatgggaggcccgggcgcggggcctctgccgcgggctcgccgccatcctgcttctcgtgcttgcgcttgtgcgagtccatctgcgacatgcccaccaccgtgtggcggcaccgcgcaaggtgcagtggaagtgcgagcacttgagcttgtacttgcagtcgggcacggcgcagtcggccctggagctgaactggcagaagcccgcggcgcntgatcacgtcctgtttgccgtggtgcttgcgatgcgccgtgaccttaatgctgtcggtgcagcggaagtcagcgcagaacagtggaagtgcgtgctggtgcccgagaaagggcagtcggcgaagtggcagctgagtgaggccttgaagcgcttgaagtcgtccagcaccaggttgtccacgcggtcgtggtgctgcgcgtgcttgtacatgtgtgtgcgc

SEQ ID NO: 7490 - DNA, 217 bp, Homo Sapiens
  misc_feature (68)..(76): n is a, c, g, or t
ctttaaagaccagtgtgatagtaggccatgcatctgagatacgatattccttggtaactagagggagnnnnnnnnntcaagtaggttcaggcttatgttgtattttgagagtctggttttatttgaacagaaataactctacagaaagctcttgtaaataatgctcaaatttgcacccgacgatcaaatccattaaaaatgaatcttgtaaaaaaaa

SEQ ID NO: 7491 - DNA, 733 bp, Homo Sapiens
  misc_feature (547)..(560): n is a, c, g, or t
accgagaagaactggttccactacgctgcccggatctgggatggggtgagaaagtcctctgctctggcagagtacagccgcctgctggcctgaggccaaggagaggaatgtcatgcaggggacctcctgggtccgcagtgtactgcgagggagcacagatgtccatcccccgctggggtggagagcggcagcaggcctgatggatgagggatcgtggcttcccggcccagagacatgaggtgtccagggccaggccccccaccctcagttggggctgttccgggggtgactgtgagcgatcccaccccaaacctgagatggggtagcccgtcctgtgtcctccacagggacaagcagtgggaggagtctgaatggtcaccaggaagcccgggctccatcttgacctcctttttcagggacaggagcaacaggcccctcttccctgactctaagcccttccctgtaaggtgaggcagggtctggagagctctttattggaacagatctggtggttcaaataaacacagtcaaaaaacccgcccccacnnnnnnnnnnnnnncatggtcggccgccctcggcccctccgataagcctttcctaaacccattccgtttgggcggcgccggggccccagtaaggtaaggtgaaacatgggtcaatagcctggttttccctagcgaagatccctgggtccagtgacctaggtgcgttgtggatttcctccccccaaat

SEQ ID NO: 7492 - DNA, 1083 bp, Homo Sapiens
  misc_feature (521)..(661): n is a, c, g, or t
  misc_feature (674)..(685): n is a, c, g, or t
  misc_feature (691)..(709): n is a, c, g, or t
  misc_feature (716)..(810): n is a, c, g, or t
  misc_feature (924)..(932): n is a, c, g, or t
  misc_feature (976)..(1010): n is a, c, g, or t
aattctgaaactgtagttgagatacagctatttaatatttctgggagatgtgcatccctcttctttgtggttgcccaaggttgttttgcgtaactgagactccttgatatgcttcagagaatttaggcaaacactggccatggccgtgggagtactgggagtaaaataaaaatatcgaggtatagactagcatccacatagagcacttgaacctcctttgtacctgtttggggaaaaagtataatgagtgtactaccaatctaactaagattattatagtctggttgtttgaaataccatttttttctccttttgtgtttttcccactttccaatgtactcaagaaaattgaacaaatgtaatggatcaatttaaaatattttatttcttaaaagccttttttgcctgttgtaatgtgcaggacccttctcctttcatgggagagacaggtagttacctgaatataggttgaaaaggttatgtaaaaagaaattataataaaagggatactttgcttttcnnnnnnnnnnnnnnnnnnnnnnnnnnnnnnnnnnnnnnnnnnnnnnnnnnnnnnnnnnnnnnnnnnnnnnnnnnnnnnnnnnnnnnnnnnnnnnnnnnnnnnnnnnnnnnnnnnnnnnnnnnnnnnnnnnnnnnnnnnnnnttgcggcgcccgnnnnnnnnnnnnaaaaannnnnnnnnnnnnnnnnnngggcggnnnnnnnnnnnnnnnnnnnnnnnnnnnnnnnnnnnnnnnnnnnnnnnnnnnnnnnnnnnnnnnnnnnnnnnnnnnnnnnnnnnnnnnnnnnnnnncccccgcggaaagaaaacttcttttaaaaaaccaaaaaggggggtcggggcggattctcctgtcttttacccaaacaaagtcccagtcggaacccaaatttataattacctttnnnnnnnnngccctgttttaataaaagaaggggggggttttaatttaaaattnnnnnnnnnnnnnnnnnnnnnnnnnnnnnnnnnnnagtggtgtaaacctttatctcccacccgggggagtccccacccctgtccgccgctgggcgaaataaaatattt

SEQ ID NO: 7493 - DNA, 446 bp, Homo Sapiens
ccgagtagccaaagtgatgctggggaggatggcgcgcctgaagacgcagccgaggtgggagcacgggcaggctcaggcgggaagaaggaggcatcgtccagtatagaccgtcccggacgggaagctggtgaaagcaaagcaaaagctggaagatcgcctcgcagctgctgcccgggaaaagctcgcccaggcgtctaaggagtcaaaagagaaacagcttcaagcagaacgtaaaaggaaagcggcgttatttttacagaccctcaaaaatcctctgccggaagcagaagctgggaaaattgaggagagtcctttcagtgtcgaggaatccagcactacgccctgccctctactgactggaggcaggcctctgcctactttagaagttaaaccacccgataggccttcgagcaaaagcaaagatccaccgagagaagaagagaaag

SEQ ID NO: 7494 - DNA, 527 bp, Homo Sapiens
gcggccgccgccgccttccggggactctttgtcgccgcctggttgttgtcgttaccgctgccgccaccgccgcctcctcctggggactttctccgcctcttttcggcgctgccactgtcactgctgctgctgcagcctccgataccgtttaacagcctttgcagcaggtcagagaagcgctgcatttcagcagccgcggcctcatcgtcatcgtcccctctccacaggccgccgctatccgagcctccgccagacgaggagagaggccccggcgagctaagcccggggtccaggtgccagtccggttgcctggggtccaggagatccgccagttccagcccagacagaaagtccatatcctccgtctcttcccccgggaggctggcgatcgcctcctcctccatctcctcgggggagggcgcgcgcacggccacgccgccgcggctccccctcccggcttccaactctccttcgtcgccaaactgctgcttgcggccgggagatccggccgccgccgtctcctcctc

SEQ ID NO: 7495 - DNA, 400 bp, Homo Sapiens
tgcgttgtattctagaaaagtagaattgtcttaagtagctttgtaatataaagtcatctatcagcccattacacctattagaatgttttaacctttatttcccacttttttgtttctagactgagtgtacttggtctggtatttgtggcataacttacggaacacataagaatgatacagatactatttaatgatgacctaatacaagcttagatagctaaggtgaaagctgctatggccttaacattttcctcttgaagaatgtattttctgtaataaaatacagtggctacttgaaatctataaacttatgtgaggtctggataaatctgagcaactttcttctttgtgctccaggaacctacgcactatatatataaataaagcttaagtaaacatc

SEQ ID NO: 7496 - DNA, 1105 bp, Homo Sapiens
gccgtttgtcccttgcggtaccgtccgcatacgaatctagcccgggagacagagttgcgggagtgcggtctgtgccgttccggccaggagtttgccgactgcagacgtcctgcgaaccggcaagatgtgctctctggggttgttccctcctccaccgcctcggggtcaagtcaccctatatgagcacaataacgagctggtgacgggcagtagctatgagagcccgccccccgacttccggggccagtggatcaatcttcctgtcctacaactgacaaaggatcccctaaagacccctggaaggctggaccatggcacaagaactgccttcatccatcaccgggagcaagtgtggaagagatgcatcaacatttggcgtgatgtgggcctttttggggtgctaaatgaaattgcaaactcagaagaagaggtgtttgagtgggtgaagacggcatccggctgggccctggcactctgtcgatgggcctcttccctccatgggtccctgttcccccatctgtctctcaggagcgaagatctgatcgctgaatttgcccaagtcacaaattggtccagctgctgcttgcgtgtctttgcatggcacccccacaccaacaagtttgcagtggccctgctagatgactcagtccgtgtgtataatgccagcagcaccatagtcccctccctgaagcaccggctgcagcgaaatgtggcgtctctggcctggaagccccttagtgcctctgtcttggctgtggcctgccagagctgcattcttatctggaccctggaccctacctccttgtctacccgaccctcttctggctgtgcccaagtgctgtctcaccctgggcatacacctgttaccagcttggcctgggcccccagtggggggcggctgctctcagcttcacccgtggatgctgctatccgggtatgggatgtctcaacagagacctgtgtcccccttccctggttccgaggaggtggggtgaccaacctgctctggtccccagacggcagcaaaatcctggctaccactccttcagccgtctttcgagtctgggaggcccagatgtggacttgtgagaagtgcgcctgggtg

SEQ ID NO: 7497 - DNA, 695 bp, Homo Sapiens
  misc_feature (33)..(33): n is a, c, g, or t
cttttgttttgaattcttcgtaaggcacgaaantaggccaagttagaggtccaagttcctttgacggcaacgccaaatgtgttgcggcttcaacgcaacaggaccgggtgaccgcactgcgcagccttgaccagcgctcgccgtcggtgctctccagcgggatgcccttgaacaggatgaccatgaccaggtccagccgccacaccttgtccgcctgccggagacagtcgatgcgccgcatcttgcccttctggtcggggttggagagcacgcagcccggcgccttcttgccggtgatgctcagcacgaagtcctcgcggcactcgggccggatgtccttgcgcagcttggccagcagccgcgacgcccacttctgcttgacctcgggcttctcgcccagcagctcgtccttgaccgcacgctcctcgtccttcgacatccgcttctcgtgcttcttgaagtacttgcgcttccgcgcctgcaggttgaaccaggtgtaggcgaaggcgcggacgtgaggcagcagggcctcgatgaacgggtggaactcatcctgggtgaggcagagcggggacgaatacatcccgggcgcggcgggaggcgcagggccggccggagcgggcgcgctgaactaaatgagtcatttttccaaaccagctctccgcatcctccaaccccggaacacgattaggaaa

SEQ ID NO: 7498 - DNA, 634 bp, Homo Sapiens
  misc_feature (325)..(325): n is a, c, g, or t
gcgccgcgccccctcccgggccgtgactcgcgcggttgcgtcctgccgggcaagctcttcgtgattgggggcgccaggcagggccgtcagacacggacaaggtgcagtgctttgaccccaaggaggaccggtggagcctgcgttcaccagcacccttctcacagcggtgtctcgaggctgtctcccttgaggacaccatctatgtcatggggggtctcatgagcaaaatcttcacctatgatccaaggcacaagatgtgtggggggaggcaagctgtcctcccccagtccctgtggaaagctgtggagtcactgtgtgtgacggngaaggtccacatccttggcgggcgggatgatcgcggagaaagcaccgataaggtcttcacctttgaccccagcagtgggcaggtggaggtccagccatccctgcagcgctgcaccagctcccacggctgtgtcaccatcatccagagcttgggcaggtgattcagatttggacagcctgagccaggaggcggagaggcaggcggagctcagatgcacactctgctccctcatggcacctccacgcaaacagcccttaacttaatggtcccttttcttgtataaataaaatcttgttgggtctgtgttcc

SEQ ID NO: 7499 - DNA, 396 bp, Homo Sapiens
tgtgaactaaagctttatttattgtcatattttttttccttgatttctttgcaaccctgcacctaaaaccaaaaagcatcgtcatcttcgtcacactcctggcaagtccaccggagatgttccttgtgaaccatggatgtcattccactagggaattctttaatcattgtacatggtgtcttgtacaagtctgagttttcctttcaatgttcctgggctgggcttgtccagaaatctcgtcgcccttctgtctacagcagtttagggctccttttgtgtgtggttgtgggttgtgtgtctgtttgtcttaaatgcataagcaaagttttagtcttaacacctgtaagccagtactgggtgctgctctgtcctaaaattttagcactgctctgatac

SEQ ID NO: 7500 - DNA, 564 bp, Homo Sapiens
gatggcttccgcaccagggtcgtgcagctgtggtctctaagaaggagacgtaacaattcatgagtagtgaagccacacgctccattaataaagttccctaacagaagagacaaacctaaactcagtgcctcagaagctttggggtctgcagcgctcccctcccactcctctgcaatttcacagcattctaaaggaagtacgtcccccgatttactgatgcaccaaggggccaccaagacactgcagaaattataaaatcattacctcagaaatacagaaggaaacctatgtctcaagaggaaatggaatttatccagcgtgggggtccagagtgaccgtcgtggctgctgcttgtcaccagacagaagggttagctttacaataaaggacttccacaatgtcaaatgaaaagtcatatattaaacaaccttaataaatattctgtgagcagaatgaagtacagaaactccaggtggtcacttgtatctcctacactgtgtatctcggtcagctgccccacaagctgccctgtacacttattaaagtctacatttttaaatgcta

SEQ ID NO: 7501 - DNA, 447 bp, Homo Sapiens
  misc_feature (115)..(115): n is a, c, g, or t
ctgctgccacccagtcgctcttcacagcctcctacacctattagatactgtcaccaccagccaggctccagttctccttaaatattttggagacctgaatggctcagtcaacccntggaaattagataacatttgattgaacttctgaaaacacaacacatgtgaatcataaacacaagagaaaagccaaatcagctttgaaacccaagaatgagcatgtcacccaatagtctctcaacacttccagttccctatgttccagaacattcatccaagaaaagaacaggccacgacttgagaaaagcaactcagaagcagaggatggagaagggcattttaataaacatagttaccaggggttgggttatagaagaggcacagcaaccagaaaaagaaataaaacgtgtatgaaccttccgttggtacagtttcactttcctgctcttg

SEQ ID NO: 7502 - DNA, 482 bp, Homo Sapiens
  misc_feature (283)..(283): n is a, c, g, or t
  misc_feature (382)..(382): n is a, c, g, or t
  misc_feature (395)..(395): n is a, c, g, or t
ctgtttatttaacttcaaaaacatttcagcattctaaacatataaaaaacaacagaatgttgcaaattgtgtttaggtccagaggggtttttgaacttccattgatgcagttctttgttttgctgacaatgatgagttccacagtttctttaaaaagtttgagacctactgcacttaactaaagaaaaaactccaagcacttctcatgccagctgacccctccccctttccacaactaagaatgtcagcagaaggctaatgccactatatacaaaaaccaagncaacctgggaagctaaagggatggctcactgcagtattaacagggtccaggcctcacaggtgcacgccctggaggctacggggcccccttcccaaaaanggcatcttccccnttcaacaagccttccaacggccaaggcaaggggaggcattcaaggaatctggtctgggggttggttttggttccccttttaacaaac

SEQ ID NO: 7503 - DNA, 406 bp, Homo Sapiens
  misc_feature (45)..(45): n is a, c, g, or t
gtccaccctccaacccccacaaagttaactcccttagggaggtgntgggggcaaatgactgtcactccctgtgcatggtctgaccccaaggctcctcccccaagcacggttcggttcctcctctgtagcctgggaagacttctctgtccaccgtcccaaggggctggagcagtacaagttgttgcaggacagcagcctgaaaagaagggctggttgttcctgcccatattgggagagatgggagcatcctaggtcactggcttttgctgctgtaatggggacccctcccccatctacttaccaccaccctttcccaaccccaaccatgttttttgtgtgtcaattgtgccatttttattttattcctttccctactgtacacggagaaataaaggtgtagaaatac

SEQ ID NO: 7504 - DNA, 405 bp, Homo Sapiens
  misc_feature (130)..(130): n is a, c, g, or t
tctgctttcccatcatttgaacccatgaagatcaaaagtggctgagggaaacaaacagcagccagatgctcaggagccctcaagttgctggaagcagccttggacaacttgaggcctggacaccttgtcngtgttatgggacccaaagttcaggacacgggtctgatctatgaagttcccacttcgaaatctagtaccagagcaggtaggtttacactgttcactcgtagagtcacataggtacacctcgcagtgaaggtagacaaggtcgtagtttcctgcaaaccggaacatctgaacagaaaatcgggcctgagatgactcgccattctctgtcacctgaatggttgtatcttctgtacgtggacaactgtcctggataatgaagtatttcacagggtctgt

SEQ ID NO: 7505 - DNA, 1069 bp, Homo Sapiens
  misc_feature (298)..(307): n is a, c, g, or t
  misc_feature (391)..(524): n is a, c, g, or t
  misc_feature (590)..(601): n is a, c, g, or t
  misc_feature (710)..(742): n is a, c, g, or t
actcatttgtatgtataagaatattctgacagtgagtgacccggagtctctggtgtaccctcttaccagttcagctgcctgcgagcagtcattttttcctaaaggtttacaagtatttagaactcttcagttcagggcaaaatgttcatgaagttattcctcttaaacatggttaggaagctgatgacgttattgattttgtctggattatgtttctggaataattttaccaaaacaagctatttgagttttgacttgacaaggcaaaacatgacagtggattctctttacaaatggnnnnnnnnnntccttattttgtataaaggacttccctttttgtaaactaatcctttttattggtaaaaattgtaaattaaaatgtgcaacttgnnnnnnnnnnnnnnnnnnnnnnnnnnnnnnnnnnnnnnnnnnnnnnnnnnnnnnnnnnnnnnnnnnnnnnnnnnnnnnnnnnnnnnnnnnnnnnnnnnnnnnnnnnnnnnnnnnnnnnnnnnnnnnnnnnnnnntacaatggccaataactgtttcccaaagagcaccggaccagaaagcggtgcttgggctcccccccnnnnnnnnnnnnccgttttcaccccaaaccgctcggagccgcgcccgacaggggagacgtgagggcatttattgatatgtttcccccggagagccccaggggggctgaaatatcggcgtgnnnnnnnnnnnnnnnnnnnnnnnnnnnnnnnnngtaatcgccccccacctttttttacaccacttccccgcccggtggattgttaccgccgtacccgcccacgggggttttgatggccaacccggcgccccgccggaaaggggggttctatatcaacttttcttttttcgccccccgcgagagctgttagatatcttccgccgccctgggggtgcgacacagcgatggtctcattagaacacctgcgcccccatcaatgtgtggcccatctttcttcataccggcggagttgtgggtggaactactcgctctccgcgggcaggcgggtgttagaaaccacacaggggcggtttgtcggcg

SEQ ID NO: 7506 - DNA, 469 bp, Homo Sapiens
actgaagggcaggaccctctatccggcagtaagcgctgtctggggccagtgccaggtaccgatccgctacctgggcgaaaggagagcggagccacactcccttctgcacctgagccgcctgtgtgtgcgccacaacctgggggatacccggctcggccaggtgtctgccctgcccttgccccctgccatgaagcgctacctgctctaccagtgagccctgtgataccacagactgtgctgaggtcttgccaccacccccccccttggggaggtggggaggcactgctggcctagaccagctgctgaaagctggtgaggctgagcccctaccccaacccaagctctgcggaaatcaacagccccagagccacttggagggaggaagaaagggagccggcgttcaaggctatgacagtctgctacgcaaaacattttttcaagtaaaaatagtaagagatgttgttataga

SEQ ID NO: 7507 - DNA, 632 bp, Homo Sapiens
  misc_feature (37)..(37): n is a, c, g, or t
  misc_feature (139)..(140): n is a, c, g, or t
  misc_feature (143)..(143): n is a, c, g, or t
  misc_feature (169)..(186): n is a, c, g, or t
  misc_feature (221)..(221): n is a, c, g, or t
  misc_feature (257)..(257): n is a, c, g, or t
  misc_feature (305)..(305): n is a, c, g, or t
tcttaaaaacccttggaagggcctgggtaccttttgngggaccctaagtttttaaaggaaaaattccttttatttcccagagtccccttgtgggaaggtagctgttaaaagccaatttttatgctaatttatgcccatnnaanaatgttacatcggggctgttgtcttnnnnnnnnnnnnnnnnnntccaggagaaagcccccccttttggatcggtgggntgagataccagccccaagattggtctttcccctaanaatgcaaccagattatgctgctagattgttattttgttggcacttttnttttgattggcattttaaaatcggtatttaaactgaagacattgtcatgttttattaatttaacaaagttgaaagtgactgctctgtacatcatgaccttaacaatgttaatgctgtaagtgaaagttcactgtcgtctgtatactaaatttattggtgtttctaacttaaaagtaagactgcagattatcccccaccagccttagtccaggggtgtggctctgtccgggtgcagtatgcagtcatgtggaaccttgctttctagtcctgggaaaaaaagatgtctctaattactggcttcaataaacacgaatccagactgcttaa

SEQ ID NO: 7508 - DNA, 2265 bp, Homo Sapiens
  misc_feature (1962)..(1962): n is a, c, g, or t
tggtacacgtcggttattccgggatatcgtcgaccacgcgtcgcgcctggactggtggcggcagtggggctcctccttctgtttcccagaccgagagccgcgccggcaccatgtcagcttaccctaaaagctacaatccgttcgacgacgacggggaggacgaaggcgcccggccggccccttggagggacgcccgagacctccccgacgggcccgacgcgcccgcggacaggcagcagtacttgcggcaggaggtcctccgcagggctgaggccacggccgccagcaccagcaggtccctggccctcatgtacgagtccgagaaggttggggtcgcctcttccgaggagctcgcccgtcagcgaggagtcctggagcgcacagagaagatggtggacaagatggaccaagatttgaagatcagccagaaaccacatcaatagcattaagagcgtgtttggggggctggtcaattacttcaaatccaaaccagtaagagaccccacctgaacagaatggcaccctcacctcccagcccaacaacagattgaaagaagctataagtacaagtaaagaacaggaagcaaagtaccaggcccagccacccaaaccttagaaagctggatgatacagacccatgtccccagaaggggctgggtactgccatgagtactgatgcttacccaaagaacccacaccttcgagcctatcaccagaagatcgacagcaacctagaatgagctgtccatggtgactgggatcgatctgcacaggcacatcagccactgggtgcatgcagcaccagcaacattgcaggcagccaagcatgcaccattcttatgcaccagtgctgcacgaaaccaacagatggcacacagattcagcattgtccacaccattcacagacacagactacgaagcacacgagcaccacacaggtatcgacaccacacttcgtgcacatacccagtcacgggcatttatccccaactcgtcattggtggcgatgcacaacagcaatgtggcaccagcaatcattgatcagcattgtacactaatcccaaagacaccatattccatatctcacatcatcttcacagttcattgtcacacattcaaatgttagtggctcgtgccacacatggttacattcgcatcagccagtcaggctcttttcacagcaaccatataacaggcatggttacatcacagtgcaccagtagtaataggacccccaaccaatctatgacacaataaatagtggtataacaaacaggcacgttctaacgcccaaaagtagatatccagtttacacacataggacaagaacaaacattgtctatatcacatatacacggacatggtatataagatagattacatttcgcacgagccatgcccaccgatacaagccaactatggagcaacgcccgattcgacactataacgttccatcgttggcgcgtccagtttagtacggaccatcacagcgcaacgtatggaccttatgcggaccacagctcacactcagacaaccagcaagcagttcatgacacaacttaatacactaacagaatacgtaaacaaaagtggaaggaccacattatcgtggtgccgaccaagcatttgggagcaccagacatccacaaaataccaccaccgtgtcgatctggatctaacgccacatattgaaggcactagtcagcatcacttatacgagtcaaactatcaccttaaacaggccacatgtaacaccaacaatgaacgtctcacagaaagcaggatatcgaccggagagctcattgtgtcatgcacacgcacacgacaagtgactgaccccgacaagtgtaccattccacaacaaacacacggaagcaagaagagaggaagcaagacaacacgcagagacaaaaccgcaacacgacacgagcaccacaagcccgacaaacgacagacaacagngagaaacagagcacgagcagaggaagagatcaagaccaccccgacgcaacgaagaagacaagaagacacaaaaagcgaacacacaacgaggccgaccggcccagatgatcaagcaacacgagaaacgcacaatgacaccccaagtcgacgaatactaagccgaggaactcaagagacgcagacaacgcgccaagaagacgaccgcatgaccgcacacagcgcccaaaccaacaaagaagagaagcaacgaagagaagacaacagaacagaaacgacacacacgaggcgcaacaacgacacgcc

SEQ ID NO: 7509 - DNA, 411 bp, Homo Sapiens
tttaagagaagcaaataaacattttatttccacagcacgccttcccttttcccaaagaacatgagttcacctcagccatcaaagcagagggcgaaactgcaagtgacaaggcaagaggctcctagaaaaatagattatacccaaggctctcctcctggggacccaaacccgtccccaggctccccctcagagcttgccaaatggagtgaaaggcatggaaaggggctgggagaaaagccagctccactgaacaaaggggagaggagcctggcagtgagcagacctgggaggggtgtggggtgggatgagctttgctccttggttgagtgctggaaaagggaagggggaagaaataatttatgttgatgtaattaatgtaatgatgatgtaatggtgcgtggtttcaatcat

SEQ ID NO: 7510 - DNA, 276 bp, Homo Sapiens
tacaggcatgggccactgtgccagcctcacttatttatttgtattgctggggagagtgtgagtgcagttccccacatatgaagaaatcgcaggggtcagcacatctggagtgcaatggacgaaccttgccctgggaaaaccacctttgtgatcttggtattttccctgacaggtaaatacgttttgcctgtttaaagtggctgatgacagcccactgtgatggctgtggcagcaaggacaggaaacgctgttggggtaatggggcgcaccgtgtaa

SEQ ID NO: 7511 - DNA, 461 bp, Homo Sapiens
gtgtactgcatcgaggataagatggccatcgatgacaagtacagccggagggaggaataccgaggcttcacacaggacttcaaggagaaggacggctacaaacccgacgttaagatcgaatacgtggatgagacgggccggaaactcacacccaaggaggctttccggcagctgtcgcaccgcttccatggcaagggctcaggcaagatgaagacagagcggcggatgaagaagctggacgaggaggcgctcctgaagaagatgagctccagcgacacgcccctgggcaccgtggccctgctccaggagaagcagaaggctcagaagaccccctacatcgtgctcagcggcagcggcaagagcatgaacgcgaacaccatcaccaagtgacagcgccctcccgccccggccctgcctcaaccttcatattaaataaagctccctccttatttttaaaaaaa

SEQ ID NO: 7512 - DNA, 489 bp, Homo Sapiens
  misc_feature (12)..(12): n is a, c, g, or t
agagatggcccnagtgaattcagaagagcttgcagtcaagccgtgagaccctgggagctgtggctgtcttctgtggaggaggctccagtcattcccaaagctcttaattctccataaaatgggctttcctctgtctgccatcctcagagtctggggtgggagtgtggacttaggaaaacaatataaaggacatcctcatcatcacggggtgaaggtcagactaaggcagccttcttcacaggctgagggggttcagaaccagcctggccaaaaattacaccagagagacagagtcctccccattgggaacagggtgattgaggaaagtgaaccttgggtgtgagggaccaatcctgtgacctcccagaaccatggaagccaggacgtcaggctgaccaacacctcagaccttctgaagcagcccattgctggcccgccatgttgtaattttgctcatttttattaaacttctggtttacctgaaaaaaa

SEQ ID NO: 7513 - DNA, 379 bp, Homo Sapiens
ttgcgaccgctgcgcgtccttgcccgggcttggggcgccgcgctggggaaagccgggggccggacacattggcgtgagacctgggagtacgttgtgccaaatcattgccacttgccacatgagtgtaaatgatggcggatgccaagtatgtcctctgccgatgggaaaagcgattatggcctgcgaaggttttggcccgaaccgcgacttcaacaaaaaataagagaagaaaggaatattttctagctgtgcaaatcctctctctagaggaaaagttaagtgttgtgttgttttaatactgttttttcccgtgtagatttctgatacttcaatcccctactcccccaaaacagttgaagcccagcccactcttaatggg

SEQ ID NO: 7514 - DNA, 395 bp, Homo Sapiens
agccatacccaagtacacatatagcacatttcacccagggaccttccctctttggacactatgttacatacccctcttggcctttgaacctgtgccaggaagtgtgagctgttacagcaaggggctagaagtgaaaaaagtaattctggagacaagcactattttctcttcctaccccacctccatttctaatgcctactgccatcaaggccttgttttgcttttctttttggattgttcagagaaatgtgtgtggcatgtgtaagaaaagtgtatatactatcttatactacctctccaggttgccagagagttgcgaggagagcaaggggcacaaccgtctccctttatagttctacttttctaataaatagtctgtttaagatcataactaa

SEQ ID NO: 7515 - DNA, 421 bp, Homo Sapiens
gggagctcacactgcctcccagcttgcacgtactctttctttaatcctcaccatcaaaaaacaagttggcatctttcagtgctgttcttccttcaaatgtgatatgtatgaagcccctgtctcctgaaggaatgtggcaaaataataagtttaaagtatcagcttttggactcattaattcaagtcgttacagaacacacagttgctgtgagcactgtctgttgtgctgggcattacatggtgggaataaaacagatcctttctctatctttatggacttcatagatgctctaagaaactaggctcaatgcatgttctgctatgtgatctaagatgagacacacaatgtatatgaacttcacctgtctatccattcatgtatacatccatcctttcactcaataaacatttgccaagtcaa

SEQ ID NO: 7516 - DNA, 385 bp, Homo Sapiens
cccttcgcgcctgtactccttgctgttccgcagaacttccacctttgccctcaccatcgcagtgggcgccctgttcttcgagcgagccttcgatcagggcgcagacgcgatctacgagcacatcaacgaggggaaactgtggaaacatataaagcacaagtatgagaacaaggagtaacaccctgcccctgtgggacccgaaggaacagtcgccggtcagctgtttgcctggagttggggcctcagcctaaggatgagtttcaagttgccgttcaccgaccgccagtgtgtgggcaagctatggctccactgtacaaacagactcacttctgctgtgtttgagtacagctgtcagcaaataaatgcaaagtgctcatgagaaaaa

SEQ ID NO: 7517 - DNA, 534 bp, Homo Sapiens
aattttgtaacatacaaaaccactgtatggctaaagtcttactgagccaaaaagggaacacagcggtatctccgaattttacacctactgttccctcatctttacggatcattagtgatgaatgcagcagcaatttgagaaagtcttcaaaagcaagtagagtcttatccagtgctttaaacatcatagaaagactttgtattccgaggtcatataaatcaaagcaacaagctttttaaacaaaacagagtaactgtcacaaaagcaatggtacaagcccaggaacaaacaatactttgagtggctctgtggggaatgagaagggaactgttccattaaccactcactagagtagggtttctccagctccattctcagttgtgaagggcagcagagttcctgggccccatggctgtacagacgcctacctcacagagtctgtgcacaggagagagcggaggcgtctcacaagctttgtgatctggagagtttgttcagcatttattctttggaataaaaatagtttatctaaaa

SEQ ID NO: 7518 - DNA, 449 bp, Homo Sapiens
  misc_feature (255)..(255): n is a, c, g, or t
  misc_feature (287)..(287): n is a, c, g, or t
  misc_feature (316)..(316): n is a, c, g, or t
ccgggcttccaggaaatttgccacgagtgccgagcaaggtcgtgtagaaaggggagttaggtggtacggccatttcttccgccttccgtgtctgcggccctcgcagaactttccagcagctgacatgttgggccagagtattccggaggttcacgacctccgtggtcctgtcgcagccactatgaggagggtccggggaagaatttgccattttcagtggaaaacaagtggcggttgctgggctatgatgacccntgtacttctggatctgggtttgccgcaccttntctttatagtaagacaccagctactttanaaaaataaaggattatttaattcatccctttaaccagaatgaaagaaagttttaaagagatgatctgaaaaattgggattaaactccttgaacctctttatacctagaaaaaaattgtaaattaacctaattg

SEQ ID NO: 7519 - DNA, 418 bp, Homo Sapiens
gcgagagtgcctgcacatttggggaccccattgtttaggtagatgtctctggaagcagcgctgtgaaccatgacagggaggggtgattaattactgacactggacatgtccagacagctataaacagtgcttgtggacatgaggaccagagtgtggactgcatcccgagaggagacggtaaaggatgaaacacaactgcactgggaccctccgccgtaccctccaggcctgcctcctccaccacttgaagccctccaggcctgcctcctcttctacagtgcttgccttcagccacccggagaagagagctatggtttaggacagctcaacttatcaccagatctggagccctggaatccatgggaggggggaacaagtccagactgcttaagaaatgagtaaaatatctggcttccca

SEQ ID NO: 7520 - DNA, 481 bp, Homo Sapiens
  misc_feature (53)..(214): n is a, c, g, or t
  misc_feature (350)..(350): n is a, c, g, or t
  misc_feature (353)..(394): n is a, c, g, or t
  misc_feature (398)..(398): n is a, c, g, or t
gattaagtcttaacgtatgagtttttgggagaaactcaaacattcggacaatnnnnnnnnnnnnnnnnnnnnnnnnnnnnnnnnnnnnnnnnnnnnnnnnnnnnnnnnnnnnnnnnnnnnnnnnnnnnnnnnnnnnnnnnnnnnnnnnnnnnnnnnnnnnnnnnnnnnnnnnnnnnnnnnnnnnnnnnnnnnnnnnnnnnnnnnnnnnnnnnnntccgtaaggtttaatttgtgtttgaacacaccctgccctctggaccaagcatttccactcctgggcattacaggcaaaagaaatgcatccacgtgttcatcaaaagatgtaaacctgtgccgggtgaggtggttcnatnnnnnnnnnnnnnnnnnnnnnnnnnnnnnnnnnnnnnnnnnntgcnttgggcccagaagttcgagagcagcctgggcaacggggcaaaacctcgtctctactaaaaagtagccgggcatgatggtatat

SEQ ID NO: 7521 - DNA, 530 bp, Homo Sapiens
acttttaaaagtattttattgagatcgttcaggaaactatgcatttccaagccattatatagtctgggcaagataagttcttatttcatttgtctaatactcatgttcaagggaggccctggttcagtctgggcgcagggctcgcagattacaccttacagcctctcatgttcaagataactggcaacaaaagcaaataaaaagccgtccaaacttgtcaagtgcgtagcaagcaaagcccttcaatgtgggcaggacaaagggctggcttctcattagatgattagcttcaattcaggtcacatctaggtcacttccacctttgtctggattccaaggttagccctcatctaggtgaggggatggggcccctgtgaagtcctcagagctcacccattggtgctactgggtacggctggcgtgggccaggaacctgcggcacgaggcggacccatgccttgctctccggagtcctcagaccctgcccagaccggtggagaacaaagaagggtgaaaacacggcaaaccgt

SEQ ID NO: 7522 - DNA, 648 bp, Homo Sapiens
cacttctacctttggcatatggttaaccagaaaaaatctaacaaagagaactttaactagataccccgaaaccagacgagctacctatgagacagtttaaaagaaccaactcatctatgtggcaaaatagtgagaagacttgtaggtagaggtgaaaagcctaacgagcctggtgatagctggttgtccgagaaagaattttagttcaaccttaaaaataccccaaaaaccctaaattccaatgtatttttaagagatagtctaaaaaggtacagctttttagaaacggatacaaccttgactagagagtaaaatcttaatactaccatagtaggcctaaaagcagccatcaattgagaaagcgttaaagctcaacaaattcaccaacataatcccaaaaactaataacaaactcctagcccaatgccggactaatctattgaaacatagaagcaataatgttaatatgagtaacaagaagcctttctcctcgcacacgcttacatcagtaactaataatatactgataattaacaatcaataaaccaaaacaacactaaagcgtatattaattatatggttaacccaacacaggagtgcaccaaggaaagattacaggatgtaaaggactcggaaacacaaccccgc

SEQ ID NO: 7523 - DNA, 943 bp, Homo Sapiens
cggtccggaattcccgggatgtttgtatgaagtgagtttttctaacacttctgtctctcagttccacaaaccagagtcactgcctgctgtggaccctgctttcctggctcctgtgatggagccccagagtagtttgactctaggcagtttaaggctctgcagtttgcaatcactactaatggagaaattcattttccctgcagtttaaagctcatgcatcattctactaccctctcttatgtgaaattatgcaatttgacttgattcctgaacttcgtgctgttcttagaagattttttctgcgaatcggagtagtttttcagatatcacaaccacctgaacaggaacttggaataaacaagcaatgatgggaacttaatatttttgttggcatttacatccctctgctctttaaaaggacgctggagctgaggtttcctacctgaaaaatgatttctctggattgcagtgtctgagttactggtaaagatgcttagaagtcttactcaaacttgcaacactccagtcccttttagtgctggtggattttgtgtgttatattggcctcatgttgagcagaaagcctgtttaaacagtgtcagctcatgctcacgggtccttccctgtcttccacggcaggaaaagccccacgtttttggcaggtgtggaagtgaaacttacccaaagaactatagatgtaaagattgaacttctacaagaagtacaactcaggagagctgtattttgaaggataaaatgtttataattggggagtggggagagaagaagaaattattgttcatggtaaaagatatttagcaactatggtattcttattctgaagatttttgcacactcaggctatctgagatactggtaatcatcctgtgaaaaatgtacagagatgcaggtctgtaatataaaaatcttaaaacattaaaaa

SEQ ID NO: 7524 - DNA, 286 bp, Homo Sapiens
gcacgagcaggaaggctctgacagagttaatgaattgggtctcagagggtaaagtccagtgtcatgaatacgtcactgaaggatttgagaaaatgcccgcagcatttatgggaatgttgaaaggagaaaatctggggaagaccatagtgaaagcatgaaaataaaaatggcccacggatcgtccctggagggttagctttttaccattcagtgcaagtgtatactgtcctatgtaagatgtaacagcaatgcgtttgacctagctaataaaacatgtgtgtttttt

SEQ ID NO: 7525 - DNA, 439 bp, Homo Sapiens
  misc_feature (156)..(156): n is a, c, g, or t
acagacccaccaaggaccatttgcacccgaaggcatgacaatgggctcaatagggtctgtgctgagggcaacctggtggtggccggctctggagacctgtcgctagaggtctggagcctgcaggcctgagcaggtgggcgtggatgtggataatgncctgccggaaggctgggcttccctcccctgttctttgggggaccatccccaatgttggtgctgcctcagccccgtgggcctagggcacaaggagtcccagccacattcgggtgagcgtcctggcctgggccctatgcccgggggaagggtgaaattggggttacaggcccacccagggggccgcttcccactcttgggccctggttttgttatgatttggatgcccagctctcagttgagagcgaaggagaaataaacctgacatgttggtgcttgggaaaaa

SEQ ID NO: 7526 - DNA, 437 bp, Homo Sapiens
gtgcccagtgctgcagagcagcgagctggagggaacgccagaggtgtcctgccgggctctggagctcttcgactggctcggcgccgtcttcagtaatgtcgacctaaataatgagcctaataatttcatatcaacctattgctgtcctgagccaagcacagtggtggcaaaagcttatttgtgtacaatcactggcttcatacttccagagaagatctgtctcctattggaacatctctgtcactactttgatgaaccgaagttagctccatgggttacactgtccgttcaaggctttgcagacagccctgtttcttgggaaaaaaatgaacatggttttcgaaaaggaggagaacatttatataactttgtgatttttaataatcaggactattggcttcagatggctgttggggcaaatgatcactgtccaccat

SEQ ID NO: 7527 - DNA, 119 bp, Homo Sapiens
tgagcattcaagtctggcgagagagattgtttctagatgagggtgggggcgggtgtccttagcccaaagcttgtgccagtctctatcagaaataaatgcccccaaaacctcaaaaaaaa

SEQ ID NO: 7528 - DNA, 367 bp, Homo Sapiens
ccagtagtaaacgtctttattcttccgtgacgtcgcacacccaagccacctcccgcggactctccgtctggcagtcccacccagtgagggtagaggcggtggagggcccacccaaggccggctcttccaagcaccacaaatcctctcctcgcccaggtccctttccccctttctggccttcgtggggacaccttcagagtccccaaggaaggctgtgctgatagcctcactcaacccagcttttcaaagttctgcaggaggcaaagggcaagcccagagattagggttagagaccaaagacaagcggtcgttacccctaatatccaaggggaggggacgggagggggctttttgtaaaaatgcccct

SEQ ID NO: 7529 - DNA, 687 bp, Homo Sapiens
  misc_feature (227)..(241): n is a, c, g, or t
tctttgcctcctccccagatgggcctctcagctcccacaatctctggcctccaggatgagctatcccatcttcaggagttattacggaaatggacaccaagaatatctcctgaggatcactccaagaaaagagatccacataccattctcaatcccactgaaattgctggcattctcaaaggcagggcagagggggatctggggtacaggagggttctgtctaatcnnnnnnnnnnnnnnnggtatctgcacttgcagcctcagctttcacacttcagcccttaagttcactaagaaggtctgagtttctgctgcagatagtggtgttaactgctccaactcttgtcttgcttagtttctacaaatatttttgcttcttgtcatttgaaggattaagaaacaaaaacaatccagaaattgatcggtttttttaggccaatcccatcccttctggataaccagatgttaaatcatgagatcagagatgctgttcatcagtcccaacaagatggcctagaaatcgcattctcacctcgccttgctgctgctttaattccaagttctatttcttcccttatagttttctatgggaatgaggcggatacaggaaacaccctatctcctctgtatttttgtagtggaatttctatttaaggggctcattaaagcatagtatttatacacaaa

SEQ ID NO: 7530 - DNA, 808 bp, Homo Sapiens
tcagtaaatggcgtactttgtctatccattggccaacctgaaggaaatgaaactcacctatctttctatcacagatgaatgtgctagatgaatgatttgggttgtatctgatcatggttcacaaaaattatgttagtgtgttttcagtatgctaaaaagtcagagtgatacaaaagtgatatttaaaaatatacacacatgtatgtacacatgcttcagaaatattgttgcttagggtgatttgggcagctaaatagtaagtactttttaaaatttttgcatcatcatcttcctatttaatgaattgtgatttaaaacaaaatgaaaataagccaggtattctaaaagatcctggatacaaattaagaattttgctttattttaaaccaaattgagattaaattgaagaaaagcaagcaaattaatttcagcttgattatcaacctgtatcaagaacaaaaatgggaggaggtgtccacatttatggtgtgtataggtaacatggggaaaatgctattctgtgttttggaaaagaagaaatagtgccgtcctatttatttctatatttagaaatttttctcaaagaaatttcaattgtatctatgagatgggtttctaagtatcttattgtgtgttataagtgccttttaatatcatactaagtgtgagcttctggacattttcaagagcttacaaaaactaagtggcattgtatttttataaccccattgagaagactaagtaagaaatgaaatgtcctatcaattttattttgtcatgcttcaaacaataaagacatttctgcttt

SEQ ID NO: 7531 - DNA, 1454 bp, Homo Sapiens
  misc_feature (1178)..(1346): n is a, c, g, or t
  misc_feature (1357)..(1371): n is a, c, g, or t
cccgggcaatattatcccccgcggaaaatatccgatcagcaccacaaacgctgatccagccagtgatgcactgaggctaactccacgggagcccaggagctctggccggcaggtccatggcacaggcatcggaagactgcaaaactgctggacttaccctgggctgcagtccattgtcggcccctgggttgaatcaagatagtacttgcagctagatggatgcttttagccagggacattgtgaggggaagattcctccacaccagtctggcctgtggtgtctgtctcctccctgagaccacagcttctccagtagcagactcatgggcgccaccaagtggaagcacctggagcggctctgccatccagtggggaagccaggccccgagacggaggtgggggcagcacgtgccctccacagcaccgcttacccgagctcagacagcccaggcctcctggcccagccctgactggacagtgcatctccacctcaaccgggaagctggaatcctcctgcccgagaggaagcagacggcacagggacacccctgccaccttgggatctgcctccaagactggtgcagggtatcgagagtggattccagatggagtgtcctggtcccagcactgcagcagtcctggtagctctgcagaggagacaggaacccgagaagtagctgaagcagaagccagacgcagtcgcccttgccacataggaggcgggcttctcccagccatggtgtcccctctgcctcccctcccccgaccctcctgccttccgcgtggagggtggtggtcctgtagtgtcagcaccagcaccatgggcttggaccccctccctggacacaggcaggtgtcctagggctgggggtgcagcccgagggaatggagaccacactcatggctcagggtctgccggggccggcagggggttggggaagaagagggctcaggcccagcaggggtggaagcccctgccactgccactacccgctccagagctttaaggaaaatgaagtgagacccctccccttaggcctggggagccatagggctggcttctctgtgggtgcgtggacgtggggttgggagctgggaatctattttttgtattatgttttgagctactgtagttttggcgtggcactattgtaatggaaataaaatacttgtacggnnnnnnnnnnnnnnnnnnnnnnnnnnnnnnnnnnnnnnnnnnnnnnnnnnnnnnnnnnnnnnnnnnnnnnnnnnnnnnnnnnnnnnnnnnnnnnnnnnnnnnnnnnnnnnnnnnnnnnnnnnnnnnnnnnnnnnnnnnnnnnnnnnnnnnnnnnnnnnnnnnnnnnnnnttttgggccgnnnnnnnnnnnnnnnaaaaaatttttttaaaaccttttttgtgggggccgccggcccccaaaagaaaaaagagaaagggggcaaaagccggtttctcc

SEQ ID NO: 7532 - DNA, 812 bp, Homo Sapiens
gatactagtcagaaggcccaggaagttggcattgcagtaccagctcagtgagaaggaaagagagcagcagaaacttctataggagatccaactgatgttaacatatggtggacaccctcctggtcccctggcccctttcctgtcacccagatttggtatgtggcaaatctaaacatttgcaaattcacagtcgtattcagtcatccggcacattatgaacttccactggcgatccctttccactgcagagaaagtggttgttgctcctcggatatagtaatcataattgtaggaaatcatgtccatttcctcaccatagtgacctggatattctgttgttagccagcaggaatatgggcacctcttgctgtagcgacaacagtaaaactgccactcccgatccagcactgactcgaagtagcggctctggaatcctgccaccagcccattgttggagcacgtctggtaccattccatgccagccctgttgatctcctcccaccagcactccgtgggttccccgaggctctgtggcgtgggcatgcaggcgtagttccattgtctgtcagaaccttccttcttgctgaagatgctcctcacggccactatcacctgcccctggggacactggtagctgaagccttgccggttcaaattcacccacccatcatcgctgtagtcatgatactgctggtatgggtatccataatcgccatactggccccagcccatggtgactaggggcagaagtacccagagaagactgaggtccatgctgcctgggatttgatcctacgactccgaccgtacct

SEQ ID NO: 7533 - DNA, 146 bp, Homo Sapiens
ctacattgaaaatagaaactgcttcctttcttctttccagtcagctattggtctttccagctgttataatctaaagtattcttatgatctgtgtaagctctgaatgaacttctttactcaataaaattaattttttggcttcttaa

SEQ ID NO: 7534 - DNA, 596 bp, Homo Sapiens
  misc_feature (407)..(470): n is a, c, g, or t
aggctggtacgcgtcgcgtttccgggatatcgtcgaccacgcgtcgctcaactcaaccttctcgcctggcccctacccacatcctgccaccacccgaggggaccgcaagcaaaagaagagagaccagaacaagtcggcggctctgaggtaccgccagcggaagcgggcagagggtgaggccctggagggcgagtgccaggggctggaggcacggaatcgcgagctgaaggaacgggcagagtccgtggagcgcgagatccagtacgtcaagggacctgctcatcgaggtttacaaggcccggagccagaggacccgtagctgctagaagggcaggggtgtggcttctgggggctggtcttcagctctggcgccttcatccccctgcctctaccttcattccaaaccnnnnnnnnnnnnnnnnnnnnnnnnnnnnnnnnnnnnnnnnnnnnnnnnnnnnnnnnnnnnnnnncatctataacgttattattttcagtggtgtgcagcatttttgcttcatgagtatgacctaggtatagagatctgataacttgaattcagaatattaagaaaatgaagtaactgattttctaaaaaa

SEQ ID NO: 7535 - DNA, 397 bp, Homo Sapiens
  misc_feature (155)..(155): n is a, c, g, or t
gacactgggaccagaatgagcgttacctggtggtgctcaacttccgagattcgggccggtcagccaggctaggggctccaacctccctgctggcataagctgccagccagcgctaaacttttgcttagtaccgacagttgcccggcaaagccgtngaggaggacacctccctgaagctggaaaacctgagcctgaatccttatgagggcttgctgttacaagttcccctttgtggcctgatccttcctatgcagaacctaccaccctcctttgttctccccaggccttttggattctaagtcttcctctccttgtttttaaacttttgcagattacatacgaattcttatactgggtgtttttgtcttcaaataaaaacatcacccctgcctcatga

SEQ ID NO: 7536 - DNA, 859 bp, Homo Sapiens
  misc_feature (18)..(18): n is a, c, g, or t
  misc_feature (51)..(51): n is a, c, g, or t
  misc_feature (60)..(60): n is a, c, g, or t
  misc_feature (94)..(94): n is a, c, g, or t
  misc_feature (500)..(508): n is a, c, g, or t
ccccccaaaggggtaacnttagaaagcctttgcatccctttttccttgggntaaagtaanttaacttctggtccaaattgccaggaaaccatcnagggcacccacagtgcatgaaaaatcttttcacaagctagaaattgaaagggccttgggtatagagagcagctcagaagtcatcccagccctctgaatctcctgtgctatgttttatttcttaccgtttaatttttccagcatttccaccatgggcattcaggctctccacactcttcactattatctcttggtcagaggactccaataacagccaggtttacatgaactgtgtttgttcattctgacctaaggggtttagataatcagtaaccataacccctgaagctgtgactgccaaacatctcaaatgaaatgttgtggccatcagagactcaaaaggaagtaaggattttacaagacagagttataaaaatggttttgtccaaaatatagttgttgttgannnnnnnnnaagttttctaagcaatatttttcaagccagaagtcctctaagtcttgccagtacaaggtagtcttgtgaagaaaagttgaatactgttttgttttcatctcaaggggttccctgggtcttgaactactttaataataactagaaaaaccacttctgattttccttcagtgatgtgcttttggtgaaagaattaatgaactccagtacctgaaagtgaaagatttgattttgtttccatcttctgtaatcttccaaagaattatatctttgtaaatctctcaatactcaatctactgtaagtacccagggaggctatttcctaaacaaaaaatctacatctaggtctctcta

SEQ ID NO: 7537 - DNA, 648 bp, Homo Sapiens
ttgattcttcagctgtggcctctggtactcccttagaggctttcctagctggtcaggatgccccgtgctgccagggaccctcaagcccctcaagcctcactgatctggtgacactttgaagcacctcaattcttcccccagacaacatcttaggactcttctagccagacacatgctatcctgcaagtgagcctagcagtggcagatgacgtcagctctgggccagcccctgaaggaaggcagatcaaatttgtccagaccccagaggtagccgtcctcacggttgccctctgtccaaggcagcctgtgactgagcatctggtggtcaggcagggccactgtcttgccgaagtcaatcatccagaccttggccaggcagtgtggtcatgcacaaagagaagggaactgcccactacctgcagcagagagtgagagaaaagcagttagagaaaggagcaagcactagctaatgtatttcccggtgagcagtaaacagggtggtaagacagcagaaactctggaatgaggctacccacgttcaaatcctgactctgattctacataaacagaataattgtataattacatgtaatgggcataaatcatttcaaatggttcctgaaacacaacaaatacacaatgaatgtt

SEQ ID NO: 7538 - DNA, 686 bp, Homo Sapiens
agactgtagtgtgaggctcgcgcgggcagtggccatggagcccgtgctgaacgagctggtgtctgtggaggacctgctgaagtttgaaaagaaatttcagtctgagaaggcagcaggctccggtgtccaagagcacgcagtttgagtacacctggtgcctggtgcggagcaagtacaatgacgacatccgtaaaggcatcgtgctgctagaggagctcatgcccaaagggagcaaggaggaacagcgggattacgtcttatacctggccgtggggaactaccggctcaaggaatacgagaaggccttaaagtacgtccgcgggttgctgcagacagagccccagaacaaccaggccaaggaactggagcggctcattgacaaggccatgaagaaagatggactcgtgggcatggccatcgtgggaggcatggccctgggtgtggcgggactggccggactcatcggacttgctgtgtccaagtccaaatcctgaaggagacgcgggagcccacggagaacgctccaggagggcctgtccatcctcgctgtcctttccctgttctccccctgccccccgtctctatcctctgtggccttcagctaatttctgctcccctgagattcgtccttcagccccatcatgtgctttgggatgagtgtaaataaaacggggctgtggcttggg

SEQ ID NO: 7539 - DNA, 566 bp, Homo Sapiens
ttacagattttataatagtttatatttgcacacaaattctgccacattgttcagtaccaccaaagtaaaattcttgaatctttcattgaaaatgaaaaacccatctgtcacctgttcccagtaaaaaactgattgttctatgaaatcggctgttttagtcagataggaactgaagtttgaaagacagcctttccaagttgccaggtcatcaaataatgaccattctaggaacatggtaggaccaaagacaatgacaaggccaagcagaaggattagcaaaaataacttataaaagctccagggaatcttgctaatgaatgtgccagtgtcttgaggcaaagaaagtttatccacatccgactaagttttatgtccttcccactgactggtatcaaagttcttcattaaagggcttgcagccaaattagagggaggtcaaggagtttccttgattactgtgattttctctctaaactcctgcatctgttgcagaaatacaatggcttctgacacatctttgaaagcctcagcacgtgttaaagaccatccgttacgctggaatggat

SEQ ID NO: 7540 - DNA, 1032 bp, Homo Sapiens
ccagtaactatcacgggccttacgtagcgaggcctgggtggcgaattcggcacgagggccacttctggttctagcacttctcttttgttaagatagggtttggatttagtatgaagctttggctaaaacccttgggtttgccttagaacactgacactaagaacctggaatgacatggggaggacaaagagagctcaagaggaatgctttgtgagaagtggattctctccgtgtccctgccccccacccaaacttgaactatacctattacatttccaggcagtatccctaagatgagatcctggagaaaggactaggggaagtatctttctggatgcttgtggtcccagaagggtactttctgtgtcataccatgccacttctttaagctcttcagggcagccaaagccagcccttttctcctactgcccccaggagaaatagcactcttctcccttcccccagatggcaagggctctgggcctccctaaaacctcataccctgcctgcctcctccaggaggaatctccggggccccttcctgactctccaccacttcgccacttgtactctaggctatgggacaatcatcccattcaccacttgacatccttgacatccttgactttcattcccccaaactccagcaggttggacccaatcctcttcacctctgtggttttcttctagaagatgcattatgggtctgagaggagcattttcctggaaggccatcttttaaggccctgcattgctgtcatagtgcagagcagaaacttggcacactattagagagctccctttccacctctctgccaagccttgttacctcattctgctctggccatggctgtgaagggcccagccagctcctgtttagatagttctgtgcaacagctccgggtctggtgactggagatcctcaaaggcctggagccagatgaagtctggcactaatgagcagacctgccggcagaagaagctgatgtgaaattcccaaatctgaggttacaactcgcgtattaagcctcc

SEQ ID NO: 7541 - DNA, 275 bp, Homo Sapiens
tctgtgtttacggcttggcacaacaccctcatatttttttcagctttctgttccaaatgagcccaaaggaaacacaagttctaggtccaatggttctgctcaaacctgaacatcattcttggggccagcatctcccacatgcccacccaacacacacaattttaaaaagtaaactttttaaaaagagtaatagcattttttgttgttgttaatcagtagataatgcttgaactgagttgatacattgaaaattaaaatacttgtgtataacaata

SEQ ID NO: 7542 - DNA, 403 bp, Homo Sapiens
agctgaggcctctaaagaggctgaaccggagccggagccagagccagagctggaacccgaggctgaagcagaaccagagccggaactggagccagaaccggacccagagcccgagcccgacttcgaggaaagggacgagtccgaagattcctgaaggccagagctctgacaggcggtgccccgcccatgctggataggacctgagatgctgctggagctgaatcggatgccaccaaggctcggtccagcccagtaccgctggaagtgaataaactccggagggtcggacgggacctgggctctctccacgattctggctgtttgcccaggaacttagggtgggtacctctgagtcccagggacctgggcaggcccaagcccaccacgagcatcatccagtctc

SEQ ID NO: 7543 - DNA, 389 bp, Homo Sapiens
  misc_feature (43)..(43): n is a, c, g, or t
  misc_feature (66)..(131): n is a, c, g, or t
ggtttctcctgtgtggccctggctgtccctggaacttgttctnttgaccaaggctggccttgaaannnnnnnnnnnnnnnnnnnnnnnnnnnnnnnnnnnnnnnnnnnnnnnnnnnnnnnnnnnnnnnnnnccttcagagcatcttttaagaggattctttctgagcaaatttcaggttatgaggtagattctaattggtcaatgaggtaacattctcagggatttctaactcaagtgatcagacagaaaatattttctagttattatgtgtaaaatgttactatttttctgatgaccattctgatacaactgcttttcatgtcaaatatctactgtgcccaaatgtatttgatttaaaccattctaaaataaatatgacacgattctt

SEQ ID NO: 7544 - DNA, 930 bp, Homo Sapiens
gtagtgatatatgtgctagcaggagtcagctatccaacctcgtcaaaccttctgcaacaatacaagaccctagcgtatccattccagagtcttctgtacttgctttgggctctgagtacaatttcagctttgacaggattgacttggctaaaatatcagtagcaatccgaaatttttgggccctggatcctacagctttagcatctttcttgtactttactgctcttatactatctctgagtcagcaaatgacaagtgacagaatccacctttacacaccttcttctgttaatggtagcctctgggaagcaggaattgaggaacagattctccagccatggattgtggtgaatctcgtggtggctcttctggttggattatcttggctatttttgtcttataggccaggcatggatcttagtgaagagttaatgttctcctcagaggtggaagaatatcctgataaagagaaagaaatcaaagcctcttcataataccagctcacctttggaggaataatgacccagtatttgtcccatttttgtttttaaatgtatttttataagatgtatacatgtgtatttgtaatagattttttgattatataatactgaaacatctctcaatattatgaaaaatgttaaaattgtgtttgctgtttatgtctaaacattaatttgtctagcattatcatcttaatgacaaagggaataatgaactagaaaccagcaagtgaaagtgtttatttcctattttctcaaaacagttgtatttataactattaccttaaaaagcactggtttagaaaaagccataacttaaatagtgttataaaatatatatcaggtttaaacataaatttagcgaatatggtagaagggaaaaaagccttcatttttgacctccccttactgaataaattgaaatatg

SEQ ID NO: 7545 - DNA, 208 bp, Homo Sapiens
  misc_feature (29)..(30): n is a, c, g, or t
cagcagcgcttcggggccatggggggagnngcccccgccgctgccggcggggaactccgcagcccaccgccacccccaccctcaaccaactgctcacgtcgcccagctcggcccggggctaccagggctaccccgggggcgactacagtggcgggccccaggacgggggcgccggcaagggcccggcggacatggcctcgcagtgttg

SEQ ID NO: 7546 - DNA, 979 bp, Homo Sapiens
  misc_feature (182)..(190): n is a, c, g, or t
  misc_feature (287)..(295): n is a, c, g, or t
  misc_feature (608)..(628): n is a, c, g, or t
  misc_feature (747)..(762): n is a, c, g, or t
  misc_feature (792)..(869): n is a, c, g, or t
ttgggggaggagggcccgcaaagggtttttgcgccgaatttttgtctcccaataatatattcccacgaaaaatggggcgtgtgtatccggggagaaaaacgtgggcccctatatttcggcgaaaaaagggggttattggaggaaataaaggtgtttgttgtggtttcaggcccaaatccccnnnnnnnnnaggttttcgccccggagttttggatttttaaaagcgggggccccaaaatggggagccgactttttcttgtggcgccccccacgttttgtggcccccnnnnnnnnnaaaaaaattgaattatgccccaaagggggcgcacacaagggggtatggaaattcccccgcggggacggaatgttaaaggtgttctctaccaaacccgcggtttgggggggaggggtttcccaaatggcggcagagaaatgtgttaattgaaatttcccccaggtcattctcgaaaggagggggacaggggcggggggtaaaattttagttatggggctcggcctggggcccccggtggataaatcccccgaagaggccctccaggaatcccctttggagatttgtttagagaacgctctgggtgggccccgcnnnnnnnnnnnnnnnnnnnnnaaatccaggccctttgtcctttggccaggtgtttcttgggaaagccaatataagggccaatttccgtgtcctatatggggcgccggggccacaaacaaaaagttttggaaggttttctnnnnnnnnnnnnnnnnccggcaaggatttttttttgttggttgtgnnnnnnnnnnnnnnnnnnnnnnnnnnnnnnnnnnnnnnnnnnnnnnnnnnnnnnnnnnnnnnnnnnnnnnnnnnnnnnctgctgtttaattgatctcaaggaaggagaaattcaagtccacaaaaacttacatcaattctgtttatcacatacaaaactaaacatacaatataacagcaaaataacaa

SEQ ID NO: 7547 - DNA, 1393 bp, Homo Sapiens
  misc_feature (265)..(274): n is a, c, g, or t
  misc_feature (531)..(548): n is a, c, g, or t
  misc_feature (597)..(644): n is a, c, g, or t
ggcgagagaagtgtggggtggtgatcgaccgcggggcggaaatcgtggggggtgattctgcgccaaaccccccggtgggtggggagagaatggttccacagatatgtgtgcgagcgagaaaatgttatgaagagacggggcgcacaaagcataaatcttcgctggtgtgggacaccagcggccgggggcggttgtaatttttgacgggtccgcggggcctcccggttctgcgggcccgcccccgtgcgggaaggggggccccgcnnnnnnnnnncccctaaagaggaataggcgtgtgtagaaagatggggtgtaaaaagaagaaactgcggggggtaaccacaacgcgcgggcgagttgtttattttacaagggggagagggggacaccaggggcccccttgttctcgcgggggcagaagggttttgtcgttagggaaacacaaggggttggtaccgcaagggtgtaaattaccgcgcccggggggccggccggccccccagacaaaaggggttaagaaaagaatttttnnnnnnnnnnnnnnnnnnagcacaagcgcgattggttggttttgttccactatacgggtaggcggtnnnnnnnnnnnnnnnnnnnnnnnnnnnnnnnnnnnnnnnnnnnnnnnngttgagttcgcctagaaggggggtgtcgtttttgagtagaattgcaattttgtttttctccggagaagttgtttcttcagtccttaacggtgccgctccttatatgggctttggtggaggtcatggggcagcacctgcaggtatacgttggggtggaggtgttcggtccttgcctgcttcatgagctcaattcctcaccactgtgctgtgaatggcacaactcacatggtaaggtagcttcacatccagcctgggaagtacacaggcgtcaaggatgctcatttcagaaacatcgctgactgctgcggcctctacgtttcaaatgatgaatttcttagtagccttgtcattgggcacacaacaaccacagttcatacagcaaatgggctgcagtgaccagtgcacacctggttgtggacctctttggcacgaccattgcttcttctttgttatcttggaggtgcaggcccaagaaagatgaagtaaaaatcttaatttgagggtgactaaatgaatccttcaagaccacttaccccaaatccacattctgcaagacagttcaagaagaaaggcaaagtagccatctatctcaaggggctatgggctccacaatacttagcacttgtccccaagtgtaaacacttcccatggcgtgcttcttccgtctcccaggttaggcacaacgatgccaaggtgctgtcatcgacactcccatcctttaagaatttcaggccagttgtggtgctcat

SEQ ID NO: 7548 - DNA, 835 bp, Homo Sapiens
tgggacagacacacgaccacgcggcgccaccgcccacgccgtccacccaccggcgcccaagtcctccccgcgccgactcctctgtatggcacaaactttcctcccgggacggaacacgcatgcctcagggagcccgcgaccgcgccttctcctccgccggtcccatacgcatgctgaaagtgggttgcggattgaacaagttagagaaacgtgatgaaaaacggcctgggaatatttattcaactttgaagaggcctcaggtggaaaccaagatagatgtgtccgtatgaataccgcttcctggagttcaacgactctgagtgctgcggagctccctgggtcctcagcagtgaggcttggactccctgctgtgaccttgcccgcaccagctcctggagctggtaccagcaagggcattctcgctggcggacctgcaagccatttcgtgcagaccagccatgagcggggagaaagaatccacctggaagcacaatctttagagccatcctgatcaagcaaaaccgcgaagatctcagaaaactgagtcttacacaatgaagtgctacatcttggacattagactgcttgttcctccattagagcagccgactgaccagtaaatcaatccaagagttcaataaggaaagatacaagtgaggctagcaaacgcccaagagactgaaaatacagtggggtggtaatacctcaagaaaccaaacctcatgtgaactagggaagcaagcagtgctccaggtggtctactgacaacaagaccggaggatgcacaaagaagataaaacgcacgtggcgactcaccagtcactgaagaagaaaa

SEQ ID NO: 7549 - DNA, 989 bp, Homo Sapiens
  misc_feature (628)..(628): n is a, c, g, or t
cactggcctgagggtggtactacgtcaaactcaaagacagtgagaagaaccgcaagctctttgatctcttggatgtgctggagtttaaccaggtgataatcttcgtcaagtcagtgcagcgctgcatggccctggcccagctcctcgtggagcagaacttcccggccatcgccatccaccggggcatggcccaggaggagcgcctgtcacgctatcagcagttcaaggatttccagcggcggatcctggtggccaccaatctgtttggccgggggatggacatcgagcgagtcaacatcgtctttaactacgacatgcctgaggactcggacacctacctgcaccgggtggcccgggcgggtcgctttggcaccaaaggcctagccatcacttttgtgtctgacgagaatgatgccaaaatcctcaatgacgtccaggaccggtttgaagttaatgtggcagaacttccagaggaaatcgacatctccacatacatcgagcagagccggtaaccaccacgtgccagagccgcccacccggagccgcccgcatgcagcttcacctcccctttccaggcgccactgttgagaagctagagattgtatgagaataaacttgttattacganccaaccaacccccaaaaccctaatccccttgtggggccgctctcgggccctcgaggaagcttttctaaaccacttctttttggcagcgcgggccccaataggttaagtgaaacatgggccataacctgtttccctaaggaaattctggcccatgacataagggcctcgggaatcctcaccaaatacaaaaaaggcctcggcggccaacccggaggggttcttgaaccacatcccgagaggggagttcctgaaggggccattacgtgggaatctgattcagacgggggagtccccaggcggaaagtcacggaataaccaaaatgtaagcggcccggggccccttggcgacactacattgtga

SEQ ID NO: 7550 - DNA, 857 bp, Homo Sapiens
gcagagaaagaggaaacatagaggtgccaaaggaacaaagacataatgatgtcatccaagccaacaagccatgctgaagtaaatgaaaccatacccaacccttacccaccaagcagctttatggctcctggatttcaacagcctctgggttcaatcaacttagaaaaccaagctcagggtgctcagcgtgctcagccctacggcatcacatctccgggaatctttgctagcagtcaaccgggtcaaggaaatatacaaatgataaatccaagtgtgggaacagcagtaatgaactttaaagaagaagcaaaggcactaggggtgatccagatcatggttggattgatgcacattggtttcggaattgttttgtgtttaatatccttctcttttagagaagtattaggttttgcctctactgctgttattggtggatacccattctggggtggcctttcttttattatctctggctctctctctgtgtcagcatccaaggagctttcccgttgtctggtgaaaggcagcctgggaatgaacattgttagttctatcttggccttcattggagtgattctgctgctggtggatatgtgcatccatggggtagctggccaagactactgggccgtgctttctggaaaaggcatttcagccacgctgatgatcttctccctcttggagttcttcgtagcttgtgccacagcccattttgccaaccaagcaaacaccacaaccaatatgtctgtcctggttattccaaatatgtatgaaagcaaccctgtgacaccagcgtcttcttcagctcctcccagatgcaacaataattcagctaatgccctaaatagttcacgtaa

SEQ ID NO: 7551 - DNA, 552 bp, Homo Sapiens
  misc_feature (200)..(230): n is a, c, g, or t
gaacaatgtattgctgaaaatgggcagtagaagcaaatgctgttgttacatttgacctataaagtattcagagtgactgctaggtagaaattaaaacttagctttcccaaatagctccttattttgcaccttataaaaagtatactaattgttaattagatgttgcttttgtttatacaagcattcccaaagaactagannnnnnnnnnnnnnnnnnnnnnnnnnnnnnnaaaaattatcttatttagattgactaacagcatacttacaattttaaaagaagctgttgttcagttcatcttaccagatgtgtctggcgaagtattcagggtttgatggactgctttactttcgtttggaagtgatagctaagtttattatactctatattaaacaactttgttcatttcactgaggaccttatcttccttatatttcagaacaaagaagcaacaagcgtgaataaaaagacaaatgtatttgactccctcataatccccatctgtatgtgctacccttccttcaaatatataaatgtgcatctttttttct

SEQ ID NO: 7552 - DNA, 535 bp, Homo Sapiens
tctgctgatatttgttggatcaaaatggcttctagatactaaatgccacttaattcagcactattcttggttggtctgtataagtaacactttaaaacttgcagctctggaaagacagaactttactaacaaagtagaaagtgatttcaaagtatcttccacaaaagattgtactggtaggcggttgacaacattctgtgcgatctactttcaaatttctagagaaaatcattttggaatactactgtactgattcttggccttcgttgtctctaaaagtgctgattttaacattatcttaaaactgtccagtttgaattgagcttgtttacatcaatatacatattgaaaatgcctggtgtagaaaactcaacatgtgctgaatacggagtgtacttcccttcaactacctaaaaggctgaactttggttaaatcttaaagaaatggtcccaacagcttaacttcattttttttaatgatagttgaatgtgtttcccataaaaatttcttttaaaaagaggcaactgattaaaa

SEQ ID NO: 7553 - DNA, 2065 bp, Homo Sapiens
  misc_feature (108)..(124): n is a, c, g, or t
agacttcaagctttgaaaactatgaagcaacactgagatgtccaggatctgtgactgaagacatttctgattatttctgtcctggcagcatgttccagctcttgatgnnnnnnnnnnnnnnnnnagaagaaaaattaagtacagaaaagcccagatttaaatacatttaatatgtcattttaaaaatgattttaataattcatttcttaaaacactgaatgaattttgaagcttaatgtttttaaaggcatagttttatctttgacatctaatttaccatcaagttgtaaaattatttggaaaaatacagaactccgttttatttgtatacttatatggaatctgcatgtgaggtgtttgagggcatatgtttgaaagagggagcatcaccacaggaatcctttctgtgaggtggaaacagtggtcctgaatcattgtgctcacacctaacttgaaatctggtcttactttcatgctgttatgatttcacctggtgaatcagtgttttaaataagaaaggtaatagttggtaaggccaatgttatttaaatgaaagtagttagaaaaatgctctcctattctaccaaatttttaatttctttcttccctttcttgctacacagtgatcaagagtttctcatagtgctttgaagttagaaattatgtataggatattttaaatcattgagtatgtggggtaaaaaaggtagtcgttcttttgttctttggaaaaatccgtgtctttatctttttttcccacgtggtagatatgatcccattggaggtaaattgtagcttcttctcattcatgcagtaaataatacatcctttcactcagcagagatggccataataaacacgttttgctatgttaaaagtggcagaacaggaaagacgaattaaaaataacattttttaagcgacataaggatgaaatactgatgaatctctgtgacattacagggaaaaaaatatagttttctatctctttcaagggcagaagagttttcatttttaattttgtaattttatctgtaagtcataaatattacttaatcaggcctgattctacttttgaaaattacagttcttgaaatgcagataatgtttactttgaaaacaaatgtcatgaatgatttccagtttttaaagctatatgtttcactgcttcatatctctgtccactttctgaatgagaacttattttgtgcctagagctctcactcactgataatgcttattaccttctgggcatttattccaaagtgggatcaactgtacgcctttggtatctgaccataaagtcttttgctccgctgacatttgggtgatgtcttcacatggaaatataataaaaataaaaatctagtttaatactgcattatttattttcctaaggctaaagaggagcagtcctatgcttttattcagcatcctttatctgtgacttcatgctctgataactgcctttccttccttctgtgcctttgaatacaaatttcagttctgcaaaagtgaaacattaaacattgccaacgcaaatggcgggggaatgacgccaaaccggcgccggggggccctcgtactcgccctgtatcccgaatttacgccttgctcgggccgcctttgtccccccccaaaaaaaccctcctcctataaccattccccgttatggtactcccgcgctttcccccccgttttggcctaaggcgcgataacactcggcgccataaagctgtgatcccccttttgtataccccccccttgcttttttgacccctcaagggcttttgccacctcttcccccgcagtataaaaatcaccggctccggcctgattgacttgcacaggcattatattaaaaaacaataccccgacagaggaatttaatgtaacagtcccatcttaacgggccactcccttttctttttggggtatacccccactcctctcccttctttattctcgcaatatttatgctgtcccaacatcgcccacccccttttttaacagtgattgcccccactattcgccctcgcgtgcactcccccggcgctacaccgcg

SEQ ID NO: 7554 - DNA, 237 bp, Homo Sapiens
ataaacaccaggtggcatcgataaacaccaggtggcatcgataaacaccaggtggcatcgataaacaccaggtggcatcgataaacacccgtggcatcgataaacaccagtggcatcgataaacaccagtggcatcgataaacaccagtggcatcgataaacactcagtggcatcgataaacaccagtggcatcgataaacaccagtggcatcgaaacaccagtggcatcgaaaaca

SEQ ID NO: 7555 - DNA, 902 bp, Homo Sapiens
gggaccggaatcggaagtggctgcgtcgtcgacgctgggctttcgggtcccgcgcccagagatgggctccaaggcaaagaagcgcgtgctgctgcccacccgcccagcgccccccacggtggagcagatcctggaggatgtgcggggtgcgccggcagaggatccagtgttcaccatcctggccccggaagaccccccagttcccttcaggatgatggaggatgcggaggccccgggagatgcagctctaccagcaaagccgggcctacgtggctgccaaccagcggctgcagcaggcgggcaactgtgctgaggcagaggtgtgagctcctgcagcgatgccggctgaggacctgtgagcgggacggtgtgcccagatgaatgcagtgcagcattaccggcagccgaggctgcctcctcaggctgacctctcgggtgcctgaaagtgcttgggcatgctgcacaagtgtggctcttgccatcccatggcttttccctgggggtcccgtcgggctccccatgactcgtgccttcacggggtccccaggctccactgtgggctgtatgacatcctgtgcgcctcctccctgatgctgggcgcctgcggttcatcccgttcgtcttcattccattgcctggtgttgggtgcgggaccctaatccaactctgggcttcctgtccttgcgttggaccttggagtggggcccctacttggcggctctcttggcgatctcatgtgtttcggggcccctttcacttggcctggtctctgtgacttcctgtccgccacgctccacatgttgcgctcgcttgcttcttgcccctgggggtcccctggggaccacggtgccaccttccttcctccttccggggccacggcgctcgcctgtccacttcctgag

SEQ ID NO: 7556 - DNA, 243 bp, Homo Sapiens
  misc_feature (109)..(109): n is a, c, g, or t
ttccgctgtgggggcggtaagaaacataggcaggtcaatgaagatgaactgtgacagaagagccggcagtgcccacgggtgcatgggcaccagcgatgaccaccttccncacagctgcgcaccacagaccccagcttctctataacaccccactccctgttccaaattgaggagcatgtgtagcctcatccccctggttttcaatgaatccttgtataagcaactgccaatgaaatcgggctc

SEQ ID NO: 7557 - DNA, 584 bp, Homo Sapiens
cactgcagtaaaacaaatgcacccaaccatccttcccctgcggagtatgtcgaggtgctccaggagctacagcggctggagagtcgcctccagcccttcttgcagcgctactacgaggttctgggtgctgctgccaccacggactacaataacaatcacgagggccgggaggaggatcagcggcttgatcaacttggtaggggagagcctgcgactgctgggcaacacctttgttgcactgtctgacctgcgctgcaatctggcctgcacgcccccacgacacctgcatgtggtccggcctatgtctcactacaccacccccatggtgctccagcaggcagccattcccatacagatcaatgtgggaaccactgtgaccatgacaggaaatgggactcggccccccccaactcccaatgcagaggcacctccccctggtcctgggcaggcctcatccgtggctccgtcttctaccaatgtcgagtcctcagctgagggggctcccccgccagggtccagctcccccgccagccaccagccacccgagggtcatccggatttcccaccagagtgtggaacccgtg

SEQ ID NO: 7558 - DNA, 605 bp, Homo Sapiens
agtgagactatctcatggagacaggaggtgacatgtgtcctgtctctggccccaggtcaccctgtactgcattggtggcttctccatagggagggggtcctatctcatagactccaaacttcatgatggcagggaggaatatctggatttgctcacccctgtattttcagagcctcacacagtgcctggaacatggtaaacatttaatactatctgtcaaaaacaaatgaatgaaagagcagatggaaagagccaatcctgcattgaagagatatccatggtggccctaaaactactcaaaccagatgtctcttcagctccactggaactgagctgatggcaaaccaccactccactcagcagaaggtcaagtgcaaaagtatttaaatagcacgaggtcccacaccccatcccaggacagcccccagcatcctgctccaacataagcagaaaaagacaatgaggtgcaaagagcttatctcctgggatggttcctgggtggtctgcattgccacacagcatcatgctttgatcactgaaggacaaggccccaaaagccctatttctcagcacagtcattaaaatcaccttggaaatcatactgc

SEQ ID NO: 7559 - DNA, 1326 bp, Homo Sapiens
cgtccggcgggggtcagaaccgggctccccagccatggaaaagttcctcagcgcctccgcccgggcccgctgtgcacactggcagcgaccaaaagcactttttggcagcaggcccagccccctcgtgggctctggtcattggtgaacgtaaacatttctcctgctcacttgagagccccttggcggagacaccgccgctggtgctcctgggcggcaccggatcccctcgggcaggagcagcagggagccccttcccgcctggctgaacagaccagctgtgccctgtgctcctgcgctctctgtgcctcgaagcccttcggccagatgtgggaccccctggccctctggctgcgtgtgcacacgccaggcggtggggccggctccttcctgcacagcacctctggcctggctgggccccctgtcccaagagcggtggggccctctgcctgaacttctgaactgctcactgactccttggccttttccgccaaaaacttcctaatctccagttcgatgctgtcgttgctgtccactgaactgctgtcatcagacagggagccggggctgggagctgggccctgggactccctggggaatggattcccttcggaggcagaggcggaggcgggtctcctcacccggaaggccagggccgcgtcctggctcgcggcaccctcctgcctcatcctctctgccgtgctatgccaaagacactggggggtttcttccacaggacacctcgccactgtcgtctcttggacttaggagaggcagctcgttcagcactggcgggcccctgtctttccagtctctccggaggcccgcccagctgctccaagaagtgcgtcttgggctgtggcatgaacctgaccgttcttcctgcacgcagccactgggcatccactgcacactgcttctgtgagcatttcagcattggaccttgacaagtccattgatggctgatgtcaacaggtccctcgtcaatgtccagggagcatgcttttgtcttcagagctctcgtttcgtcagtctaggcgccattgcctcgtctgtattagccactggccctgtgacatgcgagtgtacgaccagggcacccatggcggtgccctcccgctcgccagggcactcacatggcatttgaccactggatgggcaggtctcgcctctcatggccgggctcagcatctccactggctagtggtcggcatcctggctaccagtctttcaccacctcctgcattttcttgggcaggtggatggcactccctcgtgccgaattcgccacccaggtcctcgctaccaaagaaccgttatagttactga

SEQ ID NO: 7560 - DNA, 761 bp, Homo Sapiens
gtcatttaattcaaacaacatggcttgaaaagaatttttatttttgtttctagaaattatcttctttacctgggtattttagactgccattctttaatttcgccttcatgactcaagtaatgaaatgcaaagattctgtcaattaaaaatgtaagcattcaaatgcaaataaattaacataaatatttcagtattttaccataatcacattacaaaaaatctatcagtttatcaaaaagtgtaagttcacttcgctctatagtatgattgttatattagtagctcctgggtttggtatgtatctccctgttttcttcttgacagctagactgtttctttgcctgcttgggattccttctcatacccttttatctccagtgacattcacaaatcaattcctcatcatcttttgttgagcaaaactatttctcaatttcatacttaacagaagactgaaatacaacccagagaagtttgtaatcaatttgacataaaacctctcagcagtctttagggtataaataggggatatcataaaacctgttaaaaagagttgggaaaataagcctcatctaaacattgtatacctgcatacacttatttgcattaaatttattccattaaaaaggagaaaaaaagatagtgtctagttcaacattggctctcaagctaaatgttttctcagtttttctactatatctagtattcatggcagattaatacctgaaacagcacgcttcacaaataatatactgctggca

SEQ ID NO: 7561 - DNA, 1129 bp, Homo Sapiens
atctcccggcgtgcctggcagtgtggtggcctctgtgcgccgtctgcactcgttgcaggcgacgatgcagagggctgtaagtgtggtggcccgtctgggctttcgcctgcaggcattccccccggccttgtgtcgtccacttagttgcgcacaggaggtgctccgcaggacaccgctctatgacttccacctggcccacggcgggaaaatggtggcgtttgcgggttggagtctgccagtgcagtaccgggacagtcacactgactcgcacctgcacacacgccagcactgctcgctctttgacgtgtctcatatgctgcagaccaagatacttggtagtgaccgggtgaagctgatggagagtctagtggttggagacattgcagagctaagaccaaaccaggggacactgtcgctgtttaccaacgaggctggaggcatcttagatgacttgattgtaaccaatacttctgagggccacctgtatgtggtgtccaacgctggctgctgggagaaagatttggccctcatgcaggacaaggtcagggagcttcagaaccaggcagagatgtgggcctggaggtgttggataatgccctgctagctctgcaaggccccactgcagcccaggtactacaggccggcgtggcagatgacctgaggaaactgcccttcatgaccagtgctgtgatggaggtgtttggcgtgtctggctgccgcgtgacccgctgtggctacacaggagaggatggtgtggagatctcggtgccggtagcgggggcagttcacctggcaacagctattctgaaaaacccagaggtgaagctggcagggctggcagcccagggacagcctgcgcctggagggcaggctctgcctgtatgggaatgaccttgatgaacacctacacctgtggagggcagcctcatttggacactggggaaccgccgccgagctgctatggactcccctggagccaaggtcattgttccccacctgaagggcagggtgccacggaagccttgtggggttttaattgggaaggggcccccccggcgggaacctgaattattgcgcggaataggaggtggtcccaaaatgggccttgtccataaacgttctatccccc

SEQ ID NO: 7562 - DNA, 717 bp, Homo Sapiens
atacggctaggtacgaggccgggtggtaatcggcacgaggcaggtacagagccccaggccagagaactctctggagcgggaggagatgggtcccgtgccagcgcacacggatgccttccaggactgggggcctggcagcatggcccacgtctctgtggtccctgtctcctcagaagggacccccagcagggagccagtggcttcaggcagctggacccctaaggctgaggaacccatccatgccaccatggacccccagaggctgggcgtccttatcactcctgtccctgacgcccaggctgccacccggaggcaggcggtggggctgctggccttccttggcctcctcttctgcctgggggtggccatgttcacctaccagagcctccagggctgccctcgaaagatggcaggagagatggcggagggccttcgctacatcccccggagctgtggtagtaattcatatgtcctggtgcccgtgtgaactcctctggcctgtgtctagttgtttgattcagacagctgcctgggatccctcatcctcatacccacccccacccaagggcctggcctgagctgggatgattggaggggggaggtgggatcctccaggtgcacaagctccaagctcccaggcattccccaggaggccagcttgaccattctccaccttccagggacagagggggtggctcccaatcacccagcccaaaa

SEQ ID NO: 7563 - DNA, 510 bp, Homo Sapiens
tgatttacgatatgttctaaaatgtttatgattgaatcttaagatggtaatatttgtagaaatatagttaatcattacaatgtctagcttatggatgtatagtcacaatatgagggtaaatcaaatgcatttgtattcccctgcttttagagccaattattaaaaaatacaccaaaatcattgatggagtgcctgtggaaataactgaaaaagagacacgagaagaacgaatcattacaggtcctgaaataaaatacactaggatttctactggaggtggagaaacagaagaaactctgaagaaattgttacaagaagacacacccgtgaggaagttgcaagccaacaaaaaagttcaaggatctagaagacgattaagggaaggtcgttctcagtgaaaatccaaaaaccagaaaaaaatgtttatacaaccctaagtcaataacctgaccttagaaaattgtgagagccaagttgacttcaggaactgaaacatcagcacaaagaagc

SEQ ID NO: 7564 - DNA, 837 bp, Homo Sapiens
taggctaggtagcgaggcctgggtggtgaatcggcacgaggcatggctccgcggctgtgcagcatctctgtgacggcgcggcggctgctggggggcccggggcctcgcgctggggacgttgcgtctgcagctgcggcgcgtttctattccaaggacaatgaaggcagctggttccgctccctctttgttcacaaagtggatccccggaaggatgcccactccaccctgctgtccaagaaggaaaccagcaacctctataagatccagtttcacaatgtaaagcctgaatacctggatgcctacaacagcctcacggaggctgtgctgcccaagcttcacctggatgaggactacccatgctcactcgtgggcaactggaacacgtggtatggggagcaggaccaggcagtgcacctgtggcgattctcaggtggctacccagccctcatggactgcatgaacaagctcaaaaacaataaggagtacctggagttccgaagggagcggagccagatgctgctgtccaggagaaaccagctgctcctcgagttcagcttctggaatgagccacagcccagaatgggtcccaacatctatgagctgaggacatacaagctcaagccaggaaccatgatcgagtgggggaacaactgggctcgggccatcaagtaccggcaggagaaccaggaggcagtgggcggcttcttctcacagataggagagctctacgtggtgcaccatctctgggcctataaagacctgcagtctcgggaggagactcgaaacgctgctggaggaagagaggtgcgatgacaaatgtctactatacaagtcccc

SEQ ID NO: 7565 - DNA, 378 bp, Homo Sapiens
  misc_feature (316)..(325): n is a, c, g, or t
gaaggagggatgggtttcaaggccggtcttggttttgccaagaacttgacttccagcaaatcgtaagccttctgggctttcatttccttgtctctgaacgaaacagctggcaggagtcgaatgcttatcatgtgccaggccctggccgaacactctgaacatgtgcgcacagagtgtgtgttaaccagtgggggagggggcaccaagcaggcccatctgggtgggaatatgaagccaccttcccaacagggcagtcacatatgcccagtaggaaagagctgtatctgtgctgtcagagacgggtcatttcaaattnnnnnnnnnnctttttagtaattaaaaagatcaagcttgataatcacaatatactactgggca

SEQ ID NO: 7566 - DNA, 929 bp, Homo Sapiens
aaacgatagtgaatatagacccagtgctgaaaaaaagcaggctggtaccggtccggattcccgggatatcgtcgagccacgcagtcgggcccagccatcgccgagattcgagggtcaactggaagtggcgttggtgctccctgtggacttgcgtcggcacccagaggccttggagggacaaggcactgggcggtgtgactggtcatggcacttgctggccttctggccagaggtcctcctggaagcccctccatttcagtgcctggctgcagcggtgctagccaggctggagtccagcacctctcgccggtgtctgtgtgagtgagcgcatgtgcgcatttatgagcatctacttgcggatgcactcaggaccatttgaacccagtgcagagttatctctatgaggaggacccgggtctccagccccctccatctcccctggggtttggcatatttgacatggagccccatgccaagggatgcagctgttggtgtctgtccagtccattcaaggctagcctgcccatgcactgtggcaggggttggattggagggagagaacagagttgggaaaaacaacaggtttgagtccctataaagccataatttaactccagatagctgatgtcagacaagcttgtcctatgtcctatttgagtggcagcagcgccagaccagcaagaaggctgggggtagtcaaggttgtacccagaccttgcttgcagagggttggagaacccagggggcatgcttgggaccatctggcagagggaagcgggacgaactagacctggagaatgtggtacctcgcggctagacaagatggaggcaagtaactcccaggaacttcttaatactcggagtccccataagcgactgacgagacaagaacaacaacctaaaggctgatctaaacgggccgacgaaga

SEQ ID NO: 7567 - DNA, 916 bp, Homo Sapiens
aaggctaggtacgaggccgggtgttgaatcggcacgagggcgcgcggctgaggcgaggtcgctcggcgcagctgttgcggggccatggcggggaccgcgctcaagaggctgatggccgagtacaaacccttgagaacgtgcagtgagagcttgaggaagaaggcctgacttgctgctgcggaattaggagggaaaagtgtatgcgttaaaaggggaaaggctcgttggtggagctttgaaagaattaacactgaatcctccggaaggaattgtagcaggccccatgaatgaagagaacttttttgaatgggaggcattgatcatgggcccagaagacacctgctttgagtttggtgtttttcctgccatcctgagtttcccacttgattacccgttaagtcccccaaagatgagatttacctgtgagatgtttcatcccaacatctaccctgatgggagagtctgcatttccatcctccacgcgccaggcgatgaccccatgggctacgagagcagcgcggagcggtggagtcctgtgcagagtgtggagaagatcctgctgtcggtggtgagcatgctggcagagcccaatgacgaaagtggagctaacgtggatgcgtccaaaatgtggcgcgatgaccgggagcagttctataagattgccaagcagatcgtccagaagtctctgggactgtgagacctggcctcgcaacaggcgcacacacaccgccaagcagctcagcattctcccccggcacacttagtgagcagtgatgctctgtgctggtaccaaacaaggcagacttgcaaaaatgtgtaggttctgtgggttttcattttcttgatggcatcctttgaagcacagaagtttaattttgatgaagttcaatttacccatttggctctgttttcattc

SEQ ID NO: 7568 - DNA, 555 bp, Homo Sapiens
gccggtcggagggctcctagtgcgccaggttgtgggaagtgaggctggcggtggcgacaaccgaggaggaggggcgggacgccgtggagcacggcgaccggctgagcgtcatggagggctcaggggagcagccgggcccacaaccacagcatcccggagaccaccgcatccgcgacggcgacttcgtggtgctgaaacgtgaagatgtgtttaaagcagtacaagtccagcggagaaaaaaagtaactttcgaaaaacagtggttctacctggataacgtcattggccatagttatggaactgcatttgaagtgaccagtggaggaagtctacagcccaagaagaagagggaagagcctactgcagagactaaagaagcgggcactgataatcgaaatatagttgatgatgggaaatctcagaaacttactcaagatgacataaaagctttgaaggacaagggcattaaaggagaggaaatagttcagcagttaattgaaaatagtacaacattccgagacaagacagaatttgcccaagataaatacactaaaa

SEQ ID NO: 7569 - DNA, 1334 bp, Homo Sapiens
  misc_feature (467)..(512): n is a, c, g, or t
  misc_feature (574)..(612): n is a, c, g, or t
  misc_feature (690)..(728): n is a, c, g, or t
  misc_feature (782)..(963): n is a, c, g, or t
  misc_feature (1071)..(1082): n is a, c, g, or t
  misc_feature (1218)..(1293): n is a, c, g, or t
ggggattaaagggtctttacttcacgggatatttgctgtttggcctggggacgggatttattgggctcttcccgaatgtctactccaccctggtcctgtgcagcctgtttggtgtaatgtccagcaccctgtacactgtgccctttaacctcattactgagtaccaccgcgaggaagaaaaggagaggcagcaggccccaggaggggacccagacaacagcgtgagagggaagggcatggactgcgccaccctcacatgcatggtgcagctggctcagatcctggtcggaggtggcctgggctttctggtcaacacagccgggaccgttgtcgtcgtggtgatcacagcgtctgcggtggcactgataggctgttgctttgtcgctctctttgttagatatgtggattacgtcaataaagagacaatgaccctagagaaccctaacccccaatcctacccaatctcnnnnnnnnnnnnnnnnnnnnnnnnnnnnnnnnnnnnnnnnnnnnnnccaacaaaatctttgcctccccgcctcctcctcccaaacttttcccaacacctccgtttcgnnnnnnnnnnnnnnnnnnnnnnnnnnnnnnnnnnnnnnnttgtcccgctcgcccatatacgcccgtcgcctccgggtttttgtatcacctcctctaccccgatccctcttctttcgnnnnnnnnnnnnnnnnnnnnnnnnnnnnnnnnnnnnnnntcaattgcgccgaaccgcttcccctgtccacccttttcccgcttacccttcttnnnnnnnnnnnnnnnnnnnnnnnnnnnnnnnnnnnnnnnnnnnnnnnnnnnnnnnnnnnnnnnnnnnnnnnnnnnnnnnnnnnnnnnnnnnnnnnnnnnnnnnnnnnnnnnnnnnnnnnnnnnnnnnnnnnnnnnnnnnnnnnnnnnnnnnnnnnnnnnnnnnnnnnnnnnnnnnnnnnnnngtttacaccccatatgccgtatttcccgagcgcccgagcctatctggacctcccccctctagccgccgccgcattcgcggcgcagacacatcatgtccgatttattannnnnnnnnnnnttttctatctcctgacattacccgcccctatatccccccctccgcccgctacatcgtgttccccgcctgaccgcgcgcgccctagtcgccctttaggctaacgcgtatccctctcttcacccgttcgcgcccgccnnnnnnnnnnnnnnnnnnnnnnnnnnnnnnnnnnnnnnnnnnnnnnnnnnnnnnnnnnnnnnnnnnnnnnnnnnnnacatatcgctctttatgtccgcgtccttatcccctcccccc

SEQ ID NO: 7570 - DNA, 1948 bp, Homo Sapiens
gctggtaccggtacggaattcccggtgatatcgtcgacccacgcgatcgcgacagagctgagcgcggcgcggggccaccatgggggcccagctcagcacgttgggccatatggtgctcttcccagtctggttcctgtacagtctgctcatgaagctgttccagcgctccacgccagccatcaccctcgagagcccggacatcaagtacccgctgcggctcatcgaccgggagatcatcagccatgacacccggcgcttccgctttgccctgccgtcaccccagcacatcctgggcctccctgtcggccagcacatctacctctcggctcgaattgatggaaacctggtcgtccggccctatacacccatctccagcgatgatgacaagggcttcgtggacctggtcatcaaggtttacttcaaggacacccatcccaagtttcccgctggagggaagatgtctcagtacctggagagcatgcagattggagacaccattgagttccggggccccagtgggctgctggtctaccagggcaaagggaagttcgccatccgacctgacaaaaagtccaaccctatcatcaggacagtgaagtctgtgggcatgatcgcgggagggacaggcatcaccccgatgctgcaggtgatccgcgccatcatgaaggaccctgatgaccacactgtgtgccacctgctctttgccaaccagaccgagaaggacatcctgctgcgacctgagctggaggaactcaggaacaaacattctgcacgcttcaagctctggtacacgctggacagagcccctgaagcctgggactacggccagggcttcgtgaatgaggagatgatccgggaccaccttccacccccagaggaggagccgctggtgctgatgtgtggccccccacccatgatccagtacgcctgccttcccaacctggaccacgtgggccaccccacggagcgctgcttcgtcttctgagggccgggcacggtcacacggccacccgccccgcgcaccccacgccctgttcacgctcacccagtcacctccccacatcgcacactggggccccgggttcagcctggcctgcccgtgccccggtgaatcacctggctgagcagttcccctggggccccttcgggagcagggctgtgtcccagatgggccacggctgagccttcagagtacgtcctgcctggcacttactggtccttaccagagacgcccagccccttccctgtcctcatgacccctcgtccaccccccacacacactataaggctgagggctgccagcagccccgtctgcccaccattcccggccgtggaccatagtcgggatgtcagcagacacacatgggcagcccaaagctgcaggtgccagggcccaccccagcctcgcctgtcacccccactcccgcctcagggccaggcccaggcctcaccacctgacgctgcatgagacattgacaccagaaagccctcttgggggcactgctccctaccccagggccctggccagccgggagcttggctctcctctggctagagtgggaagagggggctggccatggggccctcccagaacctcagcatttccttccagcccatccaaacactgaggcagccttggggaaccccgagctggggggttggcagcccactgcaccgcctcagggttttggggtcctgggctggggccaccatccctgatggcagaactcccacaaccacatgtatttattcctctgtcctaaaccgtcccctccttccctcacccccagcacagggggattctgagcagtgcctcttgtctgagggacatatcagtgacctcgacgttgcctttagactacagttgtgttagcctcttgcgtattggctttttcagagtcatttatgagcagaaaaaaaaaaagtaaaactttgctaatattaaaaa

SEQ ID NO: 7571 - DNA, 325 bp, Homo Sapiens
  misc_feature (79)..(89): n is a, c, g, or t
ggggggtcgtggggacgggaacatgtgcccgaccgctccatcccctcctcctccttaggatgcataacctaccttgtcnnnnnnnnnnnaaattttctttccaggtagagtagctctttgtacataaagaatacttgaaaaattaattgtatgatgtatgagaagacagagtctcctagttttgtatcttgttgtatgactgccatgagttccaccagaaagccactctattttggtctctgtgacattttaaatgcgtgacagaagtgagcaaataaagtgaggaagaaatctatatatgagataatatagattgtattgaaag

SEQ ID NO: 7572 - DNA, 1558 bp, Homo Sapiens
ggtatctaagagtggttcggacacagtggctgtgatgaacgtgggggctccggctgcaggcatgaatgctgctgttcgctccactgtgaggattggccttatccagggcaaccgagtgctcgttgtccatgatggtttcgagggcctggccaaggggcagatagaggaagctggctggagctatgttgggggctggactggccaaggtggctctaaacttgggactaaaaggactctacccaagaagagctttgaacagatcagtgccaatataactaagtttaacattcagggccttgtcatcattgggggctttgaggcttacacagggggcctggaactgatggagggcaggaagcagtttgatgagctctgcatcccatttgtggtcattcctgctacagtctccaacaatgtccctggctcagacttcagcgttggggctgacacagcactcaatactatctgcacaacctgtgaccgcatcaagcagtcagcagctggcaccaagcgtcgggtgtttatcattgagactatgggtggctactgtggctacctggctaccatggctggactggcagctggggccgatgctgcctacatttttgaggagcccttcaccattcgagacctgcaggcaaatgttgaacatctggtgcaaaagatgaaaacaactgtgaaaaggggcttggtgttaaggaatgaaaagtgcaatgagaactataccactgacttcattttcaacctgtactctgaggaggggaagggcatcttcgacagcaggaagaatgtgcttggtcacatgcagcagggtgggagcccaaccccatttgataggaattttgccactaagatgggcgccaaggctatgaactggatgtctgggaaaatcaaagagagttaccgtaatgggcggatctttgccaatactccagattcgggctgtgttctggggatgcgtaagagggctctggtcttccaaccagtggctgagctgaaggaccagacagattttgagcatcgaatccccaaggaacagtggtggctgaaactgaggcccatcctcaaaatcctagccaagtacgagattgacttggacacttcagaccatgcccacctggagcacatcacccggaagcggtccggggaagctgccgtctaaacctctctggagtgaggggaatagattacctgatcatggtcagctcacaccctaataagtccacatcttctcagtgttttagctgtttttttcattaggtttccttttattctgtaccttgcagccatgaccagttctggccaggagctggaggagcaggcagtgggtgggagctccttttaggtagaatttaacatgacttctgccccagctttatctgtcacacaaggctgggcacctctagtgctactgctagatatcacttactcagttagaattttcctaaaaataagctttatttatttctttgtgataacaaagagtcttggttcctctactacttttactacagtgacaaattgtaactacactaataaatgccaactggtcactgtg

SEQ ID NO: 7573 - DNA, 144 bp, Homo Sapiens
gggtgcccagttcggcaatgccgctgttcacgaagcgctggatcgaatccttggcgccaggccaatatcgcggcagttggtcgcatagcgcgacgccttgagcgaaaacacgaacccctccggcgtcgtcggtcgcgcatttgg

SEQ ID NO: 7574 - DNA, 1219 bp, Homo Sapiens
  misc_feature (557)..(573): n is a, c, g, or t
  misc_feature (842)..(842): n is a, c, g, or t
  misc_feature (1040)..(1051): n is a, c, g, or t
  misc_feature (1061)..(1061): n is a, c, g, or t
  misc_feature (1119)..(1177): n is a, c, g, or t
cggggatggccacagactgccggtcagtgtcagcaggcggtgggttagggtccgcaggcccagaccaggccgccgacaccaataagctacaaggaggagctttaccgctgcctgtactactactgcctgcgctacttcccagcctgcggcgtagggcgcaccaagggcctgacgcttagcgagcaggcgctgcgcaccaagcggctgtcgcctggacggcacgctcaggcagaagctcctcagtggccacaagtccgctagctccggctacagcccttgccgcacactcccgccacctgagcctgtgatgccgaacgacctgcgcacccccacgttctgcaaccccaactgtccctccgcgtctacgacgacagaatccatgatcggggccaacaccaaagtctttgagcgccgcttcaaagcggagatgggtgccaacagcctcgttcgcgccccctcccttcgcgctggtttacggctaacgctacacggaccccaacgcgggagcccccacaccctttcttctcagcggccgtccgatctttccacgcctcctnnnnnnnnnnnnnnnnnttggtccatggaggcgttacgtcacgcgtgcgtgcccagtgtgctcgttcggccgccgctgtgtaaagtatcccgcgcgccctcgccccacacaaggcgccccccccgccgtccttattcatagggcgtggttcggcgctcgcggctctttttagtattagttcgcggtgcggggggagaagccgtagagctctgctgcattcgtccgtccccacggcgactcccacttgacgcgccccatagctacacaccctcgacactgtgcggcnagacagttactcgcggcccgttttgctgccccgtgccgctcccctataggaggtgttattcgcccgccgctcttatggccgccccctcgttctctcagcgccgtattctcgccgcatctcccctggagtcgtatcgcgggttttagaggagcgcctcattaatcgctctcgccccgtgccctctctacgctttatctnnnnnnnnnnnngggcgagacncgactcgcttctggcgctctgtccccgccctactgcaaccccgcgtgtgtggggcggnnnnnnnnnnnnnnnnnnnnnnnnnnnnnnnnnnnnnnnnnnnnnnnnnnnnnnnnnnngaagcgctcgccgcccattactcacggatcccgacgccgccg

SEQ ID NO: 7575 - DNA, 276 bp, Homo Sapiens
ggtacccgctcgtgcgcggtgcatagttgccctcggggccgacgtgagccacggagccgtcaagataggccacgcccgtgacgtggatgcggtcgctggcggtgcttgccgggtcggcgtgcacgcgatagatggtgctttcgccgaacgtgaggttgccgttgaccgtcagcgtgccaatgggcgagccgtcattgcccggcgagatgaccgcggtggggtagagggtggtggtgcccacctggcccacgcccgccagcacgattgcggccgata

SEQ ID NO: 7576 - DNA, 1127 bp, Homo Sapiens
  misc_feature (572)..(582): n is a, c, g, or t
  misc_feature (586)..(594): n is a, c, g, or t
  misc_feature (653)..(661): n is a, c, g, or t
  misc_feature (718)..(718): n is a, c, g, or t
cggggcactatgtcaccactacttgtatgtagaagtgagtcaccggctggcaaatgggcatagctgctgggcagtggatgcagctccatgcagtgttattctcatgtgatacaggatctcattggcttctcacagcaatcctgtgcactataggtattgctcccgggaacagatgaggaaacaggagagcgcgagattacagcaatttcgtaaatgggaggatctgtgaaggtttcagacatacaccctctctcatatgtcaaggatatgaagtctaatgaatcccctaaagcagcaggggttggcaagctgcggcccgtggggcccaaatcagcctactgccctgtttctgtaaaaaacccccatgaacgcgggctcccaccccttgtcggccgctctcggcccctcgaaaaaacgctctcctaacaccactccgtttttggcgccgcccggaccccccctatggtaaccgcggaaacattgggtccctacctttggtttttcctcacggaacaccccttggcccgcccgaaaattaccggggcctgtgggattttccccaaacccaaatnnnnnnnnnnnccannnnnnnnnggtgcgtgcacaacaccccaaaaagcgcggctttccgtggcaagcaccagaatctttgnnnnnnnnnaaagcggggaaaattttgccccccgcaaagggagcccccactctataaacgtggggngagattccccgctcgccataccaggtggcacagtcttccggaaataggcggagagctctcccgtcattttctcctccgactttttatacggcgcgcccaacccagcactcgtgttgcacaaccttcctcttgtccgagagataaccgcgtgggtgcggccaactggcccctgttgtaagacgctatgctcctcggagcgagacaaattgtgaaagaccgtttcttcccccacaaaccctgtgcgttttgtagcacgctataccccccggaacacggccgccttatttgtgcctcgcccaataaacgcgcctgtgccctccccgttgcggcatatataacacacccctctcgcacttcttgttggggcaaaacccttgagctctcgccacaccaagactttttatatatt

SEQ ID NO: 7577 - DNA, 772 bp, Homo Sapiens
  misc_feature (422)..(478): n is a, c, g, or t
catgggcacagtgaacataatgaactattcattcaagaactgtgactgtgaaaggaaggagggagagaaggtacagtagttagagaggagcaggggatcatggcaaagttttttgattctgtttaagagttgtttactgagtccctgcttatgtctctgtagtatctttctggctacccacgtttgctcccagttagaatcctggactctaaccatgggatggaaggtggtgttggcacaggccactgctctttagcagcctaaaggattatattctcatcaggtagaaactttgtggtcactgaagtccttacatgccccatgaagacttgtgtgtggatttgctgcctgcactgagctaacacgttcctgtcctgaaggcttcttccacagtgagctcatcacagcaccctgtggaatgnnnnnnnnnnnnnnnnnnnnnnnnnnnnnnnnnnnnnnnnnnnnnnnnnnnnnnnnnttccttcatgatggttctttctaggagtggggtgcaggagtctgggcttttgtcaagctcctcaggagatttgtttttttggacagcaggtttgaaaacgctagtcaattgcatgtctttattgtctgtgcttttctgtcagtgaaggttggttgtctttttgaatcatgctagatctttttccatttttgttacctaagatcacacctcctctaagatgaacataagtcattatatagttgtctgttttgtatataaaatatgtgcttaataaaacaaacaatggaaacaaat

SEQ ID NO: 7578 - DNA, 347 bp, Homo Sapiens
cgggggaaaacccgctgcccgccgccctggtccagccccacaccgggaaactgtgctggttcttggacgaggcggccgcccgcctcctgaccgtgcccttcgagaagcattccactttgtagctggccagagggacgccgcagctgggaccaggcacgcggcccatggggctgggcccctgctggccgccactctccgggctctcctttcaaaaagccacgtcgtgctgctgctggaagccaacagcctccggccagcagccctacccggggctcaacacacaggctgtggctctggacatccggatattaaaaggagcgttgctggtaatatccgcccgctaccac

SEQ ID NO: 7579 - DNA, 1233 bp, Homo Sapiens
aacttcggctaggtgcgaggcctcgggtggtaactcggcacgagggcaggctcgcccggtgccgggcgtcatgtctcatgcggccgaaccagctcgggatggcgtagaggccagcgcggagggccctcgagccgtgttcgtgctgttggaggagcgcaggccggccgactcggctcagctgctcagcctgaactctttgcttccggaatccgggattgttgctgacatagaattagaaaacgtccttgatcctgacagcttctacgagctcaaaagccaacccttaccccttcgctcaagcctcccaatatcactgcaggccacaccagccaccccagctacactctctgcatcgtcttctgcagggggctccaggacccctgccatgtcgtcatcttcttcatcgagggtcttgctgcggcagcagctaatgcgggcccaggcgcaggagcaggagaggcgtgagcgtcgggaacatggccgccgcggctcccttccccagtcctgcacctgcctctcctgccatctctgtggttggcgtctctgctgggggccacacatagagccgtccaccccctgctcaggtgcccagggaggtgctcaaggtaaggtgcagacccatctggagaacccaacgcgctaccacctgcagcaggcgcgccggcagcaggtgaaacagtacctgtccaccacactcgggcccaagctggcttcccaggccctcaccccaccgcggggcccgcaagtgcccagccactgcctgcccctgaggctgcccacaactaccggccccacaggcagtgcgcccaacagccccatggcgctgctcaccatcgggtccagctcagagaaggagattgatgatgtcattgatgagatcatcagcctggagtccagttacaatgatgaaatgctcagctatctgcccggaggcaccacaggactgcagctccccagcacgctgcctgtgtcagggaatctgcttgatgtgtacagtagtcaaggcgtggccacaccagccatcactgtcagcaactcctgcccagatgagctggcccaacatcaaaagggagatctctgagaccgaggacacaggcccttttgaaggcacggcagaacgaaagacatcaacaaccttaatttgagcgtcgcaaggcgattccaacatttaccgacaggaatcagggaactggggcctcctcatcctagtccagtgaccggagatggctggac

SEQ ID NO: 7580 - DNA, 177 bp, Homo Sapiens
gctctggtacacctgccggggcccgctctcacgggaggcgtagattagcaccgcagcgatggagagcgggcgggcattgtgggggtgcgggacgcgcggggtagaggaagctattacatacagtcaattagttaccttgactcctcaagctcttgtctctctgatcttgtttaccta

SEQ ID NO: 7581 - DNA, 792 bp, Homo Sapiens
tcaggggcatctccaacaggtccgcatgctgttgctcaactcatgggacagaggaacatcaggctgacgatggctgggaccaaggcagccccagctccgcctcttgcaccactagagaggctgcctgggcccttgagatgtcacctctgtgccaggggccgccagctccgcagagcaaaggccagagctcagggcctgcacacaccctcttcggcacagcctccctctaccgggagttggctcaggagggagcaggccctgaaaggctttcacagtagatccatgccttcttcttcctctgcttcctccatccgcctcctcatcagccagtgggcagcccaggctggctctacccaggccatctccagcagccagcccccatgcagtcagcacacaggggccgatcctgcgtgaggctgaagtcaggggtgagggaagggttagccatacaagcataggccaggagggcaagctggagcttcagccagggatgggcacaggggtggtagaggaaggtgacatcctcagcctgccctgggctcactcgtgtgtaggtcactcttggtgacacctgcggaggcagaggccacaggctctcgggacaatgggcatcccgcctcctccgccggtccagccatcacctcgctgggacccaggagcctcgcgagggctgccaggagaagcagttggggcgaaggcggaggaggcgccattccaagcggccccgggcccggcccgccgcccaaccgctcctcggccgattaacacgcagcctcgacactagccgtaggt

SEQ ID NO: 7582 - DNA, 362 bp, Homo Sapiens
agctgttagaaatttagaatatcagactttattccatatcttcagaaaaaataatctgcattaaccagatctcgagtttattgtacacattaaaacctgagaggtaccttttaactcaacgtgccttttccatctgaaaaatacacacaacttattctgtatgatgcacatatagcactcagaaatggacatgtttgtgtttatgcccttaattttatactttatcatccagaagagtaccatgtgtatgctgattctgtggatcttatgccactttcttttctcagggcaagaagtacattagaaaatatttctgttaaaaattattttatgggcgtgagtcaccccgcctggccaaatga

SEQ ID NO: 7583 - DNA, 729 bp, Homo Sapiens
cggctaggtacgaggccgcgggttaatcggcacgaggtggacttcgagggcataccttgctgaaaatcgcttcacagtcctccccaacatagatcctgaaattgatgagaaaaagcgaagactgatgggacttcccagtttccttactgaggttgcccgcaaggagctggagaatctgggctcccgtattccttcatgcagatgtcatctacatccctctgattggcttcccttctttctatatccccgacatgccttccatggtagaggccagtgactttgagattaatgcactggacttcatgttacccctcagaggagaagctgcactatcgtagtgcccgaaccaaggagctggatgcattgctgggggacctgcactgcgagatccgggaccaggagacgctgctgatgtaccagctacagtgccaggtgctggacacgagcagctgtctataacccgagtattggaccttgacctcccgcctggacgtcctgctggctcttgccagtgctgcccgggactatggctactcaaggccgcgatatactccccacaagtccttgggtgtacgaatccagaatggcatgacatcctactgatggaactctgtgccagaacctttgtgcccaactccacagaatgtggtggggacaaagggagggtcaaagtcatcactgaacccaactcatcagggaagagcatatactcaaacaggtaggcatgac

SEQ ID NO: 7584 - DNA, 143 bp, Homo Sapiens
agctaattgtaaatgttctcaattgtcagtcccagagcagtcccttctctttgtagctagtaattcactgtgggatgcagcagctctaaaccaggaaacagagaaagagggaaaagcgtcaaatttggggatcctcgtagagt

SEQ ID NO: 7585 - DNA, 775 bp, Homo Sapiens
tccggctaggtagcgaggccgcgtggtttaattcggcacgaggcagcgcagggctcaagaagttgactggcgcagatgaagttgactggcgcagagtagtcaacttcatcagcgcagggctcaagaaaggggcagcggaggaggcagagttggaagattctgatgacgaagagaaacctgttaagcaggacgactttcctaaggattttggaccaaggaagctaaaaacgggtggcaattttaagcccagccagaaaggttttgcaggaggaaccaaatctttcatggacttcggcagctgggaaagacacacaaaaggaattggacagaagcttcttcagaagatgggctacgtccctggacggggcctcgggaagaatgcacaaggtatcattaacccaattgaagccaagcagagaaagggaaaaggtgctgtgggggcttatggatccgagcgcaccactcagtccatgcaagacttccctgtggttgactcagaggaagaagctgaagaggagtttcagaaggagctgagccagtggaggaaagacccaagtggaagcaagaagaagcccaaatactcttacaagaccgtggaagagttgaaggccaagggcaggattagcaagaagctcactgctccccagaaggaactttctcaagtcaaggtcatagacatgacaggccgggagcagaaggtctactacagctacagtcagatcagccacaagcacaggtaccgatgatgggctgcgctaaagtcccacagtgcacg

SEQ ID NO: 7586 - DNA, 395 bp, Homo Sapiens
cttgccagcagtatgattgctgccatgtcacattcttgtaaccagctgcagggccatcttgttataactggttcatgtcctgctaaagctgagaggtgaagggctaaaacacagtcctggcacagattccaggacgccccggcacaggctcgtttgaggacattgcctgggtaaacagcctcccctgaaaatgttcagtgtacaactcttcacagagcaatcgctcagatgcgtggcagcacgcagacatgtctctcggcttctctccttgtctctgttgccttcctctccagtcggtgctttagaaatgctttattcccattgtccactgaaaatacaacctagattccttcagtaaatatctgttaaggaggtcacatgaaaagattgctcca

SEQ ID NO: 7587 - DNA, 801 bp, Homo Sapiens
cactcgatgtatcatgctcctctttcagctctgccacacggagcgccagttcttctttcgtccccgtcaggctgacatcacggttcagttgttcacccagcgagcggaggcgggcaatcagttcatctttcgtcatggactcctccacagagaaacaatggccccgaagggccatgattacgccagttgtacggacacgaactcatcagggtcagccagcagcatcagcggtgctgactgaatcatggtgaactcacgcgccggatcgccggtggtcacccagtttttcgggtaacgggcagaggcgttaatgccttcgcgctgtgcgtccgcatcctgaatgcagccataggtgcgcagaccgcgtgcctgagtgttccccagcaccatcgtgttgtccggcaggaagttctttttgacgccgttttccacgtactgtccggaatacacgacgatggccacatcgccatacatccccttataggacaccgctttgcccacgtctttcaccgctgtctccagctcggaattagagccacgacgggtatccagcttctccttgacggctttgaaggaacggaacagcgcccagcctttcggatcgaacacgatgatattcaccacaccgctggcgttcaacgcgtaggcttcgatatcgtcggtcgggtcatacgtggacttgtcacgcttgctccactccgggccgccggactgcgtgatgttattctcctcactgtggcccatatacacctcaaccggatcgaaagcttcaccgggcatggtgtatttgcccttaagcac

SEQ ID NO: 7588 - DNA, 224 bp, Homo Sapiens
tgtaaggtagaaagagaaaagaggcaagccatctgaaaccatcatgttaacccactgtgagtttttaaaaatgtggttaaaatgaatctaagaatgccttttaacacagctcacactttaatgaacaccagagaattcacagcaagactgtaaagctaggaatgtaaagttattgtggggttttagccacgaccctcacctcactctactatatgcaaaagaag

SEQ ID NO: 7589 - DNA, 854 bp, Homo Sapiens
  misc_feature (677)..(686): n is a, c, g, or t
  misc_feature (769)..(769): n is a, c, g, or t
aggctaggtagaggcgggatggtgaatcggcacgaggggaggaaacagccggcgttgctgtagcgcgtctgggaattacaccgggggactggccggcccgcttcgtgcctgcgggaagtcgggccgggggactcttcggaaactccgagcctcagagaaatatggcgctcccgacgctgccatcctactggtgcagccagcagcgcctgaatcagcagctagcacgacagcgagagcaggaggcccggcttcggcagcagtgggagcagaacagccgttacttcaggatgtctgacatctgcagctccaaacaggcagaatggagctctaaaacctcctaccagcggagcatgcatgcctatcagcgggagaagatgaaggaggagaagaggaggagtctggaggcccgacgggaaaagctcaggcagctcatgcaggaggagcaggacctgctggccagagaactggaggagctgaggctgagcatgaacttgcaggaaagaagaatccgggagcagcacgggaagctgaaatcagccagagaagagcagaggaaactgattgctgaacaactttggtacgaacactggaaaaagaacaacccgaaacttcgagaggtgaaaatcagagatctccattgatttacctaagtagatgaaatcatgtttccagacacnnnnnnnnnngaacacgtatcttgtactgggttgaaacagaggagggaaccttgagccacctgaaaagagcgccaggcagaagatctggcacnaggtgcctgagcggctcattcggttgttgaacaaatgttgattgaacctccgctgcctggtctgccaggtgcgggcatggagatt

SEQ ID NO: 7590 - DNA, 1057 bp, Homo Sapiens
  misc_feature (1001)..(1001): n is a, c, g, or t
caactatcggctacgatcaggccgcgtgttactcggccgaggagttcataatatcctgagggtcgggcctgggcgggccaggcgctgagcacggtgatggccaccactggggccctgggcaactactacgtggactcgttcctgctgggcgccgacgccgcggatgagctgagcgttggccgctatgcgccggggaccctgggccagcctccccggcaggcggcgacgctggccgagcaccccgacttcagccctgtgcagcttccagtccaaggcgacggtgtttggcgcctcgtggaacccagtgcacgccggcgggcgccaacgctgtacccgctgcggtgtaccaccaccatcaccaccacccctacgtgcacccccaggcgcccgtggcggcggcggcgccggacggcagttgatagagaaaaacaacccagcgaaggcgccttctctgaaaacaatgctgagaatgagagcggcggagacaagccccccatcgatcccaataacccagcagccaactggcttcatgcgcgctccactcggaaaaagcggtgcccctatacaaaacaccagaccctggaactggagaaagagtttctgttcaacatgtacctcaccagggaccgcaggtacgaggtggctcgactgctcaacctcaccgagaggcaggtcaagatctggttccagaaccgcaggatgaaaatgaagaaaatcaacaaagaccgagcaaaagacgagtgatgccatttgcgcttatttagaaaaaagggtaagctagagagaaaaagaaagaactgtccgtcccccttccgacttctcccttttctcaaccccaacctaaactccaccatccccgcacaaagcggctctaaaactcaggccacatcttttccaaggcaaaccctgttcaggctggctcgtaggcctgccgctttgatggaggaggtattgtaagctttccattttctataagaaaaaggaaaagttgaggggggggncattagtgctgatagctgtgtgtgttagcttgtatatatatttttaaaaatctacc

SEQ ID NO: 7591 - DNA, 1080 bp, Homo Sapiens
gggagctgctggatgaccacaaggatgtggtgaccctcttggcagagggcctacgtgagagccggaagcacatagaggatgaaaagctcgtccgctacttcttggacaagacgctgacttcgaggcttggaatccgcatgttggccacacatcacctggcgctgcatgaggacaagcctgactttgtcggcatcatctgtactcgtctctcaccaaagaagattattgagaagtgggtggactttgccagacgcctgtgtgagcacaagtatggcaatgcgccccgtgtccgcatcaatggccatgtggctgcccggttccccttcatccctatgccactggactacatcctgccggagctgctcaagaatgccatgagagccacaatggagagtcacctagacactccctacaatgtcccagatgtggtcatcaccatcgccaacaatgatgtcgatctgatcatcaggatctcagaccgtggtggaggaatcgctcacaaagatctggaccgggtcatggactaccacttcactactgctgagggcagcacacaggacccccggatcagccccctctttggccatctggacatgcatagtgcgcgcccagtcaggacccatgcacgcctttggcttcgggttgcccacgtcacgggcctacgcggagtacctcggtgggtctctgcagctgcagtccctgcagggcattggcacggacgtctacctgcggctccgccacatcgatggccgggaggaaagcttccggatctgaccccacagcctttggcctgctcacccgaccagcctgggccgcattccctgcaggacctcccgggtcaggcagggcggccccctgctccacacactgctgcatcttgggtctcagggacccagacagatggacttacatggagctgggcactgccctgcctcaacagggtccattgcctcctcgcctccagaacttggagcagggaagtgggcaccctgaggcctccagcaccagttccgtcattctcgttcctggggaacccccactctgacctgttattaaagttcacattttgaatgccaaaaa

SEQ ID NO: 7592 - DNA, 562 bp, Homo Sapiens
tctccctgttctacgtcttcaccctgctggggaacgggaccatactggggctcatctcactggactccagactgcacgcccccatgtacttcttcctctcacacctggcggtcgtcgacatcgcctacgcctgcaacacggtgccccggatgctggtgaacctcctgcatccagccaagcccatctcctttgcgggccgcatgatgcagacctttctgttttccacttttgctgtcacagaatgtctcctcctggtggtgatgtcctatgatctgtacgtggccatctgccaccccctccgatatttggccatcatgacctggagagtctgcatcaccctcgcggtgacttcctggaccactggagtccttttatccttgattcatcttgtgttacttctacctttacccttctgtaggccccagaaaatttatcactttttttgtgaaatcttggctgttctcaaacttgcctgtgcagatacccacatcaatgagaacatggtcttggccggagcaagtaatagactgcaaaatctcttggctacagttgctgggtcata

SEQ ID NO: 7593 - DNA, 401 bp, Homo Sapiens
ccataatctaccttctcttcactgtctgattcaaggccaaccctcccacttacactagattccatccccaatgactttttcaagaatttaactccagaagttaaacattatttcctgcattatgaatctctacaccacccccaagcaggataattcattttaggtagaaatatgtggtaatagttctcatttaaaattctgtacatttccagctactgcctcatttactcctctctttatagaagaaagcatcgtttgtctttattcagcatctccactttttctcttgcattcttttgctgttgttttgtttttctgggaaagttctttaatgtttttaatttgttataaaatatttcagactttaaaaataaaaagtaaatatattgtgtcataaaaaa

SEQ ID NO: 7594 - DNA, 276 bp, Homo Sapiens
gaccagacccctcaaagagcactcagcccacaatgtgacgcagagaaaccagagacccaggcagggagtgcacccacggggacactccgagggtggcctcctgcctgccctgattacttaaaaaggagattcttggaaacctttgcgggcccacaggtgcaccctgactcccagggatgggggctgagccacccaggaaacaaatatgaaatcaaagatccagacagccctgaccctcctgattccagggtccataaataagtcattcttaaaaaa

SEQ ID NO: 7595 - DNA, 489 bp, Homo Sapiens
aatgggccattatgctgacaatttaaaggggaacccaagtcttgtggaacaaacctttttcctgaaacacaggaggagagtggtaactttactagttggagatataaggtatcagtcacactttctggaaaagagaaagtgaatgggtacatcaggattgctttgtatggaagtaatgaaaactcgaaacaatatgagattttcaaaggatccctcaaaccagatgcaagtcacacgtgtgctattgatgtggattttaatgttggaaaaatacagaaagttaaattcctctggaacaaacgtgggataaatctatctgagcccaaactgggggcttcccaaatcacagtgcaaagtggtgaagatgggactgagtataatttttgtagcagcgacactgtggaagaaaacgtcttgcaatctctttacccttgttaaaaacgtggtgcggctattgcggtaataaaatctttaatgcactcggaaaaa

SEQ ID NO: 7596 - DNA, 549 bp, Homo Sapiens
gcttttcattaaactgcaagtatatacaagacagatctgaaattaggcctgagtgttccgatccaccactgtactagtaaataaaaatccacctaccttttatgtggaaaattatgtgctattgagtaacttttagctcttttttaaaaaatgggtgaaatttaagtgtcttttttatgagaatgacacatgaagagatctgagagcaatctcatgtagtcttccatgaacctgcaattgtttggtatgcgtcagcattttccaatttccaggttggatctagagctgctgttgatcactcaggcatactaatggattcatttagatgggtccaagctgcagtccatgagcaataacagactaccccagatactgcagtttacgcagtgcttagtaaatgagatttgtggaactaagttattagttacctgaggcttcttaagaaagtcttcttttttgaccagttgatgtgaaagagggagcatgtgacacagccagtatggtggagtgctagggttatcctgtttacaataaatcgcctgaatttca

SEQ ID NO: 7597 - DNA, 639 bp, Homo Sapiens
ctcccaggggtggaaacgtggagggcccacagcaccccggggtctgcccaggggagtcaaggccccgaggtgggggggcctattccaggaagagtgggatctcggccctgtccagagcgagttaatgtgtccatctgcccaaccctgtcctgagaaaggacctggttttggccaggacctgacaaatacccaatggcagcagtgtcaacagacgggagtccagccagggtgggtgcccttgtcattgaggttagggacagctatccccaggttatgcctggccccacccagcagggagttggggtccccccacaggctgtgagctctgtgggccctgggatgtgatctagctcagatgccctctcatccttgatgtcatagttgagtgcacccaagtggcacccactggcggccaggggcacagcctggtggtggtggcaatagaactgtgcccctcctcagctcctcgcttcccctcccacagccccagccttactccaccatgcggacaatcattttgtacggatcacgggagcaatgctgtacggttttgtacactggtggtttgtttcctagaaaacccattgtgtctctggatttctagcacattactaaaagagcctctgctttgtaaaaaaa

SEQ ID NO: 7598 - DNA, 879 bp, Homo Sapiens
  misc_feature (655)..(782): n is a, c, g, or t
  misc_feature (807)..(831): n is a, c, g, or t
cagaacatttatgcggtaaatgaaatagcgttccatcatgttcatggcaccttgcacactgtggaatctgatggtatattcagcttctgggccaaagatgccagaacataactaaaaacttcggaacagttagatcagcccatctcagcttgctgtttcaatcacaatggaaacatattttgcatacgctcccagctacgactggtcaaagggacatgaattttataatccccagaaaaaaaattacattttcctgcgtaatgcagccgaagagctaaagcccaggaataagaagtagtggctggagactctggctcagccagagttgtttctctccactctgcctcatctctgtacgaatttgggtcccagccttgttgggttgtcagccatggacatggatttcaacccctggagaaaacgatgtcattgttcagcagctgagagcccaggcgtccgcggcgacttgccgtctctccattccactgcctgttgcagagtttttctgtaactaagggggttgaggttattgtagacgttagattgcgggcaccgccagggattttgcagcgcttcagtgtacgtgttagagaatattggaaaagcgtctgtgagccccgtgctgtattttgtaataaagtcttttgcagattgnnnnnnnnnnnnnnnnnnnnnnnnnnnnnnnnnnnnnnnnnnnnnnnnnnnnnnnnnnnnnnnnnnnnnnnnnnnnnnnnnnnnnnnnnnnnnnnnnnnnnnnnnnnnnnnnnnnnnnnnnnnnnnnncttgtggggcccccctcggcccccnnnnnnnnnnnnnnnnnnnnnnnnngggccccggcccccaaaaagaaaggaaacggggcaaaagttttttccc

SEQ ID NO: 7599 - DNA, 430 bp, Homo Sapiens
ccttatattttaacctactaagcaatgaggagggattcctgtcattaagcacaagggcgctggatcctcaaagtgcccatcttcgtgagagaaaaagcagcacatcctgcccatttctggtgctttctgctcacaggcaccaaagccgcacatgtaaactgacttcttgccaaaggaaatgacccctgggaagttcaagctcctggaagaggctttaactcggacgcgccctcctccaggaaccagtgggcagggcagccttcatgcatgtgtaactggacctccagccataagcatggtgtgcagtatggaagagcctgctacggaactgaaagtgattggacattttataggaattgataaagatgttggtcctcaaaagctacaaaccagtggtctgcaaaataaagtgtgttggaaacctctagtg

SEQ ID NO: 7600 - DNA, 1055 bp, Homo Sapiens
  misc_feature (55)..(55): n is a, c, g, or t
  misc_feature (59)..(59): n is a, c, g, or t
  misc_feature (279)..(287): n is a, c, g, or t
  misc_feature (390)..(412): n is a, c, g, or t
  misc_feature (432)..(495): n is a, c, g, or t
ggcgccgctggtgggatgtcacgagtcggcagcacgaataatatccgcagacaanacanggcgcggcgatatgaagagagtgcgggcgcggggcgggagagaaatagggtggggagaatatggggaggcgtagcgtcacacagggaggtgttagcgggcggcgaacataggggagtaataggaatcacgggaaaaggcgaatgcgagagagaggggcggggggaacagggggaaatactagtaacgggggacggcgaaaaaaaggcggcgaatgagagnnnnnnnnnggcgcggcggggttaatatgcgcagtggttgggtctaggaagccgccgcgttcgtaggggcgggcgtctatcgtccgctgcggaacaggtttagggtaatacnnnnnnnnnnnnnnnnnnnnnnntagctagggagtaggaacgnnnnnnnnnnnnnnnnnnnnnnnnnnnnnnnnnnnnnnnnnnnnnnnnnnnnnnnnnnnnnnnntgggcggcgcgaaggcggggagatagaggcggggacgcgacagaggtggggggaggaagccaagaggaagagtgtcgacagcttctggaggggcaatgcggcacgccagggccattttacgtcgttttattgggtttttgagagttcatcttgacttttattacacactagacatatatgaactaatcagagatgtgcatgattctctgtactcttaaaatcacaggaaatataattccacctccccctttttttctgatattggagtagcatttcagattttggagattagcttagggcaaagtaaaagtcatggaaggcagtgtataaataacattaattatgaagctacttttcagaagctagtagtaacttgcttagtaataaccacaaggttgtacagcgttcacaatgctggtattaatcagctacatattttgaacatctactgttactggataccaaagaaagtgagttatttaagaatcttccattcttgttataagcttcctatgatccagtaacttctcaaaggctttgcaaaaagcgtaagtccttgc

SEQ ID NO: 7601 - DNA, 1203 bp, Homo Sapiens
  misc_feature (28)..(28): n is a, c, g, or t
  misc_feature (31)..(31): n is a, c, g, or t
ttggaagcaaacagcctgcgatgcaganccntccatgaggtgtatttcgggtcttgctggggctgagagagaccacagccctttgggggtacaaacaagagttcagttgctgtgaattctgccactgtgcccagctctgaagcctcagctcttgccaaacagacccgagacccatgtcagccccactggatgccgccctccacgcccttcaggaggagcaggccagactcaagatgaggctgtgggacctgcagcaagctgagaaaggagctcggggactcccccaaagacaaggtcccattttcagtgcccaagattcccctggtattccgaggacacacccagcaggacccggaagtgcctaagtctttagtttccaatttgcggatccactgccctctgcttgcgggctctgctctgatcacctttgatgaccccaaagtggctgagcaggtgctgcaacaaaaggagcacacgatcaacatggaggagtgccggctgcgggtgcaggtccagcccttggagctgcccatggtcaccaccatccaggtgatggtgtccagccagttgagtggccggagggtgttggtcactggatttcctgccagcctcaggctgagtgaggagaacctgctggacaagctaaagatcttctttggcaagactaggaacggaggtggcgatgtggacgtccgggagctactgccagggagtgtcatgctggggtttgctagggatggagtggctcagcgtctgtgccaaatcggccagttcacagtgccactgggtgggcagcaagtccctctgagagtctctccgtatgtgaatggggagatccagaaggctgagatcaggtcgcagccagttccccgctcggtactggtgctcaacattcctgatatcttggatggcccggagctgcatgacgtcctggagatccacttccagaagcccacccgcgggggcggggaggtagaggccctgacagtcgtaccccaaggacagcagggcctagcagtcttcacctctgagtcaggctaggggcctccccttctcatcctccccacccccccgccaaggttctcacactggcctgggcttgggtgcccatataggaggtctgtatgttcaccaacagtgcggaggggtcacacattgcaaaacactgcccagaacagtaaaaagagcctgcatgccaaaaaa

SEQ ID NO: 7602 - DNA, 414 bp, Homo Sapiens
cgcggctgacacgccgactgtgcgccggcctgtcaatcaccgggagcagcaacagggagcacatggcaacgggctgcgggcgagctggccagcggcccgcccggggtcccagcccttcgaagaaagggacattcacgagcttctatctctaattctctgtcgcaggcatttcggccgtggaaccccaggctcggaggactgggtgtgagcgctgcccgggagaggctgacctgccgggaccggagtgcccggggacgctgtgcccccacttgcccaacgtgcggaatcggctaagcgcgtcggcctgcgcggggcacaagggacgacgcccgcctttctctctccgagaaggatccccaaacctcactctcttcactcctccccgctaaaaaaccccccaaccccccaaataac

SEQ ID NO: 7603 - DNA, 2182 bp, Homo Sapiens
actataagcggggcctaaggtagcgaggcctgggtggcgaattcggcacgaggcccaagcctacttctacctactccctgagcagcttttttagaggtagaactagacctggaagtttccagtccctttctgatgctctgtcagacacacctgccaaaagctatgctccagagctggggagacccaaaggggagtatagggattacagcaatgactggagccccagtgatacagtgcgacgtctccggaagggcaaggtttgctcactagagagattccgctccttacaggacaaactacaactcctagaagaggcagtaagcatgcatgatggaaacgtcattactgcagttctgattttcctgaagaggacactgagcaaagagatcctcttccgagagctggaggtgcgacaggttgccctgagacatcttattcacttccttaaggaaataggggatcaaaagttgcttttagacctcttcaggttcctagatagaacagaagagcttgcgctatctcattatcgagagcatttgaacattcaggaccctgacaaacgaaaagaatttcttaaaacctgtgttggtttgccattttcagcagaagattccgcacacatacaggaccattacacgctcctggaacgtcagatcattattgaggcaaatgatcggcatctagaatcagcaggacagactgagatcttccgaaagcacccccgaaaagcctccatcctcaacaggccactagtgacaacacttttctactcctgcttctaatcactacacagaggctttgaggcgacacttcaggcagtccccgtcaacctggaagaagacatttaagatcccagataaacagtatgtgctgacagccctggctgctcgtgccaagcttcgagcctggaatgatgtagatgccctattcaccacgaaagaactggctgggctataccaagaagagagcacccattggcttccatcgggttgtcgaaattttgcacaagaacaatgcccctgtgcagatattacaggagtatgtcaatctggtggaagatgtggacacgaagttgaacttagccactaagttcaagtgccatgatgtcgtcattgatacctaccgggacctgaaggatcgtcaacagttgctagcatacaggagtaaggtagataaaggatcagcagaggaggagaagattgatgctcttctcagcagctcgcaaattcgatggaagaattaagtggcatggactaccttgaagcatgcctcatttcctcctctcctgcctgcgaaagcagagagagctcttctttgggagagctgcggcatcacatcgcttgggcccattacccatgggcagtgccagctactcttgacacagataacttcagactgatcttctgtccaaggaacatcatctgaggatcgagatctaaagctttgagtcatgagaatgattctctccacctggtgctcatatgaaggtgggagtgatttctagattgggcccctactgggtaagatctcacttggtctgagaaaagtgactgctccagaaaggaagaggtatgggagtcatagggtggctactgcattccactcagctaattatgatccaggacttggcgctggacattggcagttctgctctgaatgaagtcagaacagaaccaaaatggcctcaggaaggaatgccagtgtttcccaagacctcctggagatgcactcacaccagactgcacagacccctccacattatgccacacacggcctagacgttgtgtttcctcagccattttccctctgctgccccagtttactctgtccaaaaccctaaggttcttctctcacttgaacacagacgaccttgcttgggtgatgagacatcccctttatctcttcctctactgctggccaagacccgtcactttataagaagctcagatgcagcagtgctggagagctctctctttatgcaaaaatctcatttcaccaggagctttcagaagtttcacctgggctaaattcagcagcatttctgttaggatatttagatggaggttttattttcacacttggattcttgctctgtaccaatatttgcctccttttctgtgactgaactgggtttttctgacatgcctagactcctaataaaggtatttcttccttggaaaaa

SEQ ID NO: 7604 - DNA, 573 bp, Homo Sapiens
  misc_feature (46)..(46): n is a, c, g, or t
  misc_feature (62)..(62): n is a, c, g, or t
  misc_feature (207)..(315): n is a, c, g, or t
  misc_feature (326)..(361): n is a, c, g, or t
ctggaaggatggagaaaacagactgtggaggatcagaaggaatccnccgagccagggatggntgtgcccatgtgtgccttgacgggacttcatcttatagactgttaaactgtcacacacaaacaggctttccacccctgctctgagagcaccacgcacagatttccagttcttagtgtggctgtttaaagtagaaaatctgggggnnnnnnnnnnnnnnnnnnnnnnnnnnnnnnnnnnnnnnnnnnnnnnnnnnnnnnnnnnnnnnnnnnnnnnnnnnnnnnnnnnnnnnnnnnnnnnnnnnnnnnnnnnnnnccatgtctacnnnnnnnnnnnnnnnnnnnnnnnnnnnnnnnnnnnntctgaaatttccatctggggattaacttctgtctttctggtgaacaatatagcaattcacgcattcttcaagcagcaaaagttcccggaacaattagggaagacgtatggtctgaatttatccaggcagtgggtctgctttggtttttgctggaaatttatatcagtgtctgggctcccaagaacataaatgtaattgccaaagcaaaaaaa

SEQ ID NO: 7605 - DNA, 306 bp, Homo Sapiens
ctgggagacgcgtggacatcgacagattcggcccgggacagggctcgggcacactgtggctatccaccgtgaacgtactgccggcgactggtggcctaagggtgaggactatagggttcgccttcgcacagccgccctcccgcagggcagccgactagtggagatctgcaaggtggccgtggtcacactgacccacgaccagatgatcgaccatcgctgcgcacctctgtcactgtgaaggtggatcatcatcccgccttttgaggacggcactccccggaggtaaggcctccacctttcacccag

SEQ ID NO: 7606 - DNA, 438 bp, Homo Sapiens
  misc_feature (147)..(304): n is a, c, g, or t
  misc_feature (329)..(353): n is a, c, g, or t
gggggaatccttacgagtaccaactattagtcactttttaaagtccccaaagtggagtgaggatagggggagtggaagcagtgtttggttcttactttacccaaactgtgtataaagaataaagttagcagaatgatgccacagtcnnnnnnnnnnnnnnnnnnnnnnnnnnnnnnnnnnnnnnnnnnnnnnnnnnnnnnnnnnnnnnnnnnnnnnnnnnnnnnnnnnnnnnnnnnnnnnnnnnnnnnnnnnnnnnnnnnnnnnnnnnnnnnnnnnnnnnnnnnnnnnnnnnnnnnnnnnnnnnttctttggcgccccccccgcccccnnnnnnnnnnnnnnnnnnnnnnnnngggggccgcccccccagagaaaagggaaagggggtattatttttcccaaaaaacccgggggaaagaaaaggggtggtttcccccc

SEQ ID NO: 7607 - DNA, 335 bp, Homo Sapiens
tcgagagatcccctgggtgctaggtgactgtgctagcatctacacacgtggccaacgcagcagcccagcacaggacaggcatgcatgggcgcagggagagtcttcaactgcagtgcagtgagcaacagtttttacaacagtcaagggggcagtccttgatccaaagctgcctgttcgaggagtcctgtgtctccacgaacagacgcgccttagttctttggctgggatcagctcgtgggaagcaaaccagagccttcctgtgtgaaacccatatgtggttcacacaggaaggctgtggtttgcttcgcaggggggtacgcgagctcgaaatgcgt

SEQ ID NO: 7608 - DNA, 459 bp, Homo Sapiens
gggacttccggacgccaacatccgggccgcgcggggaaggggagacgtggggtagagtgaccatgacgaaattagcgcagtggctttggggactagcgatcctgggctccacctgggtggccctgaccacgggagccttgggcctggagctgcccttgtcctgccaggaagtcctgtggccactgcccgcctacttgctggtgtccgccggctgctatgccctgggcactgtgggctatcgtgtggccacttttcatgactgcgaggacgccgcacgcgagctgcagagccagatacaggaggcccgagccgacttagcccgcagggggctgcgcttctgacagcctaaccccattcctgtgcggacagcccttcctcccatttcccattaaagagccagtttattttcctaccaaaacatccccccgccccattcacaataaactagcaaaactatgt

SEQ ID NO: 7609 - DNA, 1004 bp, Homo Sapiens
ctaataccgtaaacctagcaagagagagctctgctgacggagcggacagtgtatcagcacagagtggagcttctgttcagcccctagtgtcttctgtaaggcccctaacatcagtagatggtcagttaacaagccctgcaacaccatcccctgatgcaagcacttctctggaagactcttttgctcatttacaactcagtggagacaacacagctgaaaggagtcataggggagaaggagaagaagatcatgaatcaccatcttcaggcagggtaccagcaccagacacctccattgaagaaactgaatcagatgccagtagtgatagtgaggatgtatctgcagttgttgcacagcactccttgacccaacagagacttttggtttctaatgcaaaccagacagtacccgatcgatcagatcgatcgggaactgatcgatcagtagcagggggtggaacagtgagtgtcagtgtcagatctagaaggcctgatggacagtgcacagtaactgaagtttaaataaaaatgtcttcagctccatgctcaaggttgaaagggttacctgtaaatttctgcccacataacattatactcatccctagtagtgcatttagggagtaggggtgggacaggggtatgggcaaggatagactcataattacaaatgtctaacatgtctctgttgagaaactttatttaatgtaaggaacttggggggtcaatagttgagagctgtttagtaaataaccaagtttcttgaggtctagtatactttatactttttaaaaactactgtagtactctgggcccgtgtgtcgaatatctgtgccattaattggtccctcatcctggactcctgcatagggtctaatttctgcacttggaatggtcttaagacattactaaaatttggcacctgtgagcatggttgcaaatatgaaccagaacacattattcacatgtttgacagacttcgaattcggatacaaatatatcaaatca

SEQ ID NO: 7610 - DNA, 673 bp, Homo Sapiens
  misc_feature (552)..(564): n is a, c, g, or t
gtgagccaccacaccctgcctggttgtgtactcttttaaatactaagtttttaatgttaaatgctgcttttagatacactgtaaaaatacatctatcaatgagtttttttattaaaaacattgcaattgtactagactttaaatactaagcaataattcaggcttcaatgttggtatatagatttctcaggtctatcatttaatacctctgtaaaatgaagcagttacttccataatcctgaggtgagataagtgccctgcacaatgttataggcacagtaagtgagactggagctctgatctaatccctttgacattaaagtttgtgcagtaaaccagctatgtcagtttgccacatttgtaatagtgttcaataaattttcacttaaaggtttaatattaaagtagtagcaagaattcataaccttaattggctttaacagcttttctttccctgaaaacagatgcatatgtacacatgcacacagattgcttacaatatcagcacgtaaaaggcctttgcacattgaagtcggcactgctttggtgccnnnnnnnnnnnnnggctcggtgttttgactgcaagtctttttggatagaattttatagttagaaagtagctcgcgcttgggttttataggcacaaacagcaattcttacactagctgttgta

SEQ ID NO: 7611 - DNA, 446 bp, Homo Sapiens
  misc_feature (19)..(19): n is a, c, g, or t
aacttcagagaaaggcaanatataggagtctgcaatgacacccgggacacaagccagcttgtaacacatcgctcaatactgcctggcacagccgagctccacgaagaaccacacagaaagtagcctcctgaagcacctgtgggtaatcgaagacctggtgcttgtggcagcgcttacggacagaaaggacaccctctgagaggttggtgcatttatcgagtactaacactgactctccatgtttgacctggagggcttctaggtcctctctgtactcaggatggagacccacctgagatgacaggaggaagtattgccgtggacctggtcctttctctggaagatccacctcagctgacagtggactatagacaggaacgctgacatcgtagccttgccggtaagtgccacagctgttgtactggagctgttgtaactggagctgt

SEQ ID NO: 7612 - DNA, 592 bp, Homo Sapiens
cccgctgccagtttttcatgtgagcagagaatcagacagacacacataccaatgtcaaacacagtttactgttctgagacagaagctttggtgggtatcattgcttattgacactgggagggtgctgggggcctggcggcagctcattctgagctatcagtgcatcaggaagcaacttaagtgcctctcccgtaagacagaatatgctagaaataagctctggaggcagtgccaaaaaagattcatgtctgagggtggcaaagtagagatctgtgttaaaccaaaccaccctcagcaagtagtcatcagaaacagatcagagcaccatcagaagcaggccttcctcaggacagaatcatgggggaaaaatggaaccagtccatccagagacagtagagatgtcttcacaaaaacagtcactactcaaaaaggctctcatatgtaaccaaccccaaattccttctgctgaccacagtggaaaggctgaaggatacatacggcttctgactgagaggaatacagtaggtttttgaaagccttgttgcctgcccgaagaagtgaccacacggaacatgtccgttcctgagtatgc

SEQ ID NO: 7613 - DNA, 465 bp, Homo Sapiens
cttgccctccttgtggtcacctctgtgtgccgggtcactcctctccctctccccactgtcccagctcactgcctctggggcctcttctccaccccatctgtgtgtctcttcctcctgttctctcctgcctggaccccctagttcactccttgccctgggcttcctctgaaccctgaggtctctgctttctcaacttgtcgctgtgctcccaccatagagaccatctagacagcctctggtctaccaggacaaggcccagtcccactcagctcctttgagagcaccagaaacgcttagggagacacctgtgttgaggccacactgggcgcggtgccagaggcccctggtcaggccatgcccctgcagtgtccttcgttcactagacatggcgcctggctggctgttgggctggggcatgagtggctggacctcaggctttagaccgcagggctctctgctctgcgt

SEQ ID NO: 7614 - DNA, 670 bp, Homo Sapiens
tatcgctaggtaggaggccgggtgttaatcggcacgaggcaggctgcagcctcatctgtttgcggatcagaacccgagctgtgcttgtggctgcggctgctaactggctgcgcacagggagctgtcaccatgcctcactcgtacccagccctttctgctgagcagaagaaggagttgtctgacattgccctgcggattgtagccccgggcaaaggcattctggctgcggatgagtctgtaggcagcatggccaagcggctgagccaaattggggtggaaaacacagaggagaaccgccggctgtaccgccaggtcctgttcagtgctgatgaccgtgtgaaaaagtgcattggaggcgtcattttcttccatgagaccctctaccagaaagatgataatggtgttcccttcgtccgaaccatccaggataagggcatcgtcgtgggcatcaaggttgacaagggtgtggtgcctctagctgggactgatggagaaaccaccactcaagggctggatgggctctcagaacgctgtgcccaatacaagaaggatggtgctgactttgccaagtggcgctgtgtgctgaaaatcagtgagcgtacaccctctgcacttgccattctggagaacgccaacgtgctggcccgttatgccagtatctgccagcaga

SEQ ID NO: 7615 - DNA, 1192 bp, Homo Sapiens
cggtccggaattcccgggatgaagaagaagaccccaaaatgcacacttatggtatcatttatacgggatatgcaacgaagcatgttgttgaaggtctggaaccaaggacgctgtacagatttcgcctgaaggtcaccagcccctctggggagtgtgagtacagcccactcgtctcagtgtctacaaccagtagcatttggcttggaggagagcccataagtagtgagcacttgcaccgggctgtcagtgtgaatgatgaagatttgctggtccgaatacttcaaggaggccgtgttaaggttgatgttcccaataagtttggctttaccgctctgatggttgctgcccagaaaggatacaccaggcttgtgaaaatcctagtttctaatggcacagacgtgaatctgaagaatggaagtggcaaggacagtctaatgctggcgtgctatgcgggacacctagatgttgtgaaatatctccgaagacatggcgcttcttggcaggctagagacctgggaggctgtacagctctgcactgggctgcagatggaggccactgcagtgtgattgagtggatgataaaggatggctgtgaggtagacgtcgtggacactggttcaggatggaccccactcatgagagtctctgcggtgtcgggaaatcagagggtggcctctcttctaattgatgctggggccaatgtgaatgtgaaggacagaaatggaaagacgccccttatggtggctgtgttaaataatcatgaagagttagttcagttacttcttgacaaaggggcagatgcaagtgtaaaaaatgagttcggcaaaggtgtcctagaaatggccagagtttttgacagacaggttgggatgctctttctgcctatcaaggctaatttttagtccttctagactcagaaaaaccaccaaaaccctggattacattcgcctgtctgttttgtttatctagagtgtagtctccttattagaagaaaggaacaaaaaagcagaggccaaaagaagtcttgtgtctgctgatgagagcaccactcatctgcgaaacgcacgttaaaacaaagtgaaccgtgactgttaaactagggatgggaaattctgcatctgggggggctgtacatttatttatttagttgaagatccactgatcccacttttgaaatacatcttttagctaa

SEQ ID NO: 7616 - DNA, 459 bp, Homo Sapiens
gcgagtcactctagaggaccccctcaacgctttatacttcgtagtcaaagaaacgtagaaaagaccgaatacaggacttgatcgatatggggtatggttatgatgaatccgactccttcatcgataactctgaggcgtatgatgagcttgttcctgcttctttgactacgaagtatggaggattttacattaactcgggaaccctgcagtttagacaagcatcagagtctgaagatgacttcattaaagaaaagaagaaaaaatctccaaagaagcggaagttgaaggaaggtggtgagaagtataaagcgttgagctcaacgctttatacttctccatgcatactttgaatatgtgcttctactgggtagaatgtggagatagcgaataatgtgggtataaaattcagactgggataaatggcaataggtattataacggaagttgatagactgcatg

SEQ ID NO: 7617 - DNA, 985 bp, Homo Sapiens
gaagttatattccaagaggcaaccaagtgtatacaaagaattggtctgaagtctttgcactggaaggccattatagtctcttgcttcaaggaagtaagaacgaaatgaacaaaaagaacacatagctccctaggctccagaatctcgaatagaaaataacgtcaacagcttagtgaaattgtagatgtcaacacatcatggaaaacagatcttgtgcaaaatagtgaacacccaggacgtcttttgtatagatgatttttattataaacaataaaatatatgtaatgtctcaactacaaacctttcatgttgaaagggtctctacacatgagttgttttattattatgaagcaaaaaagtttgaagaatctcacagtggaaataatccaacaccgacagactctagtgatcaaagacattctcttttaatgtaaaacaaggacaattcataattacagagagaatgtcctagctgtgggtattatgagacaagccaactttccagaccaaaaggcactcacagctagaggatgaaacgaactccgaaccaagccagagaaattgggctggtccttgaaaaacagtggttaccctactgtccagctcgagcaagcccaatggacaaaggaaacactcagcagagaaacatacccttttactttaaaacctaccacgcacaccgcaggtactggccgcctctcactgctgggtcaaggcgtgcagaggaaggcagatcagtagaagtacggagctatcttctccctaagcgaaggcggcacatgatgagcgagactggtatatctagaagccccagtcgaccttcaggagcgcagagaaggcactacaaacgtcaaaaacgacagtcggaggtcgatgcatcacagggcaatggtctaggaccagaccgcaaaaagcagtctgatgatttgagggttgaggagtcacaaggaagagatggaacaggatgcggaggaaagagagaaaa

SEQ ID NO: 7618 - DNA, 1070 bp, Homo Sapiens
  misc_feature (98)..(98): n is a, c, g, or t
  misc_feature (341)..(341): n is a, c, g, or t
  misc_feature (393)..(393): n is a, c, g, or t
  misc_feature (416)..(416): n is a, c, g, or t
  misc_feature (462)..(462): n is a, c, g, or t
cccaccgaggacgccagccagcactactgtgacaagaatgataatggtgacagctactgggtcttgatccgtatcacaccagatgaagatggaaaatntggatttaatcttaagggaggagtggatcaaaagatgcctcttgtggtatcaaggatgaacccagagtcacctgcggacacctgcattcctaagctgaacgaaggggatcaaatcgtgttaatcaatggccgggacatctcagaacacacgcatgaccaagtggtgatgttcatcaaagccagccgggagtcccactcacgggagctggccctggtgatcaggaggagagctgtccgctcatntgctgacttcaagtctgaagatgaactgaaccagcttttccccgaagccatntcccccatgtgtccggagggtgnggacactttggagggatccatggcacagctaaagaagggcttcganagcgggacggtgctgatccacgtttgagcaactctacagaaaaaagccaggtttggccatcacgtttgcaaagctgcctcaaaattggacaaaaaccgatataaagatgtgctgccttatgacaccacccgggtattattgcagggaaatgaagattatattaatgcaagttacgtgaacatggaaattcctgctgctaaccttgtgaacaagtacatcgccactcaggggcccctgccgcatacctgtgcacagttttggcaggttgtctgggatcagaagttgtcactcattgtcatgttgacgactctcacagaacgagggcggaccaaatgtcaccagtactggccagatccccccgacgtcatgaaccacggcggctttcacatccagtgtcagtcagaggactgcaccatcgcctatgtgtcccgagaaatgctggtcacaaacacccagaccggggaagaacacacagtgacacatctccagtacgtcgcatggcctgaccacggtgtgcccgatgactcctccgactttctggaatttgtaaactatgtgaggtctctgagagtggacagcgagcccgtcccgcgtcccggataagcagg

SEQ ID NO: 7619 - DNA, 741 bp, Homo Sapiens
gctgctgtcagagccactggagccactggctgatgggcaatgggacgagatctctgagtcctcagcagtcaaagagggctgccagcccagctctgcctcagcctccagtgctgcttcctctgggaagctgggatacaggggacagcggagacccagagaagagggaagaacttggagcacaaattcgggcatcaactagcactgtcagtcccagtgcctgtacttcgggcctggggatgcttcgcaggtacagcaggaggcggatgagttcctggctgctgcactcagactgaagccaggctgggctgtgggcacacagaagcagcactgcccggccttggacatcccgagtccctgggtccttaacgtgcatctgggaagcaggttcctcctcttcccaggcatccctgaaactgcacacagcaaatctccagtcggtggcatggccctgagagtctggggactcatccccattctccaggggcctttccatcacgccctcctaaaggtgggcctgctcggggccagcgggagagggctgggtctcagtgtgaaccgcgctgaagacagtcgagtgggactcagtgggcaatgcaggcgaagggcatgggccgcaggaggtgccagtcttagtgccagggcacaggaactgcaattcaggcccccttctccacaaagtccggtgcaggaggctggtgctgaggtgcctcggccgattgacgcacgcagcctcgtactggt

SEQ ID NO: 7620 - DNA, 753 bp, Homo Sapiens
aaagaaagaaaaacaatcgtgctaggtaacaggctcgcgcgtgtaatacggcacgagggcggtctcaacgtgccaggacacctccgacaacagcaagaagcagatgctgcgcaccaggagcaaaaggcggttcgtctacaaggtcccagaggaagagagacggcagcagaggcgagagatagcttagagacccagaattgagatccaaaatgatatccaacccaaccaacttcaaccacgatggcccacatgggcccaggcgacggcatgcaggatgctcatggacctgcctctgagtgctgtgccccccatcccaggaggaaaggccgggccccgctcccacacaacctggactcgccagcctccatccaggaacaagccctacatctacgtggccctcatcaggtggatacggagcctagcagtgactgtgcctctgagaagtatgtactgatccagaccaggactttgacaaagagcctgattcggactccaccaaacactcaactccatcgaatagctccaaccccagcggcccacacgagaaccacaagatccaccacaacaaggagcccagacatacaacacaacgaaagagaccagaaagcaagacaggaccaagaaggaagaaaccttgacaggccggcaagcagtcgaaaacaagagggcgcacaagggaagcaagaaacgaaagagccaacaaaagaaaagatgccaaaggacatgaagcagagccaacgaagagtagaccac

SEQ ID NO: 7621 - DNA, 832 bp, Homo Sapiens
ctcttggacatggagagatctgtttgactgggatataggaaccatggcttcagctgtggatagaagaattctagccactcatcaccaacatggaaaacaagtgagccacacaggaagaggtgtttaaaccggaaacttgcagctacgcctcgaaaaattaaacagatacttgtatttgcagtgatccacaagatggacatccttagcagctggctttcctaaggtatctttcatagatttccaggcctggtttttggtgtattctgcatcaacaagttttgggtttttccgagacagaagaatgagaggatctcgttctggacttgtccttgatcctcggaaatatgctgtagagtttttctttttccatggccactgtgctgctgaccttaccagatcttctctgaagaggtcccaccgtccaagacctgtaggataaattggccaaacagcaggtcccccttcccaaaatgtccaagcaggatacatgatatcatggtactctgatgtcttactgaaggagaagactgggatggcaggctccatccatttaggaacctgaggataatctcgtacattgatcaccatctccatgtcagggagacgcccgatcacttccaaaataaagtgctcaacaccactacaccttgaggggaacatgcagtcattttcccggtacagtctgttcttagtgatctgatagtgggtccctagcttccgtctgactacctctgccatcatcttcctggagatgcctcctcggaaaggagttagatcctcttctatgacaccatggtagcagctgcagttttgacttgaacatggttcgtaa

SEQ ID NO: 7622 - DNA, 1155 bp, Homo Sapiens
cctataagcggtcgtatggtagcgaggcctgggtggcgaattcggcacgaggagggagcggcagcgtggagcagagtgggacagtctggacaagagcatcactgctgccccccgacgagatcttccgcaacctggagaacgccaagcgcttcgacatcgacataggcgggtcgttaaccaatgctggcctactattcaacggtacagcacaaagtcgccaaggtgcggtctttcgaccactccggaaaggacacagaacgtgaacatgagccgccctatgagatttcagttcaagaagagatcactgctcgactgcacttcattaagttttgagaatacctacatcgaagcctgcctggacttcatcaaagaccatctcgtcaacacagagaccaaggtcatccaggcgaccgggggcggggcctacaagttcaaagacctcatcgaagagaagctgcggctgaaagtcgacaaggaggacgtgatgacgtgcctgattaaggggtgcaacttcgtgctcaagaacatcccccatgaggccttcgtggaccagaaggattccgaccctgagtcccggttccagaccaaccaaccccacattttcccctatcttcttgtcaatatcggctctggagtctccatcgtgaaggtggagacggaggacaggttcgagttgggtcggcggcagtccattggaggcggaccttctgggggggcttgggcgctctgctcaccaaaaacgaagaagcttgacgagctccttgacctgagctcgagggggccaagcacagcaatgtggaccatgctggtgcgggacgtctaacggaggcgccaaccaaaattctcgggctgagcgggaactcattccgcaggcagctccgggaacgtcgcgccaccggcgaaccaaagagtgtctccacaagcaggcacgtggcgaaaaccctgttgtccgttgatcagaacagcattggcgcaagtggcctgctacaagccggataataagctggagcgcgggtcactaggagggcgttataccggggcccccccgaaatgggacacccctgattacacacttccagggacagagcgcgcttctcaaaaagatgcgacacaagttcatagatcaaggaacccacactggagaagagaactgtt

SEQ ID NO: 7623 - DNA, 1164 bp, Homo Sapiens
  misc_feature (1128)..(1128): n is a, c, g, or t
gcggccgcacactgggctgggtagaagggcgccacggtcaggaacctgaggatgtcggtggtctcaggtaccagggacgcgggtggcaagttggacctctgcgtggcagaccgggcggcagtgtgactctgaacatctcccgagctcaggacggggaaccctgagtccaggaggcgcgcggggctgaggcagtccagccaggctttcccgacttgtctcccgggaaaggacatcctcgctccgccctcctgccggctccttgtgtccgtctctctgacccttcacccgcccgggccctgcacatataaacagaagcagcctcgagctctcgggagccgactttgtggaagcagagtggagtggagggggctgcccaccctcgctgtacacagctgggcccagatggccccttctgatcccccagggctgacccagtcccagaccaggcacgaagagagaggtcagagccggtaagaaggaaccccagagtcctccgtcagtgcagaggcaccagtcaccaagtgaaacgtcagccttccgaacaagggggagcaagcttcagctgcactcgtgaatttgggggtggggggtcccggatctctgggtaatgctgcactccaggttcctggctggccccctccagccttgagttcttgggcagaagtgcagagaagggaacttccagggaagtcaggaggaagggattaacgaactcccaggcagaaagaagttgggaaaagacccccaggaggggccggggattgcaatctgaactcgggccgttaaatataccgcgggaacggttggcaaatggcgagtttttttgcaaggttggggggcgaggaaacacttgggacattcgttttgggttaacaccgaaatcacccctgttccagggccaatttgggctattctcttggaatggggttcgggaaaggtatttagggcctatccaaagagataaaggaaggaatatgggaaaaccacacacttgggccccctcattgggggcttcaaaaatgagagaggagcgcgcagaaaaataaaattgagagcgctggattgtcacaaaacaacaccaggggtttacaagggggaatcacagagaactgttttcgagacgttggngatttaaattcaatcaacaaacagaaaaacaagtgg

SEQ ID NO: 7624 - DNA, 463 bp, Homo Sapiens
gaatcaaggatagggctaaggttttcaccttaactgtgaaggcaggaggaataggtgactgcttcctcccgcccttcacagaactgattctcacacactgtcccttcagtccagggggccggggctcaggagccatgacctggtgtctcctgcccaccctggtcccaggtaaatgtgaatggagacaggtatgagaggctgtcctcgtctttgattcccccccaaccccacctcgggcctcacgacggtgctacctaagaaagtcttccctcccaccccccgctagcctggtcagtggtcagcaaattggaagaggatccgatgggagtgtaaatgtgagacacaatgtcttgattatacctgtttgtggtttagctttgtatttaaacaaggaaataaacttgaaaattatttgtcatcataaaaatgaaacaaattaaaatatttattgccaggcaaaaaa

SEQ ID NO: 7625 - DNA, 1061 bp, Homo Sapiens
agccgagtcactactgcctgcctgcctgcctgctacggctcagcagcaggtacgtacccaaccatgggctcgcaggccctgcccccggggcccatgcagaccctcatctttttcgacatggaggccactggcttgcccttctcccagcccaaggtcacggagctgtgcctgctggctgtccacagatgtgccctggagagcccccccacctctcaggggccacctcccacagttcctccaccaccgcgtgtggtagacaagctctccctgtgtgtggctccggggaaggcctgcagccctgcagccagcgagatcacaggtctgagcacagctgtgctggcagcgcatgggcgtcaatgttttgatgacaacctggccaacctgctcctagccttcctgcggcgccagccacagccctggtgcctggtggcacacaatggtgaccgctacgacttccccctgctccaagcagagctggctatgctgggcctcaaccagtgctctggatggtgccttctgtgtggatagcatcactgcgctgaaggccctggagcgagcaagcagcccctcagaacacggcccaaggaagagctacagcctaggcagcatctacaactcgcctgtatgggcagtcccctccagactcgcacacggctgagggtgatgtcctgggccctgctcagcatctgtcagtggagaccacaggcccctgctgcggtgggtggatgctcacgccaggccgtttcggcaccatcaggcccatgtatggggtcacagcctctgctaggaccaagccaagaccatctgctgtcacaaccactgcacacctggccacaaccaggaacactagtcccagccttggagagagcaggggtaccaaggatcttcctccagtgaaggaccctggagccctatccagggaggggctgctggccccactgggtctgctggccatcctgaccttggcagtagccacactgtatggactatccctggccacacctggggagtaggccaagaaggaaaatctgacgaataaagacccccgctgccccataaaa

SEQ ID NO: 7626 - DNA, 543 bp, Homo Sapiens
cacctattaatatggaagaactggatgaatcataccagaaagtaattgaactcttctctgtatgcactaatgaagaccctaaagatcgtccttctgctgcacacattgttgaagctctggaaacagatgtctagtgatcatctcagctgaagtgtggcttgcataaataactgtttattccaaaatatttacatagttactatcagtagttattagactctaaaattggcatatttgaggaccatagtttcttgttaacatatggataactatttctaatatgaaatatgcttatattggctataagcacttggaattgtactgggttttctgtaaagttttagaaactagctacataagtactttgatactgctcatgctgacttaaaacactagcagtaaaacgctgtaaactgtaacattaaattgaatgaccattacttttattaatgatctttcttaaatattctatattttaatggatctactgacattagcactttgtacagtacaaaataaagtctacatttgtataaaacactg

SEQ ID NO: 7627 - DNA, 695 bp, Homo Sapiens
  misc_feature (413)..(546): n is a, c, g, or t
ttcacatccactcaccacatcccacctacagactaccacctttcgagatcaggaccaacctggaaaatgccagagttggctatgccttttcagacattgatttggacagctcaccaacccctgaaggggccgttcagcctggttagttttctacctactccgagtgtcctcccctgccccaccagattgctgcaggggcgcggtgtgcctggcagccaaattgttgacacttcttttttcctatgcactggttttacacagctgtcatttttctttcaaaattgcagcagtcccacagatgtgtgcatttggacaaatagtacttaaaaacaaaacaaacaagcactcagcccagctcctcaatactacctggaaaaagcattggcattattttcaataaatatcaagcactnnnnnnnnnnnnnnnnnnnnnnnnnnnnnnnnnnnnnnnnnnnnnnnnnnnnnnnnnnnnnnnnnnnnnnnnnnnnnnnnnnnnnnnnnnnnnnnnnnnnnnnnnnnnnnnnnnnnnnnnnnnnnnnnnnnnnnctggggcccccgcccccgccccccaaaaaattttttaaaacttttcttttggcggggcggggccccaaaggggaaaggaaacaggggcccataattgttttcccaaaaaaaacccggggaattaaataaggggtgtggattccccccac

SEQ ID NO: 7628 - DNA, 689 bp, Homo Sapiens
aaggcacagagagatgcaaacgacctaaattagtttcagtacctaatatcagatatgaaagttgccagatctgctacagctagagttcgttcaagaccagagcttcggattcagtttgatgaaggctatgcaattatcctggccaggagagacgggatgatcttaaagaaaggaaaaatatattcacagggaaaagacttaatatttttgacatgatggcagttactaaagaagcacctgaaacagacacatcaccttcactttgggatgtggaatttgctaagcagttagccacagtaaatgaacaaccccttcagaatggatttgaagagctgatccagtggacaaaagaggggaaactatgggagttcccaattaacaatgaagcaggttttgatgatgatggttcagaatttcatgaacatatatttctggagaaacacctggagagctttccaaaacaaggaccaattcgccacttcatggagctggtgacttgtggcctttccaaaaacccatatcttagtgttaaacagaaggttgaacacatagagtggtttagaaattattttaatgaaaaaaaggatattctaaaagaaagtaacatacagttcaattaagaccatggaaatttttatttcaaacaattagagatggatattacaactaaataaaataattttactaga

SEQ ID NO: 7629 - DNA, 532 bp, Homo Sapiens
ggcaacattttattacgattattattcagcagcacattctgaggggggaacaattcacaccaccaataataacctggtaagatttcaggaggtaaagaaggtggaataattgacggggagatagcgcctgaaataaacaaaatatgggcatgcatgctaaagggaaaatgtgtgcaggtctactgcattaaatcctgtgtgctcctcttttggatttacagaaatgtgtcaaatgtaaatctttcaaagccatttaaaaatattcactttagttctctgtgaagaagaggagaaaagcaatcctcctgattgtattgttttaaactttaagaatttatcaaaatgccggtacttaggacctaaatttatctatgtctgtcatacgctaaaatgatattggtctttgaatttggtatacatttattctgttcactatcacaaaatcatctatatttatagaggaatagaagtttatatatatataataccatatttttaatttcacaaataaaaaattcaaagttttctacac

SEQ ID NO: 7630 - DNA, 768 bp, Homo Sapiens
ccatgaggcccttccccagtgtggccccagcccgacaggcatgcaccagtgccgcctgtgcccacgtgtgcagactgtggctgcagagaccttgcgaccatgtgtagattgcatggaccccgacaaagggaaggctgctgtgtagctctgtccactctgaataccaagtgtgttgggaattgcatgccatctccaccctgagcctgacctttctgagtgacatgggtgtgccaggctagactaggaggttccggtgtctggaaaagcactttacagatgagattccctctcctcccccaccttcaagcaccctgttccctctttctttcttttgtgttggatttgtttaaaaaccaaataagcatctgtgtaacctccacagtagcatttcttatttgtttggtcactgctacaccttagcagctcttcccctttcctgggggatgtgcacggcagcttgagcctgtcacgtggtcaaggcccggccccatcagaggctgggggaggcggcacattggcagtgtgtcacactgagctgggcaccacaggctgcctcatgaccctcctgtccagcaggtagtgggtgaatgtgtgaaggtcttgcctgaatccatcaggacttgggaaacagagaaccctgtgggggcggctgtgggggaggtccctgccagtgtttagaagagcctgactgtgttcagtgccttggagcagaaagccagggtcctgagtggctgaaataaaagcctttggtggaacctgcaaaaaaaa

SEQ ID NO: 7631 - DNA, 1121 bp, Homo Sapiens
  misc_feature (531)..(548): n is a, c, g, or t
  misc_feature (566)..(707): n is a, c, g, or t
  misc_feature (714)..(729): n is a, c, g, or t
  misc_feature (768)..(891): n is a, c, g, or t
  misc_feature (1018)..(1042): n is a, c, g, or t
tagaagtgtgtggtatttgtataaactcaaatgagcataggaggcactacatgaaataatgcactgagtatgcaatgctatcactgtctttgactgtgattttatgtttaaaaagtatgttctaaaattattatatatacatgggtgaattatgtttccgaggcactgttttatctctgtgaatcttgaataacttttttatatttgggttatgatgtcaaacgatcctaagcgaagatgatttcagttcatcaaatcatcattaatgactttatgtattatttgcacagggagaattgaaactgagtataatcaataagctagatacgaaatcagtttctcaaactgagcttcagaaaggggcattctgtactcttgttcctgcataactggttttgtttttttgcagaattaactataacaatcactggctaccgaagtaaactgatgtactgaattccataatacataacattcaatttttaccacttctgtttagcgaacttgtatacttattttctgttcagattnnnnnnnnnnnnnnnnnnctcagatatcctatacgnnnnnnnnnnnnnnnnnnnnnnnnnnnnnnnnnnnnnnnnnnnnnnnnnnnnnnnnnnnnnnnnnnnnnnnnnnnnnnnnnnnnnnnnnnnnnnnnnnnnnnnnnnnnnnnnnnnnnnnnnnnnnnnnnnnnnnnnnnnnnntttgggnnnnnnnnnnnnnnnnaaaaaatttttaaaaaccttttttgggggggggcccccnnnnnnnnnnnnnnnnnnnnnnnnnnnnnnnnnnnnnnnnnnnnnnnnnnnnnnnnnnnnnnnnnnnnnnnnnnnnnnnnnnnnnnnnnnnnnnnnnnnnnnnnnnnnnnnnnnnnnnnnnnnnggggaccttgaggggcttttcggggtccctccccaagggggccccaggggggctttcttttttaaaattcccgccccccggggggaaatttttgaagagtgggggggaaattctctaaaaccttttnnnnnnnnnnnnnnnnnnnnnnnnnacacgggctggtttgaaaaaccttaaaaccccgccgcgtgggtacaacacccccttgtccgcccttggagaaaaaatat

SEQ ID NO: 7632 - DNA, 1430 bp, Homo Sapiens
  misc_feature (714)..(753): n is a, c, g, or t
  misc_feature (859)..(919): n is a, c, g, or t
  misc_feature (940)..(1130): n is a, c, g, or t
aagcagagagacaaagccacgagtagatcgtccaagaaaagtacctgtgatacaagaggagagggcaatgcctgcccagttaagaagaatggaagaatctcatcaagaagcgacagagaaagaagtagaaagaatcttgggattgttgcagacatattttcgagaagatcctgataccccaatgtccttctttgactttgtggttgatcctcattctttcccccgtacagtggaaaacatctctcatgtttccttcattatacgggatggttttgcaagaataagacttgaccaagaccgactgccagtaatagagcctgttagtattaatgaagaaaatgagggatttgaacataacacacaagttagaaatcaaggaattatagctttgagttaccgtgactgggaggagattgtgaagacctttgagatttcagagcctgtgattactccaagtcagaggcagcagaagccaagtgcttgatgctagctgaaggactcaaatggatagtgaagtccaaaacggaaagcggcatgtattgtacatattgtatgattcaacatttttaaaggcagattgtttttagtaaaatgtagcttttgatagctaataaatttggcatgggtgtctttgattaaaggaaactcaccgccatattcgcggggaagaggaccgggggacgggcggcggacccgctgagtgggtcggcggannnnnnnnnnnnnnnnnnnnnnnnnnnnnnnnnnnnnnnnaaatgtatcttgtggcggcccggcgttggggcctcaggaaggtttttgcaagagcctcccggtgtgggggggcggccgggccccggtgaggggagaggggaaacannnnnnnnnnnnnnnnnnnnnnnnnnnnnnnnnnnnnnnnnnnnnnnnnnnnnnnnnnnnnggattccgccgccgacggtannnnnnnnnnnnnnnnnnnnnnnnnnnnnnnnnnnnnnnnnnnnnnnnnnnnnnnnnnnnnnnnnnnnnnnnnnnnnnnnnnnnnnnnnnnnnnnnnnnnnnnnnnnnnnnnnnnnnnnnnnnnnnnnnnnnnnnnnnnnnnnnnnnnnnnnnnnnnnnnnnnnnnnnnnnnnnnnnnnnnnnnnnnnnnntggtgggcaggtgggccgggagggcatctccggccgccacgagggtgaggggtagagtcgggcggggggcgcgcgggaggcggagggcgggatggtgtgtgtcgctcggaggccgcgcccacccctctggtgcgcgcggacgggaagcctagggtgttgacggggtacaggctgccgagaggagaggcgtgcgcggcacgacgaatatctcgtatggcgtgcgacgcgcgcaccgtgggcgatggcgcgaggtgcgggcgggctagtagattctcccgccggtcgcgtccgtcggctctc

SEQ ID NO: 7633 - DNA, 572 bp, Homo Sapiens
tttttaaggtaaaacaggatgtaaagtttatatacaagaatataatgtttatctgaaatatttacagtgttggttaaagcaatatttttacaacttttaaaggtaaactactatgtatattacaggtaagctacaatgggtttaatttgcaaaagttaagtaagaaatgttttaaacaaggcttaaagtactcaagtcaattataaaatttatatcttttgccttttacttgaagaaatcatgctatagaaatggttaatgtgcttctaataaatggaagtattgtagctggaatgtgatacatgtaacagtttaagttcccattgaaggtataaaatgatgaattgttgtaagacttagacactgagtctcagtctggagctgatgaagatgttgagataacagccagctttatctcaacagggtttgtgacccacaagtttgggccacagagaaaattgaagcaatttgcatgttatgacaacctcagtgggaagtgaaaatcagctgactcaaaacaacaaacaacaaccaaccagacccaagtcacagttgcacctattcaaaactag

SEQ ID NO: 7634 - DNA, 371 bp, Homo Sapiens
gggacctagtatggaattgttacttagtgctgccacctgctggatgttaaaaggtatttcagtacaactggaatttaaatatttccattgtttttccaaagcagttaacccaactcctaacaacattttcgggggatctgaccttttttttccagttgaaatgtattaacacaccttccacaatcattttataagagtcagcataacatagtggataagaaatgtgagatgtttaacctctcagtaactcggttctctcattataaaataggaataaaatcagtacctgtttcatatgaaggtcgtttctgagaattaaatggactaatgtatgcaaaaagcctggcaaacaataaacactcatctgactt

SEQ ID NO: 7635 - DNA, 233 bp, Homo Sapiens
ctgcctgtatttgtatgcaaaatgtcctctatctgctattaaagaaaagctacgtaaaacactacattgtaaccttctaagtaataataaataaaaagaaatatattgcagtaacaatgggaagtaagtatgtagttcttttgaaatatgtggtaaagaactaatcacagactatcatctaatctggttacatattgtatttttcatcctgaataaaagtaattttaacacaa

SEQ ID NO: 7636 - DNA, 1239 bp, Homo Sapiens
  misc_feature (494)..(497): n is a, c, g, or t
  misc_feature (507)..(518): n is a, c, g, or t
  misc_feature (603)..(665): n is a, c, g, or t
  misc_feature (708)..(726): n is a, c, g, or t
  misc_feature (757)..(772): n is a, c, g, or t
  misc_feature (1014)..(1024): n is a, c, g, or t
gcttgcagcccagggcaagtatgaaggcagtggagaagatggtggagcagcagcacagtcactctacattgccaaccatgcctactgagtatccactccataccacagcccttggcccagccatctgcacccacttttgcttgtagtcatggccagggccaaatagctatgcagagcagagatgccttcacctggcaccaacttgtcttcctttctctcttcccttcccctctctcattgctgcacctgggaccataggatgggaggatagggagcccctcatgactgagggcagaagaaattgctagaagtcagaacaggatggctgggtctccccctacctcttccagctcccacaattttcccatgatgaggtagcttctccctgggctctccttcttgcctgccctgtctcctgggatcagagggtagtacagaagccctgactcatgccttgagtacataccatacagcaaataaatggtagcaaaacnnnngagaagaacnnnnnnnnnnnngcgaacagacggagacagaacgccgcgacagaagaagcaacgaggacgacagccccgccaaccgagccacaagagtaaggaccgnnnnnnnnnnnnnnnnnnnnnnnnnnnnnnnnnnnnnnnnnnnnnnnnnnnnnnnnnnnnnnngctcacccccaccacaccgtcgactgaaccccctttggaccgnnnnnnnnnnnnnnnnnnntaaatagtttttctccaacccactgttcgtnnnnnnnnnnnnnnnnccccccaggacagggtaacgaccgggcgccgactttacgttttctcaaggaaagacgcccaccggccctcacaacaggggtggtggaccccgaccccacaataaaacaccccccgggcggggcagaacattgggttccagacaacaatcaccgggagaggggtgtactgcggacctattttgcggtcacaccaacttaagcgtcgcgtgccccggggcccgcccaccctcataatatatcannnnnnnnnnngccaagcacttagtgccaggaaggtggggggggaaagactgggaacactaccgtctcccccggaagaggcgtcctcccatcaagaggacgcaaagcgggcgtctcgacgcgccctccgcgcgggtatctcaccgtgcatcagtccccctcatgacaatatataagtgtccccgcgggcgagaagagacacggcgagtcagaaataattcgtcccc

SEQ ID NO: 7637 - DNA, 901 bp, Homo Sapiens
  misc_feature (75)..(75): n is a, c, g, or t
aagcagagactgaggcagggatggagtgcatgtaattcattcaggaagaagtctcaggagataggagtaaggaanacaggatatggcagggaaggagctaagtgagatgtggtctcagctggagactggctccagtctgatctcacagggagctccagaggatgaactgcaccaccatgttatcccagcctaaggtcttttgttctcctgtgtcagccggtccttggccaagggctgcagactctcttggggccccagcagaccggaggagaaggagcatgctctgtggtctactcttttgtgcacatccacccaccacttccccagctgacactgctggaggaggagagggaagagatatcatcccctcctatggcaacctgtgggatagcaatggcccttttcctgttgggtgtaatctgctgccatctcctgctgtctgcagcctgacacagaagggtgaaggtcaccaggttccactgacaggggtctttgtctcaagcagcaaccataggacagaggctcccttgcaagattcagccacatctcatgactgtctgcaacacaccccatgcctctgatggaaggaacccaatgccccatgctacacccatttctgccagactggggtccctgatctcaatttccctctgcagtccccaactctggggtctgcagacacatttcagatccatccttagtacctcccaggaggcagaagccagaggaaataatccttgccccaatgcacctgaccatgccacttcactgtatgctctttctccctctccaggaaaaatcaagcttgttgaatacttaccaatgtgcccacgtacatttagtccccacaaccacttcatgggacagcattatcatccccaagttacagatgaggaaattg

SEQ ID NO: 7638 - DNA, 1614 bp, Homo Sapiens
  misc_feature (1137)..(1153): n is a, c, g, or t
  misc_feature (1284)..(1285): n is a, c, g, or t
  misc_feature (1446)..(1460): n is a, c, g, or t
ctgagctcttgcttgctgtgactggtggagctgccgcgctgtccgcgttatctcctcccggtgagaacgaaccgcagtgtccaccggcgaggagccagccctgtcccggtcagagaaagacgacgaggatacctgggagcgggcggcggcgggctgggccgcgccggtgcgggctggcgactctgctcctccgcttgctgctgtctctgggaactgggtgccagcgctgaggggcttccagcggacagggacccccttccccggctcccctgcccaccctgccggggagggcggaagatgccggtgaagaagaagagaaaatcccctggggtggcagcagcagtagcggaagacggaggcctcaaaaagtgtaaaatctccagctattgcagatcccaaccccctgctagactaataagtggagaggaacatttttcaagcaagaagtgcctggcttggttttatgaatatgcaggtcctgatgaagttgtacggccagaaggaatggaaaaattttgtgaagacattggtgttgaacctgaaaatattattatgttagttttagcgtggaaattggaggctgaaagcatgggattctgtcaccaaggaaagaatggttaacacgggaatgacttcattacagtgtgactgcacagaaaagttacaacacaaatttgacttttggcgctcacagttgaatgatatttcgtcatttaagaatatctacagatatgcctttgattttgcaagggataaagatcagagaagccttgatattgatactgctaaatctatgttagctcttctgcttgggaggacatggccactgttttcagtattttaccagtacctggagcaatcaaagtatcgtgttatgaacaaagatcaatggtacaatgtattagaattcagcagaacagtccatgctgatcttagtaactatgatgaagatggtgcttggcctgttcttcttgatgaatttgttgagtggcaaaaagtccgtcagacatcatagcaagaactatgtgaagaaaatgcaaacctttcaattcccacgtgtatacaagctaatgtgatgagggggaaaaaaatccaacgggtgcattttcattcatatgaaagacttctcatagtacnnnnnnnnnnnnnnnnnaaaggaggtttttcttgttacatgtgatgggcattgagccacacctcttcttagactgaatattgaagtttttgttttgagttatgtttataacatttatttcagaacaataaagattcagatttgtgacnncgaaaaattatctttcaaccaaaaacaacgccggattttccccggcataaaagagctttgcccccagcacctagaccatagtaataactaccacagtacgtccaacaaccctccccggaaggattataaccaaaaaggtaaggtgtggaaatttggggggnnnnnnnnnnnnnnnacaaaaaaaattttttttaacaccctttcgttgtggggggccggggcccccccacaaagaaaaaaaacaccagtggcccatcgcgtgtgtctctccacaagaaaaaccccgcgggatataaaacaacagggggtggcgttttcccccacccaat

SEQ ID NO: 7639 - DNA, 436 bp, Homo Sapiens
ttaggttcgacccaccaagacaagtgaacttcgaactatgtgtctgcaagtagcacatggcagcttggtattataatccacacctactactcaataccttagaaaatcttcgcttccctaataatgttgaaccagttacaaatcattttattacacaggggcttaatgatgttgactgtttctgggggcttcatgacagaaagatgtgtgtactcggactcggcgctcttatagatatggaacagataccccaagttttaaactcaggtttctggacagatctggccggcttttatccttttatttaacggatcgaaaagagcatatgcctgccatgcagaacactgacgaatgacagcgatgatgactgatgacagctgaccgactgatgactgaaaccgaggaactggggagtgatgaagatgatatcgatgac

SEQ ID NO: 7640 - DNA, 295 bp, Homo Sapiens
cacagtgtgcctgatgggacatgaaagaagacagactttaaaccttatcaccatgctggctatccgggtgttagctgaccaaaatgtcattcctaatgtggctaatgtcacttgctattaccagccagccccctatgtagcagatgccaactttaggcaattactacattgcacaggttcagccagtattcacgtgccagcaacagacctactccacttgggctaccctgcaattaagaatcattttaaaaatgtcctgtggggaagccattttcagacaagacaggagagaaaa

SEQ ID NO: 7641 - DNA, 569 bp, Homo Sapiens
cgcgcgaacgctgtacccttctctgggagaaatagatgaatcttctgaattaagagtctcggatataccaggacaggattcagagacggttgtggatattcagaatgacagaaatagtatacttccaaaatctcaatctgaatacaagcctgatactcctcagtcaggcctagaatatagtggtattcaagaacttgaggacagaagatctcgagcaaaggtttcagtttaatctacaagatttcaggtgtggtgctgtctggggaagaggacatttgggaaaggtgcttttagctgaatataaaaacacaaatgagatgtttgctataaaagccttaaagaaaggagatatggtggctcgagatgaagtagacagcctgatgtgtgaaaaaagaattttggaaactgtgaatagtgtaaggcatcccttttgggtgaaccttttggcatgtttccaaaccaaagagcatgttggcttggtaatggaatatgctgccggtggggacctaatgatgcacattcatactgatgtcttttctgaaccaagagctgtatattatgctgcttgt

SEQ ID NO: 7642 - DNA, 1153 bp, Homo Sapiens
  misc_feature (95)..(131): n is a, c, g, or t
  misc_feature (673)..(681): n is a, c, g, or t
  misc_feature (1078)..(1078): n is a, c, g, or t
gactggagtcggggaaccggagggcggccccgctccctctgctggccatggcccccccgcccgcgtgccggtccccgatgtcaccgccgccgccnnnnnnnnnnnnnnnnnnnnnnnnnnnnnnnnnnnnnggcgcccgggcccgcgccgagcccgccgggagtgccgtccccgcgcagagccgcccatgcgtggactgccacgccttcgagttcatgcagcgcgccctgcaggacctgcggaagacagcctgcagcctggacgcgcggacggagaccctactgctgcaggcagagcgccgtgccctgtgtgcctgctggccagcggggcactgaggaccacgctgctccgtgtgaataaatgcccagtggcctaaaataattacaaaaatgaacacaccaccccttgatgagcctagaacccacagaaaacaaaaataaatgaaataacttcacactctacaactgtaaccccactcactcgccctggtaaaattttatttttgggggccccttgggccctctcaaaaaagtttttcgaacacttttcctttggggccccggggccccatacggaagacgggaacggggctcataggtgtgttccccaaggaaaaccgcgggtcataaaatagggggtcgggagctctgcccccaaaacaaaaaacacgccnnnnnnnnnaaccgccggatggcttctttagaaacaatactcccagaggggaagctccgggggcgggcctttcccgggggactcatatacacgcgcgggaggcccgataggtgacctctctccactattaatatacttggcgaccccggcctctcgcggcaatatatatttgccacaaaaacagtggcttgaaacactccctcgtaaaggatgttttctgcgcccacacattgtggaaaaaccctcttctacagatacaccgggtgtgtgagagaacattttggtgataacctccgagtggcgcgattatttcagcccccccttgttgcaccgcccgtgtggggatataaatatattttggccccgccgggggtgcacaaaaggggggggcgcgtgccgaagaaanaagtggtccgcacataataatggggcggcatcctcttttataaaaacacaacaaacggtgggagtggaatactct

SEQ ID NO: 7643 - DNA, 688 bp, Homo Sapiens
tcccgtggcagatgcgcagccgcaggcccacttggcgctcctcctctgaggccatccagccagcgggccggctgcaaggggggctcctcaggcagggacgaaggcgctcaacagctgatcatgtgctgcccagccaccagccaggtcccccagagctgggttcagcagcagcaccgagtcctccacaggctgcagccaccaggcagacagcggggctggggttccaggccacactcttcaccacagcccacccacagggaacaagtcctcacacagcgggcagtggccacctcccagagccgcagggagccgtcgtcagagcctgaaaccagccacatggcaccacacaggagagacactgaggcaccaggacaaggtcacatgtggcaccacatgtagacaacagggctactggacacagtggggaagggctgcaggtcacctcaggcacgaggcagcttggggatgaggtcactcagggtctacattcaccctcatcttgcgctgccgtgggcacaggtacaggtcaaggcagcgctcgaagcgttcctggatgaagcgtccgtaggcaggcacggcccgcaggctcgggaacttgcgtggcaaaaagctcagcttcctctcgcctggctcctgcatgttcaccacgcacaagcgctccctcgtgccgattcaacacccagccttt

SEQ ID NO: 7644 - DNA, 224 bp, Homo Sapiens
tctagaggatcccggcaaataagttgagatagaaaacggatctgccctctccccaggagctgaatgcctccctcctctagctggatcatagctgcagggtgccactcgggtgcccctcacctgtggaggtcctggaaaacagccaacaactggtcatctacatcaaatcaataccacacgttatgcagaagcgtaagtccctctccagactagctggaaagctt

SEQ ID NO: 7645 - DNA, 970 bp, Homo Sapiens
gagcgatgtgaatatagaccagtggtaataaaagaggctggtacggtcggaatcccgggatattcgtcgacccacgcgtcgcgagcatggccgctccgcgagtattcccactttcctgtgcggtgcagcagtatgcctgggggaagatgggttccaacagcgaagtggcgcggctgttggccagacagtgatccactggcccagatcgcagaggacaagccttatgcagagttgtggatggggactcacccccgaggggatgccaagatccttgacaaccgcatctcacagaagaccctaagccagtggattgctgagaaccaggacagcttgggctcaaaggtcaaggacacctttaatggcaacctgcccttcctcttcaaagtgctctcagttgaaacacccctgtccatccaggcacaccctaacaaggagctggcagagaagctgcacctccaggctccgcagcactaccccgatgccaaccacaagccagagatggccattgccctcacccccttccagggcttgtgtggcttccggccagttgaggacgattgtaacctttctaaagaacggtgcctgagtttcaagttcctgattggagatgaggcagcaacacacctgaagcagaacatgagccatgactcccaggctgtggcctcctctctgaagagctgtttcttcccacctgatgaagagtgagaagaaggtggtggtggaacagctcaactgtaggtgaagatggatctcgcagaagcggctgagggaaacacatgaggagatcttggggagatttgtaaagatgaacagcagttccagtgattggtgttggcctttattctgacctgttacctgaggctgggagcagttttggagcaggtacacatgctactgaggatgctgatgtggggtcaaaaaagatggggcgaacccatttgtgtcaccggggtaaggacgttcgagaaga

SEQ ID NO: 7646 - DNA, 286 bp, Homo Sapiens
aaaagaatgaatatttttaaaagaagaaaagtagctatgaactagtattttgtggtacttatgttctgacccaccaggctgttcccacctgtgtccactccccggacttctccatcagtcatcaaggaatcctgcatcacttgactcctcacagaagttttaccaggccggccagtgtaaagtagactgtctcacggtcattctccgatcaccaagtactaattatctgggggtagaatgtgattatttatcctaactggttagtttctatcttatgcaagatagg

SEQ ID NO: 7647 - DNA, 1112 bp, Homo Sapiens
gctaggtacgaggctgggtggcgaattcggcacgaggccgcagcggcgatggcggcagcggcaggtggaggggctggcgcggcccgctccctctcgcgcttccgaggctgcctggctggcgcgctgctcggggactgcgtgggctccttctacgaggcccacgacaccgtcgacctgacgtcagtcctgcgtcatgtccagagtctggagccggaccccggcacgcccgggagtgagcggacagaagccttgtactacacagatgacacagccatggccagggccctggtgcagtccctgctagccaaggaggcctttgacgaggtggacatggctcacagatttgctcaggagtacaagaaagaccctgacaggggctatggtgctggagtagtcactgtcttcaagaagctcctgaaccccaaatgtcgcgatgtctttgagcctgcccgggcccagtttaacgggaaaggctcctatggcaatggaggtgccatgcgggtggctggcatctccctggcctatagcagtgtccaggatgtgcagaagtttgcccggctctcggcccagctgacacacgcctcctccctgggttacaatggcgccatcctgcaggccctggctgtgcacctggccttgcagggcgagtcttccagcgagcactttctcaagcaactcctgggccacatggaggatctggagggtgatgcccagtccgtcttggatgccagggagttgggcatggaggagcgtccatactccagccgcctgaagaagattggagagcttctagaccaggcatcggtgaccaggggaggaagtggtgtctgagctagggaatggcattgctgcctttgaagtcggtacccaccgccatctactgcttcctacgctgcatggagccagaccctgagatcccttctggccttcaatagcctccaaaggactctcatttattccatctcacttggtggggacacagacaccattgccaccatggctggggcattgctggtgcctactatgggatggatcaggtgccagagagctggcagcaaagctgtgaaggctacgaggagacagacatcctggcccaaagcctggaccgtgtc

SEQ ID NO: 7648 - DNA, 734 bp, Homo Sapiens
  misc_feature (693)..(693): n is a, c, g, or t
acttacaaccaggctacccccctcaaaccccaatgtagagaaattccagtgccaacatggtaggtggcagatccaggcctggctaactccaaagcactgccctattcatttatgtatatgtcttatcacccagaaaactctaagttcttgtgtccaagtcatttctatcatcttcacagtttagaaaaatgcttagcatggtcataagcattcaaaatttatgaaggtctatcatttgattcccagtataccctattgagtcttctaatcattcatccatataattgccaagtgcgattctaccctcagtcttgagaggcaatgatttgttcatttatgttgcaagtgcacttgggtaaatgactgctgtgttttatgcatccgtgatggtgaacagacactgcaaatgtgcacgtagagatcatgagtacaaaaataattatagtgcaactttcaaaacgttttaacatacagtatttcacaatggccctgtgaaacaggcgaggcatgtatacccattttcatgcattctactatctgacgccaatccttagcactgaggattttctaatggaaggagtttatattctagtaggagtgacagataataaatgtgcaaatcatcaaaatatatgttagatggagaaaattgctacagagatgaagcagaggaggagggcagatgcaccaggntgaagagctgctatcttaaacaaggggggtcagaacatgag

SEQ ID NO: 7649 - DNA, 783 bp, Homo Sapiens
ggctaggtacgaggcctgggtggcgaattcggcacgagggtgggtggtgcttctggatgtgagtctcttatttatctgcagaaggaactttggggtgcagccaggacccggtaggcctgagcctcaactcttcagaaaatagtgtttttaatattcctcttcagaaaatagtgtttttaatattccgagctagagctcttcttcctacgtttgtagtcagcacactgggaaaccgggccagcgtggggctccctgccttctggactcctgaaggtcgtggatggatggaaggcacacagcccgtgccggctgatgggacgagggtcaggcatcctgtctgtggccttctggggcaccgattctaccaggccctccagctgcgtggtctccgcagaccaggctctgtgtgggctagaggaatgtcgcccattactcctcaggcctggccctcgggcctccgtgatgggagccccccaggaggggtcagatgctggaaggggccgctttctggggagtgaggtgagacatagcggcccaggcgctgccttcactcctggagtttccatttccagctggaatctgcagccacccccatttcctgttttccattccccccgttctggccgcgccccactgccacctgaaggggtggtttccagccctccggagagtgggcttggccctaaggcctccaagtcagcagaaaagccagaacccagtggtggccggcctcgggggggcctggggttattgggtaggctggtggcgcattgacattgtgca

SEQ ID NO: 7650 - DNA, 192 bp, Homo Sapiens
ccgcaagccaagtgcagaagcaaagaagcgctggcagtttcaaacgtaatagcattaagaagatcgtgtgaagcttgcttgctttcttttttaaaatcaacttaacatgggctcttcactagtgaccccttccctgtccttgccctttccccccatgttgcaatgctgcacttcctgttttataatgaaccc

SEQ ID NO: 7651 - DNA, 343 bp, Homo Sapiens
catcttcatattttgataggtgcttttcttgctttaaattgatccctggaatggaagcgtaaaattaaaaggtcatttcctcctttgagcaaattgaatattgttggaaaatgtgttaatagcattacacagagaaacttctggtgatatcactacccacatgggtaccttttatgtttagtaaagtatgttactccttgtgaagacatggtccaagtaccacaagctaaacagctggttgtatgtgtggtttcacaggacattagctgtcagcacgcagccctgctgagcctcgacccagcggctgttagcgctggttgcctggccagcctacagcagcccg

SEQ ID NO: 7652 - DNA, 1137 bp, Homo Sapiens
  misc_feature (1126)..(1126): n is a, c, g, or t
tgggctggtacccgtcggtataccgggatatcgtcgagccacgcgtacggcgctgggcgacatggcgctccccggagcccgggcgcgcggctgggcggcagcagccagagcggaccagaggcgccgccgcgtggagaacgcaggagggtccccgagtcctgagcctgcgggccggcgcgcggcgctttacgtacactggccttactgcgagaagcgctgcagttactgcaacttcaacaagtacatccctcgccgcctggaggaggctgccatgcagaagtgtctggtgaccgaagctcagacgctgctgcggctcagcggggtgcaacgggtggagtctgtgttctttggtggggggacccccagtctagccagtccccacacggtggctgctgtcctggaggctgtggcacagacagcccacctgcctgcacgactcggaagtcacatcggaggctaatcctacttcagctccgggctccagactggcagcagttcggggcagcaggggtcaacaggttgtctataggcctccagtccctagatgacactgacctccggctgtcgggacggacgcactcggcctgcgatgctctgcggacgctggcagacgcccggcgcctctttcccgggcgcgtgtctgtggacttgatgctggggctgccggcacagcaggtggggccgtggcttgggcagctgcaggaactgctgcaccactgtgatgaccacctctccctctaccagctgtccctggagcggggcaccgcactcttcgcccaggtgcagcggggtgcccttccagcccctgacccggagctcgcagctgagatgtaccagaggggccgggctgtccttcgggaggctggcttccaccagtatgaggtctccaactttgcccggaatgtaagttctggggctgatggctggaggtggaggatgggcagactgcagtgtgaccagggcgttgtgaccttctgaagagaaggatcctggccgagatggtgggacattctaacctggggccccttacctgagtctaaaaatgaggcctgccctcttcactctgcactatttcctccctccccgcagggggcgctcagtacccacaattggacttactggcagngtgggcagtac

SEQ ID NO: 7653 - DNA, 589 bp, Homo Sapiens
tctagatgatgcccctcgcctgccggatatcatagtaagccatacaggttcagctatccttggaacagaatataagttccagatagttcctctgaattctcccagagcttccatcaaacggctgacataaaactggactcggagacttgattctgctattttcctacaggagatcatagccttttcaattgcactcttcagccggttcatgtgagattcaaacaggggaaaatgagaaaagaagaagtcctggaaattcctttgtgcttcttctttctcacatagggaaaagatgatgcttatggcaattttcttcctcctaaccatagctggattagagctacaggtttcttcagccaagctgaatgtctcatcagttgaccttcttgggatgatgccattttccaaacttgttgtctgacttcgaagccagcggcgctggtaactgctggaagaagatgtagaggagcttggagatgggaaaggtgtgatcaaaagactgcttagtgaggctgatcgagcaatgccactgtccctgtcttcattctgtcctctgcttggcatatcaactggtgtgctgtgtgctgca

SEQ ID NO: 7654 - DNA, 1024 bp, Homo Sapiens
gctggaccggtccggaattcccgggatactcggaggccgcgcgcgccgttagccccttcctcgctcccccgccccagtcccgcagtccgggaggcgggggtcggcagccggctgagtgggaaccgcgcggtgtctgaggaggcagtcggcgaccggtttccacttcaagcgtgacccttttgcctgtgggatgagctccagcatggggtgaggtacagaagagagacttgaagagcgtgccttgggactcaagcgccaaacctgtaccctagcgagtgtcctactccgcatccgtaatggaaggaaatgcacatcttactccagaggcacaagaggaggacatcccatgcggctactcctgcccagcgtggtggggcagcagaagctccagagcccagacttgcaggctcacggtgcagggtgaacctggccacagctcaccctggaacagccacaatgtctgccccttagagaagaaccctgaaatcagaccagttttagcggcctccccctttcctctctgttacagtgccctttccaggccttaagagaagtaaaacttagctgcagcgtcaggaggtggaccccagagtgtgagtggcacgcttccctgtgaacccgtcctcaccatgttttgccacatctggggcagtggcagcggggaagccttactcgtgcagcgaatgtggcaagagcttctgctacagctcagtgctgctgcgacatgaacgagctcacggcggtgacggccgcttccgttgcctagaatgcggtgagcgctgtgcacgggctgctgacctccgagcgcacaggcgccacccatgctcgcccagaccctctacatctgcaatgagtgcggacaaagctttccgccacagccggccctctttgacctacccctggggcgcccacccggacaccgatgcccccccttgccccctggccgcacatggcggcccgggggctttcccgcaactttcccgggggcttgcttgctttaacccgggcggccccccagaaattt

SEQ ID NO: 7655 - DNA, 1113 bp, Homo Sapiens
ggacctcctagcaggggttggggatctgtgtggcacaagcaagactcccagggcaggtgggcagccaggacccggggctccagcgtcacttcttcttggcgcggtctgctgcgtccagggcagccatgttgcgggcggccgtgatcaggtggatgacgctgatgagcgacttcagcaaggcgatggggccagtgacccagaggcccatccggaacagtcccacagagccaactaaaggtccctcagagaaatggaacaggtagaggaggcagtagaagagctcattcccagcacacaaggtgaacagagcaggcctcgaggtgtagtagatccgaagcaccggattcccggacaagtcgatcatcttgtgactctcactgcctcggaccacagaactgtggaggtgcagccagtgactggccacatccaaactcatgctgatttggaagaacagcgtggctccagggtacagcagggccaggttgaccaacaggcacatggtggagcagcggtccgtcagcatgtccagcatggccccaaaccgggttccttgattaagagcgcgagcagcgtgtccatcgaaagcgtccagcaggccgctgagcaggtagaaggaggaggccgtgagggggcagcagggcatgaagtagaaagaaatgatggcgaagacaatccgggcataaccgatgaggttgggcacgaacaggaagatattttcgtctggcatcgcggcgcctcccttgctgccccgggcctgctctggagatgccagtgctgtcccagccccgcagcgcggcctcagcctccggcccggcgcatcggccgcaccacctgcgccctggaccccgccgccccaacctggccccagatgctgaagcccgcagccgtcgggagcatggaccggccccgaggtgcgcgggacgcagggggcgcgcgcagtccgcccttcctacccgcaacctccctcgcctctgccagccccgcaggcgctccgggcctccagctgcggtcgccgctgctccagctgcgcgtggcttccgggaacctcctcctccgcgcccgtcgttgcaaaattggagagaggaaaaagtggcttaaaaaaatagttgcggc

SEQ ID NO: 7656 - DNA, 889 bp, Homo Sapiens
ccgcgtactcactagctgaggtggcagtggttccaccaacatggagctctcgcagatgtcggagctcatggggctgtcggtgttgcttgggctgctggccctgatggcgacggcggcggtagcgcgggggtggctgcgcgcgggggaggagaggagcggccggcccgcctgccaaaaagcaaatggatttccacctgacaaatcttcgggatccaagaagcagaaacaatatcagcggattcggaaggagaagcctcaacaacacaacttcacccaccgcctcctggctgcagctctgaagagccacagcgggaacatatcttgcatggactttagcagcaatggcaaatacctggctacctgtgcagatgatcgcaccatccgcatctggagcaccaaggacttcctgcagcgagagcaccgcagcatgagagccaacgtggagctggaccacgccaccctggtgcgcttcagccctgactgcagagccttcatcgtctggctggccaacggggacaccctccgtgtcttcaagatgaccaagcgggaggatgggggctacaccttcacagccaccccagaggacttccctaaaaagcacaaggcgcctgtcatcgacattggcattgctaacacagggaagtttatcatgactgcctccagtgacaccactgtcctcatctggagcctgaagggtcaagtgctgtctaaccatcaacaccaaccagatgaacaaaaacacacgctgcttgtatctcccctgtggcagatttgtagcctcgtgtggcttcaccccagatgttgaaggtttggggaaggtcctggtttggaaagaagcggggagttcccagggaggtgggtgcggagcctttgagaactaaagggccct

SEQ ID NO: 7657 - DNA, 794 bp, Homo Sapiens
aaacggttaaggccccccggggcgcccaaacaaccaaaagagggccacgggacctaagggatttcccaaacagcaccggcgacccgcccaacaatggggagaaccgaagggtggccgcagtcccgcctccagccctcttgtttgctccagggacggcttcctgttcagctctgggggttctgaggggtccacaagaccaagtcctccacacctggggcattcaagaaacactcctgatggctgttggaagccactaaccatctgaggagggctcagtggccctgcctcccccccggggacaggactggacagagtgcttctcccaggggcctgaggctttcaagggcaggtgtccaagaggcagcacacagcactgacgtgttcagtggcaggttggaggattccagctaaggcccctgcctgagagtgagaaaaacaacactccaaagctagctcttcagccaccagggaacgtcatgatgccagtctgccgacagacccaggaaaggggacacaggcaggccggcccagctgagagctcacggcctctgccccttcccgccagctcgcattcctgcacctggaaacttctgccatgtgttaaggggaagctcgttaaaagagtctttacttagctgacttgtatagggaacaaaaccaccacaaatgagaccaacattatcctagtttggtaactggtctgcgcacattacacaagactcgaccaaccgacacatcctgcctcgtgccgaattcgccacccagcctcgctaccttaaaccgtagtagtactg

SEQ ID NO: 7658 - DNA, 964 bp, Homo Sapiens
ggggcgttgcaggtcactgtagcgggacttcttttggttttctttctctttggggcacctctggactcactccccagcatgaaggcgctgagcccggtgcgcggctgctacgaggcggtgtgctgcctgtcggaacgcagtctggccatcgcccggggccgagggaagggcccggcagctgaggagccgctgagcttgctggacgacatgaaccactgctactcccgcctgcgggaactggtacccggagtcccgagaggcactcagcttagccaggtggaaatcctacagcgcgtcatcgactacattctcgacctgcaggtagtcctggccgagccagcccctggaccccctgatggcccccaccttcccatccagacagccgagctcgctccggaacttgtcatctccaacgacaaaaggagcttttgccactgactcggccgtgtcctgacacctccagaacgcaggtgctggcgcccgttctgcctgggaccccgggaacctctcctgccggaagccggacggcagggatgggccccaacttcgccctgcccacttgacttcaccaaatcccttcctggagactaaacctggtgctcaggagcgaaggactgtgaacttgtggcctgaagagccagagctagctctggccaccagctgggcgacgtcaccctgctcccaccccacccccaagttctaaggtcttttcagagcgtggaggtgtggaaggagtggctgctctccaaactatgccaaggcggcggcagagctggtcttctggtctccttggagaaaggttctgttgccctgatttatgaactctataatagagtatataggttttgtaccttttttacaggaaggtgactttctgtaacaatgcgatgtatattaaactttttataaaagttaacattttgcataataaacgatttttaaacacttgtgtatatgatgaaaa

SEQ ID NO: 7659 - DNA, 469 bp, Homo Sapiens
cagacatgcacacatggagaatcgccatatgaagatttgatttccactgccataagccagggaattggcagaagctaggagagagtcctggaacagatccctccccagttccttcagagggagcacggacctgccaacaccttgatctctgatttctagtctccagatctgtgaaacaatacttgtctgttgtttaagtcactcagtttgttgtgacagccctagccctgtagaattgggaggtttaaatgatttaaaacactgagggcacttgaaactctgcttagcatagtaagtgctcaataaacattagtgatattatcattgacattgttgagtaataatctgtcatcatttgttcaccgtacaattcaaagggatgtgaaatctgatttaccgttacttcttctccaggtccttcagtatttgatacaattaaattttgctgggctatgtcttctggaaaaca

SEQ ID NO: 7660 - DNA, 438 bp, Homo Sapiens
tcctcaaggtttttaaatatttaaaccaccatctgcaggacacaattttgccatgtaaactaaacattcactggttccagggattaaggaatgaacctcttttgttggggaagggtggcattctgctgaccacagcactccaaccaaaagccaaaaaccaaagcaagacttactaacgcatatcaaataaattaaaggtacaaaatcgtgaatctcagttatcttaaatattccaatactatttacaaaattattcaaattctcacgccttccaactcaaaattagcaatctaaagtaatttccatatcctagatggaaaccctcatgctaaactgtctgattatgcatggttctaaatggtttcagtggcaaatacataacattgtactactgattaaactgaacttaaaagcatcaataccaccattgctgcactt

SEQ ID NO: 7661 - DNA, 480 bp, Homo Sapiens
accaaaaaaagtgaccatgaagtcctgtatttgtctttttactacatgtaggaactctcatgtgaatgagtactgtagtaatccattctatgggagccttatttcagaaatatttcaaactggtgcaaatggaaaagactttctcttttcctttaaagctaaagacaagaatatcatgctatacaggtgcaactcaatccccgttaataaaaaccaatgtaggtataggcattctaccctttgaaatagctgtgtcccaacctgttgccattgattttttggaaatggctttagaaatatccaagttgtccttgaattgtctaaccatggacataaacagttgtctcccttctactgtgtagaatactttgacttaattttcttccagatacagggggatacctgcctgtttttcaaagtgtttatttactgctgttactatttgattagaatgtattaaataaaaaaaacctgatttct

SEQ ID NO: 7662 - DNA, 552 bp, Homo Sapiens
gctttccttttctctactttgtaatttattgatcagtttctgttgggagacgggtgtcctttacccgcgggaagggggcggggcttccctcccgggccgcatgcggggagaggctgctccctcccctttttcctgcccagtcgcggggcccaagtcttccttcttcgtccgaaaggaggggaggggggactcgctgctacaagcctcgccccctgtgccactcagctccgccccgccgcgtccggtcgccggtcccccgggtcatctgcgggcgggttcccctctccctcccccgtgtctcgtgtccccggggcctcaccgccccccgtgctgtggccgtgtccgtgccccgggggtagggggcgcagaatggcgcttccccttctcctctggctccggggtttgcatgggagaatcctctttccacgatgccgctgggcgacgtggcgtgggggcagggggacggtgggggagccctcgcccccgactctcggtcggcctccccgccccaggcgtcactcagtgatcacgggtaaagagaactgtttcaaa

SEQ ID NO: 7663 - DNA, 951 bp, Homo Sapiens
acctttcagagacagtttgtgctcacgctgagcgaacccaagcgcctattcaatctgcacttggccagcctgccccccggccacacactcttcagcggcatctcggaccgcatgctacaggacacggagctggccgccggatgcaagcagatactggtgccttttcccccccagactgctgcttccccggatgagcagaaggtgtttgccctctgggagtctggagacatgagtgatcagcatcgacaggttttgcttgaaattttttccaaaaattaccgggtacgccgaaacatgatccagtctcggttgactcaagagtgtggagaagatctcagtaaacaggaggtggataaagtactaaaggactgctgtgtaagctatggtggcatgtggtaccttaaagggacagtacagtcttgacaatagtagcaaactactaacccagcaaatctaagcccaaggaagaagggcggaaccagaagtagggcctcgacttgcttcagacgacacagagcaagaggaactgaccatctcatgacctgtggcattgcacggtgcagtggacagaagggattatcctcagccagtcacagggtcagcttaagttagttagatcactcccagaagagaccagctgggaccttctttgcagtacaatttgaaattcctgatgtattttgcttattatttggtttcattctcataataaagagagtgtatactgacatgggcaggatgataaaaatcatggtttaatattttcttttgtaaacttaatgccaacaaggtctaagttatgtttacaacatgaagaaaacctcaaagttcttaatttttaaaatgcctagaagacatatttagtcttggattatctatctgctaagacctccacctatttcattaaacctattgaattattctattcttgggattctatgcctcttctga

SEQ ID NO: 7664 - DNA, 1071 bp, Homo Sapiens
tccattcacaaaggtttattgggtccctgcctggtgctggtttgggttagtcactgtagaggatccatctgggccagcctgggaggggcaggtctggagtccgaggcagacacgaaaccgggggtgacacccaggggctgtggaggctgccatgctgaggacagctctgggaggaccgctgaagaggatgactagcgggtggggagtggggttcagccatctcccgggagctgggagggcccaggtggaggtgagggcagcagaggaggacgaggaatggggggtctccaggtagaaaaagggagcagggaatagcatgagtgggaagcccagaggaaggaaaagtacccggagggtctctgtgcttcaagaggccagtggaggggacagagacaaacggccagtggtgaagcagggctgacaccctggcagcaaggacactgaggcacacacctgccattcaccagcactctcctccaggtgtgcaccagctcctgcccgaagcctcaggaggtcctcctgcataagaggctgcaggagccaaatgggccttccagccttgtccaatattatggagtcccgaggtgtggagtgtattctgtgggcccaagaaacagcaacagatccccagaacagatgacagccctaaagaaaggctgctttcctgagcatccctggggctagaaagagtgtggatcaggtgcttcttattgggctgggcctcggcccgggcggcgagcgctgtctccgtcccgagaagaagtttcgcggctggtcccggggcggcaggcgcacgggacgctggcggcggcggcggcttccgacttgggctcagaccccgccgctccagacaagtccccgcgactgcgacagtgtctcgggcagttcagctccccagacgggagacagaccctcgcgacctggttcaggccttgccctgggggacattgacgcgtccgggcgcctccgcggtgagtcgcgccgccgctctcggggtccgcgaaggtggctcagttcgggcgctccagtctcgacgttcccggggtagagagcaacgtccggggacgaacg

SEQ ID NO: 7665 - DNA, 423 bp, Homo Sapiens
  misc_feature (245)..(257): n is a, c, g, or t
cgaccctgggttcaggggtgcgccccggagaacaccttgcccactcccatggtcctgcagaggtgggacagtcacttcctcctccctccccacccctgtcgcatccacgtgcgacctggaggactggtcagaaccgttactgtgaatgagtgaagatcctggaggaccctgggccccaggccagctcccatcgctgggggacggtgaacggccatgtgttaatgttacgatgtttttaaaagacnnnnnnnnnnnnncctcaaaagtttttttaaagtgggggaaaaacatccaagcactttaattccaatgtaccaggtgaactgacggagctcagaagttttcctttacaccaactgtcaatgccggaattttgtattctgttttgtaaagatttaataaaagtcaaaaaacttgcaaaaa

SEQ ID NO: 7666 - DNA, 336 bp, Homo Sapiens
ggctatgtggtagagcctcctgctcccactacaaacgtgtacagcatgttactttgctgaataccataggcaattgtaatgcaatggtatctgtatatttaaacatagaaaatgtacagtaaaaatatggtattgtaaccttctgggagcaccattatatttgtggtctgttattgaccaaaacgtcataatgcagcatgtgactgtatgtagaacaactgtgtaaactttcagaaccatcaacttagtcccataacttgggatattattgaaataaagttccagtattgtttttacttttaaaggtttatttctgaaataaagctaaaaatctga

SEQ ID NO: 7667 - DNA, 1261 bp, Homo Sapiens
gctggaccggtccggaattcccgggatcgccagccgcccgttgccagttctgcgcgtgtgagtctctttcgccttgctccgggctttcttcgctcgcagcgcggcagggttatcaccagatctgggctttccccttcttgccgtcaggtgctacggccacgtggcccgcggcttcccgctcgcgcagtctggcagcccggagccttccgcggtcccccgcccgcccggggcccaacgacgccctactgggcgagcacgatttccgaggacagggggtccgggcccagcgctttcgattctcggaggagccgggtccgggggccgacggggctgtcctggaggtccacgtcccgcaggtgcgtgcagcagcacccgccaggaggcgcctgagattggagctggagtgagccttccaggaattttggctgccaaatgtggtgcagaagtaatactgtcagacagctcagaactgcctcactgtctggaagtctgtcggcaaagctgccaaatgaataacctgccacatctgcaggtggtaggactaacatggggtcatatatcttgggatcttctggctctaccaccacaagatattatccttgcatctgatgtgttctttgaaccagaagattttgaagacattttggctacaatatattttttgatgcacaagaatcccaaggtccaattgtggtctacttatcaaggtaggagtgctgactgggcacttgaagctttactctacaaatgggatatgaaatgtgtccacattcctcttgagtcttttgatgcagacaaagaagatatagcagaatctacccttccaggaagacatacagttgaaatgctggtcatttcctttgcaaaggacagtctctgaattatacctacaacctgttctgggacagtatcaatactgatgagcaacctggcacacaaactatgagcagaccacttcagcttgagaatgcagtgggtctgaagatggtcaagtctgtttgccttagattttgatgtcacctagacaacacttaaactcatatgaaacaaaaattaaaatacgtattacaaggaaccaaatgcagattcgaacgtaattactggctgtctggccgccgtcggccactcaaaaagcttttccaaaacattccgtttggcggggcggccccacagcaggtaaagggtaacatgggacataagcggttttcctaggaagaagcctgggtccgtgaccaagggcattgtgattccccccccattt

SEQ ID NO: 7668 - DNA, 913 bp, Homo Sapiens
  misc_feature (498)..(500): n is a, c, g, or t
  misc_feature (512)..(568): n is a, c, g, or t
  misc_feature (581)..(640): n is a, c, g, or t
  misc_feature (662)..(662): n is a, c, g, or t
  misc_feature (673)..(686): n is a, c, g, or t
gggacggctgcccaacccggtcccagccatgtccaacgtcccccacaagtcctcgctgcccgagggcatccgccctggcacggtgctgagaattcgcggcttggttcctcccaatgccagcaggttccatgtaaacctgctgtgcggggaggagcagggctccgatgccgccctgcatttcaacccccggctggacacgtcggaggtggtcttcaacagcaaggagcaaggctcctggggccgcgaggagcgcgggccgggcgttcctttccagcgcgggcagcccttcgaggtgctcatcatcgcgtcagacgacggcttcaaggccgtggttggggacgcccagtaccaccacttccgccaccgcctgccgctggcgcgcgtgcgcctggtggaggtgggcggggacgtgcagctggactccgtgaggatcttctgagcagaagcccaggcgggcccggggccttggctggcaaataaagcgttagcccgcagccnnntcaaccaaactnnnnnnnnnnnnnnnnnnnnnnnnnnnnnnnnnnnnnnnnnnnnnnnnnnnnnnnnnactcctaatcaannnnnnnnnnnnnnnnnnnnnnnnnnnnnnnnnnnnnnnnnnnnnnnnnnnnnnnnnnnncattcttttagcgatttctttncttttgccctnnnnnnnnnnnnnngaaaattttttaaaacacttctttggggcgcggtgcgcccccctagaaacagaaaaacgggccaaatagtgtctctccaaaaaagcaacatggcgcttcataacggcggtttggaactcccccccaaagaaataacctcgctggcgcactaagcgccgtttttataaataactcccgcgcgctcctcctaggcgctccttctcgccctttttccaacaggcgcgccc

SEQ ID NO: 7669 - DNA, 717 bp, Homo Sapiens
gtgcattgggtgtgcgcccaggaagaagccgcaccactagcagcgcaaggtcatgatggagaggcatcccaggctgcctctggaaggggtgctgccttgtagatggagcaagtgagcaatgagggtctggtgccaatcctgtaggcacaaaaccagaagtttctacattctctatatttgttaatcatcttctctttctccagaatttggaagctagaatggtgggaatgtcagtagtgccagaaagagagaaccaagcttgtctttaaagttactgatcacaggacgttgctttttcactgtttcctattaatcttcagctgaacacaagcaaaccttctcaggaggtgtctcctaccctcttattgttcctcttacgctctgctcaatgaaaccttcctcttgagggtcattttcctttctgtattaattataccagtgttaagtgacatagataagaactttgcacacttcaaatcagagcagtgattctctcttctctccccttttccttcagagtgaatcatccagactcctcatggataggtcgggtgttaaagttgttttgattatgtaccttttgatagatccacataaaaagaaatgtgaagttttcttttactatcttttcatttatcaagcagagacctttgttgggaggcggtttgggagaacacatttctaatttgaatgaaatgaaatctattttcagtgaaa

SEQ ID NO: 7670 - DNA, 517 bp, Homo Sapiens
cattcatgtaatcaccacttctcgatgtctatttcaaatcaaggctcctgagtagggggtgaagtgagccagcttgcacctcaggctaacacataggactttgctcagccatgtcccctgggatacaggggcacaccaggaccaagtggcagacctgtgggcttcagcctcggggccagggcatgcctgccaccccctgacaaaaacaggttccacagtgctacccttgcttcctgccccttgaggtgggccaggctggctcctggctatgcagggatctctggtccccaggagaccttgggggccaggcaggtaaggatcaggggtgataggggagagcaattactttgttcactgtatgcacccgcgggggcctgggagtccccatttgcaggtgggtagggcctccagcccacaccacccagacctaggcttccctcttctcaggatccaccacagggttaggggacaggaagcctgttctattctcaataaatcttacaaaattccaaaaaaa

SEQ ID NO: 7671 - DNA, 940 bp, Homo Sapiens
cgctgcgccggttgctgcggctcctcgtgctggggctctggctggcgttgctgcgctccgtggccggggagcaagcgccaggcaccgccccctgctcccgcggcagctcctggagcgcggacctggacaagtgcatggactgcgcgtcttgcagggcgcgaccgcacagcgacttctgcctgggctgcgctgcagcacctcctgcccccttccggctgctttggcccatccttgggggcgctctgagcctgaccttcgtgctggggctgctttctggctttttggtctggagacgatgccgcaggagagagaagttcaccacccccatagaggagaccggcggagagggctgcccagctgtggcgctgatccagtgacaatgtgccccctgccagccggggctcgcccactcatcattcattcatccattctagagccagtctctgcctcccagacgcggcgggagccaagctcctccaaccacaagggcggtggggggcggtgaatcacctctgaggcctgggcccagggttcaggggaaccttccaaggtgtctggttgccctgcctctggctccagaacagaaagggagcctcacgctggctcacacaaaacagctgacactgactaaggaactgcagcatttgcacaggggaggggggtgccctccttcctagaggccctgggggccaggctgacttggggggcagacttgacactaggccccactcactcagatgtcctgaaattccaccacgggggtcaccctggggggttagggacctatttttaacactagggggctggcccactaggagggctggccctaagatacagacccccccaactccccaaagcggggaggagatatttattttggggagagtttggaggggagggagaatttattaataaaagaatctttaactttaaacaaaaa

SEQ ID NO: 7672 - DNA, 1845 bp, Homo Sapiens
  misc_feature (1163)..(1163): n is a, c, g, or t
  misc_feature (1217)..(1217): n is a, c, g, or t
  misc_feature (1255)..(1255): n is a, c, g, or t
  misc_feature (1270)..(1281): n is a, c, g, or t
  misc_feature (1359)..(1359): n is a, c, g, or t
  misc_feature (1384)..(1393): n is a, c, g, or t
  misc_feature (1426)..(1426): n is a, c, g, or t
  misc_feature (1458)..(1458): n is a, c, g, or t
  misc_feature (1461)..(1504): n is a, c, g, or t
  misc_feature (1596)..(1604): n is a, c, g, or t
  misc_feature (1649)..(1649): n is a, c, g, or t
  misc_feature (1771)..(1771): n is a, c, g, or t
gggggtggtgctgcagcaggtcttccagcttatccagaaggtgctgagcaaatggttgaatgatgcccaggttgtggaggcggtgtgcgctatctttgagaagtctgttaagacgctgctggatgactttgcccccatggtgccacagctgtgtgagatgctgggtcggatgtacagcaccatcccccaggcctctgctcttgacctcactcgacagctggtccacatctttgctcatggactgctttgccgatatcctgttcgccctgaacaagcactgcttcagcctcctgagcatgtggatcaaggaggccctgcagccacctggtttcccctctgcccgcctcagccctgaacagaaggataccttcagccagcagatccttcgcgagcgagtgaacaagaggcgggtgaaggagatggtgaaggagttcacactgctgtgccggggtctccatggcacagattacacagctgactactgaggggtgcccccatcccatccaccccttctcttcatccttccctattcccaaagagtaaacctggaccctcactgctgtctctgcctcctttctgctgccaccaccacctaactgaaagcctgcggtccagaaggcctgggggaaggatgggaggatgctttggaccccaggccttgggagggaatggcgggaaacatcctctagctccccgggtggaacagataccactgtaccccaacccccctaggctggagcccctccgcataccgccattggccccggggcgggccggttgccgcaggggaactaacgcccccgcgatccccattaaatccatcccgcccccgccggctccaaacccgcctgcgcggccgccgagaaatgctggcccgggccggcccatggcggttttcccccaaagtctcgcccaacaccccgccctaccccagcgcctcgtgtacgccccatattacgcgcggatccggagcgcccccgccctaagaacggccgggcgtccgcccgaagcgcgagcgagtctccggcgcgcgcggcgggatgaacgcgtaattcatgcttgaacccgcgcacccttggcgacgccgtacgcgcaggcacccgaagcataggtatgtacggcctttgttcccgccgcgaccaccgacccaagcgttgaaagtncgccccgtaaggggtgcatgagggaggggcgtggatgggattattcttcggcanaatccagcgcggctctatcgcccccttctccgccctgngccgcacagacgcgnnnnnnnnnnnngcatctcggcgggtatgaatatttttccttccgaccccccacccccggcatagcgtgcgcgcgcagctctgataaaanaatccttgaacttaatcgggtgcgnnnnnnnnnntcaaatgagcagaaagcccgatggacggacganccacatatgtcgccaccccccgccccgcctcnaannnnnnnnnnnnnnnnnnnnnnnnnnnnnnnnnnnnnnnnnnnntcatttggattatttcccccggccccgtgtgtaggctacatgttctcgcgtagagcgccgcgtgctctcaaggtgcgatgtggagtagtatnnnnnnnnnatgatgtcacgtcctggctggctggtgggagacacccgggcgcangcggcgggctgcctgagatggtttttataagccacgcgccgcgcttatggcgccgtggttgaaccccctgcacacggatgagtgccccgcggggcatagtcgccgccccgcctcgccgccgnagcggctgtgcgcgcaatggtacgcgcccgccccaggtggccccacgcgagacacaaatcgcgccgccgacacg

SEQ ID NO: 7673 - DNA, 600 bp, Homo Sapiens
  misc_feature (311)..(348): n is a, c, g, or t
cgtggtgtttttgttacgtggccacgcgcccccacccatcaccgagttgagccgcccagccggctgcggaccccatcggcagggagaggaagcgcgggagggggacgcaaacaaaaaaaatggctttcatattcaaagatgttcatgttgctgagctgtaagcaggagcaccctggtcttcctctggtctttgacttgattaaagtatctccgctttcttgggagggaataggggatgtattatcagtgaatgtgccatacaccttatggtccacttcatgtgcctttcaaacttcacaacgcgcgcgcannnnnnnnnnnnnnnnnnnnnnnnnnnnnnnnnnnnnncgtgagcttctttttctctcctaaaaatcgataagtagctccacctgaagagggatggaacctctgggtcaggaaacagctggaatccacactcacctcattcccattgtttggatcatgcttctttccaacacgtgttcacaatctccaaagggactgtatttcttctctgtgcttaatgtgatttgaaatatgttgaatcaaagtgaaatatttattttttgaataaaggagataatagccttaaaaaaa

SEQ ID NO: 7674 - DNA, 523 bp, Homo Sapiens
agtcttcatcaccgggtacccttggcctttagtttccggttgggtttggccaatgggagagaggagatggatgggctggaggagacatcggggtccttctcctttcagcgccctcctagcttgtcagtggccatggcaggactggaattggcaggatgtacactgagtttgctaaaccacctgagcatgagaccactcaggcgcctccatgctcccatgctcagtgccacgcccatctcagctgacaacaacttgcataagggcttaccatgttaaggagctgtcttagatagcaaataaatattccaagcttatctcatgtccaaaactaactcctgattcccgcccctccccaaagtaccttctcttctggcatccttctacatttcagaaatgacaaccgcgtccttcccagtagtttaggtcagaaatcttggagtcatcctggccacttctctttctctgtctttcacctcaattccaatctgtcctcaaatctacctcccagagaggggcggagcag

SEQ ID NO: 7675 - DNA, 871 bp, Homo Sapiens
  misc_feature (739)..(739): n is a, c, g, or t
gggaggggcggggcgagcgcgggacaaagggaagcgaagccggagctgcgggcgctttttctgcccgcggtgtctcagattcattcttaaggaactgagaacttaatcttccaaaatgtcaaaaagaccatcttatgccccacctcccaccccagctcctgcaacacaaatgcccagcacaccagggtttgtgggatacaatccatacagtcatctcgcctacaacaactacaggctgggagggaacccgggcaccaacagccgggtcacggcatcctctggtatcacgattccaaaacccccaaagccaccagataagccgctgatgccctacatgaggtacagcagaaaggtctgggaccaagtaaaggcttccaaccctgacctaaagttgtgggagattggcaagattattggtggcatgtggcgagatctcactgatgaagaaaaacaagaatatttaaacgaatacgaagcagaaaagatagagtacaatgaatctatgaaggcctatcataattcccccgcgtaccttgcttacataaatgcaaaaagtcgtgcagaagctgctttagaggaagaaagtcgacagagacaatctcgcatggagaaaggagaaccgtacatgagcattcagcctgctgaagatccagatgattatgatgatggcttttcaatgaagcatacagccaccgcccgtttccagagaaaccaccgcctcatcagtgaaattcttaantgagagtggggtggccagacgttccggtcagttgtccccacaagctaaaattgccgtccctccaacggccaggtccagtcctttacgggttcctccagcgaaaactagaacgctgaacttccttcaagagag

SEQ ID NO: 7676 - DNA, 381 bp, Homo Sapiens
gtgaagtttaggtgaaagaatttggatatctaattgctctagcaccatttttggaaagtgctatcctttctgcaccacccccccactccttttttttgtaacagactctcactctgttgctgaggctgaagggcagtggtacaatctcagctcaccacagcctcaacttcctgggctcaagggatcctcccatctaagcctcccaaattgcagaaaagtacttaaacatgacaccaaaagtacaatcgataaaataaaattaataaatttgacttcattaaagataaaaaattctgccctctgactcagttaagaggatgaaaatacaagctacagatgggagaatatattatttgcaaacctaagtatgacagatgactc

SEQ ID NO: 7677 - DNA, 289 bp, Homo Sapiens
  misc_feature (101)..(141): n is a, c, g, or t
tgggcagaaggatcacttgagtccagaagttcaagttcacagcgagccaggtagggcacatgccactgccctacagcctggccgacagcaagaccctatcnnnnnnnnnnnnnnnnnnnnnnnnnnnnnnnnnnnnnnnnngatcaaatggaaatcttaggactgaaaaatacaataatcttactgaaatggctcaagagaagaatgaagatggtgagggaagaatgaatgaatttgaaaatataacaacagaaattatccaatctgaacaggaacctgtgggactact

SEQ ID NO: 7678 - DNA, 363 bp, Homo Sapiens
agtctctacaatagtctttgtacacaaattcagagggaactgaaaaatcccagagctcaaggctggaattgctactgtcttaatgtgagtatttttatagatgacataattcagaatacttacaatggccctctgcagctttccagtacatccctgtttatcccattccatccaccgaggcccaacagcatggatgatctgtttgcagggaagcctccctgctcccgtgacagctatctcaccagctgacactttaccatatctcgccacaaactgtttgctctctacttggatttcaaatccaccagcttataccaggccaggccagcctcccccatgcagaagatcttcattgtggtggca

SEQ ID NO: 7679 - DNA, 652 bp, Homo Sapiens
  misc_feature (84)..(125): n is a, c, g, or t
  misc_feature (463)..(507): n is a, c, g, or t
  misc_feature (568)..(602): n is a, c, g, or t
cgcgtgccggatttagactcgtctttaggcaaaacctacagcgcccccccctcaccccagacctacagaatcagagtcttcaannnnnnnnnnnnnnnnnnnnnnnnnnnnnnnnnnnnnnnnnngcaacgctttagatgcgttgaagttggggaccacggtgcctgggccaggtcagcagagctgcctcgtaaatgctggggtatcgtcatgtggagatggggaggtgaatgcaacccccacagcaggccaaaaccttggcctccatcgccacagctgtctacatctagggccccaaaactccattcctgagccatgtgaactcatagacaccttcagggtgtggggtacagcctccttcccatcttatcccagaaggcctctcccttcttgtccagcccttcatgctacacctggctggcctctcacccctatttctagagcctcagaggacccatccacnnnnnnnnnnnnnnnnnnnnnnnnnnnnnnnnnnnnnnnnnnnnnacataaatcataacttgcatgcatgtgccaggcacaggggataccctctagagacaatctnnnnnnnnnnnnnnnnnnnnnnnnnnnnnnnnnnnttaaaacttaattagtaaaactggctgggtacagtggctcatgcttgtgg

SEQ ID NO: 7680 - DNA, 538 bp, Homo Sapiens
  misc_feature (272)..(272): n is a, c, g, or t
  misc_feature (437)..(461): n is a, c, g, or t
tgagccaccgcgcccagctggggttttcctaccgtggttgtaaaaattcatttcttgtcgccacctagattaacaaatctcagattaagaactggccttttttcgcctcctctttgaattcactgtctaaagaaacggccattgccctttccgtaaaccaggacagaggtcatgtctgctttgcctttttgcaccttggcccctgcctgcccctcacctccccactcagctacagtgactggaagggcccacacaggaaagctgggccctgngtcttcatggacgttgctggaggatgtgtctccctgctggtggctctcagtcttcctgtgctcagtagggccttctggaggattctaatttccctgtcctggaaaccaccttgaaaatattcttaaatattcttaggtggaattaagatgcctctgtctaagggnnnnnnnnnnnnnnnnnnnnnnnnnaatccatcttagatttgaatgccccaagaatgaacagtctcctggatcttggatctcttccttttggtttttaaaaa

SEQ ID NO: 7681 - DNA, 352 bp, Homo Sapiens
acacgcccccgcctccgtgggcacaaaggcagcgctgctggggaactcgggggaacgcgcacgtgggaaccgccgcagctccacactccaggtacttcttccaaggacctaggtctctcgcccatcggaaagaaaataattctttcaagaagatcagggacaactgatttgaagtctactctgtgcttctaaatccccaattctgctgaaagtgagataccctagagccctagagccccagcagcacccagccaaacccacctccaccatgggggccatgactcagctgttggcaggtgtctttcttgctttccttgccctcgctaccgaaggtggggtcctcaagaaagtc

SEQ ID NO: 7682 - DNA, 329 bp, Homo Sapiens
aattgctatttgatatggtttggctatatgtccccacccaaatctcatcttgaattataatccccatgtgtcaagggagggacctgacgggaggtgattggatcacgggggcagttgtccccatgctgttcttgggatagtgagttagttctcatgagatctgatggttttataagtgtttgacaattcctcctttacacacactctctctctcatctgctgccatgtaagacttgcctgcttccccttctgccatgattgtaagtttcctgaggcctcctcagccatgtggaactgtgaatctattaaacctcttttctttataaatg

SEQ ID NO: 7683 - DNA, 682 bp, Homo Sapiens
aagttcacaccgagtagcccttgcggcctgtaccaccagtaccacctggcgggacactacgcctcggccacgctatgggtggcgttctgcttctggctcctctccaacgtgctgctctccacgccggccccgctctacggaggcctggcactgctgaccaccggagccttcgcgctcttcggggtcttcgccttggcctccatctctagcgtgccgctctgcccgctccgcctaggctcctccgcgctcaccactcagtacggcgccgccttctgggtcacgctggcaaccggcgtcctgtgcctcttcctcggaggggccgtggtgagtctccagtatgttcggcccagcgctcttcgcacccttctggaccaaagcgccaaggactgcagccaggagagagggggctcacctcttatcctcggcgacccactgcacaagcaggccgctctcccagacttaaaatgtatcaccactaacctgtgagggggacccaatctggactccttccccgccttgggacatcgcaggccgggaagcagtgcccgccaggcctgggccaggagagctccaggaagggcactgagcgctgctggcgcgaggcctcggacatccgcaggcaccagggaaagtctcctggggcgatctgtaaataaacctttttttcttttgttttttaaca

SEQ ID NO: 7684 - DNA, 420 bp, Homo Sapiens
  misc_feature (18)..(18): n is a, c, g, or t
  misc_feature (166)..(166): n is a, c, g, or t
ggcccaccccagtgcccnagcaaccccctgctccaccgctcattcccctgctggccccggggctggtctcacccaagtgccaacccgagagctccttttggaacctgcacagcccgccgaccctgttgccacctgcacccaccgctggaccatgcagccctcgccntccctggaatgctgtcccagcctggccgagggtcccaggtgaagactggagggaccccaacagccaccgcccaggacgctgaggctcccttgcctgactgtgacttgtgcctctctcctgcccccgtggggacatggcagcccagagccaaggctgggtgggcaggtgacccaaggaacctttctgggaacaccttctcgccgggctgggaacaataaatgcagccatgtctctgcagctggtgctgaaaaaaa

SEQ ID NO: 7685 - DNA, 1075 bp, Homo Sapiens
tgtattggtggtgctggcagtggtacgagctggtggtgtttacagcaagcatggagatctatggctctgctgtggcagataaactggacaatagcagaagcattcttaagaggagatattacagacagcactgcactttggagttgggcagctacatcaaggacctctctgtggtccacagtgacctctccagcattgtgatcctggataactccccagggcttacaggagccatccagacaatgccatccccatcaaatcctggttcagtgaccccagcgacacagcccttctcaacctgctcccaatgctggatgccctcaggttcaccgctgatgttcgttccgtgctgagccgaaaccttcaccaacatcggctctggtgacagctgctccccctccacctgagttggggtgggggggaaagggagggcgagcccttgggatgccgtctgatgccctgtccaatgtgaggactgcctgggcagggtctgcccctcccacccctctctgccctgggagccctacactccacttggagtctggatggacacatgggccaggggctctgaagcagcctcactcttaacttcgtgttcacactccatggaaaccccagactgggacacaggcggaagcctaggagagccgaatcagtgtttgtgaagaggcaggactggccagagtgacagacatacggtgatccaggaggctcaaagagaagccaagtcagctttgttgtgatttgattttttttaaaaatcttgtacaaacaactgaagaacgcatagaacagacgcgcagcacgaccagacaaaagcaacaggggcgggggcgggacaccaaaaaacatcacgccgaggagggggccccaaacacgctgaaaggacaacaccgcgatctatgtctgcccaagggcgggcccccaaagagaagcacgatgaaaaagcagagagcacgcagaccggcaagattacacaacgcgccgacacgggcaaagacggggacacgcggagctctgtgggaagacacacatgaccggaggcgaggggacacaccgcggcaaagcgcccaga

SEQ ID NO: 7686 - DNA, 543 bp, Homo Sapiens
  misc_feature (81)..(81): n is a, c, g, or t
tctttttctcctctccctccctcccagcccctgagtcatgaacagcaaggagtgtttgaagtttctgctttgaactccgtnccagcctgatccctggcctgagcaacttcacaacagtaattgcactttaagacagcctagagttctggacgagcgtgtttggtagcagggatgaaagctagggcctcttatttttttctcttaattattattatatttctgagttaaacttagaagaaacaactatcaagctacaacttttcctgccattttcctgtggttgcagcctgtcttcctttgaaattgttttactctctgagttttatatgctggaatccaatgcagagttggtttgggactgtgatcaagacaccttttattaataaagaagagacacaggtgtagatatgtatatacaaaaagatgtacggtctggccaaaccaccttcccagcctttatgcaaaaaaaggggagaatcaaagctttcatttcagaaatgttgcgtggaaaagtatctgtaattaaagtttcgaagtaattta

SEQ ID NO: 7687 - DNA, 541 bp, Homo Sapiens
  misc_feature (17)..(17): n is a, c, g, or t
ttgaaccccttgtacanccgctatgaggaacccaatgcctggagaatatctcgagctttccgacggcgctgaaaggcaagattgttcctttgcctctccagcagcagtagccagggcttggacttatcgatgacaggctggtcctgaggatacagctgtcccgtgactgactgtcttaactgagcattttctcaactcgactctcatttcttccctgctggtaaaatagaaacagggatttaaacctggctttggcaagagcctgcagcctccatcaccccaagtccttgggcccagttgggagctcatatctaacacagagacacattgcatcaacttcaagaaagggacaatttgtgcagctccaggatgggaaggtggagtgggtgagcatcttgtgcagggacatggtgagtgccctgatgccccagctagcaggagctactgtgctcatctaaagtgtttgccccacttcccaccccgtctccagcccctgtactttggcttgacctcgtggaaatatttattttcttaaggaaac

SEQ ID NO: 7688 - DNA, 1100 bp, Homo Sapiens
  misc_feature (715)..(715): n is a, c, g, or t
ggggccggaggtgtcgttggtgtgttgcgcgactggccttgagggagagctggggcctgctcccggagagatacggctatgtcgatcgaaatcgaatcttcggatgtgatccgccttattatgcagtacttgaaggagaacagtttacatcgggcgttagccaccttgcaggaggagactactgtgtctctgaatactgtggacagcattgagagttttgtggctgacattaacagtggccattgggatactgtgttgcaggctatacagtctctgaaattgccagacaaaaccctcattgacctctatgaacaggttgttctggaattgatagagctccgtgaattgggtgctgccaggtcacttttgagacagactgatcccatgatcatgttaaaacaaacacagccagagcgatatattcatctggagaaccttttggccaggtcttactttgatcctcgtgaggcatacccagatggaagtagcaaagaaaagagaagagcagcaattgcccaggccttagctggcgaagtcagtgtggtgcctccatctcgtctcatggcattgctgggacaggcactgaagcggcagcagcatcagggattgcttcctcctggtatgaccatagatttgtttcgaggcaaggcagctgtcaaagatgtggaaaaagaaaagtttcctacacaactgagcaggcatattaagtttgggncagaaaatcacatgtgggagtgtgctcgaatttttctccagatggtcagtatttggtcactgggtctgttgatggattcattgaagtatggaactttactactggaaaaatcagaaaggatcttaagtaccaggcccaggataactttatgatgatggatgatgctggtcctctgcaaggtggtttcagcagagatacagaaatgttagctactggggcccaagatggaaaaatccaaggtgtggtagattcagagtggacaatgtttaaggagatttgagagggcacacagtaagggtgtcacctgtctaagcttttctaaggatagcagtcagatccttagtgcttcttttgaccagacaattagaattcatgtttagattct

SEQ ID NO: 7689 - DNA, 963 bp, Homo Sapiens
  misc_feature (564)..(651): n is a, c, g, or t
  misc_feature (653)..(661): n is a, c, g, or t
  misc_feature (895)..(906): n is a, c, g, or t
agaagagcttactggtgcgagcgtccgtcgaccccgtcgccgctgacctagagatggcagggcggtctcaccgacatatttcagcatgatacatactgtggtgatgtctggaacaccaacaaacgccagaatggcagactcatgtggctctatctcaaatactgggaactcgttgtcgaactgaagaagtttaagagagtagaggaagccatactagaaaagtaagacaagagtgaaatcaaactgcttttagtgactcgaggccaggcagtcatgcgccttctgggtctccggcgtcttccgttcccgtgctgcccgtgtcatggccacaccgtcacccttcagcagcgacctccactcccgccaccgtctgagcagaagtgcaccgaagcctcagagacagagggtctcctcccgatgctctgccgctgttggggatatggtttcttgaagcatttttaggctgccagtattgtattaagcagaacagtataacctcgtattttagctccagggtaaaaatggttttttaaaaagtcaaatacaatactggtccttagcacnnnnnnnnnnnnnnnnnnnnnnnnnnnnnnnnnnnnnnnnnnnnnnnnnnnnnnnnnnnnnnnnnnnnnnnnnnnnnnnnnnnnnnnnannnnnnnnncgccgaaataagatatttcaccccgcgggggaacacccataagaagagcacacccacacatcgttgtagagcagaaagggcccaccaccatagagtggcaggatctaatgaacaggaaccaagcggcggcgcggcgcggtgaataaaaatacagagtatggcagggtgaagaaaaagatgccaactagatgggagagtagtacttcgtgaggggaagaacaccccattcctgcnnnnnnnnnnnncaataaatatagggcacacaccccaccagagaaagtagtaagacgcgccgcgagcat

SEQ ID NO: 7690 - DNA, 1100 bp, Homo Sapiens
tatcgtcgacccacgcgtccgaagttctggagtcctgggtctggggtttgctggtccccaaagaggaacacactgggtgtaagatctgggtgtagagggcggcttcagagagactcacgcttgtgcagttggaattgctgttaacggagactgggaagatcttttgtgccaagatgcagggaaatgaagaaagctctttccagctgtttttatggattcatggagtgggctcatgttgggaccagctgactctgggaggaagactgcctctccatcgctgtcagagagcctgaaaggaccaacaatgaggtgttcttgggacccgccatggggatgattgcttctctaggctcctggatgttgctgcattctaagcttaacctcctggtctcatggcagtgacttgagcttttgattcatagaagaaagccagaggttctgcttgttcttgtctgccagccctcgtcgttctttctcctctgcctctcacctctaccccaaatacctctgttcttagtctcaaggggagaataacatcagggagcccctcatcttccccagaaggactcctcgttcctcatgtagttaactccattgattttcctatcttggtgctgatagctctctaagggtagggcacacctccccacagccaccctccctcttcagagagcccccagccagcagcaggcccctctgcctgcactcctcaggcttgcccctcgctgcctcagtgaggcactagtgccactgccgtggcccagccgggccatagctcaggctgcagcagaaatgcctctcagtggccaacagttgcttttctctctggtgtcaccctgtggcaacaggctggagcaggggaaggagaaagccttcctcttctctcataggatagaaaggcaggctcagaactaatgctcatcctgatctctaggccttgttcctcttccagggaaaaaaagccaaatccttatcaaggaaaaagcacctaacagctccctttggatattcctgagctctgctgtggggagtatcataaaggttctagccttcgtgaagtgttctcgtggaggtctgttgtcccttagccctcagcctca

SEQ ID NO: 7691 - DNA, 1076 bp, Homo Sapiens
gtttttggtgatctagcaaacaaaatggtttctgcagttagaagtgagcgagaagcatttgtacttatagtatttaaataatcctggttaatctcttgttaagccgagtaacccctccagattttgcctttttattattgaggctggcttcattttcttctacttttttttcccgttttatagcagttaattatttttgtgattattatgcaagaagcattgcccttgagttaaactgttatagtctcataagcagctattaaaataactgagcattgttttatgaacacacactaatctgagatgctgaaaagctttgcaactaaaaagcaaaacaacctacattagtcatctagccattgtttggatgtcttgagttgattttttatggtgcctcttttagcttggaatattacgtttactttaatccaagtctaggccttttaaagggtccttaaaattaaagttcagaatgtgaatccctttgacatctattacaggtttataggaccttttcggtcgtgattactgttttcaatacgaattgtataaatgaagttaactttgtcagaagttaaaatggaggtcataggagttcctggagaaatggctctcctgtttctttcattaccccactgaagttcaccccagtttctggccacaagaatatgagaaaggaaccctgttgttttccaagggaaatcattcctctctgtccccactgttgattaactaaagtcctggacaccttccttcctccactggccaagacccaccttgacccaccttgaacctcttttcagagccgagtggcatgaatatgtgtactgtttctgcttctgttgatggagtggctgtgggagaattaaaggaaatgctaatttgagcttcattcataggggaacctactatatattgcatccctgctggttggaaattatcttcatctctggactgcattgtttagaaaaatgttaatggcttacaattctgagaacttcattgtgtggctctggggttaagaattctgaaatatgaaaaaaaataaatattttgtattgattctcacgtcaaaa

SEQ ID NO: 7692 - DNA, 696 bp, Homo Sapiens
  misc_feature (503)..(503): n is a, c, g, or t
  misc_feature (506)..(507): n is a, c, g, or t
  misc_feature (520)..(520): n is a, c, g, or t
ggggagttcttccggggcggaggtcaccatggcagctgccttggctcggcttggtctgcggcctgtcaaacaggttcgggttcagttctgtcccttcgagaaaaacgtggaatcgacgaggaccttcctgcagacggtgagcagtgagaaggtccgctccactaatctcaactgctcagtgattgcggacgtgaggcatgacggctccgagccctgcgtggacgtgctgttcggagacgggcatcgcctgattatgcgcggcgctcatctcaccgctctggaaatgctcaccgccttcgcctcccacatccgggccagggacgcggcgggcagcggggacaagccgggcgctgatactggtcgctgacagcgccaaagagaccaacaagatgattttagcgtggactaggacacttaacctaagaagagtttcacttaatcattcaaatcactatctgaagggtcacggagcgcaaaataaagtttaaaaccctgctaccacntcnnaaattacactcancccttcctttcatgtcggccgcctcggcccctccagaagcctttctagaaccattcgttttggcggcgcggggcccccgtaaggtaaagggaaacatgggccataaacctgtctcccctacggaaaatcccgtggtccatgaaacaacggggctttgggatttccctcaccacaat

SEQ ID NO: 7693 - DNA, 267 bp, Homo Sapiens
taaaggtgcattcttgaaagaaatttagagcattggagaattttcaaaataatgtcaaataagatgtaagctccccatagaaagaaatgtattgtcatgtttagagtccacaggactatattagcaaattaattactgttttaatgacttgcttccctacagcgggagactggattatttctcccaatttttcacttgcataggattttacatccagatcctctgctttgtaagtctgtaccgcctcctgctataaactgagtatac

SEQ ID NO: 7694 - DNA, 1324 bp, Homo Sapiens
  misc_feature (313)..(364): n is a, c, g, or t
  misc_feature (1092)..(1092): n is a, c, g, or t
  misc_feature (1158)..(1158): n is a, c, g, or t
  misc_feature (1161)..(1220): n is a, c, g, or t
ggagcgtaagaagcctctggacattgactacatgggggagggaacagctccgggagaaagcccaggagctgtcggactggatccaccagctggagtctgagaaagttcgacctgatggcgaagctgaaacagcagaaatatgagatcaacgtgctgtacaaccgcatcagccacgcccagaagttccggaagggggcagggaagggccgcgttggaggccgctggaagtgaggatgccgccccggacagtggcacctgggaagcctgggagtgtttgtcccatcggtagcttgaaataaacgctcccctcagnnnnnnnnnnnnnnnnnnnnnnnnnnnnnnnnnnnnnnnnnnnnnnnnnnnnttgtcggtcgccatcgaccccagaaaagacttttaaaaaaatccatattgaacaccgctcccgagagggggaggaaacacgatcaaagcctgttcccaaggcgcccccggccctggacctcggtgtggcttccctcccaaaaagcaaggccggggggaaacccgagggtggtggagcatccccggaaggggggctcgtgcggggttcgaccgccacctatcaaaagggaatcacaagcgaacttttaaaatgttgacttcccttcccacccccggcccatctcctcccgacgtatcttcgttgcgatttttcctgttaatcactttcctgcaatcagcgtgggtcggaacacatcccccccatgcgcgtgttgggacgcaacacctgacaaacccccaccccctcccaaccctctaccacccaacacccgtgactcaccccgcctccgctcaattaccacaccattctttcccggctaccatgcgcggcagcgaaataaatcaggcggcgcaccgacacacacaacctcctcgcgcgcccccaacacaatgggacacaacaacccccgtactcaccagcgcaatccacggccgcacccatcccctctgcatacgccccctccacggatcgcccagcccgccgcctctcgtcgcgctctctctgcgccccttgaatagtgccgcggctcgcaatatagacacacaaagacaacccggcctcccgccccnacccagcgcccgtatccacctggactctgccgcgggggtccgccgccctacgccccggacctctcngcnnnnnnnnnnnnnnnnnnnnnnnnnnnnnnnnnnnnnnnnnnnnnnnnnnnnnnnnnnnngacaacacgcactgaaacggggaaaactccgcatagcacctccgcgtagagcccttgaggctataatttccaaaataaaacaccaagaaacaatcatcggagag

SEQ ID NO: 7695 - DNA, 310 bp, Homo Sapiens
ctggggtttcactctgtcactcagaatggagtgttgtggtgtgattatagctctctgcagccacaaactcttgggctcaaataatcctcccatgtcagcctatggagtggctgggactaaaggcatgcaccactatgcctggcttgatttgtgttttattatcacctcacaccaaaaagcacaatgttaggcacacaatgtatcctaaaaatatgcctgttcagcacgataaactcgttcatcgtgcttaaatatcatgtagatcaaataaatttaactgtttaccaagtatcaaatacacttaaaaaag

SEQ ID NO: 7696 - DNA, 1589 bp, Homo Sapiens
  misc_feature (696)..(705): n is a, c, g, or t
  misc_feature (863)..(897): n is a, c, g, or t
  misc_feature (1045)..(1045): n is a, c, g, or t
  misc_feature (1116)..(1116): n is a, c, g, or t
  misc_feature (1133)..(1133): n is a, c, g, or t
  misc_feature (1200)..(1200): n is a, c, g, or t
  misc_feature (1222)..(1222): n is a, c, g, or t
  misc_feature (1400)..(1400): n is a, c, g, or t
  misc_feature (1429)..(1429): n is a, c, g, or t
  misc_feature (1438)..(1477): n is a, c, g, or t
  misc_feature (1499)..(1499): n is a, c, g, or t
  misc_feature (1510)..(1510): n is a, c, g, or t
  misc_feature (1522)..(1522): n is a, c, g, or t
  misc_feature (1534)..(1534): n is a, c, g, or t
  misc_feature (1543)..(1543): n is a, c, g, or t
gacttgggtaaataaaggggactgaactctgtgggaatcacatccatactggagccctggatttttgcagttctgccctccaccttgctatctgcaccaggaggctctccacctggcagccagaggtccccagtgggccgggctcacacacaaatgatgcttcagacccgaatgagaggaccacattttgcttaatgtaaaggagccacttgaaaatgtctgctccttcggggtcctgagattgtggctccccctctggaggaggtggctccacgatgccttgattttcactcatcatttggacatgtgactggcttttcctacctctgccatggtgtagaaattgattgcacattgattggatgagccgggggttttctctaaatctgactaaaggcccaaagtgggcccatctgagtcaggtttgttgagaacaagccctctcaagtgggtggtggcttttcagtggccctgatttctgttccacacgtgttcactggagccaggtgacttcctccttgcgtgagtgagggcacaggaatctcaaaattaaacctgacttcattgcacaaaaacccaaaacggacagacgcccaccacccacccccagtcgcacaccaaatcggccccccgccacaagacaacaagggcgcactcccccaaacccacagcgcaaccccaccatctcgccggcgnnnnnnnnnnaccctccaaaaattttatataaccccctcctttggggcgcgcggccggcccagctggcgcaaccccccggcgtccgtacaacactgttttccccagggggaacctccgggtaaacaccgcctcagtggttttggaaatccttgcgctgagctgaaaannnnnnnnnnnnnnnnnnnnnnnnnnnnnnnnnnngtctctcaaaaacaaacactcccgatgggtggggtattttttccacagcgccccctccctcacgcgcggaaatatttaaaacaaaagacgaggaagacgttggtcgcaaggcaggaggagccccctcgcacacctggttaggacaganccaaaaaagggcgcaacccccgcgtagcgcctactctatactatcttcgttttttattactacgagcgcanacaaaaggtgggggggngtgggcgacacacctctctgttgtgtttgtgctcggccccacactctgtcccccgcccaggcgcggntgcaggtgggaccgagaggcgnggagctatggcacgccaaatgggtggtgcgggttcaggtcaactaacataaaccccctcgccccaacaactctgagccccgcgcgcgctcggccgctcaccgagcagccagcactcccccctcctctccttcgtcacctctccctctgtcaccaacacatcctacctgtcctgtgtgngccgcgcgctcgccagggccgtggcggangacaaaacnnnnnnnnnnnnnnnnnnnnnnnnnnnnnnnnnnnnnnnntttagccgatgatacgtaatangaaatacacanacggccgcctcntatgattcgccntgggtatgnggggccggcgggggggcccgacacctctcgccaacgcacgtgcggg

SEQ ID NO: 7697 - DNA, 351 bp, Homo Sapiens
ctggcagtgatttcgcagcttgagacctatttaataacagtgtgagagaagggtcacacagtcaagcaaaaaaacagacgaaactctggtatagcgaaggaccaaaagttctgcgggctgagcaggaaagttggctccaaatgtctgcctgcctgccagcagacctccagccccaaccttctgctttcccggcttccccaccccctcattcccgacagaccacagccagccagccaggaaaggaggggaaaggtcgcagtggggatggctcctcccttcccgtcttagagcccttcttaagcagagcccgccgagctcgctgagatgtggaaagtcacagggttctttccc

SEQ ID NO: 7698 - DNA, 1068 bp, Homo Sapiens
  misc_feature (264)..(274): n is a, c, g, or t
  misc_feature (371)..(383): n is a, c, g, or t
  misc_feature (421)..(429): n is a, c, g, or t
  misc_feature (441)..(457): n is a, c, g, or t
aggggtagtgtaaatcctgtaaattgggaggtgtttctgtaccacctttcttttcaaaaattattatttggtcaggaggcgcgggcggccggtagaaattcttggttatatgggggagttccggtcaggtgagatcaccccccgtggtatgagaagtctcccggggacatggggccccctcagtaggtccccccttttggggggacagggtgtggggaaccccgccccggtgtttctccgccccgcggcgtgttttttattttnnnnnnnnnnnatttcccagaggcccttgttcctggggccgcgggtgttttctttgggggggacccgagttaggggcccccgtggcccactttttctttttggggggnnnnnnnnnnnnntatggaataggtttttgaaaaactttttttcagggccnnnnnnnnnccggacaagtgnnnnnnnnnnnnnnnnncccctagcgatcgaccaggtcgtgtgtgggtggcggtttgccccccctccggcttcaggggtggttgttctcattcaaattacagaattttattgatacagtagattaataaaaactgaaaggatgataaaatgggataaagaattcagtacattattttataacacactctttaaaattaaaatactttaaatctttcttcttaaaattttcattgccatgaaaggccagaaaattctgggacaaatcaatactgaggtgtaaagtaatccaagaacttcaggactatttcacaatttgcatggttgtcctcctatcagaggcatccttctggtgtaatggcagacaatttagcacctctgaagattaagggtgcccaggagtaaacactaggtaagatacacaaagggaagagaccatttaactctccaacaaatagtgacatcaagaaaatgacaccaattgttgaaaacaaattttttttcacagtaaaattgcagagaatacaaatacaaacactgacagattactgcttaagatctatcctaacaaattcttttcaaatcaatagatccaataaacagtcgggtactgtcagtttaaagccgcag

SEQ ID NO: 7699 - DNA, 446 bp, Homo Sapiens
gtgccggatcgacaagagacccagaacggaccgtcgtcactagccatatggctacccctgatgccacgattcccaacactgcgatgacgatccgctgttttcggctgcgcgtccggtaagaacgtccgaaaaataccagcccgatgacgaatagtgccaggctgatggttccggcgcgagacccggatgctgccaaacacgcaagatggctgacggcagccacgctggagagaatccggtgacggtgtcgtatcacggcgtccacagcaacggccagggccaggatgagaaggacgtggcagatggcggccccaccgagtctggtggcaacccgccatccggtggtattgccttcgacgtactcacgaacgaggtcaattgggttagcgatggccatcagcatcgacaaccgccacagcgcgccttcaaggttccccaccgcgatc

SEQ ID NO: 7700 - DNA, 188 bp, Homo Sapiens
cactgaaacactgttcctaaggtctatacagaggctatggtaaataacttaaaaatagttattaagatgatgtgtataatctattatttatactgtggttaaagcatttttgggtttttggtgttttattcactgtctataataaaagttaacttggtttagccattttctgtagatgtgatcgatct

SEQ ID NO: 7701 - DNA, 324 bp, Homo Sapiens
  misc_feature (67)..(75): n is a, c, g, or t
aattggcaagccacatatagaagaatgaaagaaagaatgaagctagatcctcattttttcacctttnnnnnnnnntcaatccaagatggatcagagacttaaatctaagacctgaaactataaaaattctaaaagtgaaaaaccattctggacattggcttaggcaaagacttcataaccaagaacctaaaagcaaatgtgacaaaaacaaagataaatagatgaaacttaattaaactaaaaagcttctgcacagcaaaagaaacaatcagtagagtaaacagagaacccacagagtgtgagaatatctttgcaatctcttga

SEQ ID NO: 7702 - DNA, 401 bp, Homo Sapiens
gtgctcactgacattctactccaagtcggagatgcagatccactccaagtcacacaccgagaccaagccccacaagtgcccacattgctccaagaccttcgccaacagctcctacctggcccagcacatccgtatacactcaggggctaagccctacagttgtaacttctgtgagaaatccttccgccagctctcccaccttcagcagcacacccggatccactccaagatgcacacggagaccatcaagccccacaagtgcccgcactgctccaagaccttcgtcaacacctcctacctggcccagcaccttcgtatccactcaggggccaagccctacaacttgttcctactgccagaaggccctacgccagctcttccaccttcagcagcacacacga

SEQ ID NO: 7703 - DNA, 339 bp, Homo Sapiens
gggaggaactcataaatatccacctggtcacacagcgtcatcatgatgatgataccaagcatcccagaggatggggggtttggctgaatctcttctggggagatttcttgaagaatgtcccatagctcccaaggcatctggggcttgaggatgtaaaagggctgattggggtgcagcttacgataagtcttgtagttgttaaagaaattataatccggattctggtaccactttgggatatctgagtggtatacagatgggtcccatacaattaggattccttcattgtacaaactgtctttgaggaagcgcttctctgtggtaaccaactgagagttc

SEQ ID NO: 7704 - DNA, 174 bp, Homo Sapiens
gatggctcctcgctgggctatgtgctgactgctttgatggacaagcaccccaccccgattagctcagtggcttgatgagctgtacacagccaggctggtgcggaaccgtgagaaaggaacagtttggctataggagctagtgattcggggctcgccctttatgtccccatgaag

SEQ ID NO: 7705 - DNA, 1423 bp, Homo Sapiens
gctgaaatagaggctggaaccggtccggaattcccgggatcgccgtgggagccctggaggcccggcctggccgctcccggccctggggtgcacatcggccctgagtcccgtcccaggctctgggctcgggcagccgccgccaccgctgcccaggacgtcgggcctcctgccttcctcccaggcccccacgttgctggccgcctggccgagtggccgccatgctcctgccttgggccacctctgcccccggcctggcctgggggcctctggtgctgggcctcttcgggctcctggcagcatcgcagccccaggcggtgcctccatatgcgtcggagaaccagacctgcagggaccaggaaaaggaatactatgagccccagcaccgcatctgctgctcccgctgcccgccaggcacctatgtctcagctaaatgtagccgcatccgggacacagtttgtgccacatgtgccgagaattcctacaacgagcactggaactacctgaccatctgccagctgtgccgcccctgtgacccagtgatgggcctcgaggagattgccccctgcacaagcaaacggaagacccagtgccgctgccagccgggaatgttctgtgctgcctgggccctcgagtgtacacactgcgagctactttctgactgcccgcctggcactgaagccgagctcaaagatgaagttgggaagggtaacaaccactgcgtcccctgcaaggcagggcacttccagaatacctcctcccccagcgcccgctgccagccccacaccaggtgtgagaaccaaggtctggtggaggcagctccaggcactgcccagtccgacacaacctgcaaaaatccattagagccactggccccagagatgtcaggaaccatgctgatgctggccgttctgctgccactggccctctttctgctccttgccaacgtcttctccctgcatctggaagagccaccctttctctctgcaaggaaactgggatcgctgctcaagaggcgtccgcagggagagggacccaatcctgtagctggaagctgggagcctccgaaggcccatccatacttccctgacttggtacagccactgctacccatttctggagatgtttccccagtatccactgggctccccgcagccccagttttggaggcaggggtgccgcaacagcagagtcctctggacctgaccagggagccgcagttggaacccggggagcagagccaggtggcccacggtaccaatggcattcatgtcaccggcgggtctatgactatcactggcaacatctacatctacaatggaccagtactggggggatcaccgggtcctgggagacctcccagcttacccccgaacctccataccccattcccgaagagggggacctggccctcccgggctctcta

SEQ ID NO: 7706 - DNA, 991 bp, Homo Sapiens
  misc_feature (925)..(934): n is a, c, g, or t
ggcccatggccacctccccattttctgtgccttatctcactgtttcagctgagtccaagttgtttactctgttcctctccagaggggctctctgtcccagttgggcagctcacctttgggacataagcctttgccccacaagctgtggagagggccaaaaccaagctgcttgagcccactctcttgctgagagtccaggcctgcctgcctgccagccagaggtgccccttatgcacatccagtcctaccagcctgcttccaggagcctagagtgggaaaggcacctgggggagccctggtgaagggctggacctgacccatggaggcaggaggaagacctggctttcttggtttgtccggccctggggagcagccttccctactcactttccccttgcggcaccaaatggtcacctccttccagagcaaaaactggcactcatagcaagccagaacccccatccccatcctcatgggtctgtggctgggtgcaggccatcaaaatggacaccacgagacagaagtggggactgcctggccacctagcgccttcccactccttaagcaagcacaaagaagatgaggcagagaattgtcagagctgaaagttcctttggttgctcacaactcaggtatgcacccatgtggcagccaggcagcggagccctactagactgccagtctcatgcacccagacctgtggccagattgtggcctctggctgcctcaggcattttcctctttgcattgggttttcctgcattagtaactacagctgcaacagacatcctccacattgtgcacactggttttgcctttgtcctcaagagttgatacttggcattagcatgaaacttgtgggtgtgggaggatggagagagaactctaacacaaaacatcttattaaaattgtacttgagagacnnnnnnnnnnctctgttgtattttgacagaattatttttattaaaatacacatccatgagcaaaaaa

SEQ ID NO: 7707 - DNA, 486 bp, Homo Sapiens
gctgcagcgcagccggcggctctgccacgaggacgtggaggcgctggccgccatctacgaggagaaggaggcctggtaccgcgaggagagcgacagcctgggccaggacctgcggaggctacggcaggagctgctcaagaccgaggcgctcaagcggcaggcgcaggaggaggccaagggcgcgctgctggggaccagcggcctcaagcgccgcttcagccgcctggagaaccgctacgaggcgctggccaagcaagtagcctccgagatgcgcttcgtgcaggacctcgtgcgcgccctggagcaggagaagctgcagggcgtggagtgcgggctgcgctaggcgcagtggggtggggccaggccccaggacagccggagctcggcctgcggtgggggcgcttcctgtggacgctgcgcctcccatcgcccgggtgcctgtccttgcccagcgccaccaggctggaggcggagtgggaggagctg

SEQ ID NO: 7708 - DNA, 406 bp, Homo Sapiens
aggcaggactgtgaggcctagtgtagggcctcctgccagtggccggcacctacttgtggggctgggggttcccccagcaggttgggctccccacctgacacactcacagaccttgtgccttggagagccagtgttcccggggccacatagctatgccgcccaggggctgggcctgtcccagctctggtcccccggccccaggtcctggacgctggctccgcgcagcagcaggcggcctccggaggacacgatgtgactggctgccgctacgtcgcactcagatgagtctgcgccggatcgacctgctgccgagtcctgccggacaggcacaggcagggagtgaaaattatctacccctttttatttcttaataactgaatgaaaataaacattggtggtttgaaaa

SEQ ID NO: 7709 - DNA, 395 bp, Homo Sapiens
ccaaggaaattcctgaaacttctgactgcctctgctcggcaatcagaagtttcaggaatgtcatttgcaccatattgatggaatttccttcaacatctaagtatgaaagcagttttcccctcttaaattcactaaaccaacttcctggtttctcctttggccatgatgaaattcttactccctcagattttttgtctggataaatgcaagtctcaccaccagatgtgaaattacagtaaactttgaaggaatctcctgagcaaccttggttaggatcaatccaatattcaccatctgggaagtcaggatggctgagttgcaggtctttacaagttcgggctggattggtctgagtacccacttggaaatttcatatgctcgatgtcttgggcaat

SEQ ID NO: 7710 - DNA, 428 bp, Homo Sapiens
agtcaaagcagttcgaaaacattaactcaatgtcatcaataaactcagatgctaatttatattcacacttattcactttttcacgaaatatatttaaggcaatgggctttttgatgatgtcatagtagtctgggacctggattttagaaacaagtttcaaaaaaggccagctgtcatcatgtcgtaccaattctacaacaagttgttcaaaagcagacaattcatgaactcctccctgtcggccagaactccttcgacccagtgtcacaggcgatggctctggagattgtctttttctgcatcttcttttggattcactctcttggagagaaagttttgaagcaatatttacagatcttgactgttcacttgactttgtggcaatgactctgaagttagggaagttgggactattttctggtggcaat

SEQ ID NO: 7711 - DNA, 539 bp, Homo Sapiens
tgatccagaggattcaagcttgatttgctttgactgaagcgtgttcctcctctatcagagaaggtcgtcctctcgtcctcttcaactgagcatgcagctttaggagggacacatacggggcagtgagggaggacggggacacccgcctgctcagccagatcaaccaaatcaatcctggcgatcaatggggtgatagatgttgcagtcagagtaccctcaaatctggagcgtctttgaaaaatgagcaggaaagcctagcctgatatcatgacaagcccattggagcgtccacgggtttctatttgagaatctcccagcactgctgtctctcctctttctccttggtaagtacggggcttgtttcctgtacttacaatgggaacattgagttcccatggaaggctctcaatgggaaaatgctccaccaagcttagccggactgggatctcctcactcccagacttctcagctccatgccttaaaatgatgtcgtcattacctgaggcctctgaattggcaatcaagcttgggtaccgagc

SEQ ID NO: 7712 - DNA, 499 bp, Homo Sapiens
cacacgatgggtcctcagctccaaagactggcctttaggaccatcaaagggcctatgcaagcaagcggggtggttattaggacagatggtatatttggtatattctgggaccatcccttcaagacacgtctataaaacaaaaatggcgcttggtccacacacggttgctgctccctcctaccagctggctcccctcctgtcctcctttgactgtttgactcattgactgttaaaatgccacccccatacatatttgggatgcaaaactgaagtcaaaaggaaataatataagaaacacaaacacatatatgacagcaaccttcaagatctgggttttcagctttctgcaacctttgttttcactgaaatgttgaaactactcgtctgagggcaaaggaacctcctcacaaatgctatagctgccaattggacacttggggcatttcgaggtctggccctaagaatttactttctccttttccttttttctatttagacc

SEQ ID NO: 7713 - DNA, 294 bp, Homo Sapiens
accagaagcgaagagtaacccagactgggggcaggaagggagggggcaaaagagaagaggggaggagtattcagcatgacttgcataaaccatcccatctatcgctcgggaacaatttttcaaagtgcttttcgaatggaatggtctataacaatgctaaactgtgaaccagacatgccaatcagcaccaaaaattagtttttttctaagaagaaatgccaaggccacattacccttttaaatacaataacagaaaagactccattctggatcccacccttggtctccatctgc

SEQ ID NO: 7714 - DNA, 246 bp, Homo Sapiens
ataagtaaataaacagttaataaggttctgaaaaataagtaaagtaatagagatagagataaaattgtataattgctcagggaagcattacagcaggatattccccctgaatgttaacttcagctgaatagttgaggattgtaaactccgctgaaggagttcctagtacaatttaaatagccttaccagaagcacaccaaccaatgttacctcttctagtggtaatgtaagcatactttaggcaat

SEQ ID NO: 7715 - DNA, 318 bp, Homo Sapiens
attgccattgatgataatatattaaactcccaattatttatgacaggagacaggcaaaaaccagaaaaattaaatccatatataatctctaacttaatttcagtaatttattttgccatttaaccctgcccaatgggttaactgctcttcaccccgtgcctcattgtttttgtttagtggttgagaaactaataagcaatagaaagggtcaaaggtgggagcaggcagaagaaacaaacacctgaacattattaataattgcagctaccggtactgggtatgtactgtgtgccagacactctgctaagtatcgtgcac

SEQ ID NO: 7716 - DNA, 270 bp, Homo Sapiens
gatatgaaagtatagtgtatggataaggcaggttctaccctgtcagacctcaactgcaattcagttctgaaactcttgttttaaaggaatatctacaaacaggagcccgtgctcaggagaccagtaatgctgatatgaaggctataacattcatgacattttaggaatggttgactatctgaaccattttaacctaaaaaagaagacttaaaggagaatataataatgactttcagatacttaggtgactgacatatgaaagagggactc

SEQ ID NO: 7717 - DNA, 114 bp, Homo Sapiens
agagcatcccatgtgatgcagcagagcatatatactgacagtctttacttcagtctgtccactttggtggttttttttaagccacctttctcagatgagcagctaatcagaaat

SEQ ID NO: 7718 - DNA, 395 bp, Homo Sapiens
agcacttattctaaaatcagccacataattggaagtaaaacgctcctcagcaaatgcaaaagaactgaaatcataacagtctctcacaccacaaggtaatcaagttagaactcaggattaagaaactcactcaaaaccacacaattgcatggaggttgaacaacctgctccagaatgactcctgggtaaataatgaaattaaggcagaattcaagatgttctttgaatccattgagaacaaagacacaacgtaccagaagctctggtacacagctaaagaagtgtgagagagagaaacttacggcactaaatgcccacatcagaaagctagaaagatctcagatcgacaccctatcgtcacaatttaaaagagctagagacgcaagagcaaacta

SEQ ID NO: 7719 - DNA, 342 bp, Homo Sapiens
  misc_feature (69)..(231): n is a, c, g, or t
tgagctgattgccaggtgcagtgagtggcgatcttggtccctgcgacatctgcatcccaggttcaagcnnnnnnnnnnnnnnnnnnnnnnnnnnnnnnnnnnnnnnnnnnnnnnnnnnnnnnnnnnnnnnnnnnnnnnnnnnnnnnnnnnnnnnnnnnnnnnnnnnnnnnnnnnnnnnnnnnnnnnnnnnnnnnnnnnnnnnnnnnnnnnnnnnnnnnnnnnnnnnnnnnnaagtggcatcattgtctgggataaatacccgaggtcatcaactcagggtagagaaatagaaaacctgggcaaacaagaagtgagtttaagagcagaggtttaataggcaat

SEQ ID NO: 7720 - DNA, 363 bp, Homo Sapiens
attcagaggatccaagctgatgcatatgcaaaaaatcatgcaatcaatgcatgaagtttacccctatgtttccttctagaaaattttatacttttaggtattatagctagttctttaatccagttttagtagatttcatgtgtatagtgtaaagttagggtccaactatcgtacttttgcatataaatatctaatttttccaaaatcatttgttgaagaggctgtcctttccccattaagtggtcttggaaccctcaccaaagatcatttgactatatatgtgaagatttatttccaagatttatattctattctataattctatatctttgggcaatcaagcttaagcttgattgcctgatt

SEQ ID NO: 7721 - DNA, 334 bp, Homo Sapiens
attgcctgggttacatggtccctaaacagagttaggatctgaactcttttccaattaactacccttttttacagtcattgctgctaacattttagaaatttgtcattgcagaaacaaaagtagtgtacgcaaatgtgcctaggagcttgaaaataattacagaatacccacaaaaacaaatatggtatatgatgtttggtgttagctgtggagatctttgttcttttgggaggagtaacaatgaacagaaagttttgaggaaaagtaagcaaatatgctttctaaaacaacatatttaaaacaatggatattaagattggcatcaagcttgaga

SEQ ID NO: 7722 - DNA, 422 bp, Homo Sapiens
  misc_feature (320)..(366): n is a, c, g, or t
cgtggggctggtgagggtgatatgagatactcctgcatgaagtgtcgggtacatggctcaacagctagtgggtgcttggtaaacatttactaaattgagactctggaaagagagacgtagtgatagaaatgggctgtaaagggaaaagagctttgtactcacatgaaaggccctatatgtgctaagaggaggtgtctgatgctagtccatattgacaagaaggtcagaaagattgaaaaacatgtcttcctgcactgaggctctttgagtttcattcattcattcactccattcatcctcacttcatttgctcatatttnnnnnnnnnnnnnnnnnnnnnnnnnnnnnnnnnnnnnnnnnnnnnnngagagaacgaaccacagcgcactggagaataaaatccggcacgcgaggttttgaca

SEQ ID NO: 7723 - DNA, 303 bp, Homo Sapiens
  misc_feature (161)..(206): n is a, c, g, or t
  misc_feature (214)..(246): n is a, c, g, or t
tacagttataaatttctttcttgcacaagattcttaactactctgagcctcggattcctcaaccgaaaattgcactgtgaatgcctgctccatagtattgcacgggtttggggtttttgttttgtttttgagcctgggtgatagagtgagaacgtgcctcnnnnnnnnnnnnnnnnnnnnnnnnnnnnnnnnnnnnnnnnnnnnnngtaataannnnnnnnnnnnnnnnnnnnnnnnnnnnnnnnnggagggagaagcattatacaagaaacccactgggacatggctatgatcaaatatggg

SEQ ID NO: 7724 - DNA, 272 bp, Homo Sapiens
cctcagtgcctgtgtcttgtcaaagcggtgcccgccagactgttcgcaccagcatcgcttggtgagggttcagcctgggcaaccttgtgcccaacactccctgtcaaaaatgttccttctatctctatcttgtatgtgtctcagggtgcccaccttcttcttttggtgcctgagccatccccataacctctcctctattcgctggcatccgtttccataacaggcatttatcgagcatctgctgtatacacatccggcagcgagagtttgac

SEQ ID NO: 7725 - DNA, 596 bp, Homo Sapiens
  misc_feature (94)..(94): n is a, c, g, or t
  misc_feature (458)..(468): n is a, c, g, or t
cacaagttaattcactttttaaaaaacttcatgtcatctgaatacttaagctgctttgtttggaaagtgtctttttaaagaaaatagttaatanaattacagtaagataattgtcacaaaataaaaatcttaggtggccagttgtgtattacagagatttggttttaacagttatacaagttatttaagtgggaaacattaataataaatttttattaagaaaaattttgacaccaaaaaatctgtccttcacttagaatataaaatgtatagctgaacaccagcaggtgtcactgtgataacatgttttccccccctgaacagttttatgtggatgggtgcataccaactatggacaaagatatttaggagataataaatgtaagttatatagctgaataaaaataccaaaatgtaggaaaagcctatgagttccatgttggttaggaatgctgtannnnnnnnnnnaggattgctgtatttttaggagaattgtatttttttctcgctttcttcatgtcgtaaacatacagtcttccattatgtaagtgatgtgctgttttattagcaataaaagtagagtaaaaatcccttta

SEQ ID NO: 7726 - DNA, 652 bp, Homo Sapiens
  misc_feature (13)..(13): n is a, c, g, or t
  misc_feature (30)..(30): n is a, c, g, or t
gactggtggtggnccgcgctgcacggcagngagggctacgtcccgcggaactacttcgggctgttccccagggtgaagcctcaaaggagtaaagtctagcaggatagaaggaggtttctgaggctgacagaaacaagcattcctgccttccctccagacctctccctctgttttttgctgcctttatctgcacccctcaccctgctggtggtggtccttgccaccgggttctctgttctcctggaagtccagggaagaaggagggccccagccttaaatttagtaatctgccttagccttgggaggtctgggaagggctggaaatcactggggacaggaaaccacttccttttgccaaatcagatcccgtccaaagtgcctcccatgcctaccaccatcatcacatcccccagcaagccagccacctgcccagccgggcctgggatgggccaccacaccactggatattcctgggagtcactgctgacaccatctctcccagcagtcttggggtctgggtgggaaacattggtctctaccaggatccctgccccacctctccccaattaagtgccttcacacagcactggtttaatgtttataaacaaaatagagaaactttccttataaataaaagtagtttgcacaggga

SEQ ID NO: 7727 - DNA, 760 bp, Homo Sapiens
gcggccgcctcatgcaggaggtgaatcggcagctgcagggccacctgggcgagatccgcgagctcaagcagctcaaccggcgtctgcaggcagagaaccgtgagctgcgcgacctctgctgcttcctggactcggagcgccagcgcgggcggcgcgccgcacgccagtggcagctcttcgggacccaagcatcccgggccgtgcgcgaggacctgggcggctgttggcagaagctggccgagctggagggccgccaggaggagctgctgcgggagaacctagcgcttaaggagctctgcctggcgctgggcgaagaatggggcccccgcggcggccccagcggcgccgggggatcaggagccgggccagcacccgagcttgccttgcccccgtgcgggccccgcgacctaggcgatggaagctccagcactggcagcgtgggcagtccggatcagttgcccctggcctgttcccccgatgattgaaggcactgcttcctccacgccgacgcccgcccggattgctccccgagccccgggaccgctgtggacctcgggacctggacgccgtcctggctgcgcaggaggggccgctggcatggactaagaaatcctgacaccaagaagggcccctcgctcttgctggcagggcagcagggggactgaaggctggagcggagggacttgctgggggttggattgggggtaataaacccggacggaagcggaaaaccccaaacccccaaccagaccaaacatgt

SEQ ID NO: 7728 - DNA, 602 bp, Homo Sapiens
atttccatatttgtgcaagcactgttccaaaagccaagatttgaaagcaacctaagtgttcatcgacagatgaatgcagaaagaaaatgtggcatatacacaatggagtactattcaaccacaaaaaagaatgagatcctatcatttgcaacaacatggatggaactggagatcattatgttaagtgaaataaaccagacacagaaagacaaacgtcgcatgttctcacttatctgtgggagctaaaaattaaaacaattgaactcatagagatagagagttagaaggatggttaccagaggctaggaagagtaggagaagagtcgggggtacgtgggtgtggttgatgagtacaaacagtagttagaaaggatgaataagatatagtatttgctagcacaacagagtgactatagtcaaaaataattttattgtacatttttaaataattaaaagagtatacttgggttgtttgtaacacaaaaaataaatgcttgaggtgatggataccccttttgccctgatgtgattattatgcattacatgcctgtatcaaaatattacatgtaccccataaatatatacatctactatgtacccac

SEQ ID NO: 7729 - DNA, 1366 bp, Homo Sapiens
  misc_feature (111)..(214): n is a, c, g, or t
  misc_feature (599)..(642): n is a, c, g, or t
cccataccccccaacccacgccaacgaaaaatgtcctaacacaacacacaacggtaacggtccggcattcccgggatcgtgaatttgtccgtctccgacttctggagattnnnnnnnnnnnnnnnnnnnnnnnnnnnnnnnnnnnnnnnnnnnnnnnnnnnnnnnnnnnnnnnnnnnnnnnnnnnnnnnnnnnnnnnnnnnnnnnnnnnnnnnngtgatgatgcgggtgtgctggttggtgagacaggacagccggcaccagcgaatcagacttccacatttggaagcagttgtgattgggcgtggcccagagaccaagatcactgataagaaatgttctcgacagcaagtacagttgaaagcagagtgtaacaagggatatgtcaaggtaaagcaggtaggagtcaatcccaccagcattgactcagtcgtaattgggaaggaccaagaggtgaagctgcagcctggccaggttctccacatggtgaatgaactttatccatatattgtagagtttgaggaagaggcaaagaaccctggcctggaaacacacaggaagagaaagagatcaggcaacagtgattctatagaaagggatnnnnnnnnnnnnnnnnnnnnnnnnnnnnnnnnnnnnnnnnnnnncaactctggccaatgctctgtgcccctaaagaagggaaaagatgcacctatcaaaaaggaatccctgggccactggagtcaaggcttgaagatttctatgcaggaccccaaaatgcaggtttacaaagatgagcaggtggtggtgataaaggataaatacccaaaggcccgttaccattggctggtcttaccgtggacctccatttccagtctgaaggctgtggccagggaacaccttgaactccttaagcatatgcacactgtgggggaaaaggtgattgtagattttgctgggtccagcaaactccgcttccgattgggctaccacgccattccgagtatgagccatgtacatcttcatgtgatcagccaggattttgattctccttgccttaaaaacaaaaaacattggaattctttcaatacagaatacttcctagaatcacaagctgtgatcgagatggtacaagaggctggtagagtaactgtccgagatgggatgcctgagctcttgaagctgccccttcgttgtcatgagtgccagcagctgctgccttccattcctcagctgaaagaacatctcaggaagcactggacacagtgattctgcagagcctgagctgctgctgtggtgtggcccactggagcaaactgctggcacctattctgggttgcttgtgaacttctactcatttcctaaattaaaacatgcagctttttcaca

SEQ ID NO: 7730 - DNA, 670 bp, Homo Sapiens
ttttccagaagccacgtgataggggctggtttctgtggagccagaggcagagacactgaacttgagctcacctcctaacaccggcagtaaacttcctggaactttgccctcaggtgcggaggggacagaggaccctggcactctgttagggtgctgtagaagactagattgatggtagtttggcctgttagttcctgttttggccatgacttttgcagatggcaagtcacacaccctcaaagggaagctacacgggccaaatcgggggagtgggtggggaattttctcctctccctttcctactataatagtatttaagacatatcagctccagagatgagtcctggagccttgaattttgtttaacaaaataattgtaggtttctctctgtaataacaacgctggaaaggcagagaacctcttttatgctcatgtcttgcatttattgagatgactgtttctcatgcctttatgttccttcatgtaagtaaagtggacctttgtgctcaaactgttcctttcaagcttcaggaaggggttcccaaggtgtgacaatgtaggaacctgggtcactaatttttaccatcaaacctagccttagtatggggatggggcaagcagaaggagctagttacacctcagtggtcagttctctccagtcaacagaga

SEQ ID NO: 7731 - DNA, 417 bp, Homo Sapiens
aaagctgattgctactttcaatagggtatttgtttctttactattgagtagtacagagtttcttgtatattatggatttagctccttattgcatatatagttatgcaaatattttctcccattctatgagtatctttactctcttcatggttttctttgctatgcaaaagctttttactttgatgcaatcctactcctttacttttgcttttgttgcctgtgcttttgttgtcatatcaaaaaagaaatcaacgctagcaccaatgtcatgtatctttccctgcatattttcttctaggagtattaccattttaggtcttacatttaaatctttcatccacctttagttgattttagtatatagtggaagataaagatccaatttccttatttttattggcatgggcaatcaagcta

SEQ ID NO: 7732 - DNA, 712 bp, Homo Sapiens
gtttcgcagaggggcgggctcgctacctcgctcgcgcaggcactgcagattctcccaggccagtggatcccgagccaactcggccgggcgctggaggcaggtggcgagacagaacctcgcctgtttcctcacaaacccacactgtggcagccttgttaatgcagatggccatggtgaagtgtggacagattggaataatatgtccaagtttttccagtatggatggcgatgcaccactaatgagaatacctattcaaaccgtaccctgatgggcaactggaaccaggaaagatatgacctgaggaatatcgtgcagcccaaacccttgccttcccagtttggacactactttgaaacaacatatgatacaagctacaacaacaaaatgccactttcaacacatagatttaagcgagagcctcactggttcccaggacatcaacctgaactggatcctccccgatacaaatgcacagaaaagtcaacttacatgaatagctattcaaagccttaaattgggcatcactcaggatgtgtataagatcttaatattgactagtttcacatccaggtttctaagaaatgataagatacttcacttttccagagtgaaatgtaggagggagcacattctaagtacagctaaaaatttagctcactgtaacacagtttcactctctgaataaataaagcaaaaaacacagtaaaaaaa

SEQ ID NO: 7733 - DNA, 319 bp, Homo Sapiens
aggatcccaagcttgattgccagagatgcattttttagcaaaggtaataatgtaggtacttataggacttctaaatttgcttgtgtaataagaatgggcaagtaagacagctgatcttagatgacagcatcagttgggaaaaaattggttttgtttctctatagcactgtgatgatagaggaatttaaaagttatttttcttggaagatatcaaaaggagaaaaacaggagttcaaatagggggaaagaacatgagagaaaagattgtgtttattgttatgtagttatgttatatgaaagtattaataagttaggcaat

SEQ ID NO: 7734 - DNA, 658 bp, Homo Sapiens
gagaatgtcgattatagggtatacacttaatactgcaacatgcataacatatgacagaaaagctcatgcattataggaagagaaaagaaatgtgatgtaactgctatatgagtctgattataaattcattgcttcagtcagttttctttcttcagggataccatttacctgtaagtctgctgttggggaatctgagtctgatgtggcaagttctgctgcgtttgcatcaatggcatgttagtgctatcatagttgtctagtgtgtaaaggaggtaatgatttccccagtcacagggtggaacacaggaagcgttgacaggggccatgctatctctctattcttggacatgtctcgaagctcctaggtaagatatctgaatagcactgtgatggaccagttggatgtctggtgtatgcatgtaatctcttttccacgccttcccgtcggcagcacatgatataaagcaagtattagacaaaaggaccagttgccactgccgagggcacagccagtgtaatcaggaactccgtgtaatagtctctgcttttcaaagaatcagaagggggttagtattctcccaccatcaggtaaaatcccctctccaggaattacttcttgatagtggacccttgcttgtttatcaccaatgaaattttg

SEQ ID NO: 7735 - DNA, 673 bp, Homo Sapiens
tgaagcgcgttgcctttgccctgcataggggactgatcttcaaccctcgggccaagccaagtgaattgatgcccaagctgaaagagttgggagcgaccatggatggattccatcgttcttttgaatacatacaggactatgtcaacatttatggactgaagattaggcaagaagaagtatctcgtatcataaattacaacgtagagcaagagtgtaataactttctaagaacgaagattcaagattggcaaagcatgtaccagtccactcatattccaatacccaagtttacccctggggatgagtctgtaacgtttattggtcgactctgcagaaaaatcctgcggatcacagacccaaaaatgacatgtcacatagaccagctgaacacttggtatgatatgaaaactcatcaggaagtgaccagcagccgcctcttctcagaaatccagaccaccttgggaacctttggtctcaatggcttagacaggcttctgtgctttatgattgtcaaagagttacagaatttcctcagtatgtttcagaaaattatcctgagagacagaactgttcaggacactttaaaaaccctcatgaatgctgtcagtcccctaaaaagtattgtcgcaaattcaaatcaactttattattccgcccatgccaaaacacagaa

SEQ ID NO: 7736 - DNA, 425 bp, Homo Sapiens
gcaccgagcgggacgaacgctccatggcccagtggctgagcaccttgcccatccacaacttcagtgccaccgctctcacggcaggtggcacgggcgccaaggtgcccagtcccctggaaggcagtgaaggggacggagacactgactgaggcgatgggagctgcccaccagagtgcctctgagcagctcacagtgtgtgcccagatgtgccacccctgtgggcagcaagaagctgggatcgctgcagccatgttttcccggccatgccggcgttgtaacctcaggaccttcccttgtaggaacagcctttctcgaatctgttttcagctcttgcattgcatagatgaacctcagcatgtaaagaactatttttttaaagaagtgattttcttattaaacaagtacaaattttgcttagtcaaatt

SEQ ID NO: 7737 - DNA, 544 bp, Homo Sapiens
  misc_feature (117)..(117): n is a, c, g, or t
  misc_feature (405)..(406): n is a, c, g, or t
  misc_feature (459)..(459): n is a, c, g, or t
  misc_feature (485)..(485): n is a, c, g, or t
  misc_feature (519)..(519): n is a, c, g, or t
  misc_feature (521)..(521): n is a, c, g, or t
acaaaaaaaacatttaccaggtagacacttaataaataaaacaagcacttggaaaaagttctttgaaaacagacctagggacatccacctgcatcttttgcacagattttgttaagnaaaggccagatctaaaaatgtactgtcaagaaacaagcaaaccaatgcatacatacgtaggtattctaaacagaggttcatgtggtgtccatttagagtgactgatgtaaatgccagttgtagaagtgttaatctaaatcttttactcggcgacagatttcctctgtgaagtctgagcattttgcattgcctcccaaatcttttgtcaagctctttccgtccttaattgtagccaaaacacgcagcctcaattcttggcagcatggtcaaaaagtcccatgtggcgcnnttcatcacggcactgagcaggagggctgtgggattcgccatgtccctgccgcnatgtctggagccgtcccatgaaccgnctccaaaattgcaacccattggctccaatgttgncnctgggtgtcacaccgagacctcc

SEQ ID NO: 7738 - DNA, 762 bp, Homo Sapiens
gaatgttgcactgtggtgtgtgccctgggcccatgttagtaaagatttctccaggttggaaggagcccgggtgggcccttgacggagcagaactgggcattgtttccttttggagttggtagagttcttctctctggtcctaatcctggtggatgtctgctcgcctgtagctcccaaagattgggtcaggttatttcacttctgcagtaaaaactgggcaaaaaccattcactccatgatattaccgaattatttgtttcacaggtgttcggaaagggcagtgcttcacccaaaggaacgttcgattatgttcatctagtatgccaaagctagcctcgattagcttagctggttactttgttagatcttaaatacacaggccagtcagttagcaccgaaagcctatagtctaggaatcacactgatttgctttgtgtgtttgagatatacatagccttttaactttcccttctgtgggagacaggaaaagccagagggtttgtcctctggaggctccctttactgtggggtgggttccatttcagcatgtaggcttgcaaatggaatatttgatgatgcaaacttacctggccagagatgaataggcatttctgaactcacatcagataaaactagccttgatgtgaggatggatggggtatctcacagcatcaatttacaagccataatggtgagcagtgtttttgctaaggaggggctgcagcaatgctgatcttcctatctgattaaatgacactgggg

SEQ ID NO: 7739 - DNA, 207 bp, Homo Sapiens
cccctgtgccggatctgagaatgcggctgctgatggggggtcagaatgtgcataaagggggcaggtgggtaggcagcagctgtggccggattgatggggcccccacttcctagggctgaaggcaagttgaaggaagcagcaggagtaccggaatgaaaaccttgtttctcaaaggactggggttttggagtacacagaacccgagat

SEQ ID NO: 7740 - DNA, 272 bp, Homo Sapiens
cagttggaagatgggagattgcttgatgactttcatgttgagaaactgaaataggaggcttccttaaagcagggggaagatcatcaacttttgctaggtcattctcttctattccaggcatccctgcatcaccacctcttttgatttgttctttcccatgtggaatatgattgcttgagggttcttcattcttatctgcaacattctcagctacttttggaatatttttaggtactacttgattgtttatatccattcctcatccgtgggag

SEQ ID NO: 7741 - DNA, 634 bp, Homo Sapiens
taaagaaacatggcacgcttccatgactcagagtggcaatgttctctgggatatgacacccaaagcatagccaacaaaagaaaattagattccttggattacatctaaatgacagacacttttgtgcagcaaaaaacactgtgaactgagtgaaaagataacccatggattaggaacaatattttgcaaagcatatatctgaaaagaggctgatatccatcatatataaagaacagctacaactaaactacaagtaaccctaagcatcccatcaacaatggtcagaagacttgagtagacgtgttcctaaagaagatatagcaatggccaataagcatctaaaatgatgttcaaagtcactcattatagggaagcacaaatcaaaccaagaatgtcataccacacattagggtgactgttattttttaaaatctagaaaattaaaaattgttggcaaggatgtggagaaattgaaacccttgtgcactgttggtgaaaattaaaatggtagggccactatggaaaacattaaggcagtttctcaaaaaattaaaaatagaattaccacatgacctagcgattcttctgcatgtatgcaccaaagaaatagaaggaggatcttgaagaatagctg

SEQ ID NO: 7742 - DNA, 223 bp, Homo Sapiens
gatctaggagatagcagagccaagtgacccctgtccctgtcgaagctgcacttcctctgagagccaggaccctggagagccaccccatgagccccctctccatttggagccatttgcctcattgccctgagctgccctcaactgcaggacacagggaaggcgaaagtggagggtgaccagaagcagcccccacaaggacccaggagccccaacacacgtccgc

SEQ ID NO: 7743 - DNA, 750 bp, Homo Sapiens
ggtaggaggctggtgtaaatcggccgaggatttacagcccaggcctgaagaatgctgaaaatgcttacctatattcaccaagctcggacaaggtcatttgatgaagatgcaaaagaaagtcgagcagctgccctacgggcagcaaacaagtctggcactgggtatggggagagttatagcctggctaacccatctatccgggctggtgaggatattccacagcccacaatttttaatggcaaattgaaaggttatcaactgaaaggcatgaattggttggccaatctatatgaacagggtattaatggcattcttgctgatgaaatgggccttggtaaaacagtacagagcattgcccttctggcccatctggctgagagagagaacatttggggacctttcttaataatttcacctgcgtctacacttaacacattggcaccaggagtttactagattagttcctaaatttaaggtgctaccatataggggaaatcctcatgatagaaaagtcatcaagaaggttctggagtcagaagaccctctacactcaggaatgcccccttccatgtgtgttattaccagctatcagctggtggtgcaggactgtaaagtatttccagcgggtcaagtggcatacatggtactggatgaggctcagggcgctcaaggagtagttccggtgttcgtgggagatcctctacggtccaggtcggatcggtatggctacgggcccctttcgaaaccggg

SEQ ID NO: 7744 - DNA, 452 bp, Homo Sapiens
catcatcgaggatctgctggaggccacccgcagccctgaggtgggcatgaggcaagctgctgccatcatcctcaacatctactgttcccgctcaaaggctgactacaccagccacctgcggagcctggtctcgggcctgatccgcctcttcaatgactccagccctgtggttctggaggagagctgggatgccctaaatgccatcactaagaagctggatgctggcaaccagttggcactcattgaagagctgcacaaggaaatccggctcatagggaacgagagcaaaggcgagcatgtgccaggattctgcctcccgaagaagggagtgacctccatccttccagtgttgcgggaaggagtcctgactggcagccctgagcagaaggaggaggcagccaaagccttaggttggtaatccggctgaactcggcttgacggcctgaggccct

SEQ ID NO: 7745 - DNA, 556 bp, Homo Sapiens
atcccagcttcagcagtgttgcttgacacttaggacagaaggaaaagagccagacattcctctgtacaagactctgcagacagtgggcccatcccatgcccgaacctacactgtggctgtttatgtcaagggagaaagaataggctgtgggaaaggaccaagtattcagcaagcggaaatgggagcagcaatggatgcgcttgaaaaatataattttccccagatggcccatcagaagcggttcatcgaacggaagtacagacaagagttaaaagaaatgaggtgggaaagagagcatcaagagagagagccagatgagactgaagacatcaagaaataaaggagggcatgcaagtgtggagtatttacttgctcagtaactgtgactgttgtctattgagacctagccatagtttatccgtgcaagacaattgaacgaagtgttggctcattggaaattaataatagcagtagttcaaaagaaagcagaaagaaacaaaagatcgacgtatacataggatattctagaacatacaaaaaacaaacccggagaatt

SEQ ID NO: 7746 - DNA, 315 bp, Homo Sapiens
gaatacaaatgctccaacattattttttataactctggattaccgatgctgagatgtgtgcaggaatacttccaaataaatttttaacattgtaagccagtagattctttggctgggtggcaaattttgagtcttcttgcatatttggctcatgggttcataaattgaggccagagactcattgtatatccttgatcaattttctaattaaaggaaatagcttattgtttagtaaaatggcccttggttgtgggaagaaagagaattatttttaactgaacgtttttgttgttttttaaataaagtagccatatg

SEQ ID NO: 7747 - DNA, 474 bp, Homo Sapiens
  misc_feature (418)..(418): n is a, c, g, or t
gacctgctcagaagaggcatgaggtagggaccacaagcgtggttctgttctaaatctctttatgtctggagctggccctcccttcaccttctctgtgggctctcagcccttggactagaaatgaacttgctacatccacccatcttccaaaaatcactccccgagcctgttgtccgtttcctcctcttcactgccgaataacttgtcctccaggctgcaaccttctcacatccattccttactccatccactcaactccataccctgttgcttccccacatctgctgtgggagaggccctcaatgaactctccattgctaacaccaatggacgttttttccgtctttaacttccctctcctctccactacatccggcatgggcactgcctcctccttgcgattctctccgatcttggnatccaagatgcttctttccagctttccctcttctcaggcttctccttcccagtctc

SEQ ID NO: 7748 - DNA, 385 bp, Homo Sapiens
gggttggcaatcaaagcatcctgcatgccaagctaaggagtttgatgctgaagctgtggggaaccactgcatggttaataaaactggagagagacattcaaccttcatttttagaaagatcccagaggtcacagtgtaagggactgaaaaatgaagacaggaagtccaattaggatacaattatgacagaagacaatttggagagatatttaataggcagaaacaataacaggtgaaaagtgatacgtattaactgaataaatcaatgtcaaggggtaagagaaagaacactatagaacagaggatctgtagactagaatagagaagggctatcagttcagctggatgtgttaaatcggaagggtgtgaagatcactcagcacca

SEQ ID NO: 7749 - DNA, 273 bp, Homo Sapiens
  misc_feature (158)..(166): n is a, c, g, or t
cacctactgaatgttagacactggactaggttctgtgcaagtgttgaaaagaatacagacctccattcaaatgactgtaatacaaagcaatgtattagggccataaagatactactccatttgaccaattctgtattcagggtcaaaaactatagatnnnnnnnnntgtgaaaacctcatcgatggtggtgtttccaaagttatggggcaccttgagtccagtagtagaaaagagaccacaaaaactgtttctgtgccttcatctgcaatagc

SEQ ID NO: 7750 - DNA, 814 bp, Homo Sapiens
ctggggctttcactctgcggcagcgaatgctcaacttcgtccagaatattcaatactacatgatgttcgaagtgatggaaccgacctggcacatcctggagaaaaacctgaaatccgcctccaacattgacgacgtccttggccaccacacaggcttcctggacacctgcctgaaggactgcatgctcaccaaccccgagctgctgaaggtcttctccaagctcatgtctgtgtgcgtcatgttcaccaactgcatgcagaaatttacacagagcatgaaattagatggcgagctgggcgggcagacgctggagcacagcaccgtcctggggctgcccgcaggggccgaggagcgggcccggaaggagctcgccaggaagcacctggctgagcacgcagacactgtgcagctggtgtccggcttcgaggccaccatcaacaagtttgacaagaacttctcagcccacctgctggacctcctggcccggctgagcatctatagcaccagtgactgtgagcacggcatggccagcgtcatctccaggcttgacttcaatggtttctacacggagcgcctggagcgcctgtctgcagagaggagccagaaggccaccccccaagtgcctgtcctgcgggggcccccggctcctgcacccagggtcgcagtcaccgcacagtgagccctggctgtgacaggaaggaagggtgtggggtcagcagggactggtgcaaatgggtccagaattttcaaatcgaatgctctgtgttctgtctttgcagtttaaatataaagcaggaatgattgactcagctc

SEQ ID NO: 7751 - DNA, 471 bp, Homo Sapiens
  misc_feature (335)..(365): n is a, c, g, or t
attactgcttgagtctgcggccccggtgctccggctgcgatgagataatattcgctgaggactaccagcgtgtggaagatctggcctggcaccgaaagcactttgtctgtgagggttgtgagcagctgctgagcggccgggcgtacatcgtcaccaagggtcagcttctgtgcccaacttgcagcaagtccaaacgctcctgaagggctgcccacccacagccagaatccacaggatcccaccgagaaggagagccaggtgtgccgagaccatcctaagggtccgatgtgacagcaagcaagtgaaataaacaatgatttgcttttcagtgagannnnnnnnnnnnnnnnnnnnnnnnnnnnnnntctaggttgggtggtggtagatccttgagggtcagtagtttcaaaaccaaaaatattctaagaagtcttaagatggagttccttttctttctgttgttgttttccc

SEQ ID NO: 7752 - DNA, 478 bp, Homo Sapiens
agtaacccaagccacctatgtgacaacttctgggcccaggagtaatttctcagcattgagggtaaaataggatggagtgctctgttgatcatttgggagatgtaggttacctgatttgtgccttaggatgcagcgtgaagcagaagtccatattgcaattatgattttagaaggaactaagcattttactcacacccacagcagcaagaatgacctcctgcagcagatattccacctgtaatagcactttggaactgtgggcaaaaccaaaaggctagtgtttccatttattccatgttggtgtatggggttgaactggaaaattccctgaggcaaaactcactggccaaattttgagagggtatagaaaatgactttagagatgagtggttttgtgtatgtgtctgatgatattcagtctgatgttccgcaattttaaaagttataataaaataccatttttttaatctgaaaaaaa

SEQ ID NO: 7753 - DNA, 474 bp, Homo Sapiens
gtggcggaggccagccccgagcttgcccagcggtgcttcaggcagggaggggccaggcccgccagccaggcgaaggcgcaggcagcgcgcgcggggcgccgtaggcaccgggccaggcgggcagccgccctgggcccgggaccgcgtacgaagccgcagcggcacacgctgatgagcgcggcgaagaccaccgccgcataggtggacacgtagtaggtggccccggccgcgtggcaggcggcctccgggccaggcccaggtagtaggtgagccacagctgcagcgtgagcgtgaagaactcatcaaccagagccaggttgaacaggtagagaagcagggcctggcccaggcgcccgccgctgcggatgaacattgccagggccgccacgttggctggcagccccaggcccagtgccaaggcataggccgcgggcaccacgatgaagcgagcagggtcatcccagaggctgcagc

SEQ ID NO: 7754 - DNA, 400 bp, Homo Sapiens
agccccagtgagtgcccacggaggcccccagcacacccaacgtggcttgatcacctgcctgtccagctctggtgggccaagaacccacccaatcagatataggccagcccatgccagccggcttggcccgctgcaggcctcaggcaggcggggcccatggttggtccctgcggtgggaccggatctgggcctgcctctgagaagccctgagctaccttggggtctggggtgggtttctgggaaagtgcttccccagaacttccctggctcctggcctgtgagtggtgccacaggggcaccccagctgagcccctcaccgggaaggaggagacccccgtgggcacgtgtccacttttaatcaggggacagggctctctaataaaactgctgcagtgcccag

SEQ ID NO: 7755 - DNA, 437 bp, Homo Sapiens
gatctctcagaacgcccactggagtccccaggccgctcccgttgcctcggccaaaagatgagtctcaaactcccatcacctctctctcctcaggatgttcttgagtcgaagaacagcaccatcaaggacctgcagtatgagctggcccaggtctgtaaggcccataacgaccctgctgcgcacgtatgaggcaaagctgctggccttcgggatccctctggacaacgtgggcttcaagcccttggaaacagctgtgatcggacagacgctgggccagggccccgcgggactggtgggcaccccgacgtagctgcccccctggggggccacagcccagagaaccagcctaggaacactcgggatgacaccccttatcacaccaaggacagcaagttttttagattttatcatcagcaaatgaaagcttttcacatgtt

SEQ ID NO: 7756 - DNA, 242 bp, Homo Sapiens
attaatacatttttacctttatctttattcagggttttttgaggtttagtatatcttagttgatccatttatttatttattttcctgaagaactaatttgctttgcatgtaacttacaataaaattcctctgtgtgattagagtctggctttcaggaatatgtaacacccacttttctttcttttttcttgggaagtcattgctgttcatcactttttccatcaagtgaaatatacagcctt

SEQ ID NO: 7757 - DNA, 859 bp, Homo Sapiens
agggtaaagcccaaaaatcaaaacctgacggtggcctctgccctcagcagtatccaccggccttcacccaaatcagccccagcaagaggaagttcagcatggagccaggtgacgaagaactacacttgtgacaacgaccacgtctccaaaatgagtcgcatcttcaaccacaattctgaacaagactgccaatggagactgccgcagagacccccgggagcggagccgcagccccatcgagcgcgctgtggcccccaccatgagcctgcacggcagccacctgtacacctccctccccagccttggcctggagcagcccctcgcactgaccaagaacagcctggacgccagcaggccagccggcctctcgcccacactgaccccgggggagcggcagcagaaccggccctccgtgatcacctgtgcctcggctggcgcccgcaactgcaacctctcgcactgccccatcgcgcacagcggctgtgccgcgcccgggcctgccagctaccggaggccaccgagcgctgccaccacctgtgaccccgtggtggaggagcatttccgcaggagcctgggcaagaattacaaggagcccgagccggcacccaactccatcacgggctccgtggacgaccactttgccaaagctctgggtgacacgtggctccagatcaaagcggccaaggacggagcatccagcagccctgagtccgcctctcgcaggggccagcccgccagcccctctgcccacatggtcagccacagtcactccccctctgtggtctcctgaagggagcgcctcctccaacaacacgtggatctgcatggtttgcctgagctttgaacagtcagtacttaa

SEQ ID NO: 7758 - DNA, 930 bp, Homo Sapiens
  misc_feature (511)..(511): n is a, c, g, or t
  misc_feature (591)..(591): n is a, c, g, or t
  misc_feature (777)..(777): n is a, c, g, or t
gcggccgccccagggcgcggcccggaggaaaccgggtgacggtggtgctcggtgcgcagtggggcgacgaaggcaaagggaaggtggtggacctgctggcgcaggacgccgacatcgtgtgccgctgccagggaggaaataatgctggccatacagttgttgtggattctgtggaatatgattttcatctcttacccagtggaataattaatccaaatgtcactgcattcattggaaatggtgtggtaattcatctacctggattgtttgaagaagcagagaaaaatgttcaaaaaggaaaaggactagaaggctgggaaaaaaggcttattatatctgacagagctcatattgtattttgattttcatcaagcagcggatggtatccaggaacaacagagaccagaacaggcaggaaaaaatttgggtacaacaaaaaagggcattggcccagtttattcgtccaaagctgctcggagtggactcaggatgtgcgaccttgttctgactntgatggcttctctgagaggtttaaagttctagctaaccaatacaaatctatataccccactttggaaatagacattgaangtgaattacaaaaactcaagggttatatggaaaagattaaaccaatgggtgagagatggagttatttctatatgaggccctacatggaccacccaaagaaaatcttggtagaaggtgcaaatgcagcactattagattatgatttttggacttacccttttgtaccctcttcaaatgtactggttngaggtgttgtactggtttgggtatgcaacttaaaatgttggaaaagggtttgaagttggaagcttatccaacttgagatgggttggggctttccttacgagcaagacaatgaaaaattggaattattccaaccaagggggtaggagttttgtg

SEQ ID NO: 7759 - DNA, 288 bp, Homo Sapiens
acctcaagggagaatgttttaatttctgtttgtatcagtagaattaaggtagttggacttcatctatagatgcacagttccctttgttttaatattaaatatgttctcacttaattgctttgctgctagacttgcaactaatttttttaaagtatattccattattttgcatttttgatgtgtcaaaactttgacagcttttatgtagaataaaaaaatttttaaatttgtgtattgttacatatgtttgcatcaagctagcagccaagaggttaattgtgcaactat

SEQ ID NO: 7760 - DNA, 569 bp, Homo Sapiens
ccttcaacctctctctgactacagaacattctggaatctactcctgtgaggcagacaatggtctggaggcccagcgcagtgagatggtgacactgaaagttgcaggtgagtgggccctgcccaccagcagcacatctgagaactgactgtgcctgttctccctgcagctgaaaatggagccacagagctcctcagggctgtttgcttgtgtggcatcccagcacacttcctgcctgcagaacctccctgtgaaagtctcggatcctttgtggtatggttccaggaatctgatgtttcccagcagtcttcttgaagatgatcaaagcacctcactaaaaatgcaaataagacttttttagaacataaactatattctgaactgaaattattacatgaaaatgaaaccaaagaattctgagcatatgtttctctgccgtagaaaggattaagctgtttcttgtccggattcttctctcattgacttctaagaagcctctactcttgagtctctttcattactggggatgtaaatgttccttacatttccacattaaaaatcctatgttaaa

SEQ ID NO: 7761 - DNA, 393 bp, Homo Sapiens
  misc_feature (317)..(349): n is a, c, g, or t
ctcacatgctcaactcggggaggccgccgggccggcctccgagactccggcgggcaccgagtcgcctcactcgagcgcctccccgtgccaggagcacaagcgagggggcctgggagagctgaaggggacgccggctgcggcgctgagccccccagagccggcgccctctcccgggcagcagcagcaggccgcggcccacctgctgggcccgccccaccacccgggcctgccgcctgaggcccacctgaagccggaacaccactacgccttcaaccacccgttctccatcaacaacctcatgtcctcggagcagcagnnnnnnnnnnnnnnnnnnnnnnnnnnnnnnnnnaaaatggacctcaaggcctacgaacaggtgatgcactaccccgg

SEQ ID NO: 7762 - DNA, 301 bp, Homo Sapiens
ttgggacattcatttaggatctgaagataaaaaggctgcttgttagaggcgttggctttcaaagaaaagatgaagttgatcttaccggttcaagctaaaagttaattacctgcagaaataagcactttgaaatagaccataattaaggctcattgcccattgttgattttcttctattagacgagctgtgtttttctcccaaagctttatgtatctttttattatttgtatttatgaccaggcatgtgccacactccaggttgtgaattaaactgatgggacgcagaccgcggggatcctc

SEQ ID NO: 7763 - DNA, 1207 bp, Homo Sapiens
tcatcatatgtctgccaaaagatgtatcacgctggggtcacagaggcagttttgaaatttcttaaatctgaaatgcctcctgttcagttcaaacttctgggaacattaagaatgttaatagatgcacaagcagaagctgctgaacaattgggaaagaatgttaagttagtggagcgtttggtggaatggtgtgaagccaaagatcatgctggtgtgatgggggacgtcaaacagactgctgtctgcccttatacgacacagtaaatcaaaagatgtaattaaaaccattctgcagagtggtggcatcaagcatctagtcaccatggcaactagtgaacatgtaataatgcagaatgaagctcttgttgctttggcatcaatagcagctttagaatctgggcactccttgagaaagatctagaaagtgctaaacttgtacagattttacatagactgctagcagatgagagaagtgctcctgaaatcaaatataattccatggtcctgatatgtgctcttatgggatctgaatgtctacacaaggaagtacaggatttggcttttctagatgtcgtatccaaacttcgcagtcatgagaacaaaagtgttgcccagcaggcctctctcacagagcagagacttactgtggaaagctgagaactgcccgatacacggcatcatcccatctctaatttcccctctgtcctccatccagcggcttcttccgcttcattctctaccataccacttgtgcatgcatgtgatgttctaataccaattgaagaaccgctgtaggtacctccctaataagatttctaaacctatagttagtgtgatcatgactttgtcaaaggcaagtctccacccataaccgttctcttgtattcctgttgcttgagctacattaagtagaatgtgcatgttgtagtcctatgatgatgtaaacttggtactacataatgacttgctccacacatgcagtaaactacataatgatgtactggtaaactagaaacaaagaatgcagcaggatctgtctagcttattaaagatgaaactgaattggaaaaatagctccattttttggtgcttgggaagcacagtgaccaaaaaagttgtatggctgcttattcattagtctttcctactgatgtcaaatccatggtacctagagttaaataaaattccaatgctcttactatttaaa

SEQ ID NO: 7764 - DNA, 658 bp, Homo Sapiens
  misc_feature (127)..(127): n is a, c, g, or t
  misc_feature (154)..(154): n is a, c, g, or t
  misc_feature (200)..(200): n is a, c, g, or t
gaccttctcactgaccagttggcttcgccttgtagaactgcttcttcagcccggcaaccgacatgctgcctcctgccgcggaaccttccgcccagacccccctgcccagaccccgccagcgacaggntcccgggcaccaccaaccctctgcgcnctcagcggcccccatcagcaccgcctccaccacgccgcttgccgangcttggcccgcctcgcgccgcctcgagttcatgattctttagtctccttcaatctagaactgttcccaggattgtttaaaagcatactgacaaacctttgagactgtaaatgacctgaggtatacttgagaataatttttcaatacacatgaaagatcattacacatgagccaagactcaaatgagctggcctacttactttgtacataaatgtgtaaactcctgaagacttccaataatgaactcccataagacatttagttcaatgtctttatggccttggtgacaaatcattacagaggatgagagcatttttcctatccaataatggtcaagaaaaaagcagacagatcctcactatcttagagaactaagtgagaaagtctggtcgatgaaggggacttcatccagagaggaagggatccagctgatggacgcagagggatcctctagatcac

SEQ ID NO: 7765 - DNA, 559 bp, Homo Sapiens
cccagctcgtgagcgagtccccagccagcctcatccaagctcagcgggattacttcggggctcacacctaagaactctgggccaaaccagggcagtttatccacaccaactggacaggccatggtggcaccgtgtcatcctcgtcatacaatgcctgatcatgctgctcctgtcaccctccacgattccacagaccaggacattccatgtgcctcatggcactgccacctggccctttgccctattttctgttcagttttttaaaagtgttgtaagagactcctgaggaagacacacagtttatttgtaaagtagctctgtgagagccaccatgccctctgcccttgcctcttgggactgaccaggagctgctcatgtgcgtgagagtgggaaccatctccttgcggcagtggcttccgcgtgccccgtgtgctggtgcggttcccatcacgcagacaggaagggtgtttgcgcactctgatcaactggaacctctgtatcatgcggctgaattccctttttcctttactcaataaaagctacatcagactgaaaaaaa

SEQ ID NO: 7766 - DNA, 343 bp, Homo Sapiens
ttgcgtcccatcagcaaggtctcttcgaatcctaaagtcagtttacattcccccggcagatacagagtataattaacagttcttttcagcatcttacaatttcaaacaccagatactggtaattgatttgcatgattttttttcgtattacacttaaatcagaaagcaaaaattaaatactgctaagtatttgccacgaactcaaaggtgaacaataagataaaattcagccaggtgctccagcagccaggttgtatgaaagcaagaatgtctttactggggagattttcaaaagtcccgcagggcactactgatgggacgaagacttcgtggatcctctaga

SEQ ID NO: 7767 - DNA, 721 bp, Homo Sapiens
caagactcaatcacatgccatgttcttgagtcattcgtcacaggacaggtgacagcagagcttcggaggtaacctcacggtgtacaggcgtacttggatatggaggcccatcggcacgaggactctgtgaagccaaaaggagccttcaaagctctcactgtcgagggtcagaaactgggcagcactgccccccaggtgttgagtaccagctctcaagcccaacaggcagaaaatgaagccaaagccagctcctccatcttaatcgacgaatcagagcctaccacaaacatccaaattcggctttgcagacggcgggaggctggtgcagaaatttaaccacagccacaggatcagcgacatccgactcttcatcgtggatgcccggccagccatggctgccaccagctttatcctcatgactactttcccgaacaaagagctggctgatgagagccagaccctgaaggaagccaacctgctcaatgctgtcatcgtgcagcggttaacataaccgcccagccagctgcctggcctccctcctgtgtttcccatggccagtggccatgccccatggggatcgcccctcctgcccccttgtgcacacccagcagtccagtgcaacgtctcctccatagctctgggttcttagatcttggttggacgtttgttttctccttagttgcatttcctgggtttttgtgatgatcaatggactttaatg

SEQ ID NO: 7768 - DNA, 367 bp, Homo Sapiens
ccatcttcgtcccatcagagttgttaactgtttaataagggccagtgtcagaagataacaaattatagtttcttatgaatgacaggcctacagttattattctggattatttgatggaggacaaacttacctgtatttgttagtcaagctgtgaaaataaggtggattacaaaagatgtgaaaaaaattttagtctgtagactcagtaattttctataatttactgttaatctcatttgaacatggattaggtacaatttataaattaattcaagtcagggtctttaggtatcaggtgccagagagatatttaacagatttccctacctaaattatgtatatgtactgtctaaaacaatactttttt

SEQ ID NO: 7769 - DNA, 421 bp, Homo Sapiens
gtgacgcccccccacccctccacctttgcccggagctgcgggcagcagcccagcgcgccagccggccccggggcaggagcggtgctaggcaggggtggggtggccgggcccagggaccgggagccggggagggagccgggcaccgagcagagggcgggggaagcggcgccgaagtttgcctcggactcgccgggcgctgccgtggctccctgggccgaggactgttgctgccgctgccgccgccgcttcattgcacattcaagtggaaaattttcaggagtcagcagaaacattgtgtccaaaaaagactgagtcgcagttaccaccaaacccaggaggagactctccctggaaaacttcccttccctttcggtttattttcttgaaaaggctccaggcttcggcttggaaaatcccaccg

SEQ ID NO: 7770 - DNA, 840 bp, Homo Sapiens
aggatccccagactgggttcgagtcatcaggggctctattcattcaaactagagcaagaaaaggggaaggatagtgaaccaaagcccgatgatgggaggaagtcctttctaatgaagaggggagatgttatcgattattcatcatcaggggtttccaccaacgatgcttcccccctggatcctatcactgaagaagatgaaaaatcagatcagtcaggcagtaagcttctcccaggcaagaaatcttccgaaaggtcaagcctcttccagacagatttgaagcttaagggaagtgggctgcgctatcaaaaactcccaagtgacgaggatgaatctggcacagaagaatcagataacactccacggctcaaagatgacaaagacagaaaacccgaagggaaagtagagagagtgccgaagtctccagaacacagtgctgaccccgatcagaaccttcattaaagccaaagagtatttatcggatgcgctccttgacaaaaaggattcatcggattcaggagtgagatccagtgaaagttctcccaatcactctctgcacaatgaagtggcggatgactcccagcttgaaaaggcaaatctcatagagctggaagatgacagtcacagcggaaagcggggaatcccacatagcctgagtggcctgcaagatccaattatagctcggatgtccatttgttcagaagacaagaaaagcccttccgaatgcagcttgatagccagcagccctgaagaaaactggcctgcatgccagaaagcctacaacctgaaccgactcccagcaccgtgactctgacaacaatagtgctccagcctacagta

SEQ ID NO: 7771 - DNA, 819 bp, Homo Sapiens
cagtcttgcccccatcagacgcttgaggaccggcttaaagctattggacttcagaagattgaagataagaagaaaaagaacaaaacaccttttctgaaaaaagaaagcagagagaaatgcagcattgctgttgatattagtgagaatctgaaggagaagaaaacagatgctaagcagcaagtgtcagggtggacgcctgcacacgtcaggaagcagcttgccattggcgttaacgaagttaccagagccctggaaaggagggaactgctgttagttctggtgtgtaaatcagtcaagcctgccatgatcacctcacacttgattcagttaagcctaagcagaagtgtccctgcctgtcaggtcccccggctcagtgagagaatcgcccccgtcattggcttaaaatgtgttctagccttggcgttcaaaaagaacaccactgactttgtggacgaagtaagagccatcatccccagagtccccagtttaagtgtaccatggcttcaagacagaattgaagattctggggaaaatttagagactgaacctctggaaagccaagacagagagcttttggacacttcatctgaagatctgtcaaaacctaagagaaagcttgctgacggtcggcaggcttctgtaacattacaaccccttaaaataaagaaactgattccaaaccctaataagataaggaaaccacccaaaagtaaaaaaagctactccaaagtaatcttgcataaacttgtcatgtcatacagtttgtgaaaggacaccttgtaaagaagccttgaaactaataaaatgagttatacttaa

SEQ ID NO: 7772 - DNA, 656 bp, Homo Sapiens
tttgaaatagaaaaactgccaatatgtgactaaagtttgtttattgtaataataattctatctttagaattgatgattactcactattactataaagacatttactatattagaaaacagagcttgctattggatttgaataaaacaattgccaaaaacttcaccttcagaatttccatcagtaatctctagcaagtacttgaggatttctgaaccaccattgtccttagggggatcccatttgacactaaagccatgagatgtaacggggcctttgacaagcggtctggcaggaggtccaggcctgtcaggactcgtcgtacaaacaagaacttcgcttggacagctttttccttccggattagaagcagtcagcctgaatgtatactgtgtgcttcttttgagatttttcacagtacaggttaaatcctctccagtgtattttgggtggaaaaggttatcattttcatcctcctgaatttccaaggtgtaggtgatcacttcctcgggtgaacagccttctggcttactccactgcaacgtgacccatgtgatgccagctcgaaccagccttggtgcagaaggcatctgagggatatttcctaatgtgtagcacaccacctcttggctataaccactggtaccaatgtcgtttc

SEQ ID NO: 7773 - DNA, 874 bp, Homo Sapiens
  misc_feature (455)..(455): n is a, c, g, or t
  misc_feature (611)..(619): n is a, c, g, or t
ctatttggtgcccctcaaaccatttcttgtaatagtggctgaggtgattcttttagtggccaccattctgctttgtgaaaagtacacacaaaagaaaaagaagcactcagatgaggggaaagaatttgagcagattgaacagctgaaatcagatgatagcaatggtatagaaaataatgtccccaggcatagaaaaaatgagtctctgggccagtgaatacaaaacatcatgtcgagaatcattggaagatatacagagttcgtatttcagctttgtttatccttcctgttaagagcctctgagtttttagttttaaaaggatgaaaagcttatgcaacatgctcagcaggagcttcatcaacgatatatgtcagatctaaaggtatattttcattctgtaattatgttacataaaagcaatgtaaatcagaataaatatgttagaccagaatanaattaattatattctggtcttcaaaggacacacagaacagatatcagcagaatcacttaatacttcatagaacaagaatcactcaaaacctgtttataaccaaagaattcatgaaaaagaaagcctttgccatttgtcttagaaagttattttttnnnnnnnnntcatacttactattagtatctatggaagtatatgtaacaatttttatgtaaaggtcatctttctgtgatagtgaaaaaatatgtctttactaagttgaaatgaatactttctgcctttgctatgatagttattctacaatctccacaagaaaaatataccttttatccggaaatattggtttaaggcaaataaataaaactgtgcttgctctaaagctctgcactacaaaagcaaattttccagtctttattcca

SEQ ID NO: 7774 - DNA, 144 bp, Homo Sapiens
ccagtttctcccatcaggagcttctatagagtagagaacaagttttatacatatttaaaacacaagcacaacacctgactcactacaggagcgtgataaacaagcactcattgatttactgatgggagcaagatgcggggtacg

SEQ ID NO: 7775 - DNA, 431 bp, Homo Sapiens
cacaaaaacaacacctatcctcttgctttgctgccagaaaagacaaaaagcacaaataaacaagcacctgacagcgttataggtggagaccgagttctatgagtgcagtaaagtggggcacggcacagagatggagctgtactctagacagggtgttctgaatcaggaatggacttacaaaacatctgcagtcagaaattcacatacagactatagtagatcaaaagctcattttaaactatcaatgaggaaaaaagcaattcatttacataacattctctttccaactcaaacatcaggtacaaattgctttcttttagcatatgccagaaatctgtcattacacaatagcttagcaagtgtgacacaagatactgccactttctctacacaaagacccacccaaacaccagctttgtttaaaacattac

SEQ ID NO: 7776 - DNA, 242 bp, Homo Sapiens
gtacaacaggggggctgagattacaggcgtgagccaccacacccagccagaaaaagcaatagtttcttgaaagtcaggtgcagtgtagaatccgcagctgtaccaactgcagcccgaatggatcctgtctcccatgtgttttgtccatcatgcaccaggcatttggaacacactagctcacagagttacacgggccttccagcagtgacacatttaatcacacagatcatcaaaacatccca

SEQ ID NO: 7777 - DNA, 213 bp, Homo Sapiens
atcacaggtgtgatccaccacacctggccttggagtcgcttttaaatctcttttacacatcctgtattccagtccgtaaataaacaaatattttttgctttctccatagtatatccagattcattcaggccacaacaatctttcatttgatgtactcaagtaagttcccaactggtttttctacttcccatgcttactcccacatagtatatt

SEQ ID NO: 7778 - DNA, 358 bp, Homo Sapiens
gcaggtatacactgtccagtctgccacggcgcctgccactctctgctgtcctcacactgcagcagcacatccattgccgtaaatcttaagtgtggcccctgtggacaattgagtttgcaatctgtgttgtgtgatttttaaattgcagggaggaagatcatccaggctgtctgtggaaagttgagcaaatcaagtgtgaacgcagaccaataatttctgacagtcaaaccataaatatgaagagggaccacagagaagctggattagcagacttgtatactctgattttgtcaagcacctggaagaccaatttagggtgaccatatcatttgtcatccaagctgatgggacgaagatg

SEQ ID NO: 7779 - DNA, 172 bp, Homo Sapiens
attgcaggcgtgagccactgtgcctggccataacttttttttaaaataaaatatttttatgcaggggtagttgcaggacctgaatgacgtaatgtatatcaagcacttgtcacatagtcctcattcagctaatgtcgactcccctgcctcctgttacagcccccaccactca

SEQ ID NO: 7780 - DNA, 112 bp, Homo Sapiens
ttgatggatatctttgtcagtacatataattctatttggttctctttaatggtcacatagtaagacttattatattagggtcagcaaagtatggcctctagaccaaatatgg

SEQ ID NO: 7781 - DNA, 391 bp, Homo Sapiens
  misc_feature (69)..(69): n is a, c, g, or t
agcagtgttgctgaggaagaaaaacaaaaatgagagacaggcgattgagggaaggagagcacagctaangtggagagtggcggtagccctgcacctgcagctgttggtgcagctgggtggtgggtgggcccagagcacacgcgtgtgcatacagaagtcgagccgctgagccactgtcagtgcaagaatgtcagccctgggatggggatgagccggcttttatctcttccggctgtgcaggatttacaagcttttgaaacgcaggattaataagaagaggccggtgttttaatctataatggaacagaaagtatcattattgttaaataatgcacagcctgtcgtttattaagaattaatggtttatcgagtgctcaggttgctgcagccg

SEQ ID NO: 7782 - DNA, 499 bp, Homo Sapiens
cccgggtgcatgcatgtgaacacaggcacccaagagaaggggctgtggggctcagctctggggcatgagggcgatgggaggagagggagagccgtgggtcaccacacacagccacgcaaggctaagtggactgcaggtacagaaggcgccggtaggcgactgcacacctgtacccacagctcaccaggccaagagcctgcagggacgcactccagacatgaggtaaggcaaaaacccctgacttaacagtcagtcactggggcacacacagcacgacccccatttcttcaattaaaggcacaagacacatgttccctaaacagtcaagtcactgggcacacacagcacgaccccatttcttcattaaggcacagacacatgttccctaacagtcagtcactgggcacacacagcacgaccccatttcttcattaaagcacagacatgcgttaaactgaaaagcctgtaagaatctatgaaaacacttaccaccaggcca

SEQ ID NO: 7783 - DNA, 533 bp, Homo Sapiens
cggcccacaggatacctttccatacaatacatcaccaactggagaccatggtctgtgctctagtcatgtatgctccctctccttgcctggttgatctccttagcaactcatggtcttttactttaacagatggaagcctattcatagagactctgaaggagctgattttctgtctgcccacccactaagggccttcaagctaataaagatagaaaacaaggcaggaatttttgtctgttttattcacagtgtatctcaaacacatgaagcagtccctcttcgtattaggcactcagaaatacttgctgaaggtacagttatcaaactgaaatctgagcatttttccttttgatgttccaagttatcttttgggtgattattataaataggtaaaatattgctataagttccctattcacgggtattttataaatttttaaaacttgttcttaatcttcagaagtgtacagaactgttcttcagatctttgtcaaccaaaacatgtattttcaataaattgagattcccagttc

SEQ ID NO: 7784 - DNA, 493 bp, Homo Sapiens
gccaacgcggactgggacggcggcggcagtagtgggacccggcgagcgtgagtggcccggagcggccttcgatgcggcgcagtatgaagaggcggcggcgccggcgcccggtcgccccggccacggccgcccggggcggcgactttagggcagaagacggggctgggttggaggcgcgggaggagaaggtggtgtactcgcggtcgcaactgtcgctggctgacagcaccaaggcgctgggcgacgccttcaagctcttcatgccccgcagcacggagttcatgagctcggacgcggagctctggagcttcctctgcagcctcaagcaccagttctccccgcacatcctgcgcagcaaggacgtctacggctactcctcctgccgggccctggtacccgaccccccggggccccctacagcccgcggccaggcgcgccggccggttccgcgcgcagcggccaggaggaggcgccgcggagcccgggcggccgc

SEQ ID NO: 7785 - DNA, 569 bp, Homo Sapiens
gtccaatcaactttcaaattagctctggggaaaaaaatacatttaatgaaagctagaaaacctagagaaggtcttgctcttcatctttcactgcagctatggacagctcggcaccacatttgcaccaatcagcatgtttgcccatgtcctgccaaggagagaagtttacatcatcactgacaaggtgtgttcacctattctcatcacgtaacactgatggattccatacctaatttatcaatctaagacattactggaccacgtaaccttacatataactacctgaccatattttcacatgaagttgctgctgcttattatacatcaaagttcacgtcaatgtggcatgaagtcaagaggattccaagcaaactccatcaaaaccttggggctcacagcatctcccagtgtgtagattttcacaactaagttctgaagacatgatctaagcgtggaagaacttctgaagttgcccactgatcttctgagtgcaagtcacatctggaaatcctgtaggcaatgtcatgggcaaaattgtgttcataaatctgtgcatggggcacggggga

SEQ ID NO: 7786 - DNA, 1090 bp, Homo Sapiens
  misc_feature (21)..(21): n is a, c, g, or t
  misc_feature (43)..(43): n is a, c, g, or t
  misc_feature (51)..(52): n is a, c, g, or t
tctagaatctagttactgttngtgagcttcttgcagaccaccnaagaccanntaaagtggtatagatagataaccagggatgcagtggtgtttaggcaggataggtctttactggccctgactgctgttaataattggcagcagtgctccccagatcccagaaggtccctgctggagtgtttccagtgcacctgtagggaaccaactagacttctctcctggttagtccagctctttactctaaaccctttctgtccaaaatgagtcattttcagttgtaccttagatgtctggtgttgaggatcaagtgccatagcctttattcagggggcctataaacccttccagttcttgcccagggctggcctgtagcgcttcaaattcccaggtgtccctaatttgagaagtaaccttttggaatagcattagaccctggctgtcccctccccaccaaataaacatgatatttcattctctgtccagcagtcatgaacccctccacctccaatgacctgataatttagtttggtgggcctgggtatgtggctgggggtggaggtggaagcagccgcaggagcaagggcccctcccacatacacaggaggagtatttcatttctccttaatgaaggctctggccctaacccctcagcactgtctccagataggaacatgcacaaagcagttaattaggcagcctggagaaaaccagagatccagtacagaaaggaaaggatatttattgattaacagaagttgtctttttaaaagtgtttatttttggcaataaagagcacaacataatctccttcatgcgtcatcgtgccacttagctgagccagccagctctgcctccctccccaaagacctttggaccccagttcccctctacaggctagctcatccctctgggtggtcattccccgggtcacgttgagagcgaggctgactgcaccacctccctagctcaagggctcctttgggaggggccgcgtgctttatcatcctcctgccacaactcaaatagtggttatttacaagaaggtctgttcccacaaatcaggaccctaaagtattaaaaaacaaaaccc

SEQ ID NO: 7787 - DNA, 1070 bp, Homo Sapiens
ggaaacggttcatacaaaacaagaaacgcaaataacacttccaaagatggaaccttcccgtatcccttaaggcccggggaccttccaatcaagatcaccagcagctcaataaaattgaccgaggggcgtgtaacagcccgatgaatagttttcagccatgtggaaaaagtgagaggcattccaggggtctattcttggtgttgaagcaccaccggctaccggaaagcgctccctccagcaaggccagatgggggatcactcatactgcatgggaagctatcatccgccagatgaatgcctttcatacagtcatgtgtgaccagggcttggaccctgagatcatcctgcaggtattcaaacagctcttctacatgatcaacgcagtgactcttaacaacctgctcttgcggaaggacgtctgctcttggagcacaggcatgcaactcaggtacaatataagtcagcttgaggagtggcttcggggaagaaaccttcaccagagtggagcagttcagaccatggaacctctgatccaagcagcccagctcctgcaattaaagaagaaaacccaggaggacgcagaggctatctgctccctgtgtacctccctcagcacccagcagattgtcaaaattttaaacctttatactcccctgaatgaatttgaagaacgggtaacagtggcctttatacgaacaatccaggcacaactacaagagcggaatgaccctcagcaactgctattagatgccaagcacatgtttcctgttttgtttccatttaatccatcttctctaaccatggactcaatccacatcccagcgtgtctcaatctggaattcctcaatgaagtctgaagatgcatgtttccagcattagtttgattcccaatgtgagcaagaaggaagtatatacagtaaagtaaattcaaggatctgttaaatctggtaaaagtagatcaaatcagagattgacagcctgtggagggtgctgaactatacagaattagacacaactatgtcattattttttgtacctactgctcagaataaaaacacttgaaatatgaa

SEQ ID NO: 7788 - DNA, 610 bp, Homo Sapiens
gtgcctactctgagtgccagggaattttcttctagtaattcggatcgcttacaagtaatctcacattgggatatatgggtggacctgcccatctcactctagcttcgtattgtgaagactcagccaccttccttccccaccccatgcttctcaccaaattttgttgtcattgagggcacttggataactcaagttgatatttatagctgaccaatctatatgtgtcacagaactatgctgcctaaagtgatcttggctccttaatggtccttttggccccttggatagttaacagctgagtaattctaatctcttctgtgttttccttgccttaaccacaaattgtggtgctttttgtatattttatgtataaatcacaaagttgaattctgactatttttaagacaaaagtctgttaaacttttttattgtaaagaatatttattatgcgaatctctattattttatggtatttattgcaaaagactgttgaaatgtactcatgtttgaatataacaaaatatcaatacttaacggaaaataaggtgacacgaagaaagtacatatgttaactataatgcagaaaatatattaattaatgaaactgtcc

SEQ ID NO: 7789 - DNA, 370 bp, Homo Sapiens
tcttaactatatcaccttaacatgtttacttttttgaactcgtactgtttaggctgttggtgatactcttgagaagttgtaatgaactcaaaattgaggctggagctttcttattcttttccccaacaaaattggttttctcccgaagtgatgctcatgatgtgttcagtgtaacttgcagattggaataagaaacctgctacaaattgtgattggatacaaatgcccttatcctctgtgaatgttggccctatctacatgttgtgaagtttcccagaatgcataaagtctttcactgtagacatttttattgaaatgcatattttatttaagtatattttggaccaattaaattaaatttttacaatgt

SEQ ID NO: 7790 - DNA, 307 bp, Homo Sapiens
gtctctctgattattttgcttgttgattggccagttgttaattctgtctttgtgagttgtctttttctcagtacttggcctatttgtctttgatttgaaaaagctctttatgttgtagtcattttaattcctgtcatatgttttgtaaacaatttttcgagttcataatttttcaatcttgtttgtattatattttgccacacaaaaattttaaatttgtatagtcaaatttatcagtctttttccttatgttggaccttctaatctcaaggtactaaatataatctagcatttttttaaacattaa

SEQ ID NO: 7791 - DNA, 973 bp, Homo Sapiens
ccttccaacatctcatccccgagaaaccctatgagtgtaaggagtgcgggaaagccttcagttcttccagttcctttcgaaatcatgaaagaaggcatgcggatgagagactgtcagcataaggaatgtgggaaaacctaaaggtgtccctgttctctctgaagacatgaaaactcactggggagaaaccctatgaatgtaaaaatgtggaagcaactttgtatctcaggtcttaatgaacacatatgaattcacagtggagaagaccctgcatcagggaatgtggaaatgactttgctgaattctcaagccttaccaaacacatcagaaatctcactggagagaaactgtatgaatgtagagaatctgggaatacctttctgaatcccacaaaccttaatgtgtgtatgtgaactcacattggagagaaaccctgcaatttaaatggtatggtctggatgatgccccactccatatttgtaagccctaagtcctagttccttacactataactgtatttggacatagggttttcaaacaggtgagtaacttcaaatgaggttgttgggttcgatccctaatctgacatcactggtgtccctataagggaaactgaaggaaggatacacatggagaagactgtgtggatccaccagaagatggccatctacaagccaaggacagagacctggaacagatgctttcattatggcctccagaggaaaccaaccctgtctccaccttgatattgcacttccaggctccagaactgtgaggcaataaatttctcttggttaaatcattcagtctgttattttgtacagcaaccctaggaaactaatactgtgaggaacttgggaaaagctttagatcaagcttgtccaacccgcaggccaggatggctttgaatgcagaccaacacaaatttttaagctttcttcaaacataataaatttagggttgatggggtacc

SEQ ID NO: 7792 - DNA, 946 bp, Homo Sapiens
  misc_feature (152)..(161): n is a, c, g, or t
ataatcgagcatgatatgtcatggtcggtcacttttaatagtataaagattactgcaactggagaatgaaaagtgtaaattggtgacgccaacctcagtttctgagcactcctgctctgtggtgagaatcagacaaaaattcatcggggtgnnnnnnnnnnggcattacctgattcacacccttgtcttgctagccctcttccattcatttctcacacagcactttgctctgttaaatcctctctctgtctcagaccattgcttgccccttcaaagggtatggttcaggctcctttcaagacatttggagtttctctctggggaaagagagccccctactggtttggcttcagtctaggtccaccatccctctcgatctggcatcttggagattaatttaaaaggcaagctcaccacaatgtaagcctatggtctggccaaccttgcttttgggaactgtgacaccaaagcccccaggactatctgcctctccaggagccagatagaatgacatgcctttttcctaattgtccacattccacccccaacccactgccactgtgggccaagccatccatcttgcaatcttcatctaaaacagctctcatttcatgccagttttgctcaaacctgcaccgtcacaagatattcagaagatgaaaacgtagaagacacccctgaattaaaaacacttacatagcagtggctggaattactccaaaacgtgcccagtgatcgcactgtaacatgggattttctcacccaaataggcaactcatgcttcctgagtgtaatcaaagcatgtggtgttttggggccatatgcaccaggtttctattttagaaaccttcagctgtcttgcttatgtaccatatgtaaatttattctttttaaaaatcacttttatttgattttgacttattaaatgctttaaaagccaaaaaaa

SEQ ID NO: 7793 - DNA, 502 bp, Homo Sapiens
  misc_feature (34)..(34): n is a, c, g, or t
tgtttagtgtcttcagcatcactgtgtctgtatntcaagtacaaatgtttttaaaaaggattctttatacatatgtgctgaattgattttaagaaagttgcatgatcctgtaggagcaacatttttacctaaaaaatgctaactttatagtatttctaattgttcaaggattttaaaattctatttcagggagtatatcttctgtggttttgaaggaggtgagttctgtatgtgccttgcagtactgtaattcaaaaataggaatctttggctgcaaaattttaatgaaatgttaggaagtaattttcgtgctaacattaaaattataactttttgaaaggtaatagattttccagaagtaaaatctgatggttctaaatcaatcaatgtgatagttcatttttaactcttagaagaattcagaggaaattaacccagctaagtaaaaaatctgtcttgattttgttacttattcctcagaatattaaacattgatcacata

SEQ ID NO: 7794 - DNA, 232 bp, Homo Sapiens
aggcagccctggaagtggagttaggagcttctaacccgtcatggtttcaacacacattcttcttttgccagcgcttctgaagagctgctctcacctctctgcatcccaatagatatccccctatgtgcatgcacacctgcacactcacggctgaaatctccctaacccagggggaccttagcatgcctaagctgactaaaccaataaaaatgttctggtctggcctgacaaa

SEQ ID NO: 7795 - DNA, 553 bp, Homo Sapiens
  misc_feature (35)..(35): n is a, c, g, or t
gaaaggccgagatctgtccagctgcggtgagaggnacgctgaatcgccgaagagaattggctgcgcttccttgtttgtgagctagaattagaatggcgatcagtccacgaagcgatgcaactttctccagtcagaaatcaacaccttcagagagtcctcgaacaaagaaatttccactaactgaagaggaaatattttatatgaattgtagagctgcctacttaactgtcttcaaaagcagcttggaaaacattatttgctaaagatcaactttacttagctcttcagcatgcaggaagaaatccatcccaaaagaccattaataagtattggactcctcaaactgccaaactgaattttgatgatttttgtataattttaaggaaggaaaaacctacttcaaaagcagaactactaaaatcatttaagcaattagatgtaaatgatgatggctgtattttacacactgacctttataaatttctaacaaagagaggtgagaagatgactcgagaagaagtaaatgccataataaatttggctgatgtaaatg

SEQ ID NO: 7796 - DNA, 2010 bp, Homo Sapiens
  misc_feature (1180)..(1201): n is a, c, g, or t
  misc_feature (1310)..(1367): n is a, c, g, or t
  misc_feature (1615)..(1615): n is a, c, g, or t
  misc_feature (1805)..(1805): n is a, c, g, or t
  misc_feature (1822)..(1922): n is a, c, g, or t
  misc_feature (1925)..(1925): n is a, c, g, or t
gggggggccgcgcggctgcctgggaggctccgggccagccgcggtccagagcgcgcgaggttcggggagctcggccaggctgctggtacctgcgtccgcccggcgagcaggacaggctgctttggtttgtgacctccaggcaggacggccatcctctccagaatgaagatcttcttgccagtgctgctggctgcccttctgggtgtggagcgagccagctcgctgatgtgcttctcctgcttgaaccagaagagcaatctgtactgcctgaagccgaccatctgctccgaccaggacaactactgcgtgactgtgtctgctagtgccggcattgggaatctcgtgacatttggccacagcctgagcaagacctgttccccggcctgccccatcccagaaggcgtcaatgttggtgtggcttccatgggcatcagctgctgccagagctttctgtgcaatttcagtgcggccgatggcgggctgcgggcaagcgtcaccctgctgggtgccgggctgctgctgagcctgctgccggccctgctgcggtttggcccctgaccgcccagaccctgtcccccgatcccccagctcaggaaggaaagcccagccctttctggatcccacagtgtatgggagcccctgactcctcacgtgcctgatctgtgcccttggtcccaggtcaggcccaccccctgcacctccacctgccccagcccctgcctctgccccaagtggggccagctgccctcacttctggggtggatgatgtgaccttccttgggggactgcggaagggacgagggttccctggagtcttacggtccaacatcaggaccaagtcccatggacatgctgacagggtccccagggagaccgtgtcagtagggatgtgtgcctggctgtgtacgtgggtgtgcagtgcacgtgagagcacgtggcggcttctgggggccatgtttggggagggaggtgtgccagcagcctggagagcctcagtccctgtagccccctgccctggcacagctgcatgcacttcaagggcagcctttgggggttggggtttctgccacttccgggtctaggccctgccccaaatccagccagtcctgccccagcccacccccacattggagccctcctgctgctttggtgcctcaaataaatacagatgtcccccagnnnnnnnnnnnnnnnnnnnnnntacacaccccccaataaccacaaaaacaacaccaaaaccctatcacccataccataccaaaccaaaccacttaaacccacacaccaaaagatacccaatcccccgtccnnnnnnnnnnnnnnnnnnnnnnnnnnnnnnnnnnnnnnnnnnnnnnnnnnnnnnnnnngctcctttcccctccaacgttccttcgtttgcgcgctcgctcgtccgctcccacgaaaccccgtcttttcaccgcactttttcccttttcgcttggccggccctctccccggcgcgagacagataacggccgcaggtctctcgcttccgcgttccctcgaccacaaaagcctccgcggggccgatcgctaaaagcgccggtccttcgtttagccgctccccctactccccatccacaataaaggccanacgcctcgcggttgccgcggcgcggcccaaagaccgtgaatgctcgcctcgcgcgaaacaacacagcgctttccccgccgagtgttaatccttccccgtgttcgcccctacccatctccgccgatgcctcaccccgccacacattatcgccctcccctcacccagaggcactacccccctttcactatanacgccctggccacctcnnnnnnnnnnnnnnnnnnnnnnnnnnnnnnnnnnnnnnnnnnnnnnnnnnnnnnnnnnnnnnnnnnnnnnnnnnnnnnnnnnnnnnnnnnnnnnnnnnnnngtnttccaatttaccgccctcctttcccctccccgctatacaccctccccagtttcccccctgtcgcctgtattccgtcaccccccgg

SEQ ID NO: 7797 - DNA, 414 bp, Homo Sapiens
tccagtcttgctcccatcaggatgccataaagcaaccagataccctaattttgttaatttttagaaggggaagagatggaaaagtcatagaaaacctatttaacgaaatactagctgaaaactaatcttgcaaaatatatagtcttgcaaaagatacagacttccagatacagggaactcaaagatcccctaatatattcaacccaaaaggtcttctccagatcacatcatagtcaaactgtcaaaagtcaaaaatgtaaagataattacgaaaaacaacaaaagtgttcagttaacatataagggaatgtttatatgggacagtatctactgttatgaaaacacatgaaagtataaaactcactggtagagcagatacacgcaaaaaagaagggagtcaaacatcatcacaac

SEQ ID NO: 7798 - DNA, 540 bp, Homo Sapiens
caccatttgttcttgttgcttctctggatccagaaatgttgccattcttggaaactgtcccattgcttcgtatttctgccaacgtagctctgcctgcctgtcaacccctcactgcactctgctcatcacgggaggatacctgtgtgccggcagcccctcagggactctcagccctggcactggcaccccagggttggccccgtcagcagaggcttggctttcgagccagtgggtgtctctcctttgggcctgggcggcttgctcctgccagccatgccttcagggtaggctctgagcaagctggcgaacagccctggctgctccaaaaccaaaaagctgggtcctctggaggaggggcgagctgtggagcagccacccactgctgccccaagctcactcaggaattcacacccgcctggtttcttgaagtgtgctgggtccttccctctgctccctactccccaccacggcagagaataggctttctaagatgctgcgatcccgttctgctgcccgtaataaaaatgctctcagacactg

SEQ ID NO: 7799 - DNA, 689 bp, Homo Sapiens
cgtctaattaacacagtgggacacctgcaacccatcagcatgactaaaatgtaaaagactgacaatagcaaatgttggctaggatgtggagcaactagagctgtcagacatggctggtgggagtataaagaggtgcagctactttggagagcagtttggcaatttctaaagctaaacacgcttaccctctggcccgtcgtactgcttctttgtatttacccaagagaaaggcctgtaatacaaatgttaatagcagcttgattgtaacaagtaaaaactggaaacaactcaaatgttcatcagctggtgaacagataaattgtggtgcatttatacaacaaaatgctactcagcagcaaaaaagaagggaccactgatattagcaacaacatggctgaaactcagaaacatcatattgaggtgaaggagccataaaagaaaagagcatattctgtatgattccattaatacaaagtcctagaacaggtaaaaccagatggtagtgatagaaatcagaggcatcagggttagagttgactgcaaaagggcatgagggagctctttgggtgagggaatgttctttgaggtgatgattgaagcgatggttacataggcatatacatgtgctccaaactcatcagtctgtacatataaagggtgctgatgggagcagatgtgagatcggtaga

SEQ ID NO: 7800 - DNA, 640 bp, Homo Sapiens
  misc_feature (356)..(356): n is a, c, g, or t
gcgaccgccagcgtggggatgtctaggagctcgaaggtggtgctgggcctctcggtgctgctgacggcggccacagtggccggcgtacatgtgaagcagcagtgggaccagcagaggcttcgtgacggagttatcagagacattgagaggcaaattcggaaaaaagaaaacattcgtcttttgggagaacagattattttgactgagcaacttgaagcagaaagagagaagatgttattggcaaaaggatctcaaaaatcatgacttgaatgtgaaatatctgttggacagacaacacgagtttgtgtgtgtgtgttgatggagagtagcttagtagtatcttcatcttttttttnggtcactgtccttttaaacttgatcaaataaaggacagtgggtcatataagttactgctttcagggtcccttatatctgaataaaggagtgtgggcagacactttttggaagagtctgtctgggtgatcctggtagaagccccattagggtcactgtccagtgcttagggttgttactgagaagcactgccgagcttgtgagaaggaagggatggatagtagcatccacctgagtagtctgatcagtcggcatgatgacgaagccacgagaacatcgacctcag

SEQ ID NO: 7801 - DNA, 173 bp, Homo Sapiens
acaggaatctgagggctctgacttacttgagaatcatatcaaaaagttggaaggagagacttaccgataccactgtgctattcctggaagcaagaagacaatccttatggttacaaataggcgagtgttgtgtataaaggaagttgaaatcctgggcctgatgggagaagatg

SEQ ID NO: 7802 - DNA, 185 bp, Homo Sapiens
actagtgccacagacttgccagtggtaacttatttgtccggttcaagataactctgtagttttctttcctaggacttgttgttaaacgccaaaagacatttttgaactgtacatttgatcagattgttagcttttctgttttatttcttttgagaacctttgaataaaaaacatctgaaatttta

SEQ ID NO: 7803 - DNA, 258 bp, Homo Sapiens
agtggtgctgacgaactgacgtaaggacaagtgcactgacgtacacgtattcctatcggaacaaacaaggcttgttgtgggggaaaagtgtttgcataaagaagaagagattggaatggctggaatgagccctttgggagcctggctgggagtgaggtcaggtcacgtgatcccagtaggtaaggaggtgtctttgcagaagttcacagcgtcttggagcacctcactttgagttcagagacattagaaacaattacc

SEQ ID NO: 7804 - DNA, 298 bp, Homo Sapiens
cccagtcttcgtcccatcaggaagccaatcaaaaagacaagggaaattgcaaagaagattctttggcaagttatgaattgatatgcagtttacagtccttaatcatttcggttgaacagctccaggctagttttctcttaaatccagagaagtatactgatgaacttgccactcagccaaggcgactgcttaacacactgagggaactcaaccctatgtatgaaggatatctacagcatgatgcacaggaagtattacaatgtattttgggaaacattcaagaaacatgccaactcct

SEQ ID NO: 7805 - DNA, 918 bp, Homo Sapiens
cgttatagcaccgtggtagaagtgctgggagtggacttggtctgctgggactgggactgtgggacggtgcttcgaatggtaagagtggccgggatgacggtggtgaaggtgttggtggtgggcctcacaggcattgtggagcctggcctcacaggggtcatctgggagaacacttgtggaactccaactgtcggcttaacaaactgggtacctggggctggaactagtgtaattggtctaaccgtttggccttgctgtacgttcagcacaatcccaacctgattcattgcattttgtacaggccggacattccttacaggaaatccctgcgtagtgataaatattggttgtgaggccacaggggaactagtcacatgattggcattctgcatgacctgaacaggcctcaatactggttgagtaaccattgtgcccagacctggggctggattctgggtcaggatgagtggctgtccaccttgctggaccaaaggattgccagcattgttgttggcaattagtgtgacaagagtcttctttgtactgtcgctgttctgtgccccgctgctactaacggtggtggatgtagagaggtgcccagcaacagaagcatgggcagcgatgggcactggagccgagactggctgctggctcacagaaactgtggtagttttatccactgaattataatcttcaactacagagtcctcaatgatatcactgattttctgccatggctccaactcctttgcctctagcaatatggagtctggcatgttagcaggctgatccatctgccctctgtagaaaaccagggtgggaaggacagtgccatctgccagaatggctaggactacatcacaccaaggttcccctgtgcccactgtctgcagggcattctcctttcgatcatcactc

SEQ ID NO: 7806 - DNA, 273 bp, Homo Sapiens
  misc_feature (256)..(256): n is a, c, g, or t
cgcatcttgctcccatcgagaatgaatactgtctgcttcattattacacaccacactttgctgttgtaaattcttaagatcatgatctatgctgctctgaagatctaaaaaggtgctgttccacagctgctctaattgttctttctataaatatctgtagaggctggtaggatgctgatgggacgaagacgcatcttcgtcccatcagtcgttactgctttttgataaccaacaaaggtcaatgtataaaatcccntgatgggagaagactgc

SEQ ID NO: 7807 - DNA, 192 bp, Homo Sapiens
atagtagtagtaggacatgtaggatctaggaacgaaaggaaaaagtctgagatgaagatagaatttggattaagcatatagtgattgaagttaaaatgtgatgattttctccagggatattatgtggaataagagggtaagggatagagccctgaagtatgcacattttaccctgatgggacgcaatatgcg

SEQ ID NO: 7808 - DNA, 713 bp, Homo Sapiens
aggagaaacccgctcaccagtcctttctgaattgtatgaactacccatagcttgtcctgtgtttatcaaatgtccgtcggcattaatgcctgcagtcattgtctgagaactgcccgagagtcccaaagaatctagatcgacactattgattggtacaaacgtaatatttcctggcagaccaagaggcacattagcaactacttgggtttgaccaggaaaagatgaaccaccaattgcaactccctgaacctggacttgaccagtctgtggtatgagattctggatgttagcagaaggtgttccagaggcaagtaaggtttgattagagccaggaatgatctgaatttgactgctttcttgatttatacccccattatctgaagagcctgtgaaaccaatttgaacctgctgaccatctgctgactggatctgtggtatcacttgatattgaacactggacactgtaccatttgatgaatctgatcctggtgcaacggaaaatatttgttgattctgcaaattctgaaggggaagaacatactgcccacttgaagtagcagcacttggaatctggactagattaccagcttcatcttttatagttgtaggtgtggctgacaaaacctcccatcggtttggtgctcctcctaactgtgcagaagccaaatcaggctgtcgctccggcggcggcgggggacccggctcggcggcgc

SEQ ID NO: 7809 - DNA, 410 bp, Homo Sapiens
agcggcgaaaatataggttctccaaatggtgaaaaatcaatgacattaacttatcactggatcttataccatgtagctgaggtttgaatagtttgggagccactctcaaatcttgtcttgtgccatggcttatgagacccatgtctgtgccaataataaagtgattaggatctgaaggcagaaatctaacattcagtgtttgtgtagtgccccaaaattcattacctttatgggaaagactgtcacccaactggatcagagcactatgtaccagcttgaccctccctccaggcatcagacctaaatcacttattgaacctgcgatgtctgcctttggtaattcacaaccacccatacattgagaaccccactctcatccaggaagcgatgtggatgcacaaccccggaaa

SEQ ID NO: 7810 - DNA, 130 bp, Homo Sapiens
cccacaaatcgctgagctcgtaactcagcctgattgaaagtgagccgctaatccatttcactttgtagatgggtgctgggctagctggcagcatgtccttgcctaggagccccaggatggccatgctagg

SEQ ID NO: 7811 - DNA, 238 bp, Homo Sapiens
tgctgggattacaggcatgagccatcacgcctggccatccttcgctttagatctaaagacaaaaaaggttgaaagttaaataatggaaaaagatcattccatgtaaatagtaacctaaagagaatttgcctggatatattaatatcagacaaagtaaacttgaagtaaaaaaactgatagaagagagagtgaatgagagtctatactgctagacggtacccttcatcaagaagataaa

SEQ ID NO: 7812 - DNA, 225 bp, Homo Sapiens
ctcggtaccctgccagtagtctacaattcattgcattttcgttctgcacaagctgcatacatttgagatactcttgcatgtacttggtgcattcgccgtcgtggtctagcgggaacgaacctctctcgggtggagtaggtctcaatgcgctcagcgagcttcctgggttccctgacattggattcttgtgttatgtttcgtaaaagatactttgtgtgtagtggg

SEQ ID NO: 7813 - DNA, 236 bp, Homo Sapiens
tgatccccgaggaacccccattatggctgtactaatttacattcttaccaacagtgtacaagggttcccttttctcacatcctcaccaacacttagcttttgtctttttttattatatccattcttacaggtgtcaggtgacactttgtggtgcagaagatttttattttgatgtaatcccatttgtctatttttgattttgttgtttgtgatttgacttttggggtcaaatttag

SEQ ID NO: 7814 - DNA, 231 bp, Homo Sapiens
tgagccactgagcccggccttctcttgacgtttaaactatgaagtcagtccagagaaacgcaataaatgtcaacggtgaggatggtgttgaggcagaagtaggaccacactttttcctatcttattcagttgataacaatatgacctaggtagtaatttcctatgtgcctacttatacacgagtacaaaagagtaaaacagagagactgctaaattaaagggtacgtgaag

SEQ ID NO: 7815 - DNA, 556 bp, Homo Sapiens
gaagtcagaatggacagtgaggacagttatgtcttgtaaaagacaagaagcttcagatgggtaccccaagaaggatgtgagaggtgggcgctttggaggtttgcccctcacccaccagctgccccatccctgaggcagcgctccatgggggtatggttttgtcactgcccagacctagcagtgacatctcattgtccccagcccagtgggcattggaggtgccaggggagtcagggttgtagccaagacgcccccgcacggggagggttgggaagggggtgcaggaagctcaacccctctgggcaccaaccctgcattgcaggttggcaccttacttccctgggatccccagagttggtccaaggagggagagtgggttctcaatacggtaccaaagatataatcacctaggtttacaaatatttttaggactcacgttaactcacatttatacagcagaaatgctattttgtatgctgttaagtttttctatctgtgtacttttttttaagggaaagattttaatattaaacctggtgcttctcactcacaaaaa

SEQ ID NO: 7816 - DNA, 255 bp, Homo Sapiens
ggtgctgagccctggtgaggagctgagggggatgggttgctggggccaggagggtctctccttcagcccctgcacactcccacccaggacagcccccagcccaactaggaaagggccatgggcagagggctggtagccagtatcttccactgccccatctgttggccacctgcaggccagtctcaaccctcccccaggtgggcaggcacttgatggctacaaataaatgtcccgtggccccagcccactctaaaa

SEQ ID NO: 7817 - DNA, 720 bp, Homo Sapiens
gctttcccctaaatggctgagcttctcgccagcgcaggatcagcctgttcctgggactttccgagagccccgccctcgttccctcccccagccgccagtaggggaggactcggcggtacccggagcttcaggccccaccggggcgcggagagtcccaggcccggccgggaccgggacggcgtccgagtgccaatggctagctctaggtgtcccgctccccgcgggtgccgctgcctccccggagcttctctcgcatggctggggacagtactgctacttctcgccgactgggtgctgctccggaccgcgctgccccgcatattctccctgctggtgcccaccgcgctgccactgctccgggtctgggcggtgggcctgagccgctgggccgtgctctggctgggggcctgcggggtcctcagggcaacggttggctccaagagcgaaaacgcaggtacccagggctggctgcctgctttgaagacatttagctgcggcactgggcttggccctgccgggacttgccttgttccgagacctgatctcatggtgatcctccggtactgcgatagcaccagggcactggactgggggaagtagcataacggcttcgtagtgaactatgcagacgaaatgccagagcagccctgttgcagcaagtacggtagcctctggctagctgggggtcagtgagagctctgggaaacctgtgggtccgct

SEQ ID NO: 7818 - DNA, 454 bp, Homo Sapiens
ctagaagccaagggaaaggggtgcttttatagaggctagcttctgcttttctgccctggctgctgcccccagccccggggtgagtccattctcccaggtaccagctgcgcttgcttttctgtattttatttagacaagagatgggaatgaggtgggaggtggaagaagggagaagaaaggtgagtttgagctgccttccctagctttagaccctgggtgggctctgtgcagtcactggaggttgaagccaagtggggtgctgggaggagggagagggaggtcactggaaaggggagagcctgctggcacccaccgtggaggaggaaggcaagagggggtggaggggtgtggcagtggttttggcaaacgctaaagagcccttgcctccccatttcccatctgcaccccttctctcctccccaaatcaatacactagttgtttctacccctggca

SEQ ID NO: 7819 - DNA, 537 bp, Homo Sapiens
  misc_feature (68)..(81): n is a, c, g, or t
ttttttgcccacggatataacttagtttatgggtcaagccaatgcaatgcaaagttgtttctgttccnnnnnnnnnnnnnnaaccaaaataaataaatcagatctgtccctgtgaaggtcagagtgataaatgaggggcagctggccccttggccatggcctggcccctcacccccagcccctcctctccctcttctgacctgctttggcacagcaaagaaaacgatgcatcagaaagtctccattgggttaaaggagaaagaaagagtggttggggtggggagggagtccaagagaggaggtggagggttaacaggaccaagacagagcagccagtgccccggcggtggctacctgagcggggcttcctggctacacacagactctgtgggctccaggtgctgcctgggcccaggaggggtgggtggggcatgcttgggccccacacacagcctggaaccctcgaaggaacagcagataatggacactgcagagactgaagctgccctttctgtgcaggtcaggcaaggctctctc

SEQ ID NO: 7820 - DNA, 1276 bp, Homo Sapiens
  misc_feature (840)..(886): n is a, c, g, or t
  misc_feature (943)..(943): n is a, c, g, or t
  misc_feature (1106)..(1180): n is a, c, g, or t
cattgtttgaagcagtgtgcagtttagggttcatgataaatcattgaaccacatgtgtaacaactgaatgccaaatcttaaactcattagaaaaataacaaattaggttttgacacgcattcttaattggaataatggatcaaaaatagtggttcatgaccttaccaaacacccttgctactaataaaatcaaataacacttagaagggtatgtatttttagttagggtttcttgatcttggaggatgtttgaaagttaaaaattgaatttggtaaccaaaggactgatttatgggtctttcctatcttaaccaacgttttcttagttacctagatggccaagtacagtgcctggtatgtagtaagactcagtaaaaaagtggatttttaaaaataactcccaaagtgaatagtcaaaaatcctgttagcaaactgttatatattgctaagtttgttcttttaacagctggaatttattaagatgcattattttgattttattcactgcctaaaacactttgggtggtattgatggagttggtggattttcctccaagtgattaaatgaaatttgacgtatcttttcatccaaagttttgtacatcatgttttctaacggaaaaaaatgttaatatggcttttttgtattactaaaaatagctttgagattaaggaaaaataaataactcttgtacagttcagtattgtctattaaatctgtattggcagtatgtataatggcatttgctgtggttacaaaatacttcctctgggttataataatcatttgatccaattcctattgcttgtaaaataaagttttaccaggccgatctggnnnnnnnnnnnnnnnnnnnnnnnnnnnnnnnnnnnnnnnnnnnnnnntgcagcgcccctctcgcatcaagctctcgcgcgcccccgtcctatctaggccgtctncttccctgtgtggggccgcttccgggcccctcgaaaaaattcttttaccccccattttccttgtccgcttccgcgcccttcccagggttccctacccccggccccaaatcctcccgtctctccaaaaccatctccccgtcccctgacattgcggcgctctgannnnnnnnnnnnnnnnnnnnnnnnnnnnnnnnnnnnnnnnnnnnnnnnnnnnnnnnnnnnnnnnnnnnnnnnnnngagagagctttttggcgcgcgcctttcccctggcgcttttctccccgggaggattgttctccacttttcgcccgtcatagcctaaatccgctcccc

SEQ ID NO: 7821 - DNA, 728 bp, Homo Sapiens
acttgcaaaatgcataaacatccgacagtttgaatttatagtgttgatggaagaaatcatttttaatgtgtactgtaaaacttgaaatactcaggagctgagtgaatatgtttgttgctacttacaatcccgacctgttagtcccagtagttttgttttaacatggtctttttcaactttgtttcctgtttaactacagatgacttctgttgtagactcacaagtttaactgttgtattataacagtattacatgtcaacggtgtggttatgacctttatttatataaaaaccaaatatttagtcaatttaccgtgtcttaatttaatctttgtacaccttccatttttaagtgcttaaatgagtactatattgcaataaaatgtagtgatataattaaccagccattaaaaatttacttctacagatacaggggcaattgagtttatatattagggacttgcatactttttatgattactatgaaaattagagcaattaaaattaatggtttctacaattaatctgagttctacaacctaaaattgccttcagtttactggcatccctggattagggttagacctgatattgtggctgacacagaaaggcaacaggaaattaacttcattattttcatattcataatatggcatatgagactcaccaggcaagcaaatccccagactggttaaaagtaaaaatttaaaagctgttagctatattttg

SEQ ID NO: 7822 - DNA, 1456 bp, Homo Sapiens
  misc_feature (60)..(60): n is a, c, g, or t
  misc_feature (99)..(99): n is a, c, g, or t
  misc_feature (248)..(248): n is a, c, g, or t
  misc_feature (269)..(269): n is a, c, g, or t
  misc_feature (300)..(382): n is a, c, g, or t
  misc_feature (385)..(385): n is a, c, g, or t
  misc_feature (390)..(390): n is a, c, g, or t
  misc_feature (392)..(392): n is a, c, g, or t
  misc_feature (396)..(396): n is a, c, g, or t
  misc_feature (403)..(405): n is a, c, g, or t
  misc_feature (410)..(414): n is a, c, g, or t
  misc_feature (416)..(417): n is a, c, g, or t
  misc_feature (420)..(421): n is a, c, g, or t
  misc_feature (425)..(443): n is a, c, g, or t
  misc_feature (445)..(448): n is a, c, g, or t
  misc_feature (453)..(464): n is a, c, g, or t
  misc_feature (469)..(471): n is a, c, g, or t
  misc_feature (473)..(474): n is a, c, g, or t
  misc_feature (476)..(587): n is a, c, g, or t
ctcgcgcgccgggctgcctctcccgggccgttgcgggtggcggcgggcggccgcctgtcncggccccgccgcctgttccccgcgcggggttcgtccgtncgtccggcgcttttggcgcccgccgcgcgcgcgtttcgtgcggtgggtgcgtgcgtggcgcgctctgcggtgcgcgggctgcgtctctggcggccttcgtctcgcggcggcgttcgcgcgccgtgtgctgcgtcggtctttctgcgtgnggcgccggccgtcgggggggnggcggttgtgtttggttgtcttgctggtgtnnnnnnnnnnnnnnnnnnnnnnnnnnnnnnnnnnnnnnnnnnnnnnnnnnnnnnnnnnnnnnnnnnnnnnnnnnnnnnnnnnnttnttttntngggntgtggtnnnttttnnnnntnnttnngggnnnnnnnnnnnnnnnnnnntnnnnttttnnnnnnnnnnnnttttnnntnntnnnnnnnnnnnnnnnnnnnnnnnnnnnnnnnnnnnnnnnnnnnnnnnnnnnnnnnnnnnnnnnnnnnnnnnnnnnnnnnnnnnnnnnnnnnnnnnnnnnnnnnnnnnnnnnngactcgcacacaaggacggtttattggctagagagcaaacgcaggcagaagtaaaaacaccagataaaaagtgagtgtggagaggtgaagactgcggccgctggacttggcttgagctgtgaggggtgggaggggaggatagcaccggaagatgctgctccgggcccaacaccagccctggccaggctctcccctcccaggggcagcgcccagtccccaggggctgccagagccctgtgtgccttgccgcattcccctgatgcagcttttggcaactgaaaggcagggctctcgctgagtgcacctggggcttcctgagcccatctgcggcggccccaccctggcctaggtgctgagtgcagctgctgcagacagcccctccctccttagtggagcctggagggtggggtgctcggggatgcaggcaggggcaggggctccagagccacaggtcagaagcagggctgggggaggggtggagccattcagcctcaggcaccctcacagctaggtgactaggggcagggacagaatggggtgaattctccccactctgaacaactgtgtcaccaacaaacaagttaagtggcagggctgcgcccatcctctcctgcctaggccagaatgcgggggggatgggggcacctgcctagctgagcagttccaagtaggtgacagggaccttgcccttcttgttgcctctctcgccaatgagccagtcagggtccatgccaggcaggctgtagacagtgatgagctcatcagccagcagggccagctcactgctgtcggctgcctcgtagtcatagagcacccgagctttgcgggtcccactggcagggggggccacctcttccaggcagagcgag

SEQ ID NO: 7823 - DNA, 541 bp, Homo Sapiens
agcgggggcaacttgaaatatatgcagtaaagtagtccatgcatacaagtccctaacatggtagatgatgttgcctcccggccctgctcagaaagaatacaaaaagtgtacattcctttttctataatttaagaagtctggaatacagagtgtaacactgtgtactgctagcacccaaagtggaaaatcttaagcattcagattgtttagtcaaagaagaaaaccagaagggcagttgcctattgaggtgattttaaacctgtttatttgtaaggattaagtaccctaataggcttaaactatgatagaggtttaatacagaaaaaattgacaggtattataaattgtggatccagttacttgcttatttaatttgtaaagaggtaaaattagctctggttgagatatcaagtatggcaggtatttgagaaggctataaatcataattttcatttagttaaaatatggacctgattctgggaaaccctatcattccatctcaatgttttacaataaaataaaaactaaagtgaaattcaaa

SEQ ID NO: 7824 - DNA, 763 bp, Homo Sapiens
  misc_feature (36)..(36): n is a, c, g, or t
  misc_feature (79)..(79): n is a, c, g, or t
  misc_feature (182)..(226): n is a, c, g, or t
tcatgtatggcatagagcagcggtccccaacccccntggccacagatcagtatcgttctgtggcctgttaggaaccagngctgcacagcaggaagtgagcggcgggccagcaagctaagctttcatctgtttttacagccgcttcccattgcttccgttactgcctgagccccacctcctgnnnnnnnnnnnnnnnnnnnnnnnnnnnnnnnnnnnnnnnnnnnnnttgtgaactgcccacgcgagggatgtaggttgtccgctgcttatgagaatccagcacctgccgatctgtcactgttccccgtcaccctcagatgggaccgtctagttgtaggaaaacaagctcagggctcccactgattctacattttggtgagttgtataattgttatgtattgcaatgtaataataatagaaataaagtgtacgataaatgcaatgcgcttgaatcatcctgaaactccccccacccaaccccagtctgtggaaaaattgttttccaggaaaccgttccctggtgccaaaaaggttggggaccactggcatagagtaagggcttggtctctaggcacagcctgatactacctttggaagcaagatgctgaatccctccatgcctcagtttcctcatctgtgaaatgctgatagtaacatgagtcaattaatataaagtacctggaacacacagaagtgtttttattggtctagtgcccacactgtgcttggcacttggcaaaagatgaataaacatttaagaatg

SEQ ID NO: 7825 - DNA, 563 bp, Homo Sapiens
gtatcatttgaagacgtggttgtgaccttcactggagagaatggggggcacctggacctggcccagaggaccctgtaccagaaggtgatgctggagacctgcaggctcctggtctcactggggcatcctgttcccaaaccagagctgatctatctactggaacatggacaggaactgtggacagtgaagagaggcctctcccaaagcacctgcgcaggttggtgactgagagtctggcagcgggtatcagggcagcctgcagaccacccaggcatcactgtgtctgaaatgccatgggcagctattttgtggtcttgagcagtcatggagcccttgaccccatggtcccccgtcttcccacttctgtcacacactctttgcctttattcaggttggaatatgttaggtaggagacagattctaggctttaatgatttgccactcactagcctcatgactctggagaggttgtgtgacgtcactgtgcctttggtatataagttaggctgagttaatgaccttctctgaaaaataaactccaaaatcatgtgactcaaaaaaaa

SEQ ID NO: 7826 - DNA, 602 bp, Homo Sapiens
tatccgcatctgctcccatcagtaagaggcgtctctacaacctttccaaattggcagtaggtagaacaggacttgaatcagaaaccacaggaggtagaccccaaatactctggtttcccataactcatacaaagctggcaaaggaggagggaaattcagaagactgggatctttctgtttacacatcaacagcaacaggaagaggaacacaggcaggccaaacatgatgagaaacacaccaggtactcctccaaactccaagtcctttgcccggatgggggtcacttcaaagaatatcaacggccagttcttttacaacgtatgcttcttccttagaatctatttcttttaatctatgacttattctcttcttggacgaaggctatatctgtgttgctatgtaactgcttgacttgtgacaaaactgaatttatcctgtgtatttatatgaggtgcgtcatttctcatcaatatgactcaggcatccccattaaatctgactagatgctatttcacaaatggcttcagaatcagcggagtcaatttaacttccacttccctccttgcttccttaatgtcggcctgatggtagcaagactgcg

SEQ ID NO: 7827 - DNA, 2293 bp, Homo Sapiens
  misc_feature (883)..(893): n is a, c, g, or t
  misc_feature (949)..(1007): n is a, c, g, or t
  misc_feature (1380)..(1380): n is a, c, g, or t
  misc_feature (1467)..(1467): n is a, c, g, or t
  misc_feature (1476)..(1476): n is a, c, g, or t
  misc_feature (1510)..(1510): n is a, c, g, or t
  misc_feature (1531)..(1531): n is a, c, g, or t
  misc_feature (1575)..(1575): n is a, c, g, or t
  misc_feature (1592)..(1593): n is a, c, g, or t
  misc_feature (1649)..(1649): n is a, c, g, or t
  misc_feature (1678)..(1678): n is a, c, g, or t
  misc_feature (1708)..(1708): n is a, c, g, or t
  misc_feature (1975)..(1975): n is a, c, g, or t
  misc_feature (2031)..(2031): n is a, c, g, or t
  misc_feature (2071)..(2072): n is a, c, g, or t
  misc_feature (2157)..(2157): n is a, c, g, or t
taactcctgccaggcagtgcccttcccggagcgtgccctcgccgctgagctcccctgaacagcagctgcagcagccatggccccgccctgggtgcccgccatgggcttcacgctggcgcccagcctggggtgcttcgtgggctcccgctttgtccacggcgagggtctccgctggtacgccggcctgcagaagccctcgtggcacccgccccactgggtgctgggccctgtctggggcacgctctactcagccatggggtacggctcctacctggtctggaaagagctgggaggcttcacagagaaggctgtggttcccctgggcctctacactgggcagctggccctgaactgggcatggccccccatcttctttggtgcccgacaaatgggctgggccttggtggatctcctgctggtcagtggggcggcggcagccactaccgtggcctggtaccaggtgagcccgctggccgcccgcctgctctacccctacctggcctggctggccttcgcgaccacactcaactactgcgtatggcgggacaaccatggctggcgtgggggacggcggctgccagagtgagtgcccggcccaccagggactgcagctgcaccagcaggtgccatcacgcttgtgatgtggtggccgtcacgctttcatgaccactgggcctgctagtctgtcagggccttggcccaggggtcagcagagcttcagaggtggccccacctgagcccccacccgggagcagtgtcctgtgctttctgcatgcttagagcatgttcttggaacatggaattttataagctgaataaagtttttgacttcctttaaaaaccaaaaaccacaccgacacagataaagccacccccccctccnnnnnnnnnnncaagaccccccctcacacaccccacatctcaacaacccaacacaaaccaccacacnnnnnnnnnnnnnnnnnnnnnnnnnnnnnnnnnnnnnnnnnnnnnnnnnnnnnnnnnnngttttttttggggaacaaggcgccgccccccacgccgggcgcggacatcatacagaggggagacacggcccgcgcacggatactcacacccccgcgggggccgtgagacaccaccgccaccccctcgggggtccctctccctaccggggcacccccacactctatcacgcggggggggccgctcccctccgcacggccccctccaacttgcgctccgccgtattgtttttaaccaagcggtcctatacagcagagagccgccgtctaccgacctcgccgcgtgctcataagttgtctacgcctcgagtggagagtgccgcaaaccgccagacgaagccggacgctccgcgcccacgtcgcatttagcctccgntcccgcgccccccctagtgtgcccgaacgcgctagggcccgcgcttccgtcactgttttcttcgccgatgtcgctcgcttcgtcagntccctgtgnccccctcccccagtccttatagctccctgcctgntggtcatgagcggcggccganaaagaaaatgagagcaaacggcataaacaggccttgagacggantcttggtgtggggtttnnaccccctgtcgcgtctcgtacctgcctccaccaacattttcacattacaggaagtngtctggaatccaatgtctgtcccgcgtgntgggcgggtcgtcaccgaaggccgtgaagnagtgaacacttcttgtccacccctaaacttgacaccccccccgagttcccttgcgccgcctttaaggtaacctgcgaacctagacccctttcccgatccactcatggagaacacaaatggaaaccaagtcgcctcagttgcgcccggccacgcgcaattttccacgcgctctggccatccgaattcgtccagcgaagcagccaacaacgcgccaccccccccgtaaaagatccaaatcgcgttctcaaagtaaccccaccatcaagncgcatacccatccccccttactcctccgcctcccccccttcctcgtttctccttgnattcgctgaccaaaccggtaattttgggttgaaccgaccnnaattaaggaccttccggcctgatcctgcctccgcctcccacccctggtggcgctccttagcgtccactttgcccccattcgtctnctatcgtccttcccacgccccctgtcagcccttcacccctggatctccgccgtactcatcgaccctccggatccctcttctccactaccgacccccggcatcactgcccgaaacttgccgccccaccccccgtgcg

SEQ ID NO: 7828 - DNA, 711 bp, Homo Sapiens
cttccgaagaactcctggttgttattggattttgtattttaatacaaattattgaattttataagcttgtacacaatatttaattagtgtgaaaggaaacaaagaatgcaggaaaaataatttaatatcaacctcagttgacaaggtgctcagattattcaattcgggatcctccttttgttaggtttttgagacaaccctagacataaactgtgtcacagacttctgaatgtttaggcagtgctagtaatttcctcgtaatgattctgttattactttcctattctttattcctctttcttctgaagattaatgaagttgaaaattgaggtggataaatacaaaaaggtagtgtgatagtataagtatctaagtgcagatgaaagtgtgttatatacatccattcaaaattatgcaagttagtaattactcagggttaactaaattactttaatatgctgttgaacctactctgttccttggctagaaaaaattataaacaggactttgtagtttgggaagccaaattgataatattctatgttctaaaagttgggctatacataaattattaagaaatatggatttttattcccaggatatggtgttcattttatgatattacgcaggatgatgtattgagtaaaatcagttttgtaaatatgtaaatatgtcataaataaacaatgctttgacttatttcaaaaaaaa

SEQ ID NO: 7829 - DNA, 426 bp, Homo Sapiens
acatgcctatctcccatcaggctgcagggctgggggctagtgttctgcttgtcacccctggaggtagggtcggttccacttaacagcgcatggctgagaatgtaggatttggatgggaagggaatcttctcaaataagaatccaagattgttactgagagaagaggggaggcatattgaggcagtcaacaaatgtcagtgcttacacccacacaataggcagtcaagtaagcatttgattgaacgcgttgaatgacaaaaatgcttacccatcttgctcaagcagcatcttctagcccttgaatagccttaccattcctctggaatcacagctacctgggaaggactattaggataatgaggagagctaatgcttatttagcacctactctgtgctagtctttgactaggtgtgaggagtcctcaa

SEQ ID NO: 7830 - DNA, 530 bp, Homo Sapiens
  misc_feature (246)..(294): n is a, c, g, or t
aatttaagatgcatgaacaattcttttatgtttaggggatgcctttgtctttaccttttactaaacttgtttttccaagctagaactctttctggaaaatgttgaccatctgttttcaatacttttatcaaatcaaggcattgtgtagttctgaatcattggtgatttggtacaagcatgtatacttgagcatgttgatgattcacacttttaattattgtcctgttttcttaaagatgagccttnnnnnnnnnnnnnnnnnnnnnnnnnnnnnnnnnnnnnnnnnnnnnnnnnttcatctgatactttgattagaattcagttttgccaacagggataaaaaattgggctgctaatggacagctaaggaaagcaaccatcttaaaccacatatcacaggaagtataatgttttaatgtaaacctttctgaagtgacaattgtaaagactattcagtgatgatcatttgttaatgacaaagcaaatcactagtaaatttggaatgattaataaagaaaacttaaagattg

SEQ ID NO: 7831 - DNA, 235 bp, Homo Sapiens
tagaggatcccctagtcttctcccatcagtatttctgctgttttcacctctttagctctgagtctaggctatatgacacaaaaggaaaacccaggaactcaccagtatgtcattcatcaggatctgaggtccctaaagagtctgctgccttctctctgcatttcagagtcgtcattgaaacttaaaaaatatatgtccagggttttaaaactgtacctgatgggacgaagacgcg

SEQ ID NO: 7832 - DNA, 455 bp, Homo Sapiens
  misc_feature (436)..(436): n is a, c, g, or t
gcagcggctgcaccctcatgcacccgtttgtgcttggtgaggctggaggcctggccgaaggccttcccgcagagctgacagcgatagggacgctcgcccgaatgcacgtgcaggtgctggagcagcgctgagctctggccgaaggccttggagcagtgcgggcaggcgtagggccgctcgcccgtgtggatgcgcaggtggtgttgcaagttggagctctgcccgaaggctttgccgcagtgggggcagcggtaggggcgctcggcagtgtgtgtgcgctggtgctgcagcagcgccgagctctgcccgaaggccttgccgcactgcggacacgggtagggccgctcgcccgtgtgcgtgcgcaggtgtttgagcagcgcagagccctggccgaagcccttggcgcacaccgggcacttgtggggccgcgggccgncgtgcgtgcgcaggtgctg

SEQ ID NO: 7833 - DNA, 307 bp, Homo Sapiens
gacccatcttgctccatcagctaagggcacctgtacttcctggggctcagctgaacttcttgtcatgtttaaaatatgcaagatactatgttgtaagtgtgttacattgtaaaaatgaagaaaaaattaagcatttacttaaaacaggtgaggaaatacatggtttcataaatttctttgactgatgggacgaagatccatcttcgtcccatcagggtggctgtgatggctggagatttcatttgcagagaagcactattggttagataatccaaaacctcctgtagtttagctgatgggagaagat

SEQ ID NO: 7834 - DNA, 495 bp, Homo Sapiens
gctcggtacccccatcttgctcccatcagttggctctgagtgtcatcttctaaatcagaactggaagtctcctgctcctaggaaaagtgtcttaggctctgggagaggcgttatacagatcctgggaatcctctatgggaagtgaaggctcagacagtttccctgaactcttagaagctgagctgaccaaactggctcgaaatagcccaggggaaggagatctgaatcctcctgctgtagggaaaaaactggtcccacggcctgtttgtctgttacaaggctgataggatggaatcgtggagccaatcagctcaaagctgctattgtggctgctctcctttgttagcaatgaacatgaatcatcctcatccagtttgctaggctgcttgcctgagttttcatctgtttctgatttttcttcagtaggaaagtaacccatcttggaagagctgtccttaaacagaagtaaagtagaatctgatgcggagaagactg

SEQ ID NO: 7835 - DNA, 215 bp, Homo Sapiens
cgcatcttatcccatcagctactactttaggttctaacagtgtcttaatctgagaaacaaatgcttcacaaaatataagtttactgggatgaataattaaaaaaccaggtggtaataacaatatactcaaatccaggccatagtctgaataataaaaccagtacaaaaaatcacgaaggcctgatggtagcagactgcggggatcctctaggtca

SEQ ID NO: 7836 - DNA, 820 bp, Homo Sapiens
cccaacccggaggagaaaaccaggaaagagaaaagagattcagggccagctataggaaaggacaaaaaaaccatcacaggagagagaggtccaagggagaaaggggaaaggattgggaagaagcttcagtctgagctccaacttcaccacccctgaagaagttcccacgggaacaaagtctcacagatgtgatgaatgtggtaaatgcttcacgagaagttcaagccttatccgccataaaataatccacactggagaaaagccctatgaatgtagtgagtgtgggaaagccttcagtcttaactccaaccttgtcctgcatcagaggatccacacaggagagaaacctcatgaatgtaacgagtgtggcaaggccttcagccacagttccaatctcatcctccatcagcgcatccactctggagagaaaccttatgaatgtaatgagtgcgggaaggccttcagccagagctcggacctcaccaagcatcagagaattcacacgggggagaaaccctatgaatgtagtgaatgtggaaaagctttcaaccgaaactcatacctgattttgcatcggagaattcacactcgagaaaagccctacaagtgcactaagtgtggcaaggccttcacccgcagctccaccctcactctgcatcacagaatccatgccagagagagagcctctgagtacagcccagcctcccttgatgcatttggcgcgttcctgaaaagttgtgtgtaaaggaagaatttgccatcaagccatttcccccttttgtttctaaaattatttcagagatgtgtgctccaggagggt

SEQ ID NO: 7837 - DNA, 659 bp, Homo Sapiens
  misc_feature (545)..(578): n is a, c, g, or t
caacaggaagagtgaagtagaagaacagatcatttaattatacaaacaaaatcgctttcctttgctccagcgagtccaggcaacctttcaagttcatttgctgcctgaaagaaaggtttttagtatcagaaagaacctcgctgtcctccaatatccacagggaaaacaagatcagaaacaaaagtccaccatggaagaaatcccagagcgatccaatttggaaagaatttaattaacaaaataaaacggagggaaaatggtccaggtggggccctagggagatcggacttctgtcccagctgaagtctgcccagcacacctggtgggcagcccctgggcctgtcactgcagaactggccttgacaagcagacccactgtgcgcgacgccacggtttccttacgcactcggcattatgtacagatatgaaaaaacccaacggcaggtggctggaaagtggcttctagctcccctatgctggcttggcacgttcatgcatgcaaagcgaggaggttttgcgggcttcaccaaacagttaattttggnnnnnnnnnnnnnnnnnnnnnnnnnnnnnnnnnnttcataagcaggatttaaaagccactgaagtgaaaatgatgtatttcctcagcgttatggagttagactaccactacaatc

SEQ ID NO: 7838 - DNA, 876 bp, Homo Sapiens
  misc_feature (44)..(56): n is a, c, g, or t
actggcatatcaacgcacaccagtgattctcctgtatcttggtnnnnnnnnnnnnnaaggtacgtattctgcaatatggctaaaccctttcctgattgagagttaaagcaataggagtcaagttactggtgccacagatctggaggtatgataggtcaggggctaggtgttgaacttagttaatggaagactgagagcagaacaggtttgtcatctccgcaaggccagaaagtgatcacaaaaagaggcagatgatagacactggggtagggtcataccacagggaaatacctttcctggggttgttttctagcatatcactgacctgggatctttgggtgatcaagggtgtggttagtggaggctctgtgctgcacgtatgcagtatcctatctctttctacatcagatcaaaacactaagttggtgtactgcctcgacctttttttcagctcatcctggaacatatacagagttgagagttttagacaatctctaggtagaggagacaagatgtagacccagacagaagaaatctgcttccctaccatggctattccagcaccccaacctgtaattgccaagtcctctaaggtactaatttgtagctgctctgaagtaaggatttcggattcagctggtagggaaagactctgcacctgctgtcttagggaagaaatggttcaaatccatgtggtgacattgcattagtctccctttcactgttttcttattctgtaattgtttgttatatttcccaaaaacgtcttgatcactaagcaaagctgctagtgggattctatatttcgtgtcatcttttttattataatttattgcaaatttttttctgaataaatatatgttgtgtgaaaaaaaa

SEQ ID NO: 7839 - DNA, 421 bp, Homo Sapiens
atggctctgctcccgtcgtgggctgagaaggagcaggtggggctgtgccttggaaaggaggccctcccgacatgcctttgtgcgaggtccctgtccatgctgtctccatcccggagccttacggcgatgggtggccacagagcctattccaagagtctggtttagggctgggtcttcccatcttcacctctgagtcttaggcgatgcgtgaccacgcagccccttccaggagtctggtttagggctgggtcttcccatcttcacctctgagtcttaggcggtgcatgaccacgcagccccttcccggagtctggtttagggctgcgtgctcaagagtctggtttggggctgggtcttcccatcgccctggaggaggcttttgtctcatctcatgattcacattaaactctgtgccatgaaa

SEQ ID NO: 7840 - DNA, 347 bp, Homo Sapiens
tcacgccgttgtcgaaaacggcagcttcatcccgatgaagatgccgttttcgccgaggaagatgccgtgttggtcagtgccctcgtgctgatggccatggtcaagagaaaggattccatgaggctagctccaaaaccatcccaggtcattcttcatcctcacccaggattctcctgtacctgctcccaatctgtgttcctaaaagtgattctcactctgcttctcatctcctacttacatgaatacttctctcttttttctgtttccctgaagattgagctcccaacccccaagtacgaaataggctaaaccaataaaaaattgtgtgttgggcctggttgcaaaaa

SEQ ID NO: 7841 - DNA, 563 bp, Homo Sapiens
tgcaagcccatggcaggggtgttgcatctcacaccagcatcctcctcgtggttgcagccctgagactcggcattgaacttgcagtctataatggacttctcattgcctgtgcactggatctcgttgaggtggatgggtccgatcccttgccccagtcgggagccagtgactgcctctttggcactcccaaagcccagctctctgcagaccacactggccgacaccaggtcccacttgtcgtcgcagacggtcccccactctccatttttgagcacctccacgcggccctccccgatgtaggcaccgcctctcagtcgcaccaggggttgctctggcttgtacgctttccggaatctcgagggtccgtcagggctgaagacctgcccaggcacacaactcaccacggccggtagcccattctcgcaggtgacattcttcatggggtccagtgacacctgggggcccagcttgcagctggagatgtgggcctctgtgccggtgcagtccatggagaatggccagtagcgctgcttcctccgtgaagcacacattttgtacacttt

SEQ ID NO: 7842 - DNA, 1035 bp, Homo Sapiens
cccctcgcgaacgtgttatccaaatcagagctgtaattcgctttaacaaattacgcatttctatcacgttcactaacagcttatgataagtctgtgtaatcttccttttctccagttctattacccaatttagattagtaaagcgtacacaactggaaagactgctgtaataacacagccttgttatttttaagtcctattttgatattaatttctgattagttagtaaataacacctggattctatggaggacctcggtcttcatccaagtggcctgagtatttcactggcaggttgtgaatttttcttttcctctttggggatccaaatgatgatgtgcaatttcatgttttaacttgggaaactgaaagtgttcccatatagcttcaaaaacaaaaacaaatgtgttatccgacggatacttttatggttactaactagtactttcctaattgggaaagtagtgcttaagtttgcaaattaagttggggagggcaataataaaatgagggcccataacagaaccagtgtgtgtataacgaaaaccatgtataaaatgggcctatcacccttgtcagagatataaattaccacatttgccttcccttcatcagctaacacttatcacttatactaccaataacttgttaaatcaggatttggcttcatacactgaattttcagtattttatctcaagtagatatagacactaaccttgatagtgatacgttagagggttcctattcttccattgtacgataatgtctttaatatgaaatgctacattatttataattggtagagttattgtatctttttatagttgtaagtacacagaggtggtatatttaaacttctgtaatatactgtatttagaaatggaaatatatatagtgttaggtttcacttcttttaaggtttacccctgtggtgtggtttaaaaatctataggcctgggaattccgatcctagctgcagatcgcatcccacaatgcgagaatgataaaataaaattggataacacgttcgcgag

SEQ ID NO: 7843 - DNA, 526 bp, Homo Sapiens
gcggccgcctggacgccgagctgggtgcgcagcagcgcgagctgcaggaggcgctgggcgcgcgcgccgccctcgaggcgctgctgggccgactgcaggccgagcgccgaggcctcgacgcggcccacgaacgcgacgtgcgggagctgcgcgcgcgcgccgccagccttaccatgcatttccgcgcccgcgccaccggccccgacgcgccgccgccacgcctgcgggaggtgcacgacagctacgcactgctggtggccgagtcgtggcgggagacggtgcagctgtacgaggacgaggtgcgcgagctggaggaggcgctgcggcgcggccaggagagcagactccaggcggaggaagagacgcggctgtgcgcgcaggaggcagaggcgctgcggcgcgaggcgctcgggttggagcagctgcgcgcgcggctggaggacgcgctgctgcagatgcgcgaggagtacgggatacaggccgaggagcggcagagagcgattgactgcctggaggatgagaaggc

SEQ ID NO: 7844 - DNA, 562 bp, Homo Sapiens
ccacgtaccccaaaaagataagctgtcctcagatcctccttctacccaaggagggaaataagtggatattgccaagggaacaatcagaactcatctggctttgaaaacgacctgccaagtttggctagcaggttcatgacaacaagagagtaacaattggtagagagccacaggtagctggaaaagatactcccagctgacagggtgataaaaggcagggaagaattgggcctgtgctgatccaggaaggttttattgtttgcttgttttttgtatttactcgtgactaaattttattcatttaagtcagaattttgatatttgaaataagactactttcccttttcttactatctataaaaaagacgaggcagggatgctgtgttctttctgtcaaattctaaatgtgatctttgccattgcttatttgaattcaagaaagctatactttttcatcacatataactcacagtttcatttttgcattgttggattagacttaataaaacctaaatggaaaataaattcctaaatctgagcctaggagcatgtataaatttta

SEQ ID NO: 7845 - DNA, 830 bp, Homo Sapiens
  misc_feature (487)..(487): n is a, c, g, or t
  misc_feature (514)..(514): n is a, c, g, or t
tgtcaagttcctttgggttaagcattaccactcaggcatttgactgaagatgcagctcactaccctattctctctttacgcttagttatcagctttttaaagtgggttattctggagtttttgtttggagagcacacctatcttagtggttccccaccgaagtggactggcccctgggtcagtctggtgggaggacggtgcaacccaaggactgagggactctgaagcctctgggaaatgagaaggcagccaccagcgaatgctaggtctcggactaagcctacctgctctccaagtctcagtggcttcatctgtcaagtgggatctgtcacaccagccatacttatctctctgtgccgtggaagcaacaggaatcaagagcgcccctcattgtccacccacctatgtgccaactgttgtaactaggctcagagatgtgcaccaatgggctctgacagaaagcagatacctcaccctgctacacatnacaggatttgaactcagatctgtctgnataggaatgtgaaagcacggactcttactgctaacttttgtgtatcgtaaccagccagatcctcttggttatttgtttaccacttgtattattaatgccattatccctgaatcccccttgccaccccaccctccctggagtgtggctgaggaggcctccatctcatgtatcatctggataggagcctgctggtcacagcctcctctgtctgcccttcaccccagtggccactcagcttcctacccacacctctgccagaagatcccctcaggactgcaacaggcttgtgcaacaataaatgttggcttggattggc

SEQ ID NO: 7846 - DNA, 810 bp, Homo Sapiens
atacagaagtagggcggggcctcaggatgtccgaggagcccacgggcggcatcccagcaccgctgccctgtccacctggctggcagctgcttcacaggactatctgatcactttagcaaaggaggagaacaaacgaagccaacacagggcaagtctgcatgcgtgcgcgacggggcccccgcctccggctcacccccccgacccctgcctcccctccttccgagggccgccagaggttgggttgacccgaaaaggagacggtgcaccaggcgccccgaggttaagagacggtggcagcaaggaggccgagaggcacagcgaccctgccccagcccttctgtgcagtcaggcggcggtgctgctccatccctgcgggttccggcggggcgcgggggccttgctgacatcagacgggatatccgaatatctgatagcaattaaaaggcagccttgtttcgtactttctgttttgttcgaggggaaggcatggctgtgaatggacagcgtgggggctttggtttggcctgggggtcagagcctgccccgcccccatctgtgtgcccgcacacgtcccccgaggaaagactcagagacactgcctccccctacgctctgtcatggggtcttgagactgaggcttgggcaggaagatccaggtagggtcggggctgccctggccaaccggccgctcccagggagacaggactcagccaccagggctcagcaggcattttcggaaagcagggtgaaattgtctcttcccaggaaaaagattaaactccttgcaggctcttggataagttacacaaa

SEQ ID NO: 7847 - DNA, 492 bp, Homo Sapiens
atgaatgaccaataaaaagcaagttattccagaggaagaagcagcccttgaaatgttaaggcttaggcttgaaaggtgaagagcaggaattctctctttcaaatcctagagcataaacccatgtgtggccaagtgagatcagccctcaagggcacatgccaagggcagagcagcccatgtagacagcttcggagggcatgggggtgtagggagttcggggtagctcctcattaactatttgttgggtgagtaaaggggtgaggctcagtggcaggtacctctgcaatgacaagctgcctcccctctatgtgtttagcatatgttataagaacatgtccgacacccctaccgctgccattggggccctttaataaagccaagtagagaaatctggcaataaaaggcaaatgtaagcatgctttctttaagacgcatcataaatggttttctttaagtgaatggaagagtttgacagagatacaccttggtaag

SEQ ID NO: 7848 - DNA, 555 bp, Homo Sapiens
tccggcctccatgctgtcgccgacatccactgcgagaactgcaagaccactttgggctggaaatatgaacaggcctttgagagcagccagaagtacaaagaggggaagtacatcattgaactcaaccacatgatcaaagacaacggctgggactgacccccgctcccccgacgcatgtggctccagcccggcctggccgccagggagcgccactggcttcccgccacccgaagggagctctggaccctcagagcccctgcagaggacggatctagctcctgtatatatattttattgcatgcactgtgaccttggggggagaacagaagggggacgacgcccccgcacctcctgcgatctggctggcttggatctcgtttttaacccgttcctgccccacctgccctatagttatggcctgtgttctgctctcctggtcccagtgcaccgtctgctctgtgaactcctcccaccaggcccttcttaccccacgcgtgtctgtccccctcgttctgtagcgtttgtacataataaaacaatggagtggagacaaaa

SEQ ID NO: 7849 - DNA, 437 bp, Homo Sapiens
tcttctcccatcaggcgtctataattatgtagaaaaaggtccggcataactgactattaggacattccttacgcctgactctcttcggcgtccaaacggtagaccaatctttaacctatcccaggctcacgaactctgatttgactctttacccacaaggaacttggtctggaggaaaagcccgggtggtataggtgacctcaaaagacatccaagtcaaatgaagcacagaaaggagatggaagaagactctgatgaggcgcagagaggatgccagatgcttgagctgtagaggggacaaagcacaggattagggagtccaggaccaagtcggaggagaaaagcagggaagagaatgggttctaaggcagtggatgaggctcataacaaacaagaagcgtcttttaaatgtggagaaccctgatgggagcaagatg

SEQ ID NO: 7850 - DNA, 623 bp, Homo Sapiens
ggtaccccgcatcttgctcccatcagaacacctctgacatttctcccatcccttttattagagaacccttaatcctaggggttacaaagaaataaagatccatcttctgtaactttttcagggtgaataggggcgatgatattcctgcctgactcttagggtctcttgtattcagggttcagagaggagctcagtcagaaagcatcagtatggtgagagctattcataactccaacaaaaggtgatatctggaagattaaaaggtgttcagtttaagaaaacattcagtaagcttatcctgcattcctacacaaagagtacaacagcaatatactcctcaacagtaaagcaaaataagcaaaactatccccagtaaattaaataagaaggttttccatgaactgggcaactgttggaaccaagctgatttggggttactagctgattccagtatgtgcccagaattagaatattgatccagatttttacattacccattccttttgtttcttgtgagcagcagccagagatcactggttggttcacaggaataagcagagttaatctaagttgcagaaaaaacttaaaaacaactgatgggagagactcggggatcctctgag

SEQ ID NO: 7851 - DNA, 1080 bp, Homo Sapiens
  misc_feature (472)..(550): n is a, c, g, or t
acaatgagggagcgggcctccccattgccacccacagtgcccggaatggccctaggaggccctctgaggagagctagagtcccagcaaagggtgcagctgaccctagcactggctgtgacatgctgcttggtgctgcctctggtcctgaggggttagggacatccccaaagggtatacccctggctctgccacccatgaaccagcccagcatccagccagtgagtgggcacccaatgcctctcaggatgagaccagtaaatgccggaggtggagctgggcagctgtggagccccaggcacaggccagtctcgcttggctctcatgactgtggtggtggagatagtgtggggagcctcgcccatggtctcacgtggcaagaagtgcctttagctctggatcccaaccgtttggcacagctttgccacagccaggcccctctggaattgtccttattaaaccagtttcccgagnnnnnnnnnnnnnnnnnnnnnnnnnnnnnnnnnnnnnnnnnnnnnnnnnnnnnnnnnnnnnnnnnnnnnnnnnnnnnnncggggggcgcgcgcgccagcataaacatacctcccgaggggagcaccacatgcacatcagccacagtctttagtaaaaggaggggcacccaatagggaggcagaattataacaaaccgagagcaccgacgcgcacgccatcacaaacacaaagtcgcagcggagagagacaaacactcacaggtcggtcttgtaggggacgcaccccacaaccagtggcggcggagggacacacaacaactgggaggcgagcccacacccgccccacgcgaagaagatatgaagacacccgccagccaggacataacaaaatacacaaccagagcgcagacggatatctacagaggggggcaacaccaaccagcccgaacgcacatatcataaatccgacccgcgcgacgcgaacgacaagaacatagactcttcgagctggcccacgacagcgatgattacagattgaatcgtaagcaaaagcaaacaatctcattaacctaaacaccgacgcggggcgagcagaactgactcgaattg

SEQ ID NO: 7852 - DNA, 421 bp, Homo Sapiens
ggaccgaagtcttcgtccatcagtggtcctgagcagcaatcatcacttcaggtttccagtagctcattataaaagatgcattgatgtatttgcttggttcctctgaatcactgtcatcatcagaggattcatctgaatcatgctcactctctttactcatttccagctcatgtttaagtggcactctgttatagtcatatgggatgacattagaattcctgtttttacttttattttcttcttgatttccaatgtgctgtgtcctccagctcctatatgaaggaagtctctggaattcagcctctagtggagacggctcactgggtggatcccttttcttcatgttatgtagatatggatgtaattcagacaaattcacttctgtttctccaaactgattgtattccaccaaagcctgagt

SEQ ID NO: 7853 - DNA, 1032 bp, Homo Sapiens
  misc_feature (573)..(618): n is a, c, g, or t
  misc_feature (822)..(822): n is a, c, g, or t
gggtccggaattcccgggatttcgggagccacggctccgggcgctttgctgggggctaaaggggtttatccctttccttgaatcccagcaggctagaactaccccctcccagtcttcaggcttgccacgctctccacccgatccttccattgaaaggcagagaaggaaggatgtgcttgggaactttaagacccacgaacgacagcgcactgatggagcagcccagtgtctggggcaaagtcctcgaggttcattcattcaggaagcctctgaccagcctttaccatgcgctgagtgagaagctgaggataaggaaagagcaagacccccaagaaaccctgatgtctggctgaaagccgaagcatgacgcaactttgctatatttctctccaacaaggatttgtatattttcgctttctcctcaagtaacacctggacctgctcctttcccttcaaacgctgagggctcagtctccaagttcctttatgaaacagggtgtaccatcagagacgcaggtatttattgaaacctgctttgtgctgggcaatgtgccagatgttggggataaaatnnnnnnnnnnnnnnnnnnnnnnnnnnnnnnnnnnnnnnnnnnnnnnatgtttatggacagtcatgccaaagtatgattggaagacaaaaagatttttggccaattcactgctcactaacatctccatcaaaggaaaaaacacacattgtaaaataagaattcttcaaagacaacttgaagacatctgggaattctgaagcctgaaaattccatgagttcatagcagtgttcactaattccactgatctanagacaaaaaggagagtcaactgcgtgcccaaactcatttctgatgattttcttcatcctaacttttctgcctctctgggggtggttatgcctgtgaaaaacattgaagctgtcaggaacagactcggcttttcagaatggaaaggtcaaagtagagtcttctttttccttcaaacaaaaagggcttgggtttgggaaagagtttccagaa

SEQ ID NO: 7854 - DNA, 611 bp, Homo Sapiens
tgtacttatgtgaggcatgatttctctgtacaccctctatcctgagagacatcccatgtgactgagaagatgcctacttagtggttggctgtgtctctctgggcctcatgaagcactaatgtcaccttgccttgctttcctgccttccctgcctttttccccctatttcatcatctccatgtctcccaaataaagcattagcacaaatccttgcctcagattttgttttctaggaaacttggcctaagaccattatttatgaattccaccttgtgacggcaaaggagacattaaaagtactgcttatagaaggggtgtttgggcctgataagttgagaaacaatggacacatataatatgcttgtacatgtattaaaatgtctggaaggatacatttaaaaaatgtaaaaaggcttcttactatcagttactgctgagaaatgggactagggatgatgggtatgaccttaatacccttctagattacatgaacttcttaaatgtgcatttcaaaattcccttttaaaaaaggttctttttttatggctaatgttctgatatggtgaataatatatttagcctgtctataaaatcctgaataatagaactat

SEQ ID NO: 7855 - DNA, 435 bp, Homo Sapiens
gaccgatctgagtccatcagctcggcatggtggtgatgtcaggctgcttgctgctgagcaattcctttttctagccaagaagcccagttgccatgacaactatgtacagcttccccaccgctaaaagagccttccatctggttgctagggtgatgcttacaacagcctgttgctaagaagcacttcctctgtgcctctctctctagctcttcttgggtttctatggaaactgcctcagcttcctgttgtaccctcctggttcaccacggcaatccttatagtttcctgtcgcttcttccctggttgctctaatgatgctgctgacaatttcctgcctcttggtagggggttcccttgcaactggatcgctatggtgactcacagcttcctgttgctatggagctttttcttccctgatgggagaagactggcgca

SEQ ID NO: 7856 - DNA, 184 bp, Homo Sapiens
ctcccatacggtatgactttcctagttctttagtcttataagtgattttattgtgtcctgaattttataattatattatgagaatttttctctcttattatttcgtagatggttccctattgatgtgtaacctgagagctgggtgggtgtgcgtgtttatcttcccgatgggacgaaagactga

SEQ ID NO: 7857 - DNA, 765 bp, Homo Sapiens
agcacgacgtgactgtcaggaacaagctataatagctgtggaagctcagaataagtatgagagagaattgatgctgcatgctgctgatgttgaagctctacaagctgcgaaggagcaggtttcaaaaatggcatcagtccgtcagcatttggaagaaacaacacagaaagcagaatcacagttgttggagtgtaaagcatcttgggaggaaagagagagaatgttaaaggatgaagtttccaaatgtgtatgtcgctgtgaagatctggagaaacaaaacagattacttcatgatcagatcgaaaaattaagtgacaaggtcgttgcctctgtgaaggaaggtgtacaaggtccactgaatgtatctctcagtgaagaaggaaaatctcaagaacaaattttggaaattctcagatttatacgacgagaaaaagaaattgctgaaactaggtttgaggtggctcaggttgagcagtctagcagttaatacgacaaacgggtagaacttttagcaaagagagctgcaggaactgcaagatagtctaaatgctgaaagggagaaagtccaggtaactgccaaaacaatggctcagcatgaagaactgatgaagaaaactgaaacaatgaatgtagttatggagaccaataaaatgctaagagaagagaaggagagactagaacggatctacagcaatgcagcaaggtgaggaaactggagttagatattttacccttacaagacaatgctgagctgaggaccatctt

SEQ ID NO: 7858 - DNA, 834 bp, Homo Sapiens
ctcccctaggtaggtcctcccttagaagtatgtactttccttagctgcctgtagttcgggtactgccccaaaggaggacgggtggagatttcaggaaaagaaataccctgaaaaaatcccaccaccagagggagtagttcccaagttcagaaaaaggaacaatatccctagtggacttcactttcttgtgttctttcttctttccttcttcattgtcactgtatctgtcagaatcattacttccattctgccttgtattttctgctgaagaagaaattgttggcagaggagtagaagatcttgattctgttccttgttccctcagtttcaaaagctttttctcatatagcttcctggttgttcccacaataggaccaggattcactccgtatttcacaagctgatccaaaagatcttcattagtgagctctgttacaatctagatcatctttatcttcttgtctgggtttatcagttttttttgtggctttctgtaaacaaagtccagtaatcatttccatataaattaaagtgttcacttactagataataacctgtataacataaacatgcaaactcactaccaaattggcttatagtaatattaggccttagcaattccattaaattaagagcaactcattattggagaacactttctaagttgaactgtaatcatacaaaccgcacagccaagcaagtaacttaaagacattgttgttaaaatagtccattttggattacctatctaaaagagatagtaatggcatcaaaaatgcaaaagcgcaactaaaagtaaaactgactttgggtaacattttcttttaaataacc

SEQ ID NO: 7859 - DNA, 224 bp, Homo Sapiens
tctgaggatacccgagtcttgctcccatcaggcatacaggacaacagtgaagctgttggttgaaatcataattaatgcgttactgtatgaaccacaaaacagcactatttatttagccttacttctacttccagatgcagtgcctcttttggagaagacatgtttatttttcatgttctttctgacattactttagcaattcaacctgatgggacgaagatgcg

SEQ ID NO: 7860 - DNA, 494 bp, Homo Sapiens
caaatagaatcactttggtttgggtctcattttcatattataacacaaatttgtgtatgtgggttaagattcatatttgataggaactgctgggaattcttgcagttatatcctcaaaagacaaaataagcataaccaacagaattgtgaagcaataaagttgattatggatgaaaactgggctgaacagtcataggacatgacttgttcctttgacctaaaatgtgcttttctttccttatctacccagtgtaatggtactactctttcaaccatcttgaattcactcacacttattcgtcaaatcctgctcagctattcccactacccacaaagtgtacctttttcgtattccttactttttatacattagctcattttcccccaaacaatgcaataaagtaaaaaatattactctattttatagaaacttgcagctcagaaaggataagaaacttgcaagttgatccaaaataaatttctaaaaagcaaaa

SEQ ID NO: 7861 - DNA, 726 bp, Homo Sapiens
  misc_feature (42)..(42): n is a, c, g, or t
ccgaagcttcgaatggggacattgggtaggctgtcatcctanatggccagaagctcttcgtgttatgaacccgaacaatcctccctcgtcagaggttctccgcatccagaacattctatgtgagaagcctacagtgactacagtttatgccaacaatgggtctgttctccaaggaagttctgtagcctcagtgtatgatgggaagctgctcataggcactttataccacagagccttgtattgtgaactctaaattgtacttttggcatgaaagtgcgataacttaacaattaattttctatgaattgctaattctgagggaatttaaccagcaacattgacccagaaatgtatggcatgtgtagttaattttattccagtaaggaacggcccttttagttcttagagcacttttaacaaaaaaggaaaatgaacaggttctttaaaatgccaagcaagggacagaaaagaaagctgctttcgaataaagtgaatacattttgcacaaagtaagcctcacctttgccttccaactgccagaacatggattccactgaaatagagtgaattatatttccttaaaatgtgagtgacctcacttctggcactgtgactactatggctgtttagaactactgataataacgtattttgatgttttgtacttacatctttgtttaccattaaaaagttggagttatattaaagactaactaaaatcccaaa

SEQ ID NO: 7862 - DNA, 587 bp, Homo Sapiens
  misc_feature (89)..(111): n is a, c, g, or t
  misc_feature (158)..(168): n is a, c, g, or t
ggtgtccgtttgtattgaataatttgctacatttgtaaaatgtaagaggtatataatatatgtatatttctaacgtaaaaaaacataannnnnnnnnnnnnnnnnnnnnnncttaaaaagatgagagaaacatattttttcaggaaaaacaaactttnnnnnnnnnnngaggagaaataaaaccttttctcccctttccccatcctctatctatccctctttcccaggaacaaatcaaaaggtggattatcttctgaagaatggaaactgttagtccagaatgatgtctttttctcaatgcagtgagttatagattctctagttttctccctagggatgggaagggggcattgaggcaagcctggagaggagcccggggagcagggtcatgaacttttttctttagtgaaggaggaatacaatcaagggttttgtattcagaatgttgtgcaatattttggaatgggacattggtgtgtttagagattttagtttaaaaacaaaacaaaaagattgatcaaatctgtacagtttctattgttccagatttttttaagtttgtattaaaagcatgatacataatagca

SEQ ID NO: 7863 - DNA, 477 bp, Homo Sapiens
tgagattttgaggctcatgaccctgtttatgcggtaccggagtagcagtgtcctctctcatgaagaggtgggtgatgttctgcaaggtgtggctttggctgacctgtctaccctctcgaacaccacactccaggccctgcatggcttcttccagcagctccagagcatgggacacctggctgaccacagcatggcccagaccctgcaggcctccttggagggccttccccctagcacctcctcaggccagccacccctgcaggacatgctctgcctgggaggggtggctgtatccctgtcccacatcagaaactgatcctcaggacttgaaggcccagaagtggagagagaatgagacctggagacaaagggcataattgttggggaaatggatgacagctgaagctattcatatggagccatatactctattgttgaaatagaataaggaaataaaatgatacactcacaaaaaaa

SEQ ID NO: 7864 - DNA, 614 bp, Homo Sapiens
gctcgtaaattatatgtactaattcctgaaaaagacttgagacagtactatgtcagttcagccacctattcttgcattgttttctataaggaggcaaagcatatgtgtcttcctgttatgcaccttttatagcctttaccactgtgtaatgttcacaaacaccaaagtaaaggaaaaatgcaggatgttaccgtaaaatccagctgctattcatggagctgaaaaacaaagcacaaattatagatagctaagttaagaactactaagtagtttatagaagtagggaaaaacgtaatactgctttagattcatgtcttaaaagcctttttcagaataagtgccaatcactgatgttgtaaataatggtgccttaactttatatgcttccctggcacttcgtttctgattttttttcctgatttgataaataattagtacatagttttcactcacttgcagcttactaaagacaagaaattatgtacatgtactaatgtttttcccacaaaaaaatcctttacttctgatgtatgaattagttatctaaatagttaagcctaatacctgaataagactcaccaatgtgattgtacaataaattctatcattccatt

SEQ ID NO: 7865 - DNA, 261 bp, Homo Sapiens
ggaaattcatagcaaccaatcaaaacgggcctggtttacttgatttgccatgctaaagaagttccctctattttaaccctataagaaaagtaactttgaaacaaccaatctgctttttgttctctgtttctgctttcttcagcctgtttctgtctataaagccaattcctctgctcagctcatcggaacactcattcttgttttatagaatgcagtgttgctcaattataaaattgcaaataaaaggcaattaaagtattt

SEQ ID NO: 7866 - DNA, 482 bp, Homo Sapiens
cctgcaatagagccctgaaatcaagagcatggcttgagtgtgtgaatatgatgtgtgcacatgcctaatgagcgtgcaagtgtgcacacgtttgtggagaggagggtgttctggcctgagaaggtaaagaagaggcatgtccagtatgctttgcagggtgtgtttgctcttttccatgcccatgcaacccagattggggtggagcaggaaggagctcttttctgttcccaagcctcagaactcttgagctgtggcttacttgctgtcttcaccaggttcaagctccgtgggccacactgctgctgtgccaagaaggtgtacagcctccccaggatggggcctcatacaacccttcatctgcactcaacatttaatcgtgtccttgctgtctttttattttcctttttgtttgttagcaaaaacctctatttagatttcaataatcagagaagtgtaaaataaaacagattatattgtacttg

SEQ ID NO: 7867 - DNA, 492 bp, Homo Sapiens
ccgctagcccccggagccctgtcataggaagtgaggtctcttgccccaacagcaaccacgtggcaagtggccccgggaaggcagagaaacgcgttgtggtgatcagcagctcggaagactcagatgccgaaaactcgtcctcccgagagctggatgacagcagcagtgagtccagtgacctccagctggaaggccccagcaccctcagggtcctggacgagaaccttgctgacccccaagcagaagacagacctctggttttctttgacctcaagattgacaatgaaagtgggttctcctggggctacccccacccctttctaatttagtctctgagtcccaaaaagaagtgcagcagagccatctgccaggcccaggagagctctgagctctggccaacaactgcagccaggctgggcagagcactccggctcacctgggctcctggcgtgtcatttgctggcttgaataaagatgtccgccttaaaaaaa

SEQ ID NO: 7868 - DNA, 520 bp, Homo Sapiens
agaagatgaagattctgtctccctgttccccctccccagttttccaaagtgtctgagcatatgcctggctgtcctcagatcatcaccatgccacatccctgctccctacttcctggcagccaagaaaagccctttctacatgctagaaggaaatacatccaaaaagttagcattggagtgttagaaactagaatagacctctccgccaccgagctgctgtgtcacgccctcagcctgctagggagtgacaagcccaagtcattcttgatccaccccttctcccaccccagatcccagggactcatcctgtgactttgtaaccacactcattcctttcaaacacagaggaggaattattgcttcatctgactttattcaaatctagttatgtattggcctaaattatttgtgcaaaatttgaaatgttttttatttaaatattagaaatagcacaaagtcatggagtttttaaaaattgttataattaagtaaaaataaagctgaattgtgtcatttgtgt

SEQ ID NO: 7869 - DNA, 526 bp, Homo Sapiens
ttttaacatttgactataatggcaaaaatgacataggtcatataacatctgttttcctggcacaaccagacagaaggttgaattggaataaggaaaaattcattccgtgggcatcctaaacataccacattctattttcaaggtatgtggcaatacagattacttactttttctctataaataaacttgagagacaggcttagaattaatacttccaataaggttatatataaaggacaaaaaaaccaaagtgattcctcaaaaaaactccaaaccagcatttggccaacaaattgtcatgtggtgttacatgctggattataaaagtatactgtgcaaccatctttaatttttcaaattttcttaccatgtatagaggctatatcatagtttatggactgaacaagtaaatttaagtactctgttaatgtgcaaatgactttggaatccaaaagtcagttataaaggaaaaattcaaggttttccctggaaggcatatcatcattcagtttaaaatactgtattt

SEQ ID NO: 7870 - DNA, 673 bp, Homo Sapiens
agataccaaccaactaaccaatcttgataggttaccatgcgtatctcaagatctccattaatctccacgatatctctccggaatactcacaggagtggattctctcccatcagctgtacatgtcgcagattcatgcagcccaagtggagtacagagatggttgacagcagcaaaactgcctatgattataaccacaacttcaagttcttacctcatgtgaatattcaccctttctttagtcttccaagccaaacagccccgtctcatcaccagatgagcaaggtcttgatatggcatagcagatctccctagacacagatcatgagaaaagatggaagagacttagggattcaggcatcagatgaagttggcttttcccttttatgccttgtttgtatttaccctgtctaatacactaaggatacttactcattgtacttgcagctcaatatgtctttgctgttcagatactaaaatgtacctctgagtcattgtgagctgtgtggtaggttggacattggcatagttggtgatgggactcaaaatgaaaaggtggtctctttaccaggtcacagactgtagcagattgtgcttgttatctgacaatgactgtcactttgagggtcgttgatttgcatgcactactctggggccttgtattggagcctttttt

SEQ ID NO: 7871 - DNA, 785 bp, Homo Sapiens
  misc_feature (304)..(304): n is a, c, g, or t
  misc_feature (320)..(320): n is a, c, g, or t
  misc_feature (341)..(341): n is a, c, g, or t
  misc_feature (366)..(366): n is a, c, g, or t
ttcagaggatccccagtcttctcccatcaggtgcaagataggtcaccacgttgtccttcctcttccaatggtacttgaaataactgaataattgttgccaatatattaacataattactttcagtttgataaagctcttttgcaacttgccaccttgctgactgctttgaaggaactggagtggagcttttagaagacttagtacaagactttggggtgtctccatagttaatgctagactctggtgtgttggagatatctaggagtgaccctatggaaagggaatgctcagctgatgggcgcnttacggggtggaaatnggtgacacgtctgtctctctntgaaaggctgagcaagtgtttcttnttaaacgacgtcgtttgcgattgctgttaggggtatttagagaaagcattgacactgatttcttgagctcaggagtatttgccttttcatataaatacatagtttctccagctcgggcatccatttgaatgcttccccagaaccactcttgcttgacaacataaagtttctttgaaggttcaaagggaagatcttttactatattctcttcaactacaaggtgagtgcatctttcatctccaagcggtaaatatttacctccttgcatttcagtcatttcttccatattggttttctcttcatctgaaaatcccaggaaacttaaaatacaatcttgaaatggaggaactttaaattcatttctaaagtcatcaactgctgcatagaaatcctgttcattccgccgtcccaaagcacag

SEQ ID NO: 7872 - DNA, 591 bp, Homo Sapiens
gattttgtttgtaatgctcgtctcccttctcgctcccccagttagcactccccttttctgctcctaaagatctttttccatcttgatgaaaaaagctaatcttagaattaagtccatcaggtaatcttctcatacgcaagtcttcttggacttgacagggaagttaatcccttaaaacaaaagcagaagccagagtcagattcccccagctgtctccctagagagtgatcgtgttttgctgatgggtgctttcctgttcacattcagagactgtctccaaacaccacaccactagtccaacaaaaagaaagctttgcttggattttccttgatatttatttaatgattatgggtttcaattgctattttacaatattatcctatagatgcaggaaaaaaaggggggaataataaattaaaatttctcaaatacagttaattaagataggcaaaggaatcagttcattattcaaacttgtcccatcatacttgaacttgctttcctctagccataaccacagtaggagttacttttcagtctagaatttaatccatccaaatcacaaacccctgaaaataaagtgcaaaaca

SEQ ID NO: 7873 - DNA, 416 bp, Homo Sapiens
tagcccagtcgcatctgtagcctcttccagttttccaggaacatggtagcccacagagccatgaagatagagaagaagacggtggcagggttgtcaaacaggtggctggcctgcgcggtcccacaggctgagctgaggttccagtaatcacaggacttgtcacacaggggacacatggtgaaggcattctgctggtcacacatctctctgctgggaatatcttcttcaattgttgcacatccataaagaaacacaatcactccaattacagaagatgggatgaggaatgatgtatataatcccagccaggcaaaatacagtccaattttttctccaaaatactatcaagtgtaatctacacagaagtcctgccgtagtcgcctaaatcttctctttcagctgatctgatgggcgaa

SEQ ID NO: 7874 - DNA, 569 bp, Homo Sapiens
  misc_feature (248)..(513): n is a, c, g, or t
ctgtccggaggattcctggctgtcatgagtattgatagtacattgccatctccaggaagacttgacggctttgggattttgtttaaacttttataataaggatcctaagactgttgcctttaaatagcaaagcagcctacctggaggctaagtctgggcagtgggctggcccctggtgtgagcattagaccagccacagtgcctgattggtatagccttatgtgctttcctacaaaatggaattggannnnnnnnnnnnnnnnnnnnnnnnnnnnnnnnnnnnnnnnnnnnnnnnnnnnnnnnnnnnnnnnnnnnnnnnnnnnnnnnnnnnnnnnnnnnnnnnnnnnnnnnnnnnnnnnnnnnnnnnnnnnnnnnnnnnnnnnnnnnnnnnnnnnnnnnnnnnnnnnnnnnnnnnnnnnnnnnnnnnnnnnnnnnnnnnnnnnnnnnnnnnnnnnnnnnnnnnnnnnnnnnnnnnnnnnnnnnnnnnnnnnnnnnnnnnnnnnnnnnnnnnnntatcgagacttatctcataaataagtagatagatactccagcctgggtgaacaaat

SEQ ID NO: 7875 - DNA, 292 bp, Homo Sapiens
  misc_feature (55)..(113): n is a, c, g, or t
ttatctcataaataaatagatagatactccagcctgggtgacagagcgagacttnnnnnnnnnnnnnnnnnnnnnnnnnnnnnnnnnnnnnnnnnnnnnnnnnnnnnnnnnnnaacggaattggagccattttgctttaagtgaatggcagtcccttgtcttattcagaatataaaattcagtctgaatggcatcttacagattttacttcaatttttgtgtacggtattttttatttgactaaatcaatatattgtacagcctaagttaataaatgttatttatatatgca

SEQ ID NO: 7876 - DNA, 564 bp, Homo Sapiens
  misc_feature (377)..(415): n is a, c, g, or t
  misc_feature (449)..(517): n is a, c, g, or t
ctgtacatgagtattgatgaaagatatgagcccacagataaagaaggcacattatatattaaacaggataaacagctctacacaagattacaaaagcctactcaaatacatcaaaaatcacactaaacagaaacagaacaaactttacagctgaaagattgaggttgtcaaaaaggatgaagaaataaacctcctagtgatttgctatttaatagaggcatgcctatgataaataatagaaaagggttagaagtaaaaggatagaaaaaataccaacactacctaaaagagacttgaactataaaaatgccacttcaaaatattagcaacttgttacggttatataaatgtactgaatagcaacataattgaataannnnnnnnnnnnnnnnnnnnnnnnnnnnnnnnnnnnnnngacatcaaattaggaagttgaatcaatcacttannnnnnnnnnnnnnnnnnnnnnnnnnnnnnnnnnnnnnnnnnnnnnnnnnnnnnnnnnnnnnnnnnnnncaagcatgatcatagctatgtacagccaggtgataatctaggcagca

SEQ ID NO: 7877 - DNA, 528 bp, Homo Sapiens
cgagctcggtacccctggctgtacatgagtattgatcaatcagggtatagtggtctttatccaggtactggtcaagttctattaacctttcctcagagcactgcgtcattccatgatcacttgtgatgattaggttcagagtgttccacaactttgcctttttcagcatttgtatgagatatcctaacttcttgtcaatatctgaaatgacaggccccatgagcggactgtcaggtcccaaatggtggcccatgtcatcagggtcttcccaatagagaagaccaagatttatgggctcttttgacgtaaaccattcaacaattttggcaactctatcttcaaatgaaactgactcattgtaaggcatgtaatgagtaggaaagcgcttatgtatttttacatctgttccgggccacatggctgcaccactagtatgtcctgccctctggtttgtgatccatattggtgtcgcttcttcccaaaacttggaatcatcaatactcatgtacagcaggggatcctcgagaa

SEQ ID NO: 7878 - DNA, 307 bp, Homo Sapiens
  misc_feature (55)..(113): n is a, c, g, or t
ggtacagctcatcactgggaaactggggttgcatcactccactgcacagggttannnnnnnnnnnnnnnnnnnnnnnnnnnnnnnnnnnnnnnnnnnnnnnnnnnnnnnnnnnctggaaccaaaatggagtcacttatgccaaactctaataaaatggagtcggggggccacatagaagccctcacacacacatgcccgcaacaggatttatcacaagacacgcctgcatgtagaccagacacagggcgtatggaaagcacgtcctcaagactgtagtattccagatgagctgcgtctgctgaggag

SEQ ID NO: 7879 - DNA, 598 bp, Homo Sapiens
ttcctcagcagacgcagctcggcactctgggtcaccacagccaggtccttctcttcccccttctcagccttgtcatctttaaaattcaatttcttcttaaattctttgtcaagctcctctcggttgaactgggcatttgcactctcgaaatcaaagtcaccctcaaatttgattgtgttttccttaacgttagtgggacggttttgccctctggagcgattccttgtccgcctgtttcctgatcgcctcctctgaggtcttctgttctcgtcattcacctgcccttgagcttgcacagctgccggctggactacatcgctggccgtcttgctgctcggctgggcctgacgaccgttgagctgcgtccctgtggtgcccttgccaggtaacagctttttagcattcaggtggtcagcagaaccagtctgcacagactgctccaccatggggctcttgccgacggggatggatggaaaaccagctcctagacccagggaggcggcatactgctggatgagcagggagctgagcgccagggggccgtagggcgcatccctcggaaagggctgtcgagtcgggggcaagaaagggtaccgag

SEQ ID NO: 7880 - DNA, 766 bp, Homo Sapiens
tacttcggtccaccagagtagagaatgagagcgacacagacgttaggcatttcctgctgaacgtttccccgaagagtcagccccgacttcctgactctcacctgtactattgcagacctgtcaccctgcaggacttgccacccccagttcctatgacacagttatcaaaaagtattatcattgctcccctgatagaagattgttggtgaattttcaaggccttcagtttatttccactattttcaaagaaaatagattaggtttgcgggggtctgagtctatgttcaaagactgtgaacagcttgctgtcacttcttcacctcttccactccttctctcactgtgttactgctttgcaaagacccgggagctggcggggaaccctgggagtagctagtttgctttttgcgtacacagagaaggctatgtaaacaaaccacagcaggatcgaagggtttttagagaatgtgtttcaaaaccatgcctggtattttcaaccataaaagaagtttcagttgtccttaaatttgtataacggtttaattctgtcttgttcattttgagtatttttaaaaaatatgtcgtagaattccttcgaaaggccttcagacacatgctatgttctgtcttcccaaacccagtctcctctccattttagcccagtgttttctttgaggaccccttaatcttgctttctttagaatttttacccaattggattggaatgcagaggtctccaaactgattaaatatttgaagagaaaaa

SEQ ID NO: 7881 - DNA, 869 bp, Homo Sapiens
agagatggaaatacaaacctgcttactggaaaggtgcaaatatatgggttgagctggaggtaggaatacaggtaattaaggtttctagtttaagggaaaacagatctattgccatttaaataaggtaactgggatttggttaagttcacaaagatagcagaagatttatttacaggcttcacctgtactgtcagggcaagagaaagcctggtaaaccagctacagcagtttaccagtgtgatggctgtgacacagctccactccacgggtggacacagcagagggcaactgggctggcctggttcagtgtgaatcaaaccgcttaacccacacatggtacatgtgattttcttttgtgagccttacaccaagccaaactattgtcaaagcatcatttctatagaaataaagccttatcttgacctgttctattaaaacctgccacatccgccctttcctacctagatttaatgagcccaagtttttttacatggaagaaatgactctggggcaaagacccctaatgaactagtggcagagccaggaataaaacttgagtaactaatgagtcacttatgggcagagtatgcaaaaaccttaagtggaaaccaaatagaccctggtatcaagaaagcacaaagtattaatagaagtttctggttggggtgatctaggttcaacagaaataagatgatttctaagtataaagccatttaagaattccagagtagggtgggaaagcaaaaagccagctctgaacaggtaacagctacatggtgactgagtctatgggcaaaagttcttgcatcacaggcttttgggaactagcctatcccagggccctgtacaaataaactaggaagcaatcc

SEQ ID NO: 7882 - DNA, 502 bp, Homo Sapiens
ggacaagattgcttcctacagcagcctgcgggaggccaggggcagccccaacactgcctccgcagaggccaccctgccgaggtggcgggcgggtgagcaggcccagcccccaggggaccaggagcctgaggctgtgctggccatgctcaggtccctagacctggagggcctgcggagcacgctggccgagagcagcgaccacgtggagaagagtccccagtccctcctgcaggacatgctggccacgggaggcttcctgcagggggacgaggccgactgctactgagcagaaccagagtctgccactggggctcaggaccaagggaggcagcaccatgtccttctgtgggacactgccagccccagggctccagcccagcccggtggatcctctggggaagccaggaccaggagagaagcaaggtcaagaaatcccacagtttgatgtattaaagaaatgacttatttctactcaaaataaatggcattgaagtctttcttt

SEQ ID NO: 7883 - DNA, 416 bp, Homo Sapiens
caagaaaacctaagacttgtgaggctgatgcaagataaagaggaaatgattggaaagctcaaagaagaaattgatttattaaatagagacctagatgacatagaagatgaaaatgaacagctaaagcaggaaaataaaactcttttgaaagttgtgggtcagctgaccaggtagaggattcaagactcaatgtggaaaaaatattttaaactactgattgaatgttaatggtcaatgctagcacaatattcctatgctgcaatacattaaaataactaagcaagtatatttatttctagcaaacagatgtttgttttcaaaatacttctttttcattattggttttaaaaaagcattatccttttatctcacaaataagtaatatctttcagttattaaatgatagataatgaaaa

SEQ ID NO: 7884 - DNA, 1515 bp, Homo Sapiens
tttaaagcaaatgacaaagacccagtttaccagctttacttttttaaacctaagcttaacattacatatttaaacaattgtcaaaacttactaagttgccagcattcatgcacaactagaaaacatccttaatttatattaaaccagaaatgtattaccattaatgtattaatatctttcactactaaatactgaaaaaaattgaaattatttctgtagaagaatcgtcctggcaatgttaacttcacagcaggccgacactacgtggctcacatttcagacacaatgaaaagcaggtccatgctggtgttagtgtacaatcttgtcctacactaaagagtcaagactcaccttggagtacgtttaataaaaaagcaaagtgcatacagagatttacaacaattttaaagacaaaaagaaaatggtcctattatgtggtcccaacaatcaactcaaaagtctatgacaaatagaggctccgatgagctgtttataaatactttaggtacaattatactgaaagtcgagttcgtttgaaatcttcaaaaaaatgttcctgttaatcctcaaatggtgcttgttatagtttaacatttctgttaagtgcgtgcgttgaattacttgttatccaagcgcagcagctgctccttaccatttattgttaaggactttaactggccatcttcttcaacttctactctttcttgaccgtttctcgacaattctctttggtagtgaagttgttctgccattaaccattttagttgaagttgatatcgatttgaagttgcccatgccactaccaccaaatgacgtggaagagaatgaagtgaggcccccgtgacctagtgacccaaatgaagtaaatcctgtatcaaaagaagaaaatccacttccaaaagacggaaatccactgaacgcagagaaaaacgaccccgtccctcggcttctgcttcctcggggaccccttcgattcccaaagaagtcctcaaaagggtcttcaaagaagtcaaatgaaaatgggtcccttccaccaaaaaattccctgaagacatcatctgggttacggaatgtgaagccaaattcaaatggactgtcaaaatgacttccacctcctcctccaccatttaatccttctttgccatatttgtcatagatgtcccgtttcttagcatccgacagcacttcatatgcctccgctacttgcttgaattttctctctgcttcttctttattctcaggatttttatctggatgccacttcagtgccagtttccgatatgcctttttaatatcctcgggtgaggcatgtctctgcacgcctagaacttcatagtaatccaccatgttttacgagattgttggaatgggtccgaggacagaagcggccggtggcgggacgcaggggaggcagggtgacggcccgaatctcctcacagctccaggactgctgcgctggtggtggcggcggctcctcgcgctttcctttctctcctttctccaacaacaaacccc

SEQ ID NO: 7885 - DNA, 845 bp, Homo Sapiens
ctgcgggtgactcagaggatccccgagggtgaccttcgggcgaggatggacagattccgggtgaaaggggctcaagggggcctttagaggaacgcaggaggagcaagagccaactggagaagagccagcggtgttgggaggagacaaagaaagcacaaggaagaggcccaggagagaggccccagggaatggaggccactcagcaggccctagctggcggcacattcgggctgaggacctggactgcagttacacagtcctgtttggcaaagctgaggcagatcagattttccaagagttggagaaagaagtagaatattttacaggagcactggccagagtccaggtattcgggaagtggcacagtgtgcccaggaagcaggcaacgtatggcgacgctgggctgacctacacattttcaggcctcacgctgtctccaaagccctggatcccagttctagagcgcatccgggatcacgtctctggggtgactggacagaccttcaactttgtgctcatcaacaggtataaagatggctgtgaccacatcggggagcaccgagatgatgaaagagaactggcccctgggagccccattgcctctgtctccttcggtgcctgcagagactttgtcttccggcataaggattcccgtgggaaaagcccctccaggagggtggcggtggtcaggctgccgctggcccacgggagcttactaatgatgaaccacccgaccaacacgcactggtaccacagtcttcccgtgagaaagaaggttctggctccacgggtgaatctgacttttcgtaaaattttgcttactaaaaaataaaaacatttttaac

SEQ ID NO: 7886 - DNA, 1351 bp, Homo Sapiens
  misc_feature (201)..(201): n is a, c, g, or t
  misc_feature (886)..(897): n is a, c, g, or t
  misc_feature (939)..(959): n is a, c, g, or t
  misc_feature (1012)..(1029): n is a, c, g, or t
  misc_feature (1061)..(1076): n is a, c, g, or t
  misc_feature (1190)..(1221): n is a, c, g, or t
agcaaaggcctggtcgggccccccggctggggcatcccttggtggccttctcatggggggcctgctcactctgcactttggacatctactggcacacgggttcccccagcaagcggaagcccgtggtggcggtggctgccccggcctcttcggagagcagcagcaccaaccacagcatcggggagcaccaagagcaccccntgctccacagcaggcatggcatagcccgggccccccgcgctcgcccagcaggagagactgagcagccgccagctgggagcactggtgtgaactcaccctgggagccagtcctccactcgacccagaatggagcctgctctccgcgcctacccttcccgcctccctctcagaggcctgctgccagtgcagccactggcttggaacaccttggggtccctccaccccacagaaccttcaacccagtgggtctgggatatggctgcccaggagacagaccacttgccacgctgttgtaaaaacccaagtccctgtcatttgaacctggatccagcactggtgaactgagctgggcaggaagggagaacttgaaacagattcaggccagcccagccaggccaacagcacctccccgctgggaagagaagagggcccagcccagagccacctggatctatccctgcggcctccacacctgaacttgcctaactaactggcaggggagacaggagcctagcggagcccagcctgggagcccagagggtggcaagaacagtgggcgttgggagcctagctcctgccacatggagccccctctgccggtcgggcagccagcagagggggagtagccaagctgcttgtcctgggcctgcccctgtgtattcaccaccaataaatcagaccatgnnnnnnnnnnnncacaccccaaaaaccccaccgccgggggcggcaccgaagggnnnnnnnnnnnnnnnnnnnnncgaggcgcccgggaacaaaaactgcataagaaagaagggtgctcgggggcggnnnnnnnnnnnnnnnnnngaaaaaacttttctcaaaaccaatttccgttnnnnnnnnnnnnnnnncccccctgggaggtgaaagggggaaaccggggggccctaagaggcgggttctccacagaggagaaaaaccccgggggcagaagggacacaaaagggggctttggggggcctctnnnnnnnnnnnnnnnnnnnnnnnnnnnnnnnngggcgggggaaacacccgagaggcttttgtggaacaaacaaccccccagaaggggaggttctcgtggggggcccattttgcgggggacccaacacccacgggggagggcccaagaggggggcctccaaat

SEQ ID NO: 7887 - DNA, 460 bp, Homo Sapiens
gcggccgcgttgatccacagggcgctggtcagaaagcccaggaaagcaaagagccagtgaagcctggggggctggctgtcagatgtggcaaaaaaggtcactgaagccaaggctgtgcctgcgatcaccaccacgacccagacgggaacgaggccgcctatctcatagacaccataggtccccgactgcagggtcaggaccacaaccagggggctgataaccagatgcagacagttgaggggccgtttccagttctggtcatccttgtccgggtccacgacggggactgtgaggagcagcaggaactccacaggcagcttgaacaccttgagggctttccagtatgctgatttccttctccacttcatgtaatccaggggattgagggcccggaccaggatctgagccgtggtctcctggtagaagaacagcggccggtactcatcaccgtagtcatagc

SEQ ID NO: 7888 - DNA, 634 bp, Homo Sapiens
atgagttaattggaagtatgaataacagggctccgctatctcacacggcgacagagggccagaggtgaggtcggacgggcccagctcaccactctcgcacaagtgtcctaagctttctggcctcagcagtgcgtctgtgtacaggatcgctgcaggacgaactgagatgatgcacctcagacactccgcactctgtgggacacacatgctcaacagagcagctgtatcatgggacaaagtggggaaccctgacccatcttcccaggtcccccaaacactggggctgagatactactaaggggtcctggaatctccctgtggaaatgcccttaagaagtgcagggcagggttctcctgccaagtgccaggacagtggagagcctgggtttcctctcatcggacacctggtggggatggaggcttgtgggctggctaagggctcaacctcagaggaaggccaaccttcccggcgatgcgtgggaacctgggaatcgggccgcctggctgaatgagctggctgggctatcactcacatcacgatcctgctgctggcaagctgaattacgatgtgtgactgctaagagaggcttcatccttggaaagaagaacaagctttatcgaacaagaaaggcag

SEQ ID NO: 7889 - DNA, 658 bp, Homo Sapiens
  misc_feature (62)..(487): n is a, c, g, or t
gtcggtccgcaggatgttggctatgaaactagtaactactctcttttaggtagcacagccannnnnnnnnnnnnnnnnnnnnnnnnnnnnnnnnnnnnnnnnnnnnnnnnnnnnnnnnnnnnnnnnnnnnnnnnnnnnnnnnnnnnnnnnnnnnnnnnnnnnnnnnnnnnnnnnnnnnnnnnnnnnnnnnnnnnnnnnnnnnnnnnnnnnnnnnnnnnnnnnnnnnnnnnnnnnnnnnnnnnnnnnnnnnnnnnnnnnnnnnnnnnnnnnnnnnnnnnnnnnnnnnnnnnnnnnnnnnnnnnnnnnnnnnnnnnnnnnnnnnnnnnnnnnnnnnnnnnnnnnnnnnnnnnnnnnnnnnnnnnnnnnnnnnnnnnnnnnnnnnnnnnnnnnnnnnnnnnnnnnnnnnnnnnnnnnnnnnnnnnnnnnnnnnnnnnnnnnnnnnnnnnnnnnnnnnnnnnnnnnnnnnnnnnnnnnnnnnnnnnnnnnntaaacaaattttcaattatcaattaaacagtaaccaaagaataaaagtaactattggtttctggatttataaataagatgggtacttgaaggtttaagaaaaatgactacttgcaattctaataaaccaaattctgattcagtataaatacttttagtctgtcctcaccag

SEQ ID NO: 7890 - DNA, 355 bp, Homo Sapiens
ttcggcactcatatgatctgccacctcatcctcccaaagtgcgggattacaggcatgagccaccagtgcccagcctagacccttaagaatgtttgtggaatgggtgggtgaatgtgctgaggcatggagtccagtccagagtcattccttccttatgaagcttacatacaaattagagagagagagacaaaaagtaaaaactacaggtgataaatgccagatagtgataaatgctattcagaaaaataaagcaaagtaacaggatagtttatggaggatgttactttatatggatggtcagggaggacactgtgaggtactccctgtgcctactctagggcgccctgggagctga

SEQ ID NO: 7891 - DNA, 778 bp, Homo Sapiens
  misc_feature (521)..(531): n is a, c, g, or t
  misc_feature (556)..(608): n is a, c, g, or t
gacacgttgcagaatctatatagagagagctatatatgcatggtcccgtttatgtaaatagtgcctaattttaagtattcaataaatgtaagccattattattacaatgaacatgtactactttataatcagaaaaatcaacaaatttattaaattaagtgtttatgtacttccttatttaataactaaaaagtatattacttcaagaaaagtaaataacatgtgcttgcctctctggcaaacttaatttacaaaacacttcataattatacaatgtcacatttaaatacacctaagttacaggaatcaagtagcactgagaagaacactgcaacacttccaattacctaggtttacattcagcatgttagaccacagagagatgtgctgacatgactatatttagagtttaaaatcataaacaggccaaatcagaggtggtatttcaagggctgtgattaacaagattttcttgatcaatgtcttatgctgtctgaaaagtagggattgtggtacagacnnnnnnnnnnnggagatgaagtttcactctggttgnnnnnnnnnnnnnnnnnnnnnnnnnnnnnnnnnnnnnnnnnnnnnnnnnnnnnggggttcaagcaattctccggattcagcctcccgagttagcggggattacaggagccgggcaccacgcggggttaatttttggtattttaagtagagagggggtttggccaggtgggcggggcgggtctggaaccctggacctcaggtgatccgcccgcctcggacttcc

SEQ ID NO: 7892 - DNA, 211 bp, Homo Sapiens
ggaccggtccgttctgcacttcggatcatataaaaagaaactaggagaaacaaagcaaagtgtaacccaagcatcattaggaattgaactcagtaattcccaagaacacaaagtagtagagaatgatggagatgttattttaaatatgaagaaaattataccaagtcacatcataatcaaagtatttgaagccagtaataaaaaaatctta

SEQ ID NO: 7893 - DNA, 303 bp, Homo Sapiens
gactccgaatgatttggtctcttgtacacttatcttcatcacatcacattacatttagatgtcgtgaacaattcggcaagaacctaaaattactgactaagtgtttctatcaattggtatgatcaatcgctagataatcagagttggctctacagctgacattcaaaagcacagactaccaatttctgcccacacaggctatccttgacattattactgtctctcttatgtaaaacctgtatagaaagaaatttgttatatcaaatccaattattctttcttctcattttacctgacctctca

SEQ ID NO: 7894 - DNA, 232 bp, Homo Sapiens
  misc_feature (184)..(184): n is a, c, g, or t
tcggtaccgtctgtttctgccttctggggacttctctcactgggagccttgggagtgggtatggagggagatgtctgaaatgaggactactgctgttattagcactgggcaggaaagaactagggttgttctggaaactattaaaactgggaggtgggaagttgtggtgagaatagcccggagnggtactgataattaacctgctgcggcatgactggaggggttgtgtgag

SEQ ID NO: 7895 - DNA, 475 bp, Homo Sapiens
  misc_feature (269)..(391): n is a, c, g, or t
tcacaggattcctgggacgaccggatagcatatgtgaaagcctgacttgaatactgaaggggtccccgaatgtggaggaggaggaagaaggatggacgggagtgagagaagtgcagggtagacccgtagagtagatgcagagtagatgactgaacaacagaatatgccaaatggtattagacaaatgatggaggaatgttagcagttgcattagttatgaatcttgtcgaaacaccagaaaccaactcaagatagcttaaacaagttgnnnnnnnnnnnnnnnnnnnnnnnnnnnnnnnnnnnnnnnnnnnnnnnnnnnnnnnnnnnnnnnnnnnnnnnnnnnnnnnnnnnnnnnnnnnnnnnnnnnnnnnnnnnnnnnnnnnnnnnnnnncgggaggatggacaccctaaaaaccctgacttctttgttatgtattatatacatgtaataaaattgcacatgcatgcacccagg

SEQ ID NO: 7896 - DNA, 661 bp, Homo Sapiens
cagcgcttaggattactcaaaaaccaccaatttcgtactactcttcattagctatataaaaataatctatgtcttagattcgtgcttgacttcacattcttagaagtaactaaaggactttacattctcttctttgatttaggttctgtataattttagatcactcagcttagtcaagtttgaacaaaataataaaatggtttggccaaattttataggcacacaactcaaaatgcaaaaagcagtgaagaatgtaaccatctccaccttcaatacggggcaatgctgttccctgctcccctcaactgtactgccggtactcaccaaacagcactatggatatgaaaaccttagactttaccacaatgcttccaaatctgctgacttggaataaaaataataaatcagtacacttccacgagaagaattaatattgtagtgttaggaaaactagcaatttaactaaacagcatcaagttacaaaccaggaaagtgatttaaaactaaatgctggcttatctttctgaaacaaagcatctaaatttgacagtccaaaatggcacttattgaggtaatccgtgaggggcctcacggattacctcaagacaagtaaaactgctagtgttgaagaggctagcagttaggtgacaggacagggtag

SEQ ID NO: 7897 - DNA, 674 bp, Homo Sapiens
ctgtgatctgatgtggtctacatgacatttttcatgttgaactaatgcttgaatgacatgaaatctggaaacctcaggggagagggtaaatgcactttgcagatgggggaatgtgagtgtcctactgtggtagatggaatttctgaaatggtccccaaacatgccacacccttgtctctaaagcctcttaaggtgatgagacaccattcctgtgactatgttgttatatgccagttatatgactttaagatggtgaggttaccgcatgaactggatctaatcacatcactccatacatgacagagctttgtgtggctggttggagaagatgaagtcacgagaaggtgggagcttgagaaggactccataagttgttattggttgaaagatgaaacagacaggtaaggaggaaagcacgtggcctctggagtcagagtagactgtctccccgctgacagccagcacagaaaaagggccctcagccccccacaaacaagaataggaactctttcattatctgtagtgaacctggaaaaatagcttgagctctaggaaaaaaacacagccagcccattcccggattttagcctcacatgactctgatcagagaacccggccacttcattccagacttctgtggtttcaaacgcactggtttgagtaatccataaagc

SEQ ID NO: 7898 - DNA, 460 bp, Homo Sapiens
atattaaagaactaaccggttaaataaagacctatgaaaacccagcagagtctacggaaggtttagttctaaccatgcctttgtgtgggtacttcagcaggttaccttcagttatggagtctgtaatactctgtgtaagaatcatttcaatccatgctttgtttttgagcccaaaccttgctccttctacccccgcccaccagcccccaaccaattgagaaagggaaaaagataaggaccaaaaaacagaatattttaagttcagctgaaattccacctcctctacaaggttctttggacttgttatccagcaggcatttctcccggccatgagatcttgctgcggtggccctgccctcccctctgactcgcatgttgtctgccttatagtagacatgccgtgttgatctttgcgcagaacgcctgcattaggactgtgcttcttcctgctaggtacctg

SEQ ID NO: 7899 - DNA, 825 bp, Homo Sapiens
  misc_feature (275)..(291): n is a, c, g, or t
acctctgaccgagttccagcttggcgtgtcccatgtttttgagtatatccgttctgagacatacaaatacctctacggcagacacatgcaggccaacccagaaccaccgaagaagaataatgacaaatcgaaaaagatcagccggaaacccctggcagccaagaacagataaggaagggattggcatcggctggccttccagcaccttctctctccaacacttcattctctcttgccctgtctctcaaataaacccaatgctgcgtgtgaggccnnnnnnnnnnnnnnnnncactctctttctaatgcttcccaccttaccttttagattcttttgctaggtgggagattgttataaggtctttaaaccatttccatttgtttctttaacattaccaaaagcagggaacaaagctcttattcaactgcgaattccatagtgggctctggcttttcttgaatagatatcacaaggttgcttattatcaaaagaataattaaaatcatgtaaccatttaaatgtcactgttaacacttttcactctttctgttgattcacctaactcattattttgctttattaaaagtcttccttcaccaccgagatatgctaatttaacttacaaatgattttaataaaatcttgagtttgtatcacatgttacttattgactcagaataaaagaacagtctgatcttggggtataacacattttcatttacttttctcccccaaaatcatcttatccaattttattggttatacatgataaacttttcatgaaagaaacccaaaattaaatcacagttcgtttctactcccaaa

SEQ ID NO: 7900 - DNA, 429 bp, Homo Sapiens
cagtgctctgaacgcatgttaaacagccagctactcccacttgcagagtctgagatctgactagcagcaaagtgtagcacattcgccgatgctgggtacctagttaaagaggcatttgtagccctctgctcccatcgtgaacatgctgagagcaatgacaagtcagggctgatttttggaaggtgaacttgcaacttacctcaagtgaatactgttttcagttgtgcaagaagtgctttatgctagtagatatgtgcatgtttcctagagggaatgttttcaagttcagattgattctgctgagaatggacggcaactcggaggcctcaagccaataatgtactacaggccctgacatgttacagctgtgtaaacagggccattctatttcctaaatcacaactaataaagcagaggatgaaaatcaaa

SEQ ID NO: 7901 - DNA, 461 bp, Homo Sapiens
cctggatgtagctgcggtaggcgcccaccttctggggccggtgtttgatccactcgctcagtgtctcgatgggcgagccattgacgcaccactcggtcacgccgaactgccgcaggtgtgcccgtgcgtggctggccagggccttgcggttttcaaagtaaaggccacacagctcgcagcaggcctcggtggaggagtgggaggtcttctcatgaagggtctttgccttgaagggcagttcagtctggatgtaggtcttggccttgacctctgctgggaggaggcggtcctcctgcaggggccgcttggctgccactgagcccaggtagccagtggctgagggcttggccccagtgatgggcgtcaggctgagctcacgaggaacctgggccggccctgcacctggtttgcctggccggccagccaggggcgacagcggcagtggggactgcacgggccca

SEQ ID NO: 7902 - DNA, 494 bp, Homo Sapiens
tctttggggtaaagaatttggtgagaaggagctgaatgttatggctgcgtttctcagccacttgctcggagccaagcatcctctcaccctttctttcaactggtagccagaaaatacgggttgagcatcagggattctcaaccgtgtcaagctccagccctgcctgttgtgacagacgtttcctgatgcctgttgctctctggaatgaaggtcatgggcagtattacccacacagccattcaaaatcagtcggcttcgtgacctgttgtgaaaggatggcgattgccgtgccagcacgtgaacatggactcggatgcctgcgcacacagggtgcaccttccagaaggtgaggtcagcccgagcgcccaccgccatgtgagtgcgctgctgcagtgaccagttgctggaatgttctgaacagagcccagtgccacccactttgatgtgcgttattgttagatctccggaaaaatcagagtgcattaaattcctgc

SEQ ID NO: 7903 - DNA, 431 bp, Homo Sapiens
cagtaaaagggaatattacaatgttggaggagagataagttatagggagctggatttcaaaacgtggtccaagattcaaaaatcctattgatagtggccattttaatcattgccatcgtgtgcttgtttcatccagtgttatgcactttccacagttggacatggtgttagtatagccagacgggtttcattattatttctctttgctttctcaatgttaatttattgcatggtttattctttttctttacagctgaaattgctttaaatgatggttaaaattacaaattaaattgttaatttttatcaatgtgattgtaattaaaaatattttgatttaaataacaaaaataataccagattttaagccgtggaaaatgttcttgatcatttgcagttaaggactttaaataaatcaaatgttaacaaaa

SEQ ID NO: 7904 - DNA, 646 bp, Homo Sapiens
aggtgtgaaccgtgattatgaattttacagattgctgggaagtatgtcttcaactgtgctatttcagtagcagagtaagcacaaggttttaatcgagttgcataagacacctttgcatagctatttaattgcccaatgtaaaactttaatgccatttctaatgcttttattcatttttgaagtatgagtttgtagggacaaagaatgtatgttatcgtagacaagacccccagagacgcttttcagcagaaagttatgcttctagttgccttaccatgtttcttgcaaaactgtccatggtcctcaagggtgttggaaacattatgtttattaaatgggcctcttttcctttgctgtgcacttgatgggtgaactggattggggtgtgcacatccaggaggaggaggagagacctgtagaagtttaaagatagtttgtaaatatcttctaatgcttgtttttagtccttttatgttagagaagttcaatggtatgtagtttaatgcaaaatgaaaccattttatttcaatgattattaaaaaggtttgttttatgcaggaagtgaatgtattcgttgcagtgtttgtgcctgtctgatcgcttctgtttagcagagtgaatgtaaaacagtagagtgatctcagat

SEQ ID NO: 7905 - DNA, 629 bp, Homo Sapiens
  misc_feature (462)..(470): n is a, c, g, or t
cagatacgattcgagtcggtaccgacgatgctgcaagttggttaatgtgaaaaacggtaaatgccagttttaataacaaaaatggtactaaacgcagatgagcattaaattaatacagtataaaagagaacagcttaaataaactggtattcacatattacaatagcaaagttatgacagaatgaactgaagacacgaacagttttgaaaattctcttttcagcctacttccaaatagaaatagtcaggcttttttcctgtacatagtttgatgctttgtctataccatatatagtagaaaaataaattctttagcaacctagaaacagtttataaaactcttaaagtttaattttctttgccagacatgccaatagttaaactgacaactataaattaaagctatatagacaataggtataagtaatatagaacaggttaagaatactacatttaccggannnnnnnnnaaatattactgtactttcttaattcctgtgtgctttgcaataggaataatagggactttgttttcttagaaaagataacatgtaagagtataacacaaataagataatttataatatacatgtacttcaacagcagcctggttcttgccaaccatcgtc

SEQ ID NO: 7906 - DNA, 960 bp, Homo Sapiens
agtaccccccaccgcaggttgtactggaggagtcaggctctgagggcctagacgagctgatttttgcccggaaagacacattctttaaggatgtggactacgtctgtatttctgacaattactggctgggaaagaagaagccctgcatcacctacggcctcaggggcatttgctactttttcatcgaggtggagtgcagcaacaaagacctccattctggggtgtacgggggctcggtgcatgaggccatgactgatctcattttgctgatgggctctttggtggacaagagggggaacatcctgatccccggcattaacgaggccgtggccgccgtcacggaagaggagcacaagctgtacgacgacatcgactttgacatagaggagttgccaaggatgtgggggcgcagatcctcctgcacagccacaagaaagacatcctcatgcaccgatggcggtacccgtctctgtccctccatggcatcgaaggcgccttctctgggtctggggccaagaccgtgattcccaggaaggtggttggcaagttctccatcaggctcgtgccgaacatgactcctgaagtcgtcggcgagcaggtcacaagctacctaactaagaagtttgctgaactacgcagccccaatgagttcaaggtgtacatgggccacggtgggaagccctgggtctccgacttcagtcaccctcattacctggctgggagaagagccatgaagacaggttggacgctctccttgtggatgatgccgcgcagggcccttcgcacgtctgacaggactctactatatcgcgtgggcgtgtagctatgtcgggggcactgctgtatcgtgggggcgtgtagttaagtcagcatgaggacagctagtgtgtgggatgagcctggacccctggcggaccttgaacacgggcttgctgtccccagggccttgccaaccatcgt

SEQ ID NO: 7907 - DNA, 566 bp, Homo Sapiens
acgatggttgcaagggcagagaagaaacggtagcagaagatgtttgtattgatctcacttgtgattcggggagtcaggcagttccgtcaccagctactcgatctgaggcactttctagtgtgttagatcaggaggaagctatggaaattaaagaacaccatccagaggaggggtcttcagggtctgaggtggaagaaatccctgagacaccttgtgaaagtcaaggagaggaactcaaggaagaaaatatggagagtgttccgttgcacctttctctgactgaaactcagtcccaagggttgtgtcttcaaaaggaaatgccaaaaaaagaatgctcagaagctatggaagttgaaaccagtgtgattagtattgattcccctcaaaagttggcaatacttgaccaagaattggaacataaggaacaggaagcttgggaagaagctacttcagaggactccagtgttgtcattgtagatgtgaaagagccatctcccagagttgatgtgtcttgccaaccatcgtgacgatggttgcaacggtgttgatgaatagtcctacatttt

SEQ ID NO: 7908 - DNA, 396 bp, Homo Sapiens
acgatggttgcaagccagcaagcagtcaaaccagtgacccagctgggctgtgctgttctcctaaggagcatttggaagtcactgggtgggttgtgaaggtcacagtacctgagtgttggtgctgctggtttttagtgcttaggagttggccatgttaaatttcccacaccacaagtaactcttttccagaagccagtggcattcctgtctctgttggaagtcctggtctgaatgtggaccctctctccccgacccctatactctggctgtcttcttcctgtctggggagatctggcagccacgaccttgttgcctgggtctgtgagagcaaagctgagttctggtccggcttgtagcagaagaaggaacttgccaaccatcgtcgtgatcctctaa

SEQ ID NO: 7909 - DNA, 980 bp, Homo Sapiens
  misc_feature (501)..(550): n is a, c, g, or t
gtgatgtctgtaactctgtgaaggttgtattagtcgtttgctcctatattactaatgatgacaaagtcgcctgacagagtagatgttcaaatttatggacttaaactgactgacatcttgataatgcccatatccagaggtactccagatattatatcttcatgcagaaaactgaaagatacctttagctacatctaccccagaatgagtgtccaaagcaggtggcaccaccaaaaggcaccttcttttcccatgaaaagagggaagagagttgagaagcctcactcccatccctgctctgccactgacaagttgtgtggcatttggcacatcatgttctctctctacatgcacctaaaatgacgggtagggtcagagacattggaggatctctcttttctcttccacctctaacacggtaagatcttagcaaagtaaaaaggacagtgataacagaaaaattgttcctctaagagtcccaagtcattttttttctctccnnnnnnnnnnnnnnnnnnnnnnnnnnnnnnnnnnnnnnnnnnnnnnnnnnaagctatacaaggaaagctgaatccatatgtagacttcatggagactagtactgctccaaatgtgcacaagccaatctgatatggtttgcctctgtgtccccacccaaatctcatgttgaaatgtaatccccaatgctggaggtgggacctggtgggaagattggatcatgggggagttttctcatgatttaacaacatccgccctttgttgtcatgatagtgagttcttgtgagatctggttgtttaaaaatatgtgacacctccccccaccttccttctgctctggccgtgtaaagtgctcactccccctttgccttccaccatgattgtaagtttcctgaagcctccctagaagctgagcagatgccagcatcatgcttgctgtgcagcctgcagaactgtgagccaattaaacctctttatgaatt

SEQ ID NO: 7910 - DNA, 1045 bp, Homo Sapiens
  misc_feature (923)..(931): n is a, c, g, or t
ccggaattttcgggatcgggagccggcagggagcggtgctgcggagccgcctggtctcccgcgtccatcggtccattcctgcgtcgttctgtccttccgaacgcacacttcaggagcagccgcgagggtggcatggcagcgagcacagacatggctgggctggaggagagcttccgcaagtttgccatccactggtgaccccaaggccagtgggcaagagatgaatggcaagaactgggccaagctgtgcaaagactgcaaggtggctgacggaaagtccgtgacagggaccgatgtggacatcgtcttctccaaagtcaaggggaagtctgctcgggtcatcaactatgaggagttcaagaaggccctggaagagctggcgaccaagagattcaaggggaagagcaaggaggaggccttcgatgccatctgccagctggtggcaggcaaagagccagccaatgtgggcgtcactaaagcaaaaacagggggtgctgtagaccggctgacggacaccagcagatacacgggctcccacaaggagcgcttcgatgagagcggcaagggcaagggcattgcgggacggcaggacatcctggacgacagtggctacgtgagcgcctacaagaatgcaggcacctacgatgccaaggtgaagaagtgaggcttgggaagaccgccctgccaagtgcggctgcccctgccagaggctcaggcctgggtctaaggggcacgtggagcaagagatcctggtcccctccctgctggaactgccacccagagcttcctgcctagtcccactgggctggcccaccaggcctctgacccaggctgctctgcggccccttcctcctcctcttcctgctccaacttctgtcccaccgggggaacagtctggggcctggaaccctcatgaccccaannnnnnnnnaggcatggggtaacccctggactggcttgcctcctaatttaacctggcggccccgggccaaggggcctaaattttatccccaaaacctcatataagacaccctttttggtcccc

SEQ ID NO: 7911 - DNA, 334 bp, Homo Sapiens
tgacagaacatgatatatgtgcctgattatttcaagccaaaaaccagcccttgtgttatgaaattagagcaatttaggatttgttttctgcattttggcaattcctgtgatgctgtaggcatcagttacctgggcaggcagtaggtaaggaagtggggtcaggtcctttaccagcacttatagaaatgagaaacgaggctctcataccacctcttaatcactgccccctcctaagggtaagggctgatgacttggccttgagaatgtttttgctacacccaccccttctctctcatgttacttcaatcaatgtacttgccaacatcgtcgggga

SEQ ID NO: 7912 - DNA, 478 bp, Homo Sapiens
ccctcacggattacctcaaaatgctatgaaccaaatacaaatatgatattcttgcggcactgacaaaacaaacttctaatacccctgaattccacttagatggattaacacaaatctactctgaacaaaattcaaagctttcttaaagaaaaagacacaaaagccaaaaagctacaacatatcaagaccgaaactacaatgctataaatatcctgaaatgcctcaaggtgtgtaattactgaagctaattagtattctcaaaattaaacatccactgcaatgctcaaggaattggagaggtgggcagaaaaaagaatgggccgggcgggcaacgtgggccaaaactgttattccaggtaagtgggaaggttgaaggcagaaaatcggatggaccttgggaaggcgaattcgcgagttggaacttatattccggcattggaattccaactgggggaccagaagcagaatttggcctttt

SEQ ID NO: 7913 - DNA, 445 bp, Homo Sapiens
  misc_feature (359)..(359): n is a, c, g, or t
  misc_feature (432)..(432): n is a, c, g, or t
agacgaataactctacctgccatatgggagaggacaggggaagtcaacttcgacatggtttgggaaagaagatgtggcttaaaccaagatggagcagagaggagagattaaaatgaaaggtatttgttttcttggactccacaggacttgatgaatgattttgaaggggtggatataaggagagaaagggcgttatcaatgacacctggattttgtgattacaaaactgagaggctgttaatgctatccacaggagaagcagatttaatggaagagagatttaaagaatgggcacgttaactaactttgcattgtttaggcaccatcgtgtcctatacgcagctcaattcaataaatanctcagtgagcacccactaaatattcattgagccagtatgtgctggcactattccagatggttgaggaagaggncctcggatcctct

SEQ ID NO: 7914 - DNA, 578 bp, Homo Sapiens
tttcaatgtgtaagaagtactttaatagctcaaactcagagtcatcgtgctcccaattccaaagagattcctaaaagaggcaacttcggccgtttgagaagccagcgctcacccacccggggtctctgtgcattgacctttgggtgctgacttggagaaaagcacaaacacgaccagtcccatcctggctcccgtggggcttcttctatctacgcattgtatcgactgcattagttggactaagatgatgactcagttaaaggaggagacaaatgctgactgtctaagcaagaatggcccaagctggcaagaaaaagcacactgcatacataggatacagaagggcagagcttctgcctgcggatctgcaacattacatttgttttgcctgcaaactatcaagaaggattctgttggccagggagtctccactgaacaaacaaaatggcagtcaaaagtcttgagtgtcctattccagcagcccagagtcctcatccgtcatccacgggagagtctttgagggaaacatgaagtacagctcatgcctctgcctatgggtcaatttcttcgggaatcac

SEQ ID NO: 7915 - DNA, 495 bp, Homo Sapiens
aaggatactgttagaaaatcctaacattggtctccgtgcatgtgttcacacctggtctcactgcctttccttcccacagacctgagtgtgaaagactgagagttgaggagttactttgtggatcttgtccaaatttagtgaaatgtggaagtcaaccagaccaatgatggaattaaatgtaaattccaagagggctttcacagtccacagggttcaaatgacttgggtaacagaagttattcttagcttacctgttatgtgacagtgatttacctgtccatttccaacccaaaagcctgtcagaaagcattctttagagaaaaccactttacatttgttgttaaactcctgatcgctactcttaagaatatacatgtatgtattcataggaacattttttctcaatatttgtatgattcgcttactgttattgtgctgagtgagctcctgtgtgcttcagacaaaaataaatgagactttgtgtttacgttaaaa

SEQ ID NO: 7916 - DNA, 607 bp, Homo Sapiens
cctgcgacagcgcatcagcgagctgggggcccgggcgtgactgtgccccctcccaccctgcgggccagggtcctgtcgccaccacttccagagccagaaagggtgccagttgggctcgcactgcccacatgggacctggccccaggctgtcaccctccaccgagccacgcagtgcctggagttgactgactgagcaggctgtggggtggagcactggactccggggccccactggctggaggaagtggggtctggcctgttgatgtttacatggcgccctgcctcctggaggaccagattgctctgccccaccttgccagggcagggtctgggctgggcacctgacttggctggggaggaccagggccctgggcagggcagggcagcctgtcacccgtgtgaagatgaaggggctcttcatctgcctgcgctctcgtcggtttttttaggattattgaaagagtctgggacccttgttggggagtgggtggcaggtgggggtgggctgctggccatgaatctctgcctctcccaggctgtccccctcctcccagggcctcctgggggacctttgtattaagccaattaaaaacatgaatttaaaaaa

SEQ ID NO: 7917 - DNA, 735 bp, Homo Sapiens
cgggggcacagccaagatggcggcgtccgtgcgacaggcacgcagcctactaggtgtggcggcgaccctggccccgggttcccgtggctaccgggcgcggccgcccccgcgccgcaggccgggaccccggtggccagaccccgaggacctcctgaccccgcggtggcagctgggaccgcgctacgcggctaagcagttcgcgcgttacggcgccgcctccggggtggtccccggttcgttatggccgtcgccggagcagctgcgggagctggaggccgaagaacgcgaatggtacccgagcctggcgaccatgcaggagtcgctgcgggtgaagcagctggccgaagagcagaagcgtcgggagagggagcagcacatcgcagagtgcatggccaagatgccacagatgattgtgaactggcagcagcagcagcgggagaactgggagaaggcccaggctgacaaggagaggagggcccgactgcaggctgaggcccaggagctcctgggctaccaggtggacccaaggagtgcccgcttccaggagctgctccaggacctagagaagaaggagcgcaagcgcctcaaggaggaaaaacagaaacggaagaaggaggcgcgagctgctgcattggctgcagctgtggctcaagacccagcagcctctggggcacccagctcctgaggctttgtcccttcccaataaagcctgctacctggcagtacccctgaaga

SEQ ID NO: 7918 - DNA, 594 bp, Homo Sapiens
cagggacctcttcattgatatcaggactaatatttatatttgaatggtggtacttccataagcatggcacatcttttattgagcaagtatctgtaagccatttgcaaccactgatgggaggaacagagagcagcatttcagaaccaggttctccttcgaggaacagagaaaatgaaaccagcagacagaatttgtcaggtgactacttttctaatgtgttttcagagctgtgtatttaagattgagtttggctctgggagatagaaaactcaaaacagcagagtgctgtggtgtgcatgtttgtgtttcccccaaaattctaatcaccaatgtgatgttacgaggtagggtctttgggaggtgatcaggtcatgagggcagtgccctcagggatgtgatgaatgcccttatgagagaccccagagagctgcttgccacttctaccgtgggaggacaccacgagaaggcgccgtctgtgaaccagaaagcagaccctcaccagacaccaaatttgttggtaccttggtcatagacttcccagcctccagaactgttaaaaataaatttatactgtttataatctaaaaaaaagaa

SEQ ID NO: 7919 - DNA, 437 bp, Homo Sapiens
atttatttcctgttgcaaagagatggagcttcttgcagtccacgaaactgcaatatacctcaatgattttgtttttggattctgtaagataccatgtttagtagacctgtgttgttgtccacgagtctacaggaagatgttcatgttttgtttcagaaaatatttctgttgttttgtgcttttcttaactcatcaaatacaatgtgtggctcgcccttggcccttcatattgcttaccttaattgtgtagaccataaccagtttctactttgactaaagtttgacgtacacaagttacttgaatgtggggattctgtctatccctctacgccctagtgtacatagtactatatattatagtctctttaagtgttaaatgaaaaaccagtctaaaatgcaggatttatattaaaaatcgagttgcctgcttatataaa

SEQ ID NO: 7920 - DNA, 462 bp, Homo Sapiens
tatttcccttcaaagtagtttgcttcttaagaccactcctccctccagaatgtctttaaccagacatcatttcagaaggtggggcagctgcttccttaggaagagtgggcctgatagctcaaccaactcctttagcatgtaaactcacagaaggcaagaacccctttttttagactttccaaatgcatcctgcaaagagagagatagctgatagggactgacaagcacactgtttagataagaagcaattagccttttatatctgtgctctatacattttctatgtgcagcatctttcctaacttgttgtggttcccgggtggcaggtgcacagctgggagggactgccggctgtttcgtacaacattcttgccaattcccttgaggagaaaattcttcacatggcttctgcatgtacagtatttgggcagcaaaacatgattaaagtcagtttgaaaatgg

SEQ ID NO: 7921 - DNA, 179 bp, Homo Sapiens
ccagctaggtttttcaagtatagtttggcacacggcaggctagggaatgggtgctgctgattggtttggggttgcaatcataggcacatgtgaaatggtccttatgtactgagtctgcttctggctaggggctacagaggaatcgctggttggggtggggtcatcttgccaaccatcgt

SEQ ID NO: 7922 - DNA, 546 bp, Homo Sapiens
cgacgatggtggcaagaacacacaggtattttgttacctgaagcaaacccttcatttagtatgccgtgtatttgtgtcataccaatgaactgaacagtcaactaatcccataactttttgtcttgtttactttgtagtaatgctaaccatgagttaattccaacctaaccagttgttaatatgcttccattaactgagtctttatctctagcaaactggagtgcactatgaatttctgcaatattagtaccctctttccaattatgtgtttaatcagatttgaatgagaaatgaagagtttgcctccttgaagttttcagccagccttcttccccttcctccttatcctcttccttttcatagtgtagattttctttgtttcaaccctttgcctgtttatactatggctatgaagatgaaaaataatgagattaacataatgaaccattggctcacaatctcaaccctattgtgtacttgcaaggatataaatgtatcccatttctttctgagccctgacttgcaaccatcgtcggtaccgagctc

SEQ ID NO: 7923 - DNA, 737 bp, Homo Sapiens
  misc_feature (134)..(134): n is a, c, g, or t
  misc_feature (196)..(196): n is a, c, g, or t
  misc_feature (236)..(236): n is a, c, g, or t
  misc_feature (586)..(598): n is a, c, g, or t
tttgtctgtgacatgcaacttacaaaactagcaattgtaacaataaatcacagccacttgacaagaaaggatattcattattttcaaatggcttttggactatcaaaaacagtaaggcttttgttcagaaatcncctttagtcaaaaggtttaagaagcaaattatttagtagcagaacttatctcaggaaagganaaatatgcatggttggtgagaatctaataaccattaaaantgctgggggcaagatgcagtacaaagttgaagagactttattcccaataagttgatttactgatgatatgtcatatgatgcaaaaaaggttttgtgtcattaactgaaaagtagcagcttctctatccaggatgatgagtcaacaggtttcactaatatttgtcatgctgtagcatttgtaagatttgtaaatgatgaaattcaaagaaaactttttctattgctaggagcctgccagaacaaaggccaatatataatgttgtgacatcatatctgataaccagaggtctggtatctacactcctggtgccccatcagtggttgtctccataagtcattttgcgttattnnnnnnnnnnnnngaaatcctgatgttgacattatagcacactgctttctccacagagatgctgatatcaaaaacttgaagatacagtgaagttctgaataatgttacaaaactggttacctgtatcaaagacccatttatgcaaaaatgtt

SEQ ID NO: 7924 - DNA, 341 bp, Homo Sapiens
ttgaagagcacattgcaatctatagatgatccatggcagctatcttcaaatgctgaaagcttgctcatgtagcaggagtctgtgctgttttagaaaagaaagggtattacaaacagtgatggtggggatgtaatttttttacatttaactcccaaggtaatgtattaattataaataagttgtacagaattatgctaaggaatagcttggttaaagcaactaatattttgaaagatgccctttaagattatttatggtaatttgcttttcaaatctagaagctttagactttttaagaatatagttcacagtaggtgatgctggaactttgccaaccatgt

SEQ ID NO: 7925 - DNA, 451 bp, Homo Sapiens
acgatggttgcaaggcagagtaaacttgttaagaagtcaagggtcctagattatggtactaattctactaactgagaggcaagacaggcatttcaaatacaaaactatgaccagcctcctcctcaccttaatcttcttgtgtttcactacagcattaatttcaaaatctcccttccaatgccaggaaatctcctctaacataatgaatttcccaccccaccactatcccttacatttctttaaattcaagatcacttttcttcttaaaaagtaatcagagaatttataaactaagggtccttagaccaaaccccaaaattatgaacaagaactcaatcattaagtatttgtacattcacctcagtcctgaagaatagccaacctgccactatacactcaaaccaccgtgctatgtgctgagatttgggcttgccaaccatctccgggatcc

SEQ ID NO: 7926 - DNA, 582 bp, Homo Sapiens
acgatggttggaagctcccatgttggttaccatcttcttggctcactatctcctagttcccgcggccggacaaccttccgtcaaagtattcgacgttgcttttcagctacgagataacccccgtgacatatctggccttgtcttggtcgaaactatccttgggctcaacgacaactcatgcatgcccgagtgcctacaacgaggatcctccctcgtcctctacctatagctcatggacaaggtcaagtgcgttcctaccgtccaatggggttatgaaatatgctacgacattcaaaaggcgcgtctaaatcaagcgaagccaagagcacttttgaatgatgacgatccaatcaacgaggagacactatggcacgactccaaggagatgatctactcaatgcatggcatgcctcgagttttcctatatggttgggtaaagatgacgtgctactacatcaaaaaccttacaaagcaattcggacgagataagatgccactgatggacgtagccacgacaccttatgatgtgcccatcacattaaagatgttcaacgggtatccctccttgtggaataatgccct

SEQ ID NO: 7927 - DNA, 535 bp, Homo Sapiens
  misc_feature (73)..(121): n is a, c, g, or t
attgaggcagattagggtacaatctcagctcagcacaatcattatgtgactttaggtgagctgcttaaataannnnnnnnnnnnnnnnnnnnnnnnnnnnnnnnnnnnnnnnnnnnnnnnnccaagctttgggggaggttaaatgagactgtgcttggctccatggctctcctctgctgctcattgtgcttctgaagcctctgggagaagtcagacatttgtgacgtgcctggactggtttcggcaataccccggagccaaggttagaagtacagagtgaagaccctgactcaaaggccagaatttttatcttcagggctgaaagggtttttaggaattgtttgatccacaaatgatgaatgagtttcagctgtgaatcagtactagtggctttccagggctcattgttgaggattctgaagctgcatctgagcacttcaagaatggatgcctggcggggcgtggaggctcatgcctgttgcctcctgtggctacagggcgtgactgccatctgctccaactttgctcattccga

SEQ ID NO: 7928 - DNA, 350 bp, Homo Sapiens
cgatggttggcaggtaagacttggcaggcagagcaatgttgtacaatttccttagcctgtttccaagataagccatatctgtttccaaggcctgcagcattaggatgggttaaagaatggaatgtttgtgtatcagtaaaagctgcagaaaccagcgcatctgccctttgattgagtttggttaaagggacggggaggttagtatgtgctcttatatgagtgatatacaaaggggaatgcctttgttgtactgcttgttgtaaagaatgaaataaaagattgagttgatcatcagttacattttcaattaaggcacattcaatattttgcacagcttgcaccataatcgg

SEQ ID NO: 7929 - DNA, 584 bp, Homo Sapiens
gtatatagtgaggagttgaggtactccaagaaaatgagggtggtgttatttagaggaagctgaatgttaactctttgtaatataaattaccacatataagttgtatacacactctccatctaaattataaaattagctttttgtatatattttcacaaatcaaaggttacaggtaatgatgttcttctcaaacttcaaaagtgtgtgtgtgttttaatacagttcatttgaagggctcagagaatatctactcttcacagcgtcctatataaaatagtttctgtaatcagatcaacagtgataacttgttttattccagtgtaaaattaaacaagtgggaaaatatctccacagaaaccagaaagacacaattacatagtttgaaggaggcaattagaatccagcaaaccagtgggtttgttaaaagcctatttcttgactgtcagcctgttctcttgaaactacaatatatgttgctttaaggtatctttaaacaagtaactattttctcttagctggtagtggatgataattccattttagaaatactcatctacaactatcctctctaactccgaatctgc

SEQ ID NO: 7930 - DNA, 132 bp, Homo Sapiens
acgatggttgcaagcaagtaggtatggatatcaccccaaagggcaaggtgagaaggatgtccaaacagtggctagctaatggcatctgaggattctgaaagaactcatagctctggccggcacagtagctca

SEQ ID NO: 7931 - DNA, 880 bp, Homo Sapiens
  misc_feature (236)..(236): n is a, c, g, or t
  misc_feature (582)..(582): n is a, c, g, or t
  misc_feature (590)..(590): n is a, c, g, or t
  misc_feature (595)..(595): n is a, c, g, or t
ttctccgcttggcatgactacctggaaccgctcctgttgctggagcccgtgaaaaagaccgcctgcagctgctgggggcacttgcatgtttgtggcttctagattgaaggagaccatccccttgacgccgaagaagctgtgcatctacaccgcaaactccatccgggcccgaggagctgctgcaaatggagctgctcctggtgaacaagctcaagtggaacctggccgcaatgacnccgcacgatttcattgaccacttcttctccaaaaatgccagaggcggaggagacaaacagatcatccgcaaacacgcgcagaccttcgttgccctctgtgccacagatgtgaagttcatttccaatccgccctccatggtggcagcggggagcgtggtggccgcagtgcaaggcctgaacctgaggagccccaacaacttcctgtcctactaccgcctcacacgcttcctctccagagtgatcaagtgtgacccggactgcctccgggcctgccaggagcagatcgaagccctgctggagtcaagcctgcgccaggcccagcagaacatggaccccaaggccgccnaggaggcnttaanaggaggaggaggaggtggacctggcttgcacacccaccgacgtgcgggacgtggacatctgagggcgccaggcaggcgggcgccaccgccacccgcagcgagggcggagccggccccaggtgctcccctgacagtccctcctctccggagcattttgataccagaagggaaagcttcattctccttgttgttggttgttttttcctttgctctttcccccttccatctctgacttaagcaaaagaaaaagattacccaaaaactgtctttaaaagagagagagag

SEQ ID NO: 7932 - DNA, 759 bp, Homo Sapiens
  misc_feature (731)..(731): n is a, c, g, or t
gcggccgcagcagcttgggcttctggatgggcggcagcctccggctctcccgctgcacggcctccagggtctcgatgtgcatctggacaatgtctggcaccatgacatgcagccccttgaggtggtcgctggtgaccccactctccgtgcagaccttgtccacaaagcggttgatgaagcggaccacagccccagctacgtcgcaggtctctgcatcctcgaagccgctctccgtgtcatagctctcggccacactgccagccatgctgttggtgaccaggctgttgctggcgctctccaggtcgcccagcccggcacgctcccgaagtaggcggctcttgctgctgtccaggggcaggaggaggtagctcatgcggttggcatagtggatggcctggctgaacaccgtgctctcctccttctgcaccagctcctgctgcttctcacgactcagagttggccacaagcgccgctgctcagaagccacgtctagggcagagcgctcgtcctcctgggaaggtgcctacccaacctcctgggcgggggccaggtcctccgtggggctccagggtagagggcccggatgtgagtctgcacatccccatagaacatggcctcccagaaactgtgcgttgctcacaccacgtgcttctgcacacagctgtatgcaaactgcgtcacccccgggctcagctttcgggcagaggctgtgaccagaggcagcagagccngccgcatgccatgctcgtcccaagaagt

SEQ ID NO: 7933 - DNA, 457 bp, Homo Sapiens
gcggccgcggagctcggcgttgggcacgatgtgctccaggcccatggcgcccttggcccggcgccgcacgatggtgctgaagcgcacgttgacagagccggcgatgtggccggcgttgaaagcgaagaaggagcggcagtccagcagcaggcattgcgccgctcgctcccccagcagcgcccgcaggcctccagcgtccagggtgcccacttccatgaccatggccggcctcagcgcccccagcgtgatcggccctgcggtgctctttgtctgttctcggggccaagggcagggcggcgcttttcgaggaaaagctagacccccgggtctctctgcgccgaaccaaaagccgcttttggactgagagaggagcgtcacgcggggctccgggctcctcggcttcttcgcggttcccccgactgcccctccgacccgcgtcgcacacacagcccaaatg

SEQ ID NO: 7934 - DNA, 525 bp, Homo Sapiens
ccaccgctggactcagggccccggtgcctacacaatggcacctgcatggacctggtgggtggtttccgctgcacctgtcccccaggatacactggtttgcgctgcgaggcagacatcaatgagtgtcgctcaggtgcctgccacgcggcacacacccgggactgcctgcaggacccaggcggaggtttccgttgcctttgtcatgctggcttctcaggtcctcgctgtcagactgtcctgtctccctgcgagtcccagccatgccagcatggaggccagtgccgtcctagcccgggtcctgggggtgggctgaccttcacctgtcactgtgcccagccgttctggggtccgcgttgcgagcgggtggcgcgctcctgccgggagctgcagtgcccggtgggcgtcccatgccagcagacgccccgcgggccgcgctgcgcctgccccccagggttgtcgggaccctcctgccgcagcttcccggggtcgccgccgggggccagcaacgccagctgcgcggccgct

SEQ ID NO: 7935 - DNA, 1074 bp, Homo Sapiens
ctccggaggtcagccccagctgactcagccaggcaagctgaccgaggccttcaagtacttccgtgcaaggcatgggctacatggcctcatcctgcatgactcgcctgtcccggtctcgtacagcctctctgaccagtgcagcatccgttgatggcaaccggtcccgctctcgcaccctgtcccagagcagcgagtctggaactctttcttcgtgggcccccggggcacaccatggaggtctcctgttgaatggcccttgttgccctagagtgggacccagcccttcacctccccaagagctaacctgggaggtgctgaaggggcattgggccaccgtaagcaagggaaaaagggcagatcatgcggggagatgaccttgatctttgattgctaccctaaccttgacctttaacccgtgattccccccagctcctggaagagatgtcctaatatctcttagggacccagacccctaaattctcctcctcccccattttgatgttaaggtggagagggcatatgcatcctctgtcctgatctaggtgtctatagctgaggggtaagaggttgttgtagttgtcctggtgcctccatcagactctccctacttgtcccatatttgcaaggggaggggatttggggctggggctccattcaccaaagctgaggtggcttctcattaaccctttaggactctgaagggtatggacctacgtgaatgtgtgtcagggggagacttgctggtgggttagtggtcctcaggatgtgatagaaacatccagtgtaaaaaggaagttggaatgggagttggcgggcagtgaacgagtgtggggaaggattggtgctggggcaacaggaaggggcctggggccgtttggctgcactaactttggtagctcagtgtgcatctagagtgggactggggagggagctaagcttgggctgggctgcttggggcttggcatagggtggaaagggctaccctggggctctgaccacactgtagtatgtgtggagggtgccctcccgtctcccacaacttctgctataacaataaactgtagaggaatctga

SEQ ID NO: 7936 - DNA, 437 bp, Homo Sapiens
catttagtatgaggatgccacctggaaaatacatgtttaatgtttattgaaaggttaaattgcataagggtttgtgttagactgatagcatatctactgagtagcgccccgccgccccccgcccaccaccaagtttctgatcctttttcttttctctcagaatcatcggactcaggtacatctgtgagtgagaacaggtgtcaccttgaaggtgggagtgatcaaaaggaccttgtacaagagcttcaggaagagaaaccttcatcttcacatttggtttctagaccatctacctcatctagaaggagagcaattagtgagacaggtatatatgaatatttatttgacgcattcacacagctttttgatattctttctctaatgaaattagtgcttttagacttaattaaattgttccctttttttggttgaaaaaa

SEQ ID NO: 7937 - DNA, 487 bp, Homo Sapiens
ttttttgctggtcagaaagccatttaatccataaacacaaagacacatgaatgggcaaattctgtaaatgaaagcaatctggcaaaagcccttggtggtgagcttggtctccctcacaggcaatgacagtcttggccatgggtctagacaacacacaattccaatgcagcctaggaggacattatggaagtgagctgggagaaccaatgatgcagaaagtagactcaggagaggcacagagaatgcaccccctgccccaagtgcagtggatcagagagctcagaacagagaagagatgaggagctcatggcctctcgtagcctagcctagagcacacttactgctcactatcttattgtccatcattttaagtcaaacatccccagttcagtgagagtgtacattctccaatattacacacataaggaaagatggggtaaccctaaagcctgaatgagaaaaagcttccaggagctgtttttcagaa

SEQ ID NO: 7938 - DNA, 567 bp, Homo Sapiens
ggtgggggtggggttgaaagggtgtggtgggagatatggaggagtatgaattagggcttggagttggtaaaaacattcctgactatccttcttaaccacgtggctgatgtggggtaggtatgaggggaaggaagtggagtagcctaatgaaaaggggttctagttgagctctgtagataaatgccttgtttcagtgtggttggagacctggtgtcagataaaagaaactccatccgcacagacagatgcaaacagctcctctagttctgcagagctagttgagaactcaacattaatcattttaaaaagtactgtccttgaaatagatttgctgtgggaagaagggcagtgagtgtgggagaaaggagccgtgagcgtggggaaccccacagagcccaaaggactttttcagtattcgaaataaacaaaacaaaaacccatgaaaaaacccaacccagaaatattctgaagcagttgctgtgtgttattggggtttgggagggggaagaaaacaatactgaagacattgttaatgtcagatgcggctgagttccctcaatagcctcc

SEQ ID NO: 7939 - DNA, 604 bp, Homo Sapiens
  misc_feature (572)..(572): n is a, c, g, or t
gcggccgccgccggcctctccccagcagccgcggcgctgctcccccttctgccgggcgcgcctctcgctgggcgccctggctgcctttgtcctcgccctgctgctgggcgcggaacccgagagctgggctgccggggccgcctggctgcggacgctgctgagcgtgtgttcgcacagcttgagccccctcttcagcatcgcctgtgccttcttcttcctcacctgcttcctcacccggaccaagcggggacccggcccgggccggagctgcggctcctggtggctgctggcgctgcccgcctgctgttacctgggggacttcttggtgtggcagtggtggtcttggccttggggggatggcgacgcagggtccgcggccccgcacacgcccccggaggcggcagcgggcaggttgctgctggtgctgagctgcgtagggctgctgctgacgctcgcgcacccgctgcggctccggcactgcgttctggtgctgctcctggccagcttcgtctgggtgggtctccttcaccagccctcgggtcgctgccctccgccctcaggccgctgctctncggcctggtgggggggcgctggctgcctgctg

SEQ ID NO: 7940 - DNA, 439 bp, Homo Sapiens
ccacataacatttcagaatataggatacatcttaaagatgatggtgttatagttttaagtggtggtgttttttctttcttagcagtctgtaaaataatactgatagtgtctttaattcagtgcaataatgaccaatcatatgacatagctgcgtaagaacaggaactttgtctatagccaaatcatgaaatctgtgtatcatttttacccaaaacaataataaggtatctagttatccatagcagttttctgtaatctatcatacatattaaaaatatacaatttctctccttggttaccttaagttgaaaacagtccacagtgataataaacatactacaaagaataaactgctgaagaaatgccaaaacaaaataaagaaggttttgcgtttatagtgtatgctttctatgggggaattgaataaatgttgtaacac

SEQ ID NO: 7941 - DNA, 418 bp, Homo Sapiens
tcaggccatctggccgcctagcgagggtcctgctttcttcctgctgtcttgggaccaggcttctgctcctcctcagccagcggcagaagcagggctgatgctcagggacccccccaaccctcaaaccttgcctccgaggctgggcctgagctgggtgccccgtcgccctcccaggccaataggctctgactcttccagcacccatggatgtgccagaggcctctgggttggtttgcatgtcatttgcatatcgtttgcatgccctcatcccacccattctcagggcagtatgggaagccccaaggtgacctggccaagtagcaataatttgggtccagggtcacctattgcccccagaggcccctgaaccccaggctgggaccccagcacagaggcaataaaggcagtggtcccttcc

SEQ ID NO: 7942 - DNA, 433 bp, Homo Sapiens
  misc_feature (122)..(139): n is a, c, g, or t
gagcttctgactagttcagactgccacgccaaccccagaaaaataccccacatgccagaaaagtgaagtcctaggtgtttccatctatgtttcaatctgtccatctaccaggcctcgcgatnnnnnnnnnnnnnnnnnncgctgccaggttttagaagcagttctggtctcaaaaccatcaggatcctgccaccagggttcttttgaaatagtaccacatgtaaaagggaatttggctttcacttcatctaatcactgaattgtcaggctttgattgataattgtagaaataagtagccttctgttgtgggaataagttataatcagtattcatctctttgttttttgtcactcttttctctctaattgtgtcatttgtactgtttgaaaaatatttcttctataaaattaaactaacctgccttaagaacag

SEQ ID NO: 7943 - DNA, 534 bp, Homo Sapiens
tgagaaaagctgacatactcaatatgtaatcgctttacttcaacgatgtgtttacagtcacgccaatacattttgcaaacgcacaacacgcagagcgcagcctcacagctgacgccagatgacatgcagcagtttaacgcttccaggtcggaacaacctcctcaaaattgcgagacaaagagtgctttggggagcctggcttttaaaaaaagacccgagaattgatgagtcggagacaccagggcgcttccctgacagcccagcctggacccaatcacacggtcccatgctgtttctttctgagcagacaccaaagaaatgccacgccaatgggaggacacaggtgggcgggttaaagtcacatttttaaaaaggctaaactctagattgctgtatttgctctctctggagattaacaaagtgcttggtttgcagatttgctggtacggtgatctcaatgatatgaccgagggtgggagggatgtgaggagggaaatcggcaaaaccctggccagccagccagccacgacatag

SEQ ID NO: 7944 - DNA, 443 bp, Homo Sapiens
  misc_feature (325)..(325): n is a, c, g, or t
agtactcctaccgcttcgtgtgtgacgaacactactacggagagggctgctccgttttctgccgtccccgggacgatgccttcggccacttcacctgtggggagcgtggggagaaagtgtgcaaccctggctggaaagggccctactgcacagagcgtgagtctctgggaaggcaccgctggctcactcgtccacgaacacggaccacgcgcagggacggggcttcctgagccacggggggcttgggactgtagagatgttctggtggggaaactgaggcccagaggacagaagtggattgctataagtcacagctcgtcagtgngggggggtgggtcaacgcagacattttaacatcccaggctgtgtttatccactatcggaactgcctttcttaatcagggaagattttagagacagggccaggggtcaggaagtaaagc

SEQ ID NO: 7945 - DNA, 550 bp, Homo Sapiens
gggccaccggcccttacactgtggtgtccagcagcatccggcttcatggggggacttgaaccctgcagcaggctcctgctcctgcctctcctgctggctgtaagtggtctccgtcctgtccaggcccaggcccagagcgattgcagttgctctacggtgagcccgggcgtgctggcagggatcgtgatgggagacctggtgctgacagtgctcattgccctggccgtgtacttcctgggccggctggtccctcgggggcgaggggctgcggaggcagcgacccggaaacagcgtatcactgagaccgagtcgccttatcaggagctccagggtcagaggtcggatgtctacagcgacctcaacacacagaggccgtattacaaatgagcccgaatcatgacagtcagcaacatgatacctggatccagccattcctgaagcccaccctgcacctcattccaactcctaccgcgatacagacccacagagtgccatccctgagagaccagaccgctccccaatactctcctaaaataaacatgaagcacaa

SEQ ID NO: 7946 - DNA, 1004 bp, Homo Sapiens
ctgctccgcccctctctggggcagcagccaccatgttctcgtgtgtgaagccctatgaggaccagaactactcagccctgaggcgggactgccggcgcaggaaggtgctcttcgaggaccccctcttccccgccactgacgactcactctactataagggcacgccggggcccgccgtcaggtggaagcgacccaagggcatctgcgaggacccccgcctctttgtggatggcatcagctcccacaacctgaaccagggccacgagggcaactgctggtttgtggcagcctgctcgtcacttgcctcccgggagtcgctgtggcaaaaggtcatcccagactggaaggagcaggaatggtgaccccgaaaagcccaacgcctacgctgggcatcttccacttccacttctggctgcttcggggaatgggtggacgtggtcatcgatgaccggctgcccactgtcaacaaccagctcatctactgccactccaactcccgcaatgagttttggtgcgccctagtggagaaggcctatgccaaactggcaggctgttaccaggccctggatggaggcaacacatgcatgactgcactggtggacttcacgggtggtgtttctgagcccatcgacctgaccgagggtgactttgccaacgatgagactaagaggaaccagctctttgagcgcatgttaaaggtgcacagccggggcggcctcatcagtgcctccatcaaggcagttgacagcagctgacatggaggcccgccttggcgttgcggcctggttaaagggccacgcatactgccgtcacttgatgtgcgcaaggtgcgcctgggcccactggcttactggccttcttcaagtcagagaagttggacatgatcccgctgcgcaaccctggggcgagcgggagtggaacgggcctggagtgaacctcggagggatggcggaaaggggccagaatgaccgcgcaaaatggcgtgaccggcgagacaagaaaat

SEQ ID NO: 7947 - DNA, 974 bp, Homo Sapiens
  misc_feature (290)..(290): n is a, c, g, or t
  misc_feature (304)..(304): n is a, c, g, or t
  misc_feature (315)..(316): n is a, c, g, or t
  misc_feature (338)..(338): n is a, c, g, or t
  misc_feature (340)..(340): n is a, c, g, or t
  misc_feature (360)..(361): n is a, c, g, or t
  misc_feature (380)..(380): n is a, c, g, or t
  misc_feature (388)..(388): n is a, c, g, or t
  misc_feature (390)..(390): n is a, c, g, or t
  misc_feature (392)..(393): n is a, c, g, or t
  misc_feature (395)..(395): n is a, c, g, or t
  misc_feature (397)..(397): n is a, c, g, or t
  misc_feature (409)..(409): n is a, c, g, or t
  misc_feature (424)..(463): n is a, c, g, or t
ccttacggctaggtacgaggctgggtgtcgaattcggcacgaggaaaaaaggtaacatggtatgaagcattaaacatgtgttctcaaagtggaggtcacttggcaaagcgttcacaaccaaaatggccagctctttctggaagatattgtaaaacgtgatggatttccactatgggttgggctctcaagtcatgatgggaagttggaatcaagttttgaatggtctgatggtagtacatttgactatatcccatggaaaggccaaacatctcctggaaattgtgttctcnttggatccaaaagngaacgttggannaacatgacaaaaatgcagactncntcgttaagcgcactggtgcnntatttgggttaattagaanccgttacnanannananttccccttaaanacaaaggctggtttnnnnnnnnnnnnnnnnnnnnnnnnnnnnnnnnnnnnnnnntttccttttaaccattattcatcaagatgtccagcagcaaaagagaatgggtcacggtggatccagtacaagggtcactgttacaagtctgatcaggcattgcacagtttttcagaggccaaaaaaattgtgttcaaaacatgatcactctgcaactatcgcttccataaaagatgaagatgagaataagagtttgtgagcagactgatgagggaaaataataacattaccatgagagtttggcttggattatctcaacattctgttgaccagtcttggagttggttagatggatcagaagtgacatttgtcaaatgggaaaataaaagtaagagtggtgttggaagatgtagcatgttgatagcttcaaatgaaacttggaaaaaagttgaatgtgaacatggttttggaagagttgtctgcaaagtgcctctgggccctgattacacagcaatagctatcatagttgccacactaagtatcttagttctcatggcggactgattgtcct

SEQ ID NO: 7948 - DNA, 1099 bp, Homo Sapiens
cgcacggtccggaagtcgccgaggggccgggagcgggaggggacgtcgtcctagagggccggagcgggcgggcggccgaggacccggctcccgcgcaggacggagccgtggctcaggtcggcccctccccaacaccaccccgggcctccgccccttcctgggcctctcggtggagcagggacccgaaccggtgcccatccagtccggtgccatctgaagcccccttcccagaaaatgagccacagagcaagctgaccccagcgacacagccccccagccctactgtatttccgttcctatcaaaaaatggatgactcggagacaggtttcaatctgaaagtcgtcctggtcagtttcaagcagtgtctcgatgagaaggaagaggtcttgctggacccctacattgccagctggaagggcctggtcaggtttctgaacagcctgggcaccatcttctcattcatctccaaggacgtggtctccaagctgcggatcatggagcgcctcaggggcggcccgcagagcgagcactaccgcagcctgcaggccatggtggcccacgagctgagcaaccggctggtggacctggagcgccgctcccaccacccggagtctggctgccggacggtgctgcgcctgcaccgcgccctgcactggctgcagctgttcctggagggcctgcgtaccagccccgaggacgcacgcacctccgcgctctgcgccgactcctacaacgcctcgctggccgcctaccacccctgggtcgtgcgccgtgccgtcaccgtggccttctgcacgctgcccacacgcgaggtcttcctggaggccatgaacgtggggcccccggagcaggccgtgcagatgctaggcgaggccctccccttcatccagcgtgtctacaacgtctcccagaagctctacgccgagcactccctgctggacctgccctagaggcgggaagccagggccgcaccggctttcctgctgcagatctgggctgcggtggccagggccgtgagtcccgtggcagagccttctgggcgctgcggggacaggagatcctctgtcgccccttgtgagctgagcttggttaggaagc

SEQ ID NO: 7949 - DNA, 796 bp, Homo Sapiens
ggggggaaccttaaggctaggtagcgaggcctgggtgtcgaattcggcacgagggcagcctgtctcccacgtgtggtggctgcttcctgtgtgccctggggttggctcttgtggaggggtgggcactggctttggaacacctccctccccttcctcctctgccacccagtgccttctaaagggcagcagaaagaggcctgctaggcagtggggtggcggaggccaccttccttctcacaaatacttcttggccctggccctgtgctgcccgggcaggtccccaggctcaggggctgagaggctgcttactgctgcaggtggaggccccatgccggagggagagcggggttccccccatgcctctccagccctcctgctgcccacggccccaagcccaagcttgtgccggtcattacggccttgcctaagctggcagggacagctgcgtgtgatgctggtggagatgccagatgcccgcctgccctgtgaggaccggctggcggggttgtgggctggcggggctgtgggaagggggctgccgatcatggtgaacaggggacatttctcattgggtcctcggggtccgtgtcctggtactcggcgtccaccggtgcagaaacagcttgccctttggtcttgccggacaccagtgcagggcgggtgacgaccggttagggctctgacatgggtcacagcgactccgagccgagggatgtccggcagctctgtgcctctgaggccttggcctgcttgggggcaattctgtccaagccttaggggctggggtccatacccg

SEQ ID NO: 7950 - DNA, 1218 bp, Homo Sapiens
gcatagtgactatagacacggttataaaagcaggtggtaccggtcggattcccgggatatcgtcgaccacgcgtcgccacgcgtcgccacgcgtccggcggcggtagattagggccgcgggtcggagcactcaccgtcgctctttcatctcttctggggcaggggccaggccaggttttacacatccataagtagaccttttggagcctcaccagccaattcaatggcgtcctcttctactgtgcctctgggatttcactatgaaacaaagtatgttgttctcagctacttgggactcctctctcaagagaagctgcaagagcaacatctttcctcaccccaaggggttcaactagatatagcttcacaatctctggatcaagaaattttattaaaagttaaaactgaaattgaagaagagctaaaatctctggacaaagaaatttctgaagccttcaccagcacaggctttgaccgtcacacttctccagtgttcagccctgccaatccagaaagctcaatggaagactgttggcccatcttggagaaaaagtgtcccaggaactgaaagagcctctccataaagcatcgcaaatgctcctgagccagccagtgacatatcaggcatttcggcgaatgtacactggagagccacagttcatgccagcggctggaataagattttggtgcctctggttttgctacgacaaatgcttttggaattgacaagacgtggtcaagaacctttgagcgcactgctgcagtttggcgtgacatacctggaggactattcggcagagtacatcattcagcaaggtggctggggcactgtgtttagtcttgagtcagaggaggaggaataccctggaatcactgcagaagatagcaatgacatttacatcctgcccagcgacaactctggacaagtcagtcccccagagtctccaactgtgaccacttcctggcagtctgagagcttacctgtgtcactgtcggctagccagagttggcacacagaaagcctgccagtgtcactaggccctgagtcctggcagcagattgcaatggatcctgaagaagtgaaaagcttagacagcaacggagctggagagaagagtgagaacaactcctctaattctgacatttgtgcacgtggagaacagaagaggtgcccgagggcatggaagaggctgctgtggcttctgtggtcttgccagc

SEQ ID NO: 7951 - DNA, 654 bp, Homo Sapiens
caaccaggtggaactacagctggatgaggccaggaccacctatcggaggatcctacaggagtcggcgaggaaactgaatacacagggttcccacttggggagctgcatcgagaaagcccggccctactatgaggctcggcggctggctaaggaggtatggctggctgaccacgtttgaggaaggctacgtgctgagcctggccctggattcttctgtctctatatggagtgagagacaaaacaccagaccctgagggcagagccctgggctagacctggctggtcggaaccagctctgtgggctcaggaggttcctttaccacgtgggctctgggcttatggtctataaaatggtgagggtggctgtgggagaatatttagttcagccctgctaatgtttaagtgccttctgtgtatcaggaatcaggctttagggtatatcagatatgtcagttctaacatcctgttgttttcatctgcgcccatttcctcttccctctggttcatgtctctctactgaatcttttctttgcttactcctcactcttttccccatcccacacccctgttttctgtaacaaattacttttaacaaataatatgtgttcaccattggaaaaacataataaaacaagaaggaaacaaaaatcaccc

SEQ ID NO: 7952 - DNA, 704 bp, Homo Sapiens
agaacctacggctaggtagcgaggctgggtgtggaattcggcacgaggccgtcctggtgccttactgtgcatacagttctactcgtctcagaaacgtatgtcaaacgaggatacagtgtctggaactattggttctaagatataagtggaatgagcctggatcaggagaagtatgctgagctagagttgaaggaagcttctctttctaacaagagaaagcagagttaaattatggcagagacaagtctgttagaggctggggcctctgcagcctctacagctgcggctttggagaacttacaggtggaggcgagctgctctgtgtgcctggagtatctgaaggaacctgtcatcattgagtgtgggcacaacttctgcaaagcttgcatcacccgctggtgggaggacctagagagggacttcccttgtcctgtctgtcgaaagacatcccgctaccgcagtctccgacctaatcggcaactaggcagtatggtggaaattgccaagcagctccaggccgtcaagcggaagatccgggatgagagcctctgcccccaacaccatgaggccctcagccttttctgttatgaggaccaggaggctgtatgcttgatatgtgcaatttccacacccacgggccacaccgttgtgcacctggagacgctcaccagggtcccggaaactgggaaatgtttgggccccgt

SEQ ID NO: 7953 - DNA, 682 bp, Homo Sapiens
acaattatcggctaggtagcgaggcctgggtggtgaattcggcacgaggctgcagcgagagcgcgcggatctcagcgcgggagcagtgcttctgcggcaggcccctgagggagggagctgtcagccagggaaaaccgagaacaccatcaccatgacaaccagtcaccagcctcaggacagatacaaagctgtctggcttatcttcttcatgctgggtctgggaacgctgctcccgtggaattttttcatgacggccactcagtatttcacaaaccgcctggacatgtcccagaatgtgtccttggtcactgctgaactgagcaaggacgcccaggcgtcagccgcccctgcagcacccttgcctgagcggaactctctcagtgccatcttcaacaatgtcatgaccctatgtgccatgctgcccctgctgttattcacctacctcaactccttcctgcatcagaggatcccccagtccgtacggatcctgggcagcctggtggccatcctgctggtgtttctgatcactgccatcctgtgtgaaggtgcagctggatgctctgcccttctttgtcatcaccatgatcaagatcgtgctcattaattcactttggtgcccatcctgcagggcagcctgtttggtctggctggccttctggctgaccaataaacggcccccata

SEQ ID NO: 7954 - DNA, 917 bp, Homo Sapiens
gaatgtcacccggcttagctagtgggtgatgatggatcaatgtggatcctgatttcaacactggggatgcaatctggtgctaagtgtgtgttccaacccactgtttgaagcaacgttgcctgttataaagaagacatttttagctgtggagcctgatgtttctttgggctgctgactggagtaatgcgtgttaggctaacgtattgtgaaaaagcctgctatgagtttgggtgtcattcagggtccccaagtgtattcacaggtaagaatgaggtgagaaaggaccaccggggaaaacttatctgtctctagaaagtttcatatctctgaaggtggatatggtcaggaaacacttgccagaaaatcaaggaaagttggctgagaatttgtctacactcaccagaagttggattctgtcccctcaaaaggagcttccccaatgaaatgggcaactgctagtccatgtcaccagcagtttctggctagaggatgctgatgctgattacaggaaagatgagatgcagatgcctgccctgcaatgaacagggaaagtcacggaacaaagcagggtggactgtggtcagctgtgacccagcattccacaggagccagacctgaggctcaaggctcccgggagtgctcagccgaccattgcgcctacttacagcactggcaagaggtgaaaaccaacacaaggccgagaaaactagcctgcacactgcaagctggttctgccactacgcagcccgataaacttcctaacgtcttgagagatacgttccagcctcacaatggggaatgggacccacctagcgacggtgacgaaaggacaggggatagataacacgcaaggacaacctgcgaaggacgaaatggagcaataaaacaaccgaaaaaagcgcagagatctacccact

SEQ ID NO: 7955 - DNA, 782 bp, Homo Sapiens
cgcgccaagattaggagaggaagccaggggcccgcactcatgccacctgccaaggtagtgtagaattcaggagccgggagacaaagctgggcttccggcttggggtaaggggaaagggagggttcagaaagaggaatcgaagatgttgtagtgacacagaaggaaatgctactgagaactacaccccgattggctgagataggacacttgtgcagcagatatgccaatgggccatgctttacttgtggattggtaagaatcaccagggaaccattaagccccaatagctacaaggagggtggttaatctgctatatcaaactccttccctgaaaccagcaaacaccgggaaacattttggctcattataatccggtgaacaatgcagtcaggcctgttataaccgctgagcagccacacttcgacctcctgggtgctgtagtctgtgttggtacaggcttctgcatgcctggtaaaagctcagccaaggctggtcaaggcaacatctccacacagaaaatctgcaccagttatgtaagctaaaaagctgtgtgaacccaggtgtcccggaaaggggctgcaggacacagcaaaatgccagcagcatgccggacccctcccttccatcctcctctccaaagaagagaggtcaggaaaaacactggctgggacgctagaagggtcatgtgttaactataatcacatttatggtttggaaccatcaccccaaggtaacaacaagaataaaaggtattcccagtacacctgcggataataatgcgt

SEQ ID NO: 7956 - DNA, 710 bp, Homo Sapiens
ttaataggcatggatgaacagtgtctaattagaccagtgtgatagatcacttatcttttatggatttgagccttataactgatgtagtatcttgacttcataacactgacatctgttgtctgtgataaccacttctgtatcgcgtcgttaaccacttgctgtattgtgtggtcttaactgcctaaggcggcaatgggtcagtgggcccctttcccttaggatgggtatcaattcaacaatatttataaggcatttactgtgtgctaagcatttggaagacccaggctacaaaataagacatagttcctgccctccaggccagtcagagggaggcacaaatacccaggaatctctgatgggtgtgaagtgcggtcgtgggccacagaaaatgaccgtcatggagaccctgctaaaggtcggaccctgagcccaaaggggtattctagaagtggagatgattttggccccactcatagatgggtggcaaatctaagagttgtataaagcatataaaatagggtgatcacccccgaggcagaggggccagcatttgcaaaggcacagagctaagaggagctgggcaaagaaaggaaagccagggaaggtggtgggagatgagtctcaaagctaagtagtggaagctgggcacagtggctcatgcctgcaatgcccagcagctttgggaggccaagtaacggcggtgactgagg

SEQ ID NO: 7957 - DNA, 1083 bp, Homo Sapiens
  misc_feature (741)..(757): n is a, c, g, or t
gctattttttacagatttactcaatactttgtatctggttattatgcctcttattctgtaattattttttattatgaattatttatttccagatctgtctggcctataaggcctgtaggcactataagggggagtactgcgtcaccttcatctttttatccctttggccttgctccgtgcctgaaagctcaccacactggaacgtccaggtgcacatgtgccactggacaccgggatgttgccggatgctcttttggacgctggaatgctggtgcattgttgccggatgctggaatggtgcacgcacgctctgttggacgctggaatgctggtgcattgttgccggatgctggaatggtgcacgcatgccctgttggactctggaatgctggtgcattgttgccaaatgccggaatggtacacggatgctctgttggacgctggaatgctggtgcattgttgccggatgctggaatggtgcacgcatgccctgttggactctggaatgctggtgcattgttgccaaatgccggaatggtacacggatgctctgttggacgctggaatgctggtgcattgttgccggatgctggaatggtgcacgcatgctctgttggacgctggaatgctggcgcatgtgccctgttattggcatgagctgtagttcaaacctcagccatatgatgcttgaatacccaaaccattcgtggaaatgtgtacttcttcctgctggaattctannnnnnnnnnnnnnnnnttttaactgataggggaagtgaggtgcagggggcggaagaacatagcaattagccacatagctaaaaacatactgggccaaaagaaaaccaccatgattaaaacacagatatcaacatcggcctcacgaataccaggaaacaaagggcgaaaaaaagatccgtagaaagcaagtgttcccattagtcacaacccaaaggaaattgcggtagtggcaagaaaacccaaaaatctgtcaaagcccgctaacagaccaaccttattaacacaaccaaatgggatcgacccaaccctgtttatacccatggcagacacactatagtaaca

SEQ ID NO: 7958 - DNA, 710 bp, Homo Sapiens
atgtcacggacgtaactccttaaatctttggaatatcctgataggggtgtctgatttcataacaactcttgttcaccacatttgtttaccctaatgaggtgactcttgggggaccccaaggtagcttatagggtgggagcttgttgccagaggaaccaaccatgtaattagagaggaacttccagcccccctcaccgcccccactcctgggaggggccagagattgagtatgtgttcaatacaccaatgaccaatgacttaatcaagtcatacctgtgtaatgaggcctagataaaaacgtattgggcatcaggagttggggagcccccaggctgggggagcccccaacggtgctcagagatcaggtgcccacctccccacatctactacaactgaagctgaacagtggagctatccttcactaaataacgcactgaattgttacgtaaagcacttccctagtagccccctcgagagagatgtatctaggatgacatactcgaaggggagatagtacaagttctacccaaaattctgccagataggttagcgaattgaggtgctgggatagaccttagggaaaccacaagtaacagctgtacatcaagaaagttcgcgcagcagcaatcgcttatgggacagcaccctatcacaaacaaggaactgtgaacctccaggacgacaaagtcagcaaaaatgtgtgaaaaccc

SEQ ID NO: 7959 - DNA, 948 bp, Homo Sapiens
  misc_feature (13)..(13): n is a, c, g, or t
aattgctctgaanccctcctggagtatggaaaacctgtaagaaatgatggagatcagggaacaggccttggggatcctggagcggggtcacagtgagcattcggtcagccggggagacagacgccacaaagctcagcaggggctcagtttctggcctctcttcgccaccactcagtcctttcagctcctgggtgacctgagcctcagtcgccagccaccctgctcttgtgccagcgccacctccagctccctccttggtttgctgctgcaagcgtctacgggctcgccgccgcccttgccacactcggtgccacaaggcacagcgccagctcgctgaggagggcagggatgcccccttccctgcctcaccctgagaccattcttgggctgcctcatgtcccttgggcccccgctctgccagggctgcgtggctgggctgcccctcttctccaggggctccatgctttccatgtggtcaagggcaggtcccctggctgcccagggctctgcatggcccagtcctgcaccatctctccaacctctataaccatctacttctaccctatcttccccaaccgtcccctgcacatccctgactgctacctctttcccctcctcacagcagttttatctgtccatctacttagagtcttgtgcttgttccctccctgagaggactccccagttcctacttccttctgaccgggtactcttaggttgcctgttcctatatggcaccccagtgcttccctgaatacctgccccagtcagcacgtgagcttgggtgtaaggggtgcacgggtaaagggaccggcggtaccgaaacacggaagctagggaacttggctgcgaaaaaggccgcccgaataccgacccgaaggtacgcgctgtctgaggctcggaacatagctctgcgacgcattataagccgcacccgcgagtacaagc

SEQ ID NO: 7960 - DNA, 892 bp, Homo Sapiens
  misc_feature (65)..(103): n is a, c, g, or t
gcaccatggccaccccaccggggagggttaaaagaaacctttcggccacagccccaggagcccgnnnnnnnnnnnnnnnnnnnnnnnnnnnnnnnnnnnnnnncgtggaagactcctcctaccgagcctcccaggcgctcggcgtttgcataaacaagagagctggagaggctgccctcaacagtgcgctggggaaaggggagggaacgtgacaggcaggtgtgggatagggacttctcttccggtcagagcaagggtcgtccgaaaccaaaacaaccctcttcccttcatctcgccccggatccaaagtcttggggctaggctggggcgggagtggcacggagatgtagggcgccccttttagctgcacagaacgaaagaactggttttttctttaagtgagtgtgcttgggtgacgcttagggcgccctccgcagtgcgcgcaggaaagcgcactgaggctgcggaggcagagctgcatgctgggtgcgggaagaggtgggcgagaagcaaaagaaggaagattgggagcgcatggtttagggtggggtggagtggaagggcaaatggggaccatactagactgcagaactaactaaaagggcacggactcagcgactccgcgacggagcctgcctgggtgagggagtctctgggacgcagggggctcctgtagctggcaggttgctgggcaggagggggtcacaaacacggcagggaagtctcgtcgctgcgaaggggacgcggcatccatctctcctcgggaactttgaaaatgctcagttctggcctagtctccgctgggccgccgccgcgcctccccgggccaccccacgtccgccacgccccccaggccctggccttccggacgcgctctccgctctttatcttc

SEQ ID NO: 7961 - DNA, 974 bp, Homo Sapiens
aaggattcggctaggtacgaggcccgggtggttaattcggcacgaggaggagggagtggaatggccgcgggcggctcgacgcagcagaggcgacgcgagatggcggcagcttcagcggcggcgatctcaggagctggtcgctgtcggctaagcaagattggagctactcgtcgtccacctccagctcgcgtaagggtggctgtgcgactgcggccatttgtggatggaacagcgggagcaagtgatcccccctgtgtgcggggcatggacagctgctctctagagattgctaactggaggaaccaccaggagactctcaaataccagtttgatgccttctatggggagaggagtactcagcaggacatctatgcaggttcagtgcagcccatcctaaggcacttgctggaagggcagaatgccagtgtgcttgcctatggacccacaggagctgggaagacgcacacaatgctgggcagcccagagcaacctggggtgatcccgcgggctctcatggacctcctgcagctcacaagggaggagggtgccgagggccggccatgggccctttctgtcaccatgtcttacctagagatctaccaggagaaggtattagacctcctggaccctgcttcgggagacctggtaatccgagaagactgccgggggacatatcctgattccgggtctctcccagaagcccatcagtagctttgctgaattccgagcggcacttcctgccagccagtcgaaactcggactgtaggagccacccggctccaccagcgctcctcccggagtcatgctgtgctcctggtccaggtggaccagcggggaacgttgtggcccccatttcgccagcgagagggaaaaactctaacctgattgacttggcttgggtcagagggacaaccgggcgcaacagggcaacaagggccttcggctaaaagaggagtgggagccatcaaaactcc

SEQ ID NO: 7962 - DNA, 1085 bp, Homo Sapiens
aaaataagaaaaaaataggctaaggtacgaggccgggtggttaattcggcgaggatgacttgtggctgaaattgcgcacaatgcaagttatctccagtgacaagagtgccttctgaagcaaccatcgcatcttcatctagattgacactctactaggctgactactgtaggtaatacaccactaatcttcaatccacctcacagagcaactatcaaacgcttaaatcctctttacatcatagactttcagctacttgaagatagccatcagccgctacgatgactcttttctcccggatctccctaatactatgaacgcggcatgagataacggacaagctcggcctccattccctccgcatacagaacactggtcgacattcaggctacttgtgccactactggacagtggagtcttatacgaaggcctgacactggctcgccaaccagttccagaaccagaactgatcagaaggatctattctttgtgccttgtggccacatcagctagcctctgctgtgtgcacagtgtaacgatgtgtgctgggagtgtgaggcagcattatctcacagtgccttatccatgccataagaaaagcaggtgttacactactaaggaaacccaggagttaagttttaaaaccaccactcttccatttcagtcaggctttagactgatcatattagcaattgatggagaagtccacaagggcttgcttggtgctcgaaggccagatgcgggcttcatggcaggcgagttggagcgcgagactgagttcagctgttgcaatcctggtcatgacgatctggagccctgtcacatcttatgcattcctatccgtaacaaggaaggaattgtccctcctttcttttaccaccatacttttacgtgtccctttgcatgttaataaattgttgataaaaaaatctaatatatgagccccatacggtcccaacttgaggtaggatcgaattaacaaagaaccttcgctctagggtcagaacacacactagccctaatatacattggtgcaccacataaattatttaggacatatcacatcccgatatcagaagaactccca

SEQ ID NO: 7963 - DNA, 863 bp, Homo Sapiens
cggcgccggaagcacgggtccgggccctcccgcggggcgggtactcgtctcccggccgagcgacttcagctcggggacctgccccatggccgctccccagcaggacagggtaaccgccgaggtggggggcttcttgtccgtcccagcccccccaactcaggccctctcgctgcccctggcgaccaccgcgtgcgcccttccccagggcgggcgcagtcctggacgcctccgccgagcgtgactgcgtgcattttctctcctttcccttcccaacctgcggagagaagacagccccagagccgctgtctccatcctctgctgatgcctgctgtctttatgttggcctcgtcgtccgcactgcagtgtggcaggggcgtccctcgtttcccgcggactgaggtgggcgccgggcattcagtaaacgaagaaaccaaagcggagaaggttgggaatcaaacgtctgtcatacctgccaccagcagacaagcggctttgggtacctcctggacccaaagacgaactcagcccctccaggagcgcagtcattggcaccctcgtgggaacaatgccagtgggatgggtggccaccggatgtttccggggcccctcagaggcccagcagacgcaggtcttggagaatgaatgtgggtcactgggccgcgctgcagagggccggtcctgagtcgcttcctggaggagaaggccccatgggccagcacttggcttcgcctggagggacacaagcacgtgctaaaccacgagcggccagggttgtctgttgataacagatgctggctttgacacaccaattgacaaagtctttcataggttgggagctgctaagggttgtgcccctggccctc

SEQ ID NO: 7964 - DNA, 329 bp, Homo Sapiens
cgccgccgacgccggcgccggctgctaaggggctcggcccgcgagcgcctgctgccgcggacgatggtgaccgtacgggccgggccgctgccgctgccgctgcctccgcctccccagaagcaacatccgaggctcggcgcagaagagccgccgctgtgagccgtgccgtaccggcccccgccgccgcccgaggagaacgggagggcgggcgagagagccggggagttgcggagcccgcccgccggcagcgccgctccccagggagggagtccgcagcctgaggtcttctccactaagaaaacacggcaaaaaaggaaagaaaaacatgt

SEQ ID NO: 7965 - DNA, 923 bp, Homo Sapiens
  misc_feature (60)..(69): n is a, c, g, or t
  misc_feature (104)..(115): n is a, c, g, or t
  misc_feature (119)..(133): n is a, c, g, or t
  misc_feature (138)..(158): n is a, c, g, or t
  misc_feature (249)..(270): n is a, c, g, or t
  misc_feature (652)..(661): n is a, c, g, or t
  misc_feature (742)..(752): n is a, c, g, or t
gtatggtggggcgcgggtgggcgcccgcaccaacaaagaaagggtgttcttcaaaaagannnnnnnnnncttgggggtggggagagcgcccccccaccccaagnnnnnnnnnnnncttnnnnnnnnnnnnnnngtttnnnnnnnnnnnnnnnnnnnnnaaggcgggaggaggggctgtggttttgtcccatgatgcttttgggttggggagttgtgtttggccccgggtacctgttgtggggttgcacnnnnnnnnnnnnnnnnnnnnnnaaaactgacataattgtgatttattaacatgaattaaaatgcccaaccagtgcttcagtgtgacagtatatttaaaataaaaaagaaattaaaggtcatatactgtactactttcacaaagatcacacagttttgcaaaagacttgtcatatgtacaatgctatatatcaaatgagaaaagctgtaagcaattatatacgcaaaagaaatgcagtatttacagtttgtcaggagacattagaaatcatctatacattaaattacattttgcttgcaaataactggtaaaacaaaatgagccatgtccacaccaaaatataaaaatctgtattgcatttttatacctaagatgcattcacagaactgctgctgacaggaaagnnnnnnnnnntcctcatagtgccattacttagctgagtacttaatgtgtatgtattaaataatagaacattcactaaatgaatttaacttnnnnnnnnnnngatcatacagcatcaaatcagcatcagatctgccagaaaaaaacagctggaatgttcacttacaaaataaagatacctaatactggcttaacagcacattttttaaaggaattttaaaaagcaaaaatgagaaaaatacaacgaaagagcactggtgttttttatacaaag

SEQ ID NO: 7966 - DNA, 509 bp, Homo Sapiens
ggagcagtggtataacgcagagtcccattacggccgggaaatcaatttctgtacagttagtaattttaataatgtggcccttttcctagtccctgcaacctgtttcataaagtgcaatggggaaagcaggactgttgagcccttttggtgttgcgagttgaagttcaaggtttctaaaatgttgtcttgtattgaaaggagctaatgccattataaatgttactagttttcacatttcctaagcagcctagagtacagggtgagcatttttagatctcctaatgatgtattgtgccgtggaagtactgtgtgtgaatagcagtagtgggggcaaaagcaatcttctcatttggaaatgttgtaaataattttattatatagtgttttggatgtatttgttgtagaaatggaccagtgaataaagagaatctaaggatttgtacaatgtgaaataacgtgttaaataaatgtcattgtcatagaacataaagttatgttattggtaaggg

SEQ ID NO: 7967 - DNA, 427 bp, Homo Sapiens
atgtgttacagatgcagtgcaagctgtttgtctttgacaagacctcacagtcctgggtggagagaggccgggggctgctcagactcaatgacatggcgtccaccgatgacgggcagacgaccgggagcacatagcgccgggagcccggctgcacaccaggctgctgctttgtccgtctatccacccgcccacccgcccccaccccaccggcagcgtccaggtgcggggccgggaaccacacaccccactgggccggccacagtctggacccgcacgtcctgttcaaaagcagactcgggaactgcctgaatgtggtttgggacacgagacctcatcatattgatgagcgaacaaacaagaacatttcctccctcccctcctttgaattgaaatggcacattaagacttgtcacggcttctcactggg

SEQ ID NO: 7968 - DNA, 632 bp, Homo Sapiens
  misc_feature (55)..(55): n is a, c, g, or t
tgccagcagcaccacttccctgtggtatggcacaagacggtagaagggagaccanagttatcaaggaaatggtataggattttgaagcaagagcacccagagttggcagtcctcgcagactcggttgaccttcaggagtccacagggatagcttccgacagctccagcgactcttccagctcctccagctccagttcgtcagactccgactcagagtgcgagtctggatccgagggcgatgggacagtgcaccgcaggaagaagaggaggacgtgcagcatggtgggaaacggggacaccacctcccaggacgactgtgtcagcaaagagcgcagctcctccaggtgacccagcaaggctgttgtctgtatggaaggacacgctcgcggcaagggcagggcctggggagggtggcctgtccagtcctgcagacaaggggaggcctgacagagcccaagaatgaggacaccctcggcacgggaacccattcacttagcgtttgctccagtagctttccctctgctaccaatgcagataaacgcggcttgttttactcaggcaagagaatgtgaatagtgccaagaaaatcctttacattatttaataaaaattgaatccattttctataaaaa

SEQ ID NO: 7969 - DNA, 504 bp, Homo Sapiens
ctatagcaaagtttttctatcaattttcccccatcccatccccaccctggactcatttgagaagacttgagaaatgtcttaatactcacactgctgcatgtagctcttgcttatttactgggtctgggaaacaggatgtgtttcctttttttaaaagccaattgacagattacacctaaatactcctccttttgtatcattcagccttttgttttagtttggtaagttttaagaaatttcagcagcaaagttgttattcagtgggcacgatggactccaaatgcctcaagttatgtatacctgtcccagatgtaaacttcattgtcctttgttggatgatattttaaatggatataaaataaattggtctaaagggctgccctccttgttgtgtttttaaattttagttaaaaactgctacagcttatgactttgtactttaagataattgtattgatcttttttcagattccttgtattttttaataaagtaatcttaagtac

SEQ ID NO: 7970 - DNA, 387 bp, Homo Sapiens
ctttcagtagcaggaatggcattgtttaaaaagctgatggcagggtaagcatttgggttagtgttttattaacatatttgtaagtacttgttcattgtggaaatgtgtccttgactaaaaccatacgtggctatggaaaccatgtttgtagttctgaatacacaggttttgtgtgtatttactctatgtattaaattattattgcccttagtttaaagtaaggattacaattggatttaagtagatcactgaatgttattgtttatgaaacttaactttttgtatgctgcttataaacatgatctataaatcagtgcttgggaaaattttactttcttaatctactgatacaggaataaaatatgaacaattaaacaggttgatcct

SEQ ID NO: 7971 - DNA, 930 bp, Homo Sapiens
aaacacgatattcggggccctaggagatgcgaggcccggtgtttaatcggcacgagggattacgaattcttgtcaaacgggtgctgataatgtattttttcagtaagcacccagaggcctccattcaggctgttttttcagatgcccaaatgcatatttgggcattagaaggtctgtcgcacttagtagcagcatcatttacagaggatagatttggagttgtccagacgacactaccagctatccttaatactttgttgacactgcaagaggcagtcgacaagtactttaagcttcctcatgcttccagtaaaccaccccggatttcaggaagccttgtggacacttcatataaaagcattaagatttgcattcagagcatcactgaaaactgccatctatcgaataactactacattggtgaacatctgaatgctgtgcaagcatctgcagaacatcagaaaagacttcaacagttcttggagttcaaagaatagttaagtaatataaactgtgttcattacactgctgatacaactacagatgggacagtaaatgttcagcattcttggatcagaagaaaacggactaattagatgcttcctttgtcgtggtggttgctttgaaaactatactttaatgggagaaactcatggaaaagaacttctccaacaaggaaattaatctggaaaaactggccttttgtctgtaccgatttgctttttcgtgtgtggtgggtcataattaaacatctttcttcaatttttactaagggaacaaaagaacccgagggcgctctattacggggtgggaaaaggccggttatgcactggccctgggtctagtggtcccggacccagttttttgtcaagtggcaatttgccgctcccaaaagaggcgatatcgagagccagtaccgtagacccgaca

SEQ ID NO: 7972 - DNA, 1088 bp, Homo Sapiens
aaaattaaggtctaggtacgaggccgccggtttaatcaggcacgaggctcccatcttggcgatcatcgccaaggccacaatcgaggtaatccaacagtacagcagagacaggctcatctatactggaagtactgcaagcaacatgcccagcagcagcaagaccaagcctgtgctacagctctctaagagcgcaactgagtagtataggcgtggtgagaccccacactacatatagctcaaaactagacccacctacagtccaggcacatgtgttaaaggctgctggggaagaatatggagaagggtcagcacctgggtatcctcttacacgcaaagaacgtgatcgacaaaagcagaagagcatgtccctattgagccagcagcccttctatatcgctggtgctaacatgtctgaaagggcaggatagaacaacgcgagggactccttacctccctctacagccaggctgcaaccagatcgtgaataactcggcgagatgaccagtacttagatgatagcaaaccaaagcagcatatgcatgaggcactcaaaccgcggctcaacctagctgagggggcatgtaagacacggagcagacgcagcacccagcagaccacagagagtgagaccaatgctccatcctgggagatcatcaaacagaaggcacatgtcgacaatgcagacccagcaaatgagctcattcaaataaagtgataggaacatgcgaagagacagagcccatacaaaaggagaccatagagcctagcagaccatgaccaagacaccacgcaaagggaagcaatggagggaacacaagccgggcataacatagaccccatgagcaaggaagaggcagaagaagacgaaggaagaagacagccagacgaaacaggacatggacaaaaggatacagccaagcatgaagacacaaatgacccaacgacgaagaacccgaaagatgcacaccaccgtggtgtaaacccacacagagagatccccgaggagcgaaaaccaaagggaacacacaagaaagagaggacacagaaaaacaaaccagaaaacaaaggagggacaacgggtacaccac

SEQ ID NO: 7973 - DNA, 905 bp, Homo Sapiens
gccgcgcgcggcatgcagaagcttcactgagcgggcactggaggtcgcgagcacgttgctagtgggcgcggctggcggggccgggggcggcagggggctagcgtccggctgagcccggcgggttcctgcacgcggacccacgctttgtcgggctgctctgctgagtgacaccgccgtggcatccgaggagctgtggtccagcctgcgcggcgggaagcggcggcggcggctccagcgtcctaagagaagctgaaacctatcaacactcttcaaaatgcaatggaatgtaccacggactgtatctcgactggcacgcaggacatgcttggaaccacataatgctggtctctttggacactgtcaaaatgtaaagggacctttacttttatacaatgctgaatccaaagtggttttggtacaaggccctcaaaaacaatggttgcatttatctgctgcccagtgtgttgcaaaggaaaggaggccattggatgctcatccaccccaaccaggagtccttcgccataagcaagggaagcaacatgtttcattcaggagggttttttcatccagtgccacagctcagggaactccggaaaaaaaaggaagagcctgatcctttgcaagacaaatctattagtctttatcaacgattcaagaagacatttagacagtatggaaaagttctgattccagtgcatctaataacttctggtgttaggtttgggaacattttattatgcagccttgaaaggagtgaaatgtcgttccttttctagaactcattgggttacctgacagtgtggtaagcatcctgaaaaactcccagagtggaaatgccctcacacagcataatgcctgtttaagcatggcgacacatgctcggaataccggactttgcgaggaca

SEQ ID NO: 7974 - DNA, 1020 bp, Homo Sapiens
aagttagctaggtggagctggggtttaatcggccgaggagggagtctggggccattctgacttggttgacttaggccaggctccgagcctttctgggcttcaaatacccctctttggggtaagggggaagagactctgagctcttagaggtcctgtttctcgtttgctcgtggggatccaggaaagggagcgactctctccaggccccccggtctctgcctttccgtactggcctcatcccttccctgaggctcctgctccgtgtttctggtgggtccggattgggaccacacagttctgggaaaggcacctgtccccgctcctgagagccgggtggggaaggggaggtggggtctagatgggatgggcagagctgggcgagctcttctttctggaagggaacccaggcactcctcagagttgggaccgttgaacttcaagccaagccaggcaggtgagcctggcccatggacagatcctgggggccaaggtcctcatctcctagatgggtgcccaggcaggcccgtgtctgctggagggttactgagaggcgatccttggctcctcagcggaacagggggttctcctttgttccactggtgcctgggtaggaatgcaaggttttgtcacctgctccccaccctggagcatgtggattgggtgctgtcttcaatattggtgtgctagaggttgcagtacgtactttaatttgttggccttttttgttgagcctgggcaagatagacggtggtggggtagaagcttgttggtgaggacgccaccctgggtgcatggccggatgtctctgggactgaacgggggagggagtgtgatctgctgctcctccaaattcccacaaggactttcctatcatcacttttcacaaagctctaccgctttcataatcgccacatccccgacgtatttgcgtcacatcgcgtctaggcaagggcccaaatttattgcgctcccacaagggggatataggactcttctccaacgatggttctcctgcattac

SEQ ID NO: 7975 - DNA, 919 bp, Homo Sapiens
aggctagtacgaggcggtgttaatcggccgagggttcgtgaagaaaagcgaaagtatgtggaatacttaaaacagtggagtaaacctagagaagatatggaatgtgatgaccttaaggaacttccagaaccaacaccagtgaaaactagactacctcctgaaatctttggtgatgctctgatggttttggagttccttaatgcatttggggaactttttgatcttcaagatgagtttcctgatggagtaaccctagaagtattagaggaagctcttgtaggaaatgacagtgaaggcccactgtgtgaattgctttttttcttcctgactgcaatcttccaggcaatagctgaagaagaagaggaagtagccaaagagcaactaactgatgctgacaccaaagatttaacagaggcttggatgaagatgcagaccccacaaaatctgcactgtctgcagttgcatctttggcagctgcatggccacagttacaccaggctgcagtttgaaaagttggatcttgatagctgcactctttcagaaatcctcagactgcacatcttagcttcaggtgctgatgtaacatcagcaaatgcaaagtatagatatcaaaaacgaggaggatttgatgctacagatgatgcttgtatggagcttcgtttgagcaatcccagtctagtgaagaaactgtcaagcacctcaggtgtatgatctgacaccaggagaaaaaatgaagatactccatgctctctgtgggaaagctactggaccctagttttcaactagggattttattggacgattatgttgattattttcgacaggcaagcaggagttccgggaattaaaagcgaacaactcgaaggaaggggagaagcggtgccaaatcgtacagggaggggaaacttacgggcggacc

SEQ ID NO: 7976 - DNA, 1057 bp, Homo Sapiens
  misc_feature (955)..(955): n is a, c, g, or t
gctggaccggtccggaattcccgggatcagagggtctctgcggccgtagcggccggggctgcggtagccactttagatttgggcaaggactttagattcgggctctgttctgtttccgccgtcctgcttcctgccgaggctggcccaggcagccgcgcttcgaaggacgccgccgggagctgcggagcatgcgtggagtggcagtgctaacggctggtgtctcgcactgttggcctgtgaaggtacgtgaagctgaaagcctggaatggctggaaaggggtcatcaggcaggcggcccctgctgctggggctgctggtggccgtagccactgtccacctggtcatctgtccctacaccaaagtggaggagagcttcaacctgcaggccacacatgacctgctctaccactggcaagacctggagcagtacgaccatcttgagttccccggagtcgtccccaggacgttcctcgggccagtggtgatcgcagtgttctccagccccgcggtttacgtgctttcgctgttagaaatgtccaagttttactctcagctaatagttagaggagtgcttggactcggcgtgatttttggactctggacgttacaaaaggaagtgagacggcacttcggggccatggtggccaccatgttctgctgggtgacggccatgcagttccacctgatgttctactgcacgcggacactgcccaatgtgctggccctgcctgtagtcctgctggccctcgcggcctggctgcggcacgagtgggcccgcttcatctggctgtcagccttcgccatcatcgtgttcagggagggagctgggcctggttcctgggccttcctgctgctgctggccttggggcaacgaaaagggtttctgttagtcagaagcccttcgcccacgccggtccccgggaggggatccctctggtttaggaactgaacgggnttgctggtgggacctctttattttttgggcgggcagcctccatttggccccggaagagaaaaaggggcgctcttgggaaaaaacacctgggccctgtgaaaa

SEQ ID NO: 7977 - DNA, 572 bp, Homo Sapiens
ccctcttgccagttccttctgagcctgtttggcctctgcaggatttgacatttgaatcagccccactttgagccgtccacctcctcccatcatcccctgatcttagccacatccagctccaagcagacattccaggcctccccatcccaacaggctacatacatgtgccagcctcaggaacgctgcgcaaatacaacaggcctcctcttgccaaagcaaccttgcaaggaacaatctaaattccggcccatcaagcaatgcccactccttgaagacagtccaagcatcactacctgtaagcagctttctctgatccagacagggttaggtgcctaccctgctcccacagcttcctggaataggcctgtcctcaaatgcatcactgtatatatttactctcctatctgcctaggcagactgagctcccagcatgggatcccagcatggggtgagcatgaaagagtggcaaacagagtggcataagacagataaaatacaaaaggcaatttacaaaggaccaggaccgcagaggcagagataaaccagtgggctcagacttctgagcgtctcag

SEQ ID NO: 7978 - DNA, 1224 bp, Homo Sapiens
  misc_feature (354)..(394): n is a, c, g, or t
  misc_feature (792)..(976): n is a, c, g, or t
  misc_feature (982)..(999): n is a, c, g, or t
  misc_feature (1005)..(1005): n is a, c, g, or t
  misc_feature (1107)..(1157): n is a, c, g, or t
attttgaaaagcatcatgttctcatgatttatgggaatgaagcaagtactgtaatcacattaaatactgcctgggtcctgggtcagtttgaccctagccctgggggttgaggcaagccccctcctatgaggatgagcaaaaatactactctcttcgccctgagttgctttctggatctgggggcttcaggacttgctgcttcagtcagcctttattagcaccatagactttatgaagatcccacacacagacacacatcccgtcccgcctcccccctgccttcagtaggatctggctccgtggctggaggaccaacccctatagtgggaatgcagagcttaacgtgtactgctnnnnnnnnnnnnnnnnnnnnnnnnnnnnnnnnnnnnnnnnntccgcctcccaccctctccccatctgctctgggtatttttgtttttgtttagttttaggtttacaacagagaggaattaatttatcagcagcctaaaactgttgtgtttttcttatggtttaaaaaacgccatgtcattgataactccctttctcccttcccttctcccggtctgctgatcactctttcatgcctgtgtatccagggtgctctgtttccccaccgttcccaggtgtacgaggcagagggccgggacagctttcctctcagtcattgttcaccccacttgaaaattcagacaagaaaactttgcttaaaagatttcatgtgtgggaaccacagttcctggctgcctttctcctgtgtatgtgtaaattccttaataaatattgcagggnnnnnnnnnnnnnnnnnnnnnnnnnnnnnnnnnnnnnnnnnnnnnnnnnnnnnnnnnnnnnnnnnnnnnnnnnnnnnnnnnnnnnnnnnnnnnnnnnnnnnnnnnnnnnnnnnnnnnnnnnnnnnnnnnnnnnnnnnnnnnnnnnnnnnnnnnnnnnnnnnnnnnnnnnnnnnnnnnnnnnnnnnggattnnnnnnnnnnnnnnnnnnaaaaantttaaaaaaacttttgggcggcgcccgcccccaaggagagaaaaaaacggctttattttttcccaaaaaaaaccgggggcaataaagggtggtgttcccccnnnnnnnnnnnnnnnnnnnnnnnnnnnnnnnnnnnnnnnnnnnnnnnnnnngggggtccgggggctatttgggatgaattaacgagaaggggcccaccgccttctaaatatttatttt

SEQ ID NO: 7979 - DNA, 614 bp, Homo Sapiens
  misc_feature (111)..(244): n is a, c, g, or t
  misc_feature (257)..(320): n is a, c, g, or t
  misc_feature (326)..(480): n is a, c, g, or t
  misc_feature (487)..(496): n is a, c, g, or t
ggggctgattaaagtttctataaggtatgtttattcttaaggatatctactctaacacctgtaaatgtagggtgatcaattagtaaattaataaatctcaatcaattaatnnnnnnnnnnnnnnnnnnnnnnnnnnnnnnnnnnnnnnnnnnnnnnnnnnnnnnnnnnnnnnnnnnnnnnnnnnnnnnnnnnnnnnnnnnnnnnnnnnnnnnnnnnnnnnnnnnnnnnnnnnnnnnnnnnnnnnctttgggggcccnnnnnnnnnnnnnnnnnnnnnnnnnnnnnnnnnnnnnnnnnnnnnnnnnnnnnnnnnnnnnnnnggggcnnnnnnnnnnnnnnnnnnnnnnnnnnnnnnnnnnnnnnnnnnnnnnnnnnnnnnnnnnnnnnnnnnnnnnnnnnnnnnnnnnnnnnnnnnnnnnnnnnnnnnnnnnnnnnnnnnnnnnnnnnnnnnnnnnnnnnnnnnnnnnnnnnnnnnnnnnnaatttannnnnnnnnngggcctttttgggaagtggggggaattttttaaaaatttttgccgcgggggaaccccttccaaaaggggttttggaccctaaatcccccgggggaaaaaccccctttgggccctgtgg

SEQ ID NO: 7980 - DNA, 621 bp, Homo Sapiens
  misc_feature (43)..(57): n is a, c, g, or t
  misc_feature (467)..(490): n is a, c, g, or t
gggtagctctctacatcttgaattggaagctggaataaagagnnnnnnnnnnnnnnnaccctcatcgaatgctgcttactttgtcaaaagactggctatgaccaaggtgaggatatttctggaaaactgggcaaaaagggaaagcccacagtattcttccttggcagtcaaccacaggtttactttacaatgatgtattaaaaacttgcagcttgaaaaatggaatgcaaataaaaggttctctttgggtttgtcttaatggagttaaactggagcagcctataaaacatttttagggtgatgtcctctgggtccttctgttctgcacacccactcagtcttctctcccagccccttgactgcacacacccctctttgcctgaagatctcctgacttgtcgccagccatagaggctcgaaagctctggttgtgaagcataacgcaatgcatagacctgtcagccatnnnnnnnnnnnnnnnnnnnnnnnngcgacttggataacttgtatgccttcttttgtatcaatgtaccaattgtaaataatgctgatcaacctttgtagagaatagtttatacagcatattctattattgctgattctcagtgaactcttgtttta

SEQ ID NO: 7981 - DNA, 849 bp, Homo Sapiens
gcacgagcaatttggctccctgttgtacaaggggccatttggcatacctttcacagcttttatcaggccaagttaaaggctgactacattttttcatcatgaggaaagcagttgaaatgaggcatgagttactgtgcattgggattttagaacaattttcttgtgacagctctttttgtgaagttaggttcttaaaagtgcccatgatggtcacttaaaatgtgcagtaatagcactgccaggatcaagcatgaaaggcttttaaattagatcatcccacagacaatacgtttgataatagttttttcttttaacctctttaagtattgattctgcttgagaatattgaagtacttgccagaagttgtggatttcagttttaacaaatgctattaaagtggagaagcacactctggtcttggaattccatttgaggatttagaagtgtcatgtttataactattcagttgtgtttgttgctggcttgttgtaaagcaataaaatttttttggtctttttgtaagtgagtgtgctgctgtaagaaatctcccatgtgcataacaaattctgaatattttttgaggctaaagaagaccggggtgacaagcagatactgctgtgtaatggttacactaaccaaaagacaccagccactcagagttctatactgtaaagcgcagataacatttgtgtgttataccttgattggggaattaaaagtcatttaactgaagatgttgagaaacctgggctctggttttagtataccggaattacttttttccaattttagaaaatcaagcaggcttagagaaaatagagatgaatttaggggacacttgcacttcc

SEQ ID NO: 7982 - DNA, 635 bp, Homo Sapiens
  misc_feature (580)..(589): n is a, c, g, or t
cagccttggattctccatggggtgggggtggaaaaacagaccggggttcccgtgtgcctgagcggaccttcccagctagaattcactccacttggacatgggccccagataccatgatgctgagcccggaaactccacatcctgtgggacctgggccatagtcattctgcctgccctgaaagtcccagatcaagcctgcctcaatcagtattcatatttatagccaggtaccttctcacctgtgagaccaaattgagctaggggggtcagccagccctcttctgacactaaaacacctcagctgcctccccagctctatcccaacctctcccaactataaaactaggtgctgcagcccctgggaccaggcacccccagaatgacctggccgcagtgaggcggattgagaaggagctcccaggaggggcttctgggcagactctggtcaagaagcatcgtgtctggcgttgtggggatgaactttttgttttgtttcttccttttttagttcttcaaagatagggagggaagggggaacatgagcctttgttgctatcaatccaagaacttatttgtacannnnnnnnnncaataaaacttttcccacccccctcacacctcttctccctagaata

SEQ ID NO: 7983 - DNA, 1052 bp, Homo Sapiens
  misc_feature (534)..(534): n is a, c, g, or t
  misc_feature (558)..(558): n is a, c, g, or t
ctgttcggatgctcccactgttaagcccctactggagatggagcactcaccagcttcccttcaggcaggccctgggggaggggtctcacgtccctggggaagcgccggaggccggagccagagcccctgaggaggaggcagaaggggaaagtggaggagctggggccaccctcagcagtgcgcaatcagcccgagccccaggagcagagggagcgggctcatctgcagagggcactgcaggcctcagtgtctccaccatcccccagccctaaccagagttaccagggcagcagcggctacaacttccggcccacagatgcccgctgcctgcccagcagccccatccggatgtttgcttccttccacccttctgccagcaccgcagggacctctggggacagtggacccccagacaggtcacccctggaacttcacattggttgccccacagacatccctaaaagtgccccccactcgatgactgcctcatcttcctcagtttcatcccccatccccaggtcttcctagacgctncagcaccccccctctcccccgtgnccgtagtttgtctcctgggactgggggaggagtccgaggtggggttggttacctgtcccgaggggacccctgtccgggtccttgctcggagagtacggcctgatggctctgtgcagtacctggttgagtggggaggagggggcatcttctgaacagcctgcctctgcccagctccccattcacacacaccggcactttcataccctgacctctgacctcacctacagctgggatgtacctggagagatagggggtagttctccctactgcccaggctggaatccaagagtggggagtggggaagaggccctcttctctaccctccttcatgattcctgacccctcccatccttcccatttcctttgatgttattttgttacagctttttaaatattttttaaaattatttaacccctgggggcagagactgaggagggaggatgataagggatcccggactctgtatgattgaaataaagagaaataaacaaaa

SEQ ID NO: 7984 - DNA, 857 bp, Homo Sapiens
  misc_feature (41)..(92): n is a, c, g, or t
  misc_feature (774)..(790): n is a, c, g, or t
gggggagcccgcggggacgctgcggggggacccgtgctgannnnnnnnnnnnnnnnnnnnnnnnnnnnnnnnnnnnnnnnnnnnnnnnnnnnatgtcgggctgggcggacgagcgcggcggcgaggccgacgggcgcatctacgtggggaaccttccgaccgacgtgcgcgagaaggacttggaggacctgttctacaagtacgggcgcatccgcgagatcgagctcaagaaccggcacggcctcgtgcccttcgccttcgtgcgcttcgaggacccccgagatgcagaggatgctatttatggaagaaatggttatgattatggccagtgtcggcttcgtgtggagttccccaggacttatggaggtcggggtgggtggccccgtggtgggaggaatgggcctcctacaagaagatctgatttccgagttcttgtttcaggacttcctccgtcaggcagctggcaggacctgaaggatcacatgcgagaagctggggatgtctgttatgctgatgtgcagaaggatggagtggggatggtcgagtatctcagaaaagaagacatggaatatgccctgcgtaaactggatgacaccaaattccgctctcatgagggtgaaacttcctacatccgagtttatcctgagagaagcaccagctatggctactcacggtctcggtctgggtcaaggggccgtgactctccataccaaagcaggggttccccacactacttctctcctttcaggccctactgagacaggtgatgggaannnnnnnnnnnnnnnnnaggttaactgagctgctttgtgctcagaatctacattccagattgaggatttagtgtcttaggaaaa

SEQ ID NO: 7985 - DNA, 1561 bp, Homo Sapiens
  misc_feature (893)..(970): n is a, c, g, or t
  misc_feature (1430)..(1482): n is a, c, g, or t
ggggagctccaaccagggcagccttcctgagaagatgcaaccaatcctgcttctgctggccttcctcctgctgcccagggcagatgcaggggagatcatcgggggacatgaggccaagccccactcccgcccctacatggcttatcttatgatctgggatcagaagtctctgaagaggtgcggtggcttcctgatacgagacgacttcgtgctgacagctgctcactgttggggaagctccataaatgtcaccttgggggcccacaatatcaaggaacaggagccgacccagcagtttatccctgtgaaaagagccatcccccatccagcctataatcctaagaacttctccaatgacatcatgctactgcagctggagagaaaggccaagcggaccagagctgtgcagcccctcaggctacctagcaacaaggcccaggtgaagccagggcagacatgcagtgtggccggctgggggcagacggcccccctgggaaaacactcacacacactacaagaggtggaagatgacagtgcaggaagatcgaaagtgcgaatctgacttacgccattattacgacagtaccattgagttgtgcgtgggggacccagagattaaaaagacttcctttaagggggactctggaggccctcttgtgtgtaacaaggtggcccagggcattgtctcctatggacgaaacaatggcatgcctccacgagcctgcaccaaagtctcaagctttgtacactggataaagaaaaccatgaaacgccactaactacaggaagcaaactaagcccccgctgtgatgaaacaccttctctggagccaagtccagatttacactgggagaggtgccagcaactgaataaatacctcttagctgagtggnnnnnnnnnnnnnnnnnnnnnnnnnnnnnnnnnnnnnnnnnnnnnnnnnnnnnnnnnnnnnnnnnnnnnnnnnnnnnnctcactcacaccgcacaaaacgctaaagcccacatgttcctatacacagcttgccccccctacgcctccggtacaacggcccccggaccttctccttttacccccgcccgcgcctcctacctactacctatcgccccctcggctgccccggctattacgtttgcacgacctcccctggtccccttcgcttgacacacctccggcacttacaaacactctcaatagcacccaacgccccccccactccgtataaccgcccataaacgccctttcccattacacaataccacctccgcgtttcccaactttatccacgccctatcctccaccttgcccccttttcctttccctatacaaatgtcccatggctaccccctaccactattaagtaaatcccagcctcgccctccggtactaatacaccacctaaaaccactcttggtggcactgcgcttcagannnnnnnnnnnnnnnnnnnnnnnnnnnnnnnnnnnnnnnnnnnnnnnnnnnnnaattttccacagtcctctgacgcccgacccctggctcctggtgcaacccgtccacctggtgaacgttcattctttcgcc

SEQ ID NO: 7986 - DNA, 804 bp, Homo Sapiens
acaaacaaaactagactgatgatcgaaagaaggggcggttcatttttagtcgataactataacggtccgtaagtgtagcgaggcctgggtggcgaattccggcacgaggacccaggtgccccgacctttctctgggacacagttgggggctggcttctgagggattcctttctcccctctttgtgtggccccagccagggcggtgggcagtcctggtgtagagcacaagcctctccaccctagagaaatgcctctgtaccacggctaccatgtggaaccttaacttgcagaaggcttgttaacaattgttttgagagagatggctggtcatgccacagctgctggggactccgcctactccagccctcttgggacacactgtgggatttgtggcccttccccagaggaattgtggagactgtcccatggaacaaaccctcaggcaccagcacagggctctgggtgactcagtaaaactaacgtttgtctctgacaagatcagctgtaggctcaccggccagagaagaccactgtgagcattttgccgtatatcctgccctgccatttgttcactttttaaactaaaataggaacatccgacacacaccgtttgcatcgtcttctcccttgatattttaagcattttcccatgtcatgagtttctcagaaacatgtttttaacaattgtactatttagtcattgtccatttactataatttatctgaccatttccctactgtaaaatacttaagacggtttctgatttttccactatttaaataatgctgtgatgaatatcttta

SEQ ID NO: 7987 - DNA, 850 bp, Homo Sapiens
ctataacggtccggtatggtagcgaggcctgggtggcgaattcggcacgaggtttgtgtgtattaagcttttcaaacaatggaggggatggagagccctggtgtcctgacgggagccaggtcggcctgagagctgtgccgctcctctgtcttgtcagtggaggtgcctgggtggggagcaggtctcaggcctcttgtcctctccccagtggctccaggcctcactagtggcaagggcaggatgaggctgcaccgctgggaagagtctatctaagctcttggcttggagtcccgtgtcgtctccacccagaggaagttctccagagttcacctttcccttttccttgagttgtgctgaatgccccaccccagctctctttcccttctgggtgtctttgctgggagggggctgtgttgtgagccctcccggttctcacctcgcctggcacttaacacaccctggtttgtgtagccgccagcctctcttctggttgggcctttgaaaggctcagcctcccattgtgcagtgcttgggtttggagcttatttgaatggaagaggtcagtttgttcctggctctccattgtctggcctcagttgtctacaggacagtggtcagggatgcctggaggcatatattccagctgccaccaaaggggcactgtttgtcccacattattgtgagtgacccatcatccatgaccagaggattatgttcctgcttggaaagaggagagtcaaggcagcaggacgtctaacaggcaagtgtttcccagatagcgcaacagtgcgcaaaacttcgagcccagagcctgaatgacagccgtggtgcccttgatgtccctgagttg

SEQ ID NO: 7988 - DNA, 968 bp, Homo Sapiens
  misc_feature (111)..(128): n is a, c, g, or t
  misc_feature (626)..(626): n is a, c, g, or t
  misc_feature (629)..(629): n is a, c, g, or t
gtctgcaggtcggttgctgcctgccctcctcctctcacccgatgtccaggtgggattttaaagtctgcatggttataacaacagttatcagtaattcctgcccagaagacnnnnnnnnnnnnnnnnnnaagataaaaactgcacaaaaggggagtgagagagactagtttccacatccttccctcctttagtgaagcccccgaggttgtgtccaggtgatgagtgtggacgggggcaccagtcagttctcccttgaagtaaacctcagtcgcctgagacttttctaccaagccacacagctgcagcaactgcagatactgcgggctgagcaggagcagtggtggcgcctgccctgaggctgccctgcgatggcctgggtgggagagctgggtcaccggtgccgatgctctggccctccccaatacgctgcttcgtcccactgcaccgcctggctgagggcgttaggggctgtgcctcttgtgagggccatttgggacctccctggggcactgcacaattgatagtgtaccaatagaagggagactgggcgatctggaacagcacagtggtgggggtcctgctggtgtgctctgcgttcctctgtggcgtggcaggccggggctgcntgntacccggggagtggtgggcatctcgatgcttctttgccttaatgatggccacatctgggctgctctgcacccacgggagaggctggcccagctgcagactgcttagggacttctgtgtccatcctggggggtaagcccacgtgacccacattcttggcactatgaacagagaacatttgcctgttggcttctgaagtggtcagggccatggctgacacctccaggtccgcctggcatgggacaccaagtggaaggcccaagcagctcatctgctcttgggaccaggggccagttgggttgggtctggtcacggcagagctattgaggagggagaggtga

SEQ ID NO: 7989 - DNA, 729 bp, Homo Sapiens
attctgcttcaggtttctatatatactgtatatgtggtgagtgttgtatgtgtgcgtgtatatagagagaagctttcttgtgtgtgttcgaagggaatggagaacgtgtctagcccactttcccacagtcatgtaggaactacgatgttttttgcgagcaaaaacaatgaagtgcaaggtctgcattcacaccaactcgatgcaaagctacaagagcttcctgcaaagtaaagccagcacggagaattgcggtcaatatctgtggcaggaaaaatcaatggtggaagaatggcaggacttgatgatggatggctggtaggtggttcatattcaagtaatggcctcgaagcatcaggacagacattttctctggtttcaggcctgtctgttactgaattctgtatgccctgacctaagtctttaaccatatgaattggatgacaaagacttagtttgctcagaagtctgattgagtgcatcctcctcacctgctaaagtttgggtgaaatttctacacctaaggtgcagtgtaactgattggatgttttagctgaggttacagtgacagaacggttcttatttatggattccctagatttggggacaccttcctactcggttgacaggccatcacctagactcccctcgtgccgattcgccacccagcctcgtaccttagaccggtatagttactgcattacgattaaccgctgctttttgacactgcgt

SEQ ID NO: 7990 - DNA, 528 bp, Homo Sapiens
ttacaacccacgatcaccaacaagcggaaggctgtagaagccgcccagctggccgaggacctgaaggtgcagctggagcacgtgcagactcggctgcgggagatccagccctgcctggcagagagccgggctgctcgtgagaaagagagcttcaacctcaagagggctcaggaggacatctcacggctgcggcgcaagctggaaaagcagaggaaggtggaggtctacgcagatgccgacgaaatcctccaggaggagatcaaggagtacaaggcgcggttgacctgcccctgctgtaacacccgcaagaaggatgcagtccttaccaagtgcttccacgttttctgcttcgagtgcgtgcggggccgctatgaggcccgccagaggaagtgccccaagtgcaacgcggcctttggtgcccacgacttccatcgtatctacatcagctgaacctgaaactcaggggactctggaacaccatggacctgtgctgtgcccccatctcctccccacccctggcgtaacctt

SEQ ID NO: 7991 - DNA, 945 bp, Homo Sapiens
ttccctattctcagattcttgaggcctcatttcggatctgtcgtacaggtcttgacagctcctcaggcagttcccgccctctgtggatgccgcggtcatggcctcgtagcgcttcatgcccggcttgtcccggacacttgggattgtcgagactttgtttgatcatgatgtcgtcgaaggacagcacatttgcacgtgttcttggtcctgttttacctccaggtttgcacagtcagtatcgctggcgaaggcctccatcatccggtcaaattttctgggcctctcctgggtaggcgaaagctccatagaaatctgcctgagggcctgcaccagattgaggtcggtgaactcatgcagatccacgaaagcatggagcactgccaggttcagttcttccctctcccccaggtagtccccgatggctgtcttgttcagcccctcgcccttgtacaggaagcgggcgatctcctcgggtgtgttctgcagcagttcattctccaccaagaactggatccccttcttggggtccatgttgaacttcttcctgcccattgccatcttccggttccgttgcaaggtcttactgccctcattggcctccagcccctccacctcgctcatggcttcactgagctcctcccgcaggcgctgaatctccaccagcagctcctgcttccgccgccggatgttctccagctccatccgctcctccggagtcaggtctgggggttcatagacgccgtcctccatggcggctaggaaggcccgcggggaatccggggcggtcccgccagtcgggcctggatccgcgttggcccgcgggctcgggtgagcccgctcaaacgccccgggagccaccgccgcctcctcagcgccagtcctcagcgctgaaaagactctcctcgtgccgaattcgccacccaggcctcgctaccttagaccgtt

SEQ ID NO: 7992 - DNA, 778 bp, Homo Sapiens
  misc_feature (40)..(40): n is a, c, g, or t
aaaaaaaagagagagaaagggacgtaagagacctacgagntcgctccaacaaaaggggggcgttacttatcaactgacggcagtactatacggtctaagtagcgaggctggggtggcgaatcggcacgaggcaagatgttgaggaacggcgtggaactctgatgatctgaatgcttctccaaagacctcagccacacagcctggaaccgcatccagaggagatatttccgcttcttcactgatgagagaatcttcatgctcttgaggcaggtctgtcagctacttggttattatgggaatctttatttgcttgtggatcactttatggaactttaccatcaatctgtggtttaccggaagcaagctgccatgatccttaatgaactggttacaggggctgctgggctggcaggttgaggatcttcacgaaaaacatattaaaacaaacccagaagaactgagagagattgtgacatctatacttgaagaatacacaagtcaagaaaattggtatttggttacctgtcttgaaactgaggaaatgggagaggagctgatgatggagcacccaggctccaagccatcacgtctggtgaacacacctgccaagttacatcttttctagccttctcaaagccaagtaccatatttgctccatgaacagaaacatctggcaaatatgcattcagttcggcggaattggccagtctgcatatgcacctaggaaaagacttctgttgctcttgatgtcgcccttatccagtactggataaaggct

SEQ ID NO: 7993 - DNA, 997 bp, Homo Sapiens
ccggggggacggcagccccagcccggagtatacgcttttccgccttcaggatgagcaggaggaagtgctgaatgtgaatctcgaggggaacttgaccctggagggagtgacccggggccagagcgggacctatggctgcagagtggaggattacgacgcggcagatgacgtgcagctctccaagacgctggagctgcgcgtggcctatctggaccccctggagctcagcgaggggaaggtgctttccttacctctaaacagcagtgcagtcgtgaactgctccgtgcacggcctgcccacccctgccctacgctggaccaaggactccactcccctgggcgatggccccatgctgtcgctcagttctatcaccttcgattccaatggcacctacgtatgtgaggcctccctgcccacagtcccggtcctcagccgcacccagaacttcacgctgctggtccaaggctcgccagagctaaagacagcggaaatagagcccaaggcagatggcagctggagggaaggagacgaagtcacactcatctgctctgcccgcggccatccagaccccaaactcagctggagccaattggggggcagccccgcagagccaatccccggacggcagggttgggtgagcagctctctgaccctgaaagtgaccagcgccctgagccgcgatggcatctcctgtgaagcctccaacccccacgggaacaagcgccatgtcttccacttcggcaccgtgagcccccagacctcccaggctggagtggccgtcatggccgtggccgtcagcgtgggcctcctgctcctcgtcgttgctgtcttctactgcgtgagacgcaaagggggcccctgctgccgccagcggcgggagaagggggctccgccgccaggggagccagagctgagccactcggggtcggagcaaccagagcagaccggccttctcatgggaaggtgctccggaggaaccagggtggcagcgggggcg

SEQ ID NO: 7994 - DNA, 550 bp, Homo Sapiens
  misc_feature (119)..(132): n is a, c, g, or t
  misc_feature (440)..(452): n is a, c, g, or t
tcttcctccgcgccgccgccggtggccattttacctccttcccagcatcctccactcgctcccgcagccaaagggcgcccatcgcgcgcgcccgcccgccggggctgtgtgggtttggnnnnnnnnnnnnnngaaatttgacgctaccctcccccgccgcgccctcaaaggtatcacatgcggcgcatattggccagcgccggctctgcgccccctgcgctgagcctctcttccgccagcgctcgctccaacctcacctccgtccgcagcgggatggggcgcccggaggcggccctttccccagcgcgggtttggcagcctccggcctcgctctcgaggatttggcgtttcgcaagcggtgctcgacgatttcatgctagcagctttgctaacggcccacagcccacaggcgggacggagctcggcaacatctctcccannnnnnnnnnnnngtaccttttctgttaaaaaagcaaaagcaatagcaaaattaaaacttagctttccgtttccccgcaacagagcaacagaaagtacaaaaacatcttgt

SEQ ID NO: 7995 - DNA, 562 bp, Homo Sapiens
gcccatctgactcaccagatttacactctagacatccacagacctgaggattgttggaataaatttatctccaaccgaacactgggactaatagtttttttagggattgtccttgggaatttgtggaaagaaaagaagacagacaaaacaaagaagggtatagagaataaaatagaaaattaatgaatgaaatttatctaggaatttttaaaacattttttacaaaatataattagatttgaatacaaaatctgatacaatatgttaaagaattaagaacctgaagatgaagatttagagcatatttacctggattttacttatttgctagcaaaattcccccttgtcacagaaaccagggactcttcaggatttgagatggccttgagtattttagttgatacattcttctgcccattataattctcacctgaagttatggggattgcacgggttttggcactttagaaaaagcctgatgtgggtcttacataaatgaatgtctgtataagaaaatggactcttttttttagggaaaaataaaagcaactatggcaaaaaa

SEQ ID NO: 7996 - DNA, 457 bp, Homo Sapiens
gggagtctcgcgcctgcagcccgtgccgccccagccgctgccgcctgcaccggacccggagccgccatgcccaagtgtcccaagtgcaacaaggaggtgtacttcgccgagagggtgacctctctgggcaaggactggcatcggccctgcctgaagtgcgagaaatgtgggaagacgctgacctctgggggccacgctgagcacgaaggcaaaccctactgcaaccacccctgctacgcagccatgtttgggcctaaaggctttgggcggggcggagccgagagccacactttcaagtaaaccaggtggtggagaccccatccttggctgcttgcagggccactgtccaggcaaatgccaggccttgtccccagatgcccagggctcccttgttgcccctaatgctctcagtaaacctgaacacttggaaaaaaacccctcctcatccgccctacgg

SEQ ID NO: 7997 - DNA, 802 bp, Homo Sapiens
ctcttccccacccttctctcttccctgcaaagcacaacctgtaccccaggggcgccgggctgagccctttgatctcgtcattgtcgtcgtgtgttttgtatgttgggattggtcagttcggcggtgacgtggggtcgccccaaccccttttgtaccagggccatgcaggcttggagtccagagttggtgctgtgggaacggactagagagagttgcgggagagagaaggagcaggcacgctgggcctcgcgtgtccccgagcagtgagggtcccagtgttccctccactcccgagtggccacaggctcgcgggctgggaaggattcactctctttagccccaggggagcagctcagcttagcccagcatgaagagatgggctctgctctgagagtagggcgggcttgaaggccctgatgggtggaccaccagcctgggcgcagtggtgctgggggcgtgcagctgggcccaggggctgtgcactcaggcctgacccgttgcactgaacaagaccaaatcgctggttgtgcgcttaacgtgagggtgggtccagtgtgccctgcgatgggtcccgtgtcactgtttacatgacctatttgtgtggttatatagccctttatttaaaagagagaagttccttttacaaagttattaaattaattatatgtttaaaagttaaagaaaaaagagctgcagagtatttataaaactgtcttttagaaaaaaaacaagcaagaagaccatttgaccatatgaatggaaaagggaagaaagtataatagaaactttgctagttaaaaaa

SEQ ID NO: 7998 - DNA, 987 bp, Homo Sapiens
  misc_feature (418)..(579): n is a, c, g, or t
  misc_feature (586)..(600): n is a, c, g, or t
  misc_feature (624)..(634): n is a, c, g, or t
  misc_feature (671)..(829): n is a, c, g, or t
atcatccccggaacccagtatgcacccagaggggactcagcttcaaagctgctccaccatgctgggtcccaggcagctttcctctgaaaagcaacctctcctgccacccagatcccatctcaagagctcgcccatgttacgagcatgtaaaggactgacttcctagtaactgttgcagtttacaacctgccctccagggacacgtctccatggtttttcctacacatgaatgcgagaaatggctgataagcacagtaatttaagattgcgtattcatgtagtgagatttagtcattaaccaacccggtctttgtgatgtgtgaagccttcccttcagttatgtcccatttttatgatgccaaaagctgccactgtgtggtattcgaggattattgcaacaaagccagtagttaaaccnnnnnnnnnnnnnnnnnnnnnnnnnnnnnnnnnnnnnnnnnnnnnnnnnnnnnnnnnnnnnnnnnnnnnnnnnnnnnnnnnnnnnnnnnnnnnnnnnnnnnnnnnnnnnnnnnnnnnnnnnnnnnnnnnnnnnnnnnnnnnnnnnnnnnnnnnnnnnnnnnnttggggnnnnnnnnnnnnnnnaaaaaattttttaaaacttttttnnnnnnnnnnncccccaaagggaagggaaagggggcaattttttttcnnnnnnnnnnnnnnnnnnnnnnnnnnnnnnnnnnnnnnnnnnnnnnnnnnnnnnnnnnnnnnnnnnnnnnnnnnnnnnnnnnnnnnnnnnnnnnnnnnnnnnnnnnnnnnnnnnnnnnnnnnnnnnnnnnnnnnnnnnnnnnnnnnnnnnnnnnnnnnnggcgcccttggggaaaagggggggaattttaaaaaccttgcccgccggggggacccccccaaaagggggtgtgtaacactctattctcccggggggaaaaacaccccgtgggggcctggtgggataaatattctcccccggggggaaaaccggggggg

SEQ ID NO: 7999 - DNA, 467 bp, Homo Sapiens
gacggctcaacggaacgttggatgtagtatttcaggccccaccttatagattctgatcagctctggagcagaggcaggagtgtgaatgtgatgcactgccaacattgagaattagagaactgatccctttgcaaccgtctagctaggtagttaaattacccccatgttaatgaagcggaattaggctcccgagctaagggactcgcctagggtctcacagtgagtaggaggagggcctgggatctgaacccaagggtctgaggccagggccgactgccgtaagatgggtgctgagaagtgagtcagggcagggcagctggtatcgaggtgccccatgggagtaaggggacgccttccgggcggatgcagggctggggtcatctgtatctgaagcccctcggaataaagcgcgttgaccgccgaagctgcgctcactcctgcctcaacgcgccggccccgccctcccc

SEQ ID NO: 8000 - DNA, 537 bp, Homo Sapiens
gagttaaaatgtttatggtaattgtaacctttcaaatgagttacgtgaaaagagcatctcacttttaatacacccagatattttcttcaagtctttgtgcattttagcaggacttaattttcttaatttattctttcctttcaattatagtgacatagagtagttggccttataagtagatcccatttagcccctgaacataataccatctgcagtattataaaagtcatttagaaggtcagggggataatctagaggcaggattttggacattgtgaaggaaatgtgctccttctcagctcacttcaataactattttctgagactgaagttttttagacaagaataagaaaactttgctttcttcagttatcacatgtgaaagcttttgctttttgttaggaaaaggtgtggatgactctactgcgtggatggttacatttgctttccgtgaaatgctcagaaaatgtcaggacattccttttccaattgtgtgtcagtgcgtattgtaataaaactactgatttaaattagaaa

SEQ ID NO: 8001 - DNA, 435 bp, Homo Sapiens
agaaccgaggagacgggagaaacatgggagagggtggccttttccctgttcacacacacatgcacgcagccactggccgggacagttgacacccatcttccttccctgctccttccagtcattctacacccgcttggtgctgccagtgcgggcagggccttggagcccaaagcggatccccacactctgtccctacggtcggaaggaaagtagaggagagaaagtcaggcgcggcagggctaagagcaatagtggcccaaatgttcctggcccgcctgctgcgccacagagtctgaaaagcgggtctccgtctaccagaaggtgacctccacacagcccctctccccgaccaactgcagcacccaaggactggcaacgtggttggagcttttggggggaattatgaagaaatctgaataaatttctcaccccttc

SEQ ID NO: 8002 - DNA, 1053 bp, Homo Sapiens
ctcacagagtgcccgagcgtcacctgcccgccttctgcgccttctgcgccgacttggtgaccttgccggcgccgccgctcttcttctccacgttcttgatgacgcctacggccaccgtctgcctcatgtcgcgcacggcgaagcggccgagaggcgggtactgggagaagctctccacacacatgggctttcccggcaccatctccacgatggccgcgtctccagacttcagggacttggggttgtcctccagcttcttgccagagcgccggtcaatcttctccttcagctccgcaaacttgcaggcgatgtgggctgtgtggcagtcgatgaccggggagtagccggcgctaatctgccccgggtggttcaggatgatgacctgggaggtgaactgagcagcctcctgcggcgggtcagacttgctgtccccacacacgttgccccgccggatgtccttcaccgacacgttcttcacattgaagccgacgttgtcgccgggcagagcttcgctcagagcctcgtggtgcatctccactgacttcacctcagtggtgatgttcactggcgcaaaggtcaccaccatgcccggccgcaggatgccggtctccacccggcccacgggcaccgtgccaatgccgccaatcttgtacacgtcctgcagcggcaggcgcaggggcttgtccgtggggcgcgtgggaggcaggatggtgtccagggcctccagcaggaacacgccgcttgcgttgccctccttacgctccaccttccagcccttgaaccacggcatgttgggggagggctccagcatgttgtcaccgtgccagccggagatgggcacaaagggcacggtggccgggttgtagccgatcttcttgatgtaggcgctgacttccttgacgatctcgtcgtagcgcttctcgctgtaggccggctctgtggagtccattttgttcacgcccacgatgagctgcttcacacccagcgtgtagccagcagggcatgctcccgcgtctgcccatccgaagcagtgccggggatcctcaagcagcc

SEQ ID NO: 8003 - DNA, 948 bp, Homo Sapiens
gacggcagtgactataacgtgtctaaggtagcgaggctgggtggcgaattcggcacgaggctgccggagatcctggatggactcttccagatcctgggtgacaatggcaaagagattcgcaaaatgtgtgaggttgttcttggagaattcttaaaagaaattaagaagaacccctccagtgtgaagtttgctgagatggccaacatcctggtgatccactgccagacaacagatgacctcatccagctgacagccatgtgctggatgcgggagttcatccagctggcgggccgcgtcatgctgccttactcctccgggatcctgactgctgtcttgccctgcttggcctacgatgaccgcaagaaaagcatcaaagaagtggccaacgtgtgcaaccagagcctgatgaagctggtcacccccgaggacgacgagctggatgagctgagacctgggcagaggcaggcagagcccacccctgacgatgccctgccaaagcaggagggcacagccagtggaggtccagatggttcctgtgactccagcttcagtagcggcatcagtgtcttcactgcagccagcactgaaagagccccagtgacccttcacctcgacgggatcgtgcaggtcctaaactgccacctcagtgacacggccattgggatgatgaccaggattgcagttctcaagtggctctaccacctctacatcaaaactcctcggaagatgttccggcacacggacagcctctttcccatcctactgcagacgttatcggatgaatcggatgaggtgatcctgaaggacctggaggtgctggcagaaaatcgcttcctcccccgcaggccagacggatgaccaggaacactcgatggcctgactccaggccagcactcagagctccaggtgccacccctggagagccggctactgaacactctggtacaa

SEQ ID NO: 8004 - DNA, 658 bp, Homo Sapiens
gccagtaactataagcggtcatatggtagcgaggctgggtggcgaattcggcacgagggtccagctttaaaataacacactctttgtctatcccatgccctttaaacaagcagccacaggagatgtcagtctccaggcctggccccactgtgttgacagcagtcacgtctgttgagctgacactgctgaggctgaagctggccccgtgcaggtggctggtgagccacaggtgcagtacccggaggtgtgctctcccctagaggcctgtccccaactcctcccctagaggcctattcccgctgctcacagacctcagcagaggcaccagctggagggctccagggacatccttggagatacaggaggctttcctggcacagggcacagctctgcaggaggcctttgtaggacgctgtctccccagcgtgtcctgctcatccaggatggggagaaagaggaggaggacccaggctcagaagccagggacagactgccgacgataacacaaactgaatccaggcaagtgccatgaccctgggtgtcccttggttcacatacacccaccagacagctgcaggagagagtgcagggaaggggctgggacacaaaacaggccaacaacagcagcagcaacaagaggcaagaaagctgacaggag

SEQ ID NO: 8005 - DNA, 897 bp, Homo Sapiens
cctgggcatggattcttgctcagccacaccactagctggagggaggccacagcaagccccgccagagtctgaagggcctcgaaaggtgattcccagcctgggccaggagcactctcccagtgcagggctctggtctttgaagtgtatgggcccaacaccctgctcacacagagtggctgcccacaaggcccagccatcagcagggctctgccgacccatctctgtaaggcttctcttccacgtggctggtctgctccagaagccactgatgctcggactcactcactgtcagtctgagggtcacctcctgaaaaacactgctcgtagccacctgctcaaagtgaagtttctggaacatccggatgcttggttcatttgccttgcccaacttgttagcctcaaacttggtcagacctagcgtggtcacaccgtaagacagcatcgcgagaacggcctcagtgccaaggcccttacccctgcagctgggctctgcaatcatgacctcgatctcccccaaggtgaggtcttctagatctgtgaggaagaggttcacatctcccaccatgcagctctcttcggtggcgcctggctgggcctgccacttctcggcatccagcacaatgaaggtacacttgtctgcatcttcctgccagctgcactgcatggcatactcctgctccagggtcagcggctccgaggctgtcaaacgctgcagctcctctgatttcatccactcgtggtacctgctgggcacatgctccgaggtgtagggtacaaggaccaccttcttccccagcagcaaggtgttctgattcaacctcatggtagcagcctaccaccgacgaaatcgcgacgcgtggtcgacgatatcccggaaaatccgggcggtaccagcct

SEQ ID NO: 8006 - DNA, 368 bp, Homo Sapiens
cacatttgagattggatgatcatgatattgagggggtaatggtaaagcagaccctctcaaacactgcttataaacagttttacacaaataatggagattttaaaatattaccagctcagatacatgtttagaatctttataaagcaaagatattgaaaagttccataaagataatacctgataggtaatgattcaatattaggagtttatgtgtagtccaaataattatctaaccagcaatgcattttgacatatgttaaggctacattggtatctcataggtattttaaacacctctgatttcaaatatacatgaaaaggtaattatatgattctacaaatcttgctcaggcagcacagagtataac

SEQ ID NO: 8007 - DNA, 1398 bp, Homo Sapiens
  misc_feature (108)..(206): n is a, c, g, or t
  misc_feature (395)..(403): n is a, c, g, or t
  misc_feature (556)..(556): n is a, c, g, or t
  misc_feature (678)..(678): n is a, c, g, or t
  misc_feature (683)..(683): n is a, c, g, or t
  misc_feature (822)..(822): n is a, c, g, or t
  misc_feature (953)..(953): n is a, c, g, or t
  misc_feature (962)..(963): n is a, c, g, or t
  misc_feature (965)..(965): n is a, c, g, or t
  misc_feature (982)..(982): n is a, c, g, or t
  misc_feature (1009)..(1009): n is a, c, g, or t
  misc_feature (1032)..(1032): n is a, c, g, or t
  misc_feature (1159)..(1159): n is a, c, g, or t
  misc_feature (1247)..(1247): n is a, c, g, or t
  misc_feature (1261)..(1261): n is a, c, g, or t
  misc_feature (1302)..(1302): n is a, c, g, or t
  misc_feature (1307)..(1307): n is a, c, g, or t
  misc_feature (1358)..(1358): n is a, c, g, or t
ggggagccattgtggctccggccgattgagcctgccctcgggctctcaaggctaggcgagggtgtgagggactggagttcgaggtcaacctgggccccattggtaggnnnnnnnnnnnnnnnnnnnnnnnnnnnnnnnnnnnnnnnnnnnnnnnnnnnnnnnnnnnnnnnnnnnnnnnnnnnnnnnnnnnnnnnnnnnnnnnnnnncccaaaccccaaaaaaggaggagggaccccctatcaacaacccgaaaaacaacccagaaaacccacacttccccccaccccgcgctcaccacaacagatccgagccccccacgttgggctgagcggccgccccgaaccagtaaaaacaactggtgtcgcaaaccaggaagatctttttggacccatcgnnnnnnnnngaagcacccgcagcacgctccccccacactcataccgtttccacccacgcgggcggacgacccacgcaagccaactagaagtctctcagcatttacgtctccccacgccacactgaccacccatgcccccgccgcccacgcactagacaatanttgtgtgttcctctttaaacgactaaatcgtgccgggtcgtacggcctcttcttgtggacgggaggagcgcagcaccacgcctccgtgtgcgtgcacctgtacctccaccacgacacccggnagggnggatagcaaccacccacacgcgcgcgtgtctctcgtctccacactaacacaccctcatctgataagatgtgtgcgcgttggctccgcaggcaaacaactagcatattgataagaaaatcccctcacaccacacccacancaccctagacgcgccgacgacgaaaatcaaacgctctgaagctatgagctccaccccatcccaacgagtaaaaaagatgggatgtgaactcgctcagagcgagtggtgtatcggaaggaggaagattaccngagtgggcnntnttgtgcagcataagggntgaggtgggaggcagtgttgaggggangcaaagaagaaaaacactaagtnacggcaacacaagccgacggcgagcgctcagcagaggtttctcctctactgccgtctgccaccgtgtgtgcatgcagtaaacttgtctcaggaacgtcgacacgagggatatatattcctgcccctntaatgctcatccctcgacaaagcatgtatatattcatacttaatgggggcgcggaggaggagtcagacagagctggaggacgataccncgcccgccccaccncgccgtccccccggcaccaacgaccacacccaaaataagcnctggnccgcgctgagccgacgaagccgaaactatctacatgtctattaagcacagngcagattgtatagtgtgggacaccgcacctcgttaatcaa

SEQ ID NO: 8008 - DNA, 1004 bp, Homo Sapiens
  misc_feature (421)..(599): n is a, c, g, or t
  misc_feature (608)..(621): n is a, c, g, or t
  misc_feature (661)..(816): n is a, c, g, or t
  misc_feature (840)..(857): n is a, c, g, or t
  misc_feature (904)..(912): n is a, c, g, or t
gggtccggggaggatcagacacttcaaggtctaggctagacatggcagagatgaggaggtttggcacagaaaacatagccaccattttgtccaagcctgggcatgggtggggggccttgtctgctggccacgcaagtgtcacatgcgatctacattaatatcaagtcttgactccctacttcccgtcattcctcacaggacagaagcagagtgggtggtggttatgtttgacagaaggcattaggttgacaacttgtcatgattttgacggtaagccaccatgattgtgttctctgcctctggttgaccttacaaaaaccattggaactgtgactttgaaaggtgctcttgctaagcttatatgtgcctgttaatgaaagtgcctgaaagaccttccttaataaagaaggttctaagctgnnnnnnnnnnnnnnnnnnnnnnnnnnnnnnnnnnnnnnnnnnnnnnnnnnnnnnnnnnnnnnnnnnnnnnnnnnnnnnnnnnnnnnnnnnnnnnnnnnnnnnnnnnnnnnnnnnnnnnnnnnnnnnnnnnnnnnnnnnnnnnnnnnnnnnnnnnnnnnnnnnnnnnnnnnnnnnnnnnnttttggggnnnnnnnnnnnnnnaaaaaaatttttaaaaccttttttgggggggggggccccnnnnnnnnnnnnnnnnnnnnnnnnnnnnnnnnnnnnnnnnnnnnnnnnnnnnnnnnnnnnnnnnnnnnnnnnnnnnnnnnnnnnnnnnnnnnnnnnnnnnnnnnnnnnnnnnnnnnnnnnnnnnnnnnnnnnnnnnnnnnnnnnnnnnnnnnnnnnccccaggcgttttttatttaattnnnnnnnnnnnnnnnnnnattagaggggaggggggaatttttttaacctttcccgccgaggggannnnnnnnnaacgggggtgtgaatcctttattccccggggggacacccccccttggcccgcggggagaaaaatttttccccccgtggaaaaaacggggggg

SEQ ID NO: 8009 - DNA, 473 bp, Homo Sapiens
taaaagcggactcttcggtgaagcggagtgtggtggggcttgctgggatcatggcggggaatcactgcgagctcctgccgctggcccgtggcaggctcggggcggggttggggtggcttcttgtgcctcccttaaagcgcggggctcagcgtcctggcccagcgccccagcagcaggtccaagtgggtccggctctacagcggcggcacctacttcctcaccactgggcagacgccgctgtgtcaggacccgaaatccttcctgtacctcttgagccaggccgaccccgacccggactcggacaagacggagttgtgttcttgttgccccagctggagtaccatggcacaattcttggctcacccacaccctcggcccaccgggggtttcaaggcgaagtccccccctcccttcaagtccctccctgaaataaacctgggggaaatttaccaggggcttgggcaccccaaccc

SEQ ID NO: 8010 - DNA, 440 bp, Homo Sapiens
acctgcattgaccttaggcccatagagagggcctgtcccggtgctgccccagccaggatctggtcgcttgccccagggggactgatgggcagagtcgcccctgtggctggactgtgaccatccctgatggggcctgaccgcgggagctgaggaagcgccgctccaccgtctgccctccaaggacccgcatggaggcagtgggctggcagcttcctgctgctccctgtcagagtcaaagcacaaatcctcaggacgggctcaagggccagggcagccgagggaagctccaggtggggaccacgtcttcctgaggttggtgcccactggctgggaccctttgcagtggggtggcctcccctctgtctgcctggtggagggagccgtgggcgtggggacgtgactgaataaagccaccatgggtggatgtgcttggagcctgt

SEQ ID NO: 8011 - DNA, 1840 bp, Homo Sapiens
  misc_feature (130)..(130): n is a, c, g, or t
  misc_feature (143)..(143): n is a, c, g, or t
  misc_feature (152)..(152): n is a, c, g, or t
  misc_feature (280)..(280): n is a, c, g, or t
  misc_feature (305)..(305): n is a, c, g, or t
  misc_feature (784)..(792): n is a, c, g, or t
  misc_feature (839)..(879): n is a, c, g, or t
  misc_feature (1494)..(1518): n is a, c, g, or t
ccacagctgggtgcgggtaaataactttctctccggtttgtacccccggcgccgtgcgtgtgtttcccccccctccgggggttgcaggagatattggtttttatattcctcgcacataaggttgaagatncgtatattcgtgnttttcatcngtagatatgagcgcgcagttggggcgcgcagagttcctcccgcgtggtggtgcccggcgagacaccaagtgcccgcctttttacgcgggaaagcagtgggcacagcaggacgcgacattgtaagagangaaaatgacaacaatgggggcctanactaaagaatatccggttgctgtccccacccccaacgatgtatatgagcgcgcgtagggtgagagggggttccgaaaaagctagaggtgtggatgaggggatcaataaggatatgttgcgagactacatcacgcaccatacctttctctatctcagttgtggaatgatgttcctctcgtttttgtcttcaccggattaccccacgggttgagaaggggcgcctctccggaggaggtggccgacgagggggaggagggtgttttccgagaaaacccgctgacgaggatgagccgccgcggggggggtttttttcattcgcggcggagcgagaaacccaagccccctttgttccgatggtccccgggggttttttcctttggggaaaacaaggtttgtgccgccgtgtcaccctataccgcccggggggcccgcgggccccaaccgcaaatgttttgggaaaggctttttgtggggcggcnnnnnnnnnccggccctggggtgcatgttcggcgtcttgcgtgcagagaatcgccnnnnnnnnnnnnnnnnnnnnnnnnnnnnnnnnnnnnnnnnngtgtgggttttactctgtagtagtttattgaataaaaaaaattgaagatcccgccatttttaaaaggccctttacataaagtagagtttctagtggacagatttgaaaatcagtctgaatggaacatactatgaattcaacacacagaatgagttttcctcaaacccactacccttgacatagatttgataccctccctcaaaagaatcctataaaaaattgcttcaaagcccctttgaaattgcaatagtgcagcaaaaccacaagtaaacaactgcctgttaacctgttatttcaaatatagactgaaaagccaacaggcatttttcgtgtgcaatttttcttttaaaaacaagttgtaagtggaaatatcaaatctgcacagcgctgtcccttcacagaaggcaagaaactgccggcacatcatgtcagaggccgccctcggtgctgtaggctggggaagtgggcctccctcagggtctggttgatgtggaagtagaggccttggcacagcgcggactgctcgggcacgggctgaggcgtgttagggctggatccggccatggtctggctcaagctgccttccggcccgctggccctgtccgggctattgannnnnnnnnnnnnnnnnnnnnnnnncccaccactgtcactgcctgaagactctgtgtcccaggaatcctgaaagacagggtttctgctacttcttttggtctgggggggaagatggttgtcttcttcgttgccattccttctccttttcctgggacggaggcgctcgctcatggcagctggcggatggaagctacgcggcgccgctccgcgaagagagggaacagagggggttgtgtttcggcggccgccacgcccaccccctcgggccttggctctcgcagccgctcgggtggacgcagccggtggcgagtacccctcagtcggacccgtaccaccactacttccc

SEQ ID NO: 8012 - DNA, 894 bp, Homo Sapiens
aacggcagtactatagcggttcctaggtagcgaggctgggtggcgaattcggcacgagggcgacgcggtccccagcctgggtaaagatggccccatggcccccgaagggcctagtcccagctgtgctctggggcctcagcctcttcctcaacctcccaggacctatctggctccagccctctccacctccccagtcttctcccccgcctcagccccatccgtgtcatacctgccggggactggttgacagctttaacaagggcctggagagaaccatccgggacaactttggaggtggaaacactgcctgggaggaagagaatttgtccaaatacaaagacagtgagacccgcctggtagaggtgctggagggtgtgtgcagcaagtcagacttcgagtgccaccgcctgctggagctgagtgaggagctggtggagagctggtggtttcacaagcagcaggaggccccggacctcttccagtggctgtgctcagattccctgaagctctgctgccccgcaggcaccttcgggccctcctgccttccctgtcctgggggaacagagaggccctgcggtggctacgggcagtgtgaaggagaagggacacgagggggcagcgggcactgtgactgccaagccggctacgggggtgaggcctgtggccagtgtggccttggctactttgaggcagaacgcaacgccagccatctggtatgtacggcttgtatttggcccctgtgcccgatgctcaggacctgaggaatcaaactgtttgcaatgcaagaagggctgggccctgcatcacctcaagtgtgtagacattgactgagtgtggcaccagagggacgccaactgtggagctgaccaagttctgcgtgaacactgagggctc

SEQ ID NO: 8013 - DNA, 676 bp, Homo Sapiens
gggtccatctgaggtctgcggccacaacctgttggtttttaccaaaagggctttaaaaaatgggatgtggggtgggagaatgacaaggagaggctgcaagactttctcagctcctcagagagaagcttcatttgctgcggcaaagccgcttcatcaagaagagacaaaaatgcattcaagtccatcaacaaaacagtggtattttggactcaatgaaaatatttcctatatgaacataaaacactaacattcagaatcatttatcatttatgaaagagtaccatatgtacaatcccaacaatcctagacacagtagaacactcaaaatatttaagcttcacaagtaccatgcagcgcaaactataaaacagaaaaaaaatcaaactagtggctagcatcggcttgacctgcctcattcccctcgaataactgaagatcctgtacaacaatggagactctcggaacatttatccacagtgcaattacagaaagcagttcgtgatttctctagaaataataaatatggctcactggtgaccattcccctcacgtgtcctctgtggtgcccacacgtgcgccgggatgtgcaggcgtggacgcagagacgcccctgtggaaagcacacatgcggtgcacacagctccacacgcgcgcgcacatggagctgtgcccctgc

SEQ ID NO: 8014 - DNA, 298 bp, Homo Sapiens
cgtcgacgggaagtataatgacagtagatggtagaccagggtaatataatgacagtagatggtagaccagagtaatataataacagtaaattgtagaccagggtaatataatgacagtagatggtagaccagggtaatatagggacagtagaaggtagaccaggttaatagattgacagtagatggtagaccagggaagtataaagacagtagatggtagaccagggtaatataatgacagtagagaccagggtgatataatgacagtagagggtaggtcgacgcggccgcgaattta

SEQ ID NO: 8015 - DNA, 1196 bp, Homo Sapiens
ctcctcccctctccccccctggccatcacgcggctggtaccggtcggaattcccgggatatcgtcgacccacgcgtccgcggacgcgtgggtccggtgccgctgttcatcgggccgcgcggggaaggcggcggccaagatgcgctccgtcacgtaggatgagcaatacccacagcactccgttcaaggtcatctcctgggggccctctctggagccaccagacctctggacaccatggccaggttccttgccctccccaccccatcccagagcgcactcaccaactccacggcaggcaaggcctgacaggctgaagtcacctggaaggggaccgatgcctggtactggataggaacttcactggaatggcagctaactgggccgtagggcaggcttcgagtcgtgccaccctggcagcacacaggctggcagggtagggcatacagggggctggccgcacctgattccaatcttgccaccagggaacgaagagtctgtgcacacgcaagtgccgctgcatgacctcattccttacgcggctcttacggctggcgctctggcgactgcgatgccatgggagtaacctttactctaagctctcacagtcaccaactggacgagactggcgacctcacacacgaggaactctgcactcgcgaccccagagagaccctcattattgcacagctgcacagcggccttgcaccccaccaggcttgcgcccacctgcccgccagaagacacttacgcagcacaccagcccacggctgctcccacgtctacttcccgccattatccttctcccgctccattctccattctttcccacccatcaacccgagcagacgcagccctacctgcctcgccactaccttgcaaacctcctagcaaacacaaaccgcagtatgttcaccccggaataactcgacccggcccccctaacctatttcacacattcaacaaccccccaaagcaaccacaccggacaatcagcgcacccactctcgggaaatggggggcactacgatacccccagaagtgccacgcccccattggcccgatgtcacatacacaacttgtctccaccgacacagccgcaccatagctacaaagcgcccaccaatgctcacctgcgacaccccgcacagcatccatacctcatgctcatcaagtcgtgaccctggcctacatcccat

SEQ ID NO: 8016 - DNA, 1022 bp, Homo Sapiens
  misc_feature (685)..(685): n is a, c, g, or t
tggtgatataaaagtgtgtacaaaaagcaggctgtacggtccggaattcccgggatattcgtcgaccacgcgtcggccttcctgctcgcctcccggattggggagaacccctttaacctacccctccagaccctgatccggttcatggtggacattgcctgcggcatggagtacctgagctctcggaacttcatccaccgagacctggctgctcggaattgcatgctggcagaggacatgacagtgtgtgtggctgacttcggactctcccggaagatctacaggtggggactactatcgtcaaggctgtgcctccaaactgcctgtcaagtggctggccctggagagcctggccgacaacctgtatactgtgcagagtgacgtgtgggcgttcggggtgaccatgtgggagatcatgacacgtgggcagacgccatatgctggcatcgaaaacgctgagatttacaactacctcattggcgggaaccgcctgaaacagcctccggagtgtatggaggacgtgtatgatctcatgtaccagtgctggagtgctgaccccaagcagcgcccgagctttacttgtctgcgaatggaactggagaacatcttgggccagctgtctgtgctatctgccagccaggaccccttatacatcaacatcgagagagctgaggagcccactgcngggaggcagcctggagctaacctggcacgggatcagccctacagtggggctgggaatgccaggtggcatgggggcagtgggtggcactcccagtgactgtcggtacatactcaaccccggagggctggctgagcagccagggcaggcagagcaccagccagcagagtccctcaatgagacacagaggctttggcttgctgcagccacgggctacgtgcgacacaggtagctgttagcccaacaggccagagggcatcggggccatttggccggctctggggggccctgagctggctgactaagcccggttgacccagccagaaagccaggggtgcag

SEQ ID NO: 8017 - DNA, 797 bp, Homo Sapiens
ggataggtgcatatagaacagtggtgcataaagcaggctgtacggtcggaattccgggatatcgtcgatccacgcgtcgccacgcgttcgggacgcgtgggctatcaggcacagaatctaactggtgagcttcagaaccaataatgccacatttatgtcctcaaaatgcttatggccatgtttaaccaataaattctgagtctccaaaatcaaagatttgaccttaagagggaagggaaaaaagtgtgaaaggatgatgaagaaaataattttactatttcttttaaaagtatgttttggaaaatcaatgattttaatgcatagcagtatgtttgaaaaatagaccattctaaaaagcccatgataccttactgttgatgaaaaaggatgatcatatatatagaacttgattagtcagagcattgggcattccaaaatacagcctttggttcagtagattttaatgctttaaatagactgacgtcgcatacccttatagaactcggaaatatgatttgctcaaaaattaattggataattctcatgtatgatgtgcatatatgctacaaagaatgcgaacatcatctatgactagccaatcggggtgatgtgaacatttatgtactcattggtataacttataacaaacattcaaacctgtgtggtcacctttccagaatatctaggcaaacttgcccgtgagtaacagaactatcaacctctaagagaaggagtccactcttgtaccccaggtggaatgagcatggactcagctcactgacactgtggcccgggac

SEQ ID NO: 8018 - DNA, 1101 bp, Homo Sapiens
  misc_feature (295)..(295): n is a, c, g, or t
gcatagtgaatatagaacagttggtacaaaaagcaggctggtacggtccggaattccgggatattcgtcgaccacgcgtcgaaactaagtaaactcgtccctgggaactacactttcagcttgactgtagtagactctgatggagctaccaactctactactgcaaacctgacagtgaacaaagctgtggattacccccctgtggccaacgcaggccccaaccaagtgatcaccctgccccaaaactccatcaccctctttgggaaccagagcactgatgatcatggcatcaccnagctatgagtggtcactcagcccaagcagcaaagggaaagtggtggagatgcagggtgttagaacaccaaccttacagctctctgcgatgcaagaaggagactacacttaccagctcacagtgactgacacaataggacagcaggccactgctcaagtgactgttattgtgcaacctgaaaacaataagcctcctcaggcagatgcaggcccagataaagagctgacccttcctgtggatagcacaaccctggatggcagcaagagctcagatgatcagaaaattatctcatatctctgggaaaaaacacagggacccgatggggtgcagctcgagaatgctaacagcagtgttgctactgtgactgggctgcaagtggggacctatgtgttcaccttgactgtcaaagatgagaggaacctgcaaagccagagctctgtgaatgtcattgtcaaagaagaaataaacaaaccacctatagccaagataactgggaatgtggtgattaccctacccacgagcacagcagagctggatggctctaagtcctcagatgacaagggaatagtcagctacctctggactcgagatgaggggagcccagcagcaggggaggtgttaaatcactctgaccatcaccctatcctttttctttcaaacctggttgagggaacctacacttttcacctgaaagtgaccgatgcaaagggtgagagtgacacagaccggaccactgtggaggtgaaacctgatcccaggacaaacaatcctggtggagatcatcttgatatcgcgtctgttagccg

SEQ ID NO: 8019 - DNA, 912 bp, Homo Sapiens
tacgccatagcattattctgtgaagaccgtgttaatgcttgagtgctaagagggcaactggcctccagtggcaggtgggggctctggccaggcgaaaacactggtccacacatgcctgcatgagtggcagagctttaactgcggggcaggtgagaggagatcctggaggcgcggagacgcccggcacccaagaccacagcaggagtaccataggggacgctcctagcttttacgggctgtggagtgaggcattgtgaattgccaagaagacaagctaagctccttcaccagggcttgacgggcctgggagggccatcagtgagcaggggccagccctcaggatcccaatgcaagaggtggcagtgaggtcaggtcagctcaggaagggaagtgtggcaagagccaccatgacagcctgtggggcttggcagccacataactggcaggtgagggatgcacataggtccaggggagaagcacgtaaggcgcctgggcctatagtgggctctaccacaggggcagagggtggctgggggagaagcttgggcagggactcggctgcaggcacatctggaggctcttggcagaggtaagaaggccagggaggagtggcccaggctcaaggaagctgaccagggagacggcctagctagagaggccaatgagagcacccactcaatctgagactgggaaacagcgaagacttaacggcgctgacaggcgtgacgccccgccctgcagcatacgtcacgcagcaggcacagccctacaaaccacgcacaagaatacaacgtcctggccttcgtcaaccccttggagggcagggactccgggaaaccggaagctgaaaacccgcaggcgatgcgcttacacagccaaactagaacaacatcgccactactcccaacacat

SEQ ID NO: 8020 - DNA, 478 bp, Homo Sapiens
  misc_feature (424)..(424): n is a, c, g, or t
cctacaaagtcgtggtttatatgcaaaataaaacaaacacatgtaagtttattctacccttctgggaggaagtggcatacagggtagcaacaactcaattctacaaatatttattttgtcattactgagtgcaaagtatcagggaagtgtagcgggggaataccaatgcttaagagaccacagagttcttgaaacccacgattcttcttcaaatccagatgtgtgtgagccccacctcatcaactctgaaggctgaaggatcagctggaatttctgctgcagggtgtccctgataagctcaaaagcatcagaacggagggagctttctccccttctctcatctcattaaaatgagctttcttgttgtggggggttggggagggacctttaaaaccaaacaatggtgccctcttatcatcttttnctgtcctcctttctccaagtttccagaggggaaaataaaaccaaacaaacccct

SEQ ID NO: 8021 - DNA, 736 bp, Homo Sapiens
  misc_feature (565)..(594): n is a, c, g, or t
tctaaggaatcaagagaacctacaggtgtgaagaaaataaaacagactcattgtttgttctcccaagtagagatgatgccacacctgttagagatgaaccaatggatgcagaatcaatcacttttaaatcagtgtctgaaaaagacaagagagaaagggataaaccaaaagcaaagggtgataaaaccaaacggaagaatgatggatctgctgtgtccaaaaaagaaaatattgtaaaacctgctaaaggaccccaagaaaaagtagatggagaacgtgagagatctcctcgatctgaacctccaattaaaaaagccaaagaggagactccgaagactgacaatactaaatcatcatcttcctctcagaaggatgaaaaaatcactggaacccccagaaaagctcactctaaatcagcaaaagaacaccaagaaacaaaaccagtcaaagaggaaaaagtgaagaaggactattccaaagatgtcaaatcagaaaagctaacaactaaggaagaaaaggccaagaagcctaatgagaaaaacaaaccacttgataataagggagnnnnnnnnnnnnnnnnnnnnnnnnnnnnnngcgtagataaagattttgagtcttcttcaatgaaaatctcgaaactagaagtgactgaaatagtgaaaccatcaccaaagcgcaaaatggaacctgatactgaaaaaatggataggacccctgaaaaggacaaattttcttt

SEQ ID NO: 8022 - DNA, 416 bp, Homo Sapiens
  misc_feature (287)..(295): n is a, c, g, or t
gggaactctcttgtggtcagcaaagcccctgccatgcaggccaggtgccattgagaattaagtgctcagagggccaggagcccaggggatgggaaagtggtgtggttttagtacgttccaaaagggacaattcgcttgcagttggtagatctaagcgatctagttgggagataatggtgtttacccccatatgaagtattcaatagttctacttgtgaatttgtatttattttgagttatacttgacacagaattccttttttaaaaaaatatgtgtgtattttggnnnnnnnnntcatagatgttaaaatttctgcatggttaccagtttttctcacaacactgaatttggtagcttttcccgaaaaaatcttcacagtaattttttgtctgtatatatttgagggccttttttt

SEQ ID NO: 8023 - DNA, 725 bp, Homo Sapiens
  misc_feature (43)..(91): n is a, c, g, or t
  misc_feature (437)..(451): n is a, c, g, or t
gcaccatcatcccctcatgtagactccagcaccatgcttcatnnnnnnnnnnnnnnnnnnnnnnnnnnnnnnnnnnnnnnnnnnnnnnnnngcttgatgacccctggctacccctcttcaccagtgactaccgcctctggtactacttgcggttgccaccactgcaacctgaggaggatgacgatgaggatgaagaagatgatgatgacttatctcagggctatgatagctcagaaagggacttctcactcattgatgatcctatgatgccagctaactcagactccagtgaagatgctgatgactgaaagccccagcatgggccccattgcttgggcggctgctgtattttcatttactctggcccttggactatggaaacgtgggaggggcaggggagatgtggggaagtccaggactccaggaggtgaaaaggnnnnnnnnnnnnnnntgtacctgattgctcccaattatgagaggattgggtgggcaggggaactcctaaaataatacatgaccacttcctcatttctggggaaggaaaggagactagagcagctggtgtgctcacccctccctagtcacctccattaaccacagactatgtagcgctggccctagcctctggcagagcctgttcctggccgaactgtggatacagctggagggtcaggaactgttaccttctttccccttggcattaataaatttaagttaatccttaa

SEQ ID NO: 8024 - DNA, 490 bp, Homo Sapiens
gggttgataatctacacaccatctgttggaaccagggtgttattatgggggaactcctcctgtgtactaggaggaggaccttagggagaccaagaggagagaagcatttcctttgatgaagtcacatcctgtctatgagcccactaatgctgtaacattggcctgaaagagagtgttctttaaaagcctttctcggctgttagtataaaaacatgatggtatcagctcttagcatgtttgcttgacccttatggaaggtataaatccacagaacttccttcccagagaactgggaaattgtcctagaaataaaccttgtacagttgagtggacatggataagcaacaatttgttactttgcaggatttgttccttggtaattgtttggtgtgtcatcctgtaaatattcatgatagtctgtttatatccttttgtatatcgttgatactggattgggtagaaaaataaattggcaatttaaaaaaatggc

SEQ ID NO: 8025 - DNA, 881 bp, Homo Sapiens
ttgctctagccacttaggaacagatgcaaccaaggaaaaacctaaagaagtagcagaaaatcagcagaatcagtcttccgatccagaggaggaaaaaggttcccagccacctcctgcagctgaaagccaaagtagtctacgccgccagaagagagagaaggaaacatcggagagcaggggtatttctcggttcataccgccatggcttaagaagcaaaagtcatataccttagtagtggccaaagatggaggagataaaaaagagcctacccaagctgttgttgaagaacaggtcttagataaagaggaaccccttccagaagaacagagacaggctaagggtgatgctgaagaaatggctcagaagaaacaagagattaaagttgaagtcaaggaagaaaaaccctcagtgagcaaggaagaaaaaccctcagtgagcaaagtggagatgcaggtatgtttgggaataattgcctggaaatgaaaacctgatagcgtaaccacataataaaaagggtttgtttgttttggatcatttccagatttcttgtactgagatactgctttagcttaatgtatacggaatgggtcttagattggtctaccatagcctttccctgttactccttgaaaaaaaagtcccctatatataccaattactaaaaaattcatgtctgtaacctgtttaggtgaggtagatactccgagccctgccatctcttttttaaacagaatgctcttttatgcctctttaagttttcactggacagtaagtagtagatttgtgtgtgcgcattttagttgcctaacaaagcctaggttttgccatggtataagattttaattggaaatgttattatttgagatgatacttaaattgt

SEQ ID NO: 8026 - DNA, 1119 bp, Homo Sapiens
  misc_feature (1093)..(1093): n is a, c, g, or t
aatcagggcacttcaggctccacaggcgtcatgtttgactgagacctaactcactggactcagaggaggaatcgtggaaaacaagagcaaaactaccccacacccctatttcatgtctgaaataaccctgtttcataccagttgcaaagcttgtggggagcggtcccacaaagcactttcttaaaccttgagaatctccaagagaaaaatatttggggaaggagggaggaaatatgtcccttgcacaccacccctgaagcacatggcagtaggaaacagcataggattgtatgtgggaggtggataggtcggtgatgtgtggagcggaaaagcaggttggtaaagttcccttcttgggacttattcctggagtcagtggatacaagtagtgcagaaggttcacactgcaaatagtgttctcatctcaaagcaaactatcattccagaaggaaaagtgtgtcagggcaagcagacaacacaatttcctatcagaatatgtccctcaacccccgaaacaaggcttctctcagcctccccaccagtgatggataacagctcctattctcagctgacctgactgagccaacccatgaactcttcactccttggggaagccacctcccatcacacccctgagcagagttagggaggaattctacttcccataaaaggacctctcctgagaggcaaaacctgttgcctccaccacggcttccctcttggctcattccaagcttggccaaattggggaagtgggatggaggttgccctgcatcccccctcctctgcctgagtgtgtctttgtaatgtcagctggcatcatacaaagagcaggagaagcaaacacccagaactcttttgctggtcagagattccctgagtgtctgtcctcacccaagcctgctctgtgtctgtgttgtgaagcttgagactctggaaagaaatggggagggggggcaggggaaatgttgccctaagaatgcttctcattcctctgttcttattgggtcctgtttttcgggagggtgggggttgggggaagcttgaccttgtgtcttcgtcaataaactcacatttacaccaaacaccatcntataaccaaaaaaacaattcttgtcg

SEQ ID NO: 8027 - DNA, 307 bp, Homo Sapiens
ccttagaacaaacacatacagtgtagggacattcctgaaaacagtaactgtaacacgtaaaggccccatagaggatactggcctgccccggggtggcaaactcaaatgtctccagggccatgctgatgtcatgctgcgtgaaaacgggcagacgagcagctgggagtggtggagactgcggcctctctatgggagtagtcacacccagcaccagagttgttaatcttatagggagtgtgagatccaggaacctggtattcccattttttaagaaagtacagaaatctacacttttatatgtcatttt

SEQ ID NO: 8028 - DNA, 459 bp, Homo Sapiens
cttggtgaagctgccctcctcttctcccctcacactacagcctggtcggggtacaaggggttgggtgctgcttgtggttaagtctttttcgcccaccccgccattcaatctggaatcagaaagcggtggattctggcaaatggtccttgtgccctccccactcatccctggtctggtcccctgttgcccatagccctttaccctgagcaccaccccaacagactggggaccagccccctcgcctgcctgtgtctctccccaaacccctttagatggggagggaagaggaggagaggggaggggacctgccccctcctcaggcatctgggagggccctgcccccatgggctttacccttccctgcgggctctctccccgacacatttgttaaaatcaaacctgaataaaactacaagtttaatacccggcccgggccagattaagtaacttaacgcatgt

SEQ ID NO: 8029 - DNA, 981 bp, Homo Sapiens
  misc_feature (631)..(645): n is a, c, g, or t
  misc_feature (914)..(932): n is a, c, g, or t
acgccccgggtcttaaaggcttttcagcgcactatttgccgtcacaagccagttccacctacccgggcaaggtcccgaccatgaccccgccacgggacccccacaaacaaaaccggggggccccctatccaaatggggtgggccccaaaccatgcagccagaaggggaacgccagcgaccagatggccacaacggacttaaccgggcaaccaaagagaccttttccgaaatcatagggaatcaatcaacaatgacaaccccgtcaccaccggagatttgcatgatagagcatcgatagaggataaccccccagtattaggtcaaaccacaacgcccggtccgtggctcacgcccaaatcccccgcaccttgggagcccagtgggtggatcacactgagggcacagagttcaagacccgcccggcccacaagggtggaaccccctctccgtagctcaaaatatcacaatcaccccggcactggtggcaacttgcctcgtgatccccgcttctcaggaggtcttaggaggagaatctaccttggaccccggaggccagaggttccactgaatcagaggttgccgcgtactgcactcccaccctggccaacagagggagacttccctgtttccnnnnnnnnnnnnnnncctacagctgttcaaggaccagctgacaggtcaagtgtggcccttttctggtctttgaacacatcatagaaagtgacaaatgctgcaaagccatgaagaacatgaactataaacgggtagactaactgcccagcttagacacttatctatgccacaaaacagctgaatttgtcacatttatatattgcaatatgggaagtattgagatcaaaacaggattccattgacctaattatattaagctaataaactaattttttgaatttttnnnnnnnnnnnnnnnnnnngggcgccgctctagagtatccctcgaggggcaacagcctagcgcgaacc

SEQ ID NO: 8030 - DNA, 618 bp, Homo Sapiens
ggaatgttagatgaatgtcagccgctgttactctgtggattgtgtcatcacttgttaaaaaaatggtttccataaaaggatttttggtaattgcctaatttttaatacagtatttatatacaaaacccacttcaaactacttactgtacaaaacaaaagagaagcatcagatagcatgatactagcaaataagtggaaatgtacgacacctatgaactttgaccacagatggcagattaaagggaatgtaacatcacatcaatgagatcttcaagacaaattatttctatttttcctcctggcccttgctaaaatgatgtttctcttggtgcttgagaaatttcagagagttgtttagtatcattgctgcaaatttagatcactcatatcatttatgagacttggttttatacacttttaaaataattgtccaacagtgacattcctgtgagtaaaaatatagagaagtgttaccaaaatataagcctttattaataaaaatctttggtagtaacagtattttaaattcctctcaacgatatatggttaactaataaactccctccacctttgagctacagacaaaaaatcctcaatctaccatatcattgatatttg

SEQ ID NO: 8031 - DNA, 904 bp, Homo Sapiens
agtggtgtgtgcttcccctttctccctgttgaccgacttttaggtcaagggacctgaacgcgtgatctaagggtgtctgggccatccccaagacggccccgctacaggcggaatgtgcctgtgttggcggtagagccacgatctagtgtctaaggcagggtaccttcgctacaaacgtctcggcgtcggcatgcggcgtgaactacaggaacactaggaccaacaaaagcatgggttgccggtgagatgggaattatcccccaggaagcagttacgccccctgttgatcaacttgatcttgccctcctagacacgctaatcttgggccctggactttatcagcattccagtactgccagtggcgctagggcaggccaaaatcggggggctaaaagtatagggcatcaagggttctgttcactatcaggctgcgtgccaccatcagggcctggaattctatctcaagaagacctgcaaggaagtaacgcccctcttcgatatcgcagcatatagccaactttggcccccatactttactcctcaaaccagcaccacaaccttccagtttcaataattccacgccctgtttgcctgtctggcagcatcttcctagagtcttcctagactcagagtcttcctagatgctaggcccactgggcaactgcctaagcctctatttcctcaccaacaaaacagtaacagtgcttactgtctttatcagggtaccccttgagaattatatgaaataatggggacaaatgactttgcaaaagtattaaagagaaatagtgtagaacctaatgggaaccagtgaagtctagactaagatgacagatagatcctgacctgtcaaacctaaaactaactccacccatttttaaaaattaagaatttgaatttgccc

SEQ ID NO: 8032 - DNA, 220 bp, Homo Sapiens
cttcgacaaggacgacagcgcccggctggtcatcgacgaactgctggccgcctcgcggcgcggggtgaaggtgcgggtgctgatcgatcagctgtcggcgatctccgacctgcagatcctcggtgcattgtccggtgcccacgagaacttccagctgcgggtctacaacccgaccttcggcaaggcccggctgaactacttcgactacgccggcagcgtg

SEQ ID NO: 8033 - DNA, 913 bp, Homo Sapiens
  misc_feature (798)..(872): n is a, c, g, or t
ggatctcacagatcaggcccccacgtctgccccgcacagccgcccagccgcctcccgcagaagaagccgcgccggggactgacaagtccaccgcactgaccaacaaaggccaaccgagaggacctgaaggatctctctgcacacggaagactatgggtcctctgtccaaagcgtatggtcctgcaggccccctgcacccaaagccctaggaagtcgcaggcacaccaagttgaagcctaaccgggtgaaacccctcttataactgtgtggctgacaacccccgatgagcgtcacccttctccgagggggatagtgatccatcgtggaccggggaggaggaccacggagtggtggattggcccaccattgatggagatcctggtccgcaaaggcggccattccccggtgtccaattgtgccaacatttatcgctgactgaattgctactgaacaaaagcactaacacgttatgttcccgtttcgttattggtaccaaaactcttgccacgataaccagtttcatgagactgtttgtatggcaacgcccactgttctctaaagccagctgctctgctttaaaaaactccacgaggcaatttttacatatcacgtaaattgtttttataaatcagtggttttcatgagaacattgctaagcatttattaggaaaaactgaatttcccaacaggtgaactgaaaagttattttaactattatacataatcaagatcctgcctctacgggattagcttaacctaaaaagtttgcattaatgaataaattcttcctgcattccnnnnnnnnnnnnnnnnnnnnnnnnnnnnnnnnnnnnnnnnnnnnnnnnnnnnnnnnnnnnnnnnnnnnnnnnnnngtataaactgtggctatatgaatctatagataactagctcc

SEQ ID NO: 8034 - DNA, 595 bp, Homo Sapiens
cagcaacctgaagatggaagacacaggctcttacagagcccggatatccacaaagacctctgcaaagctgtccagttacactctgaggatattaagacaactgaggaacatacaagttaccaatcacagtcagctatttcagaatatgacctgtgagctccatctgacttgctctgtggaggatgcagatgacaatgtctcattcagatgggaggccttgggaaacacactttcaagtcagccaaacctcactgtctcctgggaccccaggatttccagtgaacaggactacacctgcatagcaaaaaatgctgccagaaattaatccttctctgtctctgcccaaaacctttgcgtaaatgttaaaattcaatatacagataccaaaatgattctgtttatggtttctgggatatgcatagtcttcggtttcatcatactgctgttacttgttttgaggaaaagaagagattccctatctttgtctactcagcgaacacagggccccgagtccgcaaggaacctagagtatgtttcagtgtctccaacgaacaacactgtgtatgcttcagtcactcattcaaacagggaaaca

SEQ ID NO: 8035 - DNA, 539 bp, Homo Sapiens
  misc_feature (27)..(27): n is a, c, g, or t
aggctggataactgttgaatggacacntgtccatagtctagaaagccagtgcttctaatccttaagccagatctttgactaccttttcagttgcttctttaacactctttgttgcttctctgtgtgtcctagtttaaattcatttcctctccagcaaaagtgagcttaaataatttctccaaactaaagctctcatgtttttggaagggctgcctttgcaagtgaggtttctgagaaatgactgttgttcccaaaacaagagggagctgggctggaagcaccactattaaatctgtttccctgaaccagcccctccctcttttgctccacttcctcacctgtgcagagtcattttcaggtgttagccttactgatttgcactgatctgtttgttccctgagctttttaaataccctgtgaaaattttctttcctcccttggtcatcatgcatctaattgtggggaaatgtttgtcaaaccaacctgcaaagcagcatggtgtagttgagaagaataaacagagaagactgggaaaaaaa

SEQ ID NO: 8036 - DNA, 144 bp, Homo Sapiens
cttctccttcaccttccacttgattgtaagtttcctgaagcctcctcagccatgttgaattgtgagtcaattaaacctctttcctttttaaattactcagtcttgggcagttctttatagaacaagtgtgaagggtaccgagat

SEQ ID NO: 8037 - DNA, 694 bp, Homo Sapiens
gacaacagtgtcggagagtggctgctgagtccaagagggctgggtcccacaccatgctggaggaagtgaccatctgcatggccactcttgcccccaagggcccaggctgtggcctgacacatagaaggtgcccacataggtctctgtgcggtgagatagacagcaacgaaaactgcctaactgatagggaatgggggtccctgctcatagaacgggggccaggcagctggaattcaggggagtgcatcatcctcaggagctgacatacagccaggctacaccagggcacccgcctctcaaaatcagctgggcgcccactctctctcctaaagaacacccttctggccctcagtcatgttccccttctcaggtagagattggggcatgctatggggactggccctgtagggttgagccacagacagcatcttcagccccagtagcagtggagcaggcactgtcctgcccttcccagcaataaccacctccctggaggccagtctgaagatgcctggctacttggcaccagggacttcctgacaccacagtcaattaattcctccaggggcctgtggtctggagcaattaggtgcccgagcccccaccactcctcagctgcccctccaacctctctatggcagagaggcagggagtggccctgtacatagactgctggggattgggtttgatattg

SEQ ID NO: 8038 - DNA, 583 bp, Homo Sapiens
tgcccttctccctccagcacagtcccaacaagcaggcttctgagagcccgtggccgcacactggccgccacggaaaagcagtcttctgcacgggacggggagcggcaaatggacagactttgccacggtgctctgctgccccctcctgggcacgtccaggtgagggagggctggggctggcaccacgcacagtgcctaaccctagagaaagccatgtcttcagccgcacatgctcaggcagctaagggaggacgcctgcccacgcctgggacagaaggcttcactgctaatcacatcgtgcatctgtgtgtcctgggagctgcctgctcccggcccaccctctaggaggctctggctcaaacagcaatagggtcttcctcactgaccttggaggatgcctgtggccttgtgataaaatgtgggaaatcacagaaaacaccagaaacaacaactgccagcccggcctggccacaggtgaggtctgtgatttccgagcacgctccaccttgcaatcaacttggccttttgattgcacaagcctttgttttcagtcctagtgaataaagttgtgttttctggagaa

SEQ ID NO: 8039 - DNA, 680 bp, Homo Sapiens
tcccacttctccctccggcaacctgcatgccttctctgtggagccgctgctcatctaccccacactactacacaggagacgatggctatgtgagtgacacctgagacctcagtcgtatggaacaatgagcacgtcaagaccgaactgggaccgctgccaagtcccagaagatgcgggagcagcaggcactgacccgtgaggcaaagaactcggacgtgctccagtccccactggacagtgctgcccgggatgaactctgaggggtagcagccagaaagccaaagcagccatcggtggcccaggctccacgtgcttactgaggacatcagggccacctctggaccccttggcaggccacagagggctctcgtgtggggtggtgtccagccagctcttgctaagcaatcacgtgcacacaggcagcattaatggagtgcctactgcatgccagcaacagggcttggccctggggaattgggaggaaccaagccctcttcatctgttcatgtgcccagcatttattaagcacctgctgtatgcaaggttcccatgttacggcagtgaatgaggcataattgttccctccatcagcgattgattcagtcatcaagcagttactgatcagattaagaatcaggcactagtgatacacattcatttttaaaattcattcaaggatt

SEQ ID NO: 8040 - DNA, 871 bp, Homo Sapiens
  misc_feature (92)..(107): n is a, c, g, or t
gaggagcagaacatagatatatgcacacggttaacagaaagctgggtaacgcgtaagctgagccctcggagggatactctagagcggcgccnnnnnnnnnnnnnnnnaaatatcaaacattttaattaattatggattaattttattaattctgcattcttaccaaggggtaatacatgtccatggtatttatgatctgctgaagtctttagtactttggcttggaaagtaaattttaaaattatatattctcaaaatataatgggagaggacttccaggggggacgaatgtagctctgtacagatcagacagctcgtcaataagaacgaactagaaagctaaataaaatatagaaatctatttgaaggcattggctatctatggaagaaatgagaactggggaggctgagaatcaagaggagaaaacgctcaaggagaggagctagatgtctggcagctgctcctaccctggaggacattggcaaatttagtggtacagggacgggagtgctgaaaatccaggtctatgcacattgtcacaaaatcggctgctgaggcttagaggaaccatgggagctttgggcagagtgttagagagacctcaagacatgcagccagactcctctcaagacttgtgatgaattcgggcggtaggcccaggtcagaagctaaaaattaagaaaacgcgctctgaaaagcagagcaaagcaatcagcagtctggtaagacaccatttagaattctgagatccacacggctggtggtgtttcacactattggacaaaccgaagagaattctattctgaagtatgtgtgggccaggcccttaaatggtttcggacctgggcatccaattcccaagttaaacct

SEQ ID NO: 8041 - DNA, 311 bp, Homo Sapiens
ggatggaaagagaagtgtctaaaagcttcaaaatgttccacttttttttccttcatggagactgtttgtttggctttcttccattgttgtttttgtagcatttatttcagaaatgtgtatttccataatccagaggttgtaaaaccactagtgttttagtggttacagcaacatttgaaatggaaactaaaagttaggattttatggagtatggagatagggtccagtatctatttaccctgtaatgtttaggattaaaatgttaaaattttgtgaccatgaatttctttcttttataaattttctcattt
